United States Patent Application Publication US 2025/0311734 A1 - sequence listing, part 13

SEQ ID NO: 53983 - protein, 269 aa, Unidentified
AQSVPWGIARVQAPAAHNRGLTGRGVKVAVLDTGISTHPDLRIRGGASFVPGEPSTQDGNGHGTHVAGTIAALNNSIGVLGVAPSAELYAVKVLGASGSGSVSSIAQGLEWAGNNGMHVANLSLGSPSPSATLEQAVNSATSRGVLVVAASGNSGAGSISYPARYANAMAVGATDQNNNRASFSQYGAGLDIVAPGVNVQSTYPGSTYASLNGTSMATPHVAGAAALVKQKNPSWSNVQIRNHLKNTATSLGSTNLYGSGLVNAEAATR

SEQ ID NO: 53984 - protein, 269 aa, Unidentified
AQSVPWGISRVQAPAAHNRGLTGSGVKVAVLDTGISTHPDLNIRGGASFVPGEPSTQDGEGHGTHVAGTIAALNNSIGVLGVAPSAELYAVKVLGASGSGSVSSIAQGLEWAGNNGMHVANLSLGSPSPSATLEQAVNSATSRGVLVVAASGNSGAESISYPARYANAMAVGATDQNNNRASFSQYGAGLDIVAPGVNVQSTYPGSTYASLNGTSMATPHVAGAAALVKQKNPSWSNVQIRNHLKRTATSLGSTNLYGSGLVNAEAATR

SEQ ID NO: 53985 - protein, 269 aa, Unidentified
AQSVPWGISRVQAPAAHNRGLTGSGVKVAVLDTGISTHPDLNIRGGASFVPGEPSTQDGNGHGTHVAGTIAALNNSIGVLGVAPSAELYAVKVLPAGGSASVSSIAQGLEWAGNNGMHVANLSLGSPSPSATLEQAVNSATSRGVLVVAASGNSGAGSISYPARYANAMAVGATDQNNNRASFSQYGAGLDIVAPGVNVQSTYPGSTYASLNGTSMATPHVAGAAALVKQKNPSWSNVQIRNHLKNTATSLGSTNLYGSGLVNAEAATR

SEQ ID NO: 53986 - protein, 269 aa, Unidentified
AQSVPWGISRVQAPAAHNRKLTGSGVKVAVLDTGISTHPDLNIRGGASFVPGEPSTQDGNGHGTHVAGTIAALNNSIGVLGVAPSAELYAVKVLGASGSGSVSSIAQGLEWAGNNRMHVANLSLGDPSPSATLEQAVNSATSRGVLVVAASGNSGAGSISYPARYANAMAVGATDQNNNRASFSQYGAGLDIVAPGVNVQSTYPGSTYASLNGTSMATPHVAGAAALVKQKNPSWSNVQIRNHLKNTATSLGSTNLYGSGLVNAEAATR

SEQ ID NO: 53987 - protein, 269 aa, Unidentified
AQSVPWGISRVQAPAAHNRGLTGRGVKVAVLDTGISTHPDLNIRGGASFVPGEPSTQDGNGHGTHVAGTIAALNNSIGVLGVAPRAELYAVKVLGASGSGSVSSIAQGLEWAGNNGMHVANLSLGSPSPSATLEQAVNSATSRGVLVVAASGNSGAGSINYPARYANAMAVGATDQNNNRASFSQYGAGLDIVAPGVNVQSTYPGSTYASLNGTSMATPHVAGAAALVKQKNPSWSNVQIRNHLKNTATSLGSTNLYGSGLVNAEAATR

SEQ ID NO: 53988 - protein, 269 aa, Unidentified
AQSVPWGISRVQAPAAHNRRLTGSGVKVAVLDTGISTHPDLNITGGASFVPGEPSTQDGNGHGTHVAGTIAALNNSIGVLGVAPSAELYAVKVLGASGSGSVSSIAQGLEWAGNNGMHVANLSLGSPSPSATLEQAVNSATSRGVLVVAASGNSGAGSISYPARYANAMAVGATDQNNNRASFSQYGAGLDIVAPGVNVQSTYPGSTYASLNGTSMATPHVAGAAALVKQKNPSWSNVQIRNRLKNTATSLGSTNLYGSGLVNAEAATR

SEQ ID NO: 53989 - protein, 270 aa, unidentified
AQSVPWGISRVQAPAAHNRGLTGSGVKVAVLDTGIDSTHPDLNIRGGASFVPGEPSTQDGNGHGTHVAGTIAALNNSIGVLGVAPSAELYAVKVLGASGSGSVSSIAQGLEWAGNNGMHVANLSLGSPSPSATLEQAVNSATSRGVLVVAASGNSGAGSISYPAYYANAMAVGATDQNNNRASFSQYGAELDIVAPGVNVQSTYPGSTYASLNGTSMATPHVAGAAALVKQKNPSWSNVQIRNHLENTATSLGSTNLYGSGLVNAEAATR

SEQ ID NO: 53990 - protein, 269 aa, Unidentified
AQSVPWGISRVQAPAAHNRGLTGRGVKVAVLDTGISTHPDLNIRGGASFVPGEPSTQDGNGHGTHVAGTIAALNNSIGVLGVAPSAELYAVKVLGASGSGSVSSIAQGLEWAGNNRMHVANLSLGSPSPSATLEQAVNSATSRGVLVVAASGNSGAGSISYPARYANAMAVGATDQNNNRASFSQYGAGLDIVAPGVNVQSTAPGSTYASLNGTSMATPHVAGAAALVKQKNPSWSNVQIRNHLKNTATSLGSTNLYGSGLVNAEAATR

SEQ ID NO: 53991 - protein, 269 aa, Unidentified
AQSVPWGISRVQAPAAHNRGLTGSGVKVAVLDTGISTHPDLNIRGGASFVPGEPSTQDGNGHGTHVAGTIAALNNDIGVLGVAPSAELYAVKVLGASGSGSVSSIAQGLEWAGNNGMHVANLSLGSPSPSATLEQAVNSATSRGVLVVAASGNSGAGSISYPARYANAMAVGATDQNNNRASFSQYGAGLDIVAPGVNVQSTYPGSTYASLNGTSMASPHVAGAAALVKQKNPSWSNVQIRNHLKNTATSLGSTNLYGPGLVNAEAATR

SEQ ID NO: 53992 - protein, 269 aa, Unidentified
AQSVPWGIARVQAPAAHNRGLTGSGVKVAVLDTGISTHPDRNIRGGASFVPGEPSTQDGNGHGTHVAGTIAALNNRIGVLGVAPSAELYAVKVLGASGSGSVSSIAQGLEWAGNNGMHVANLSLGSPSPSATLEQAVNSATSRGVLVVAASGNSGAGSISYPARYANAMAVGATDQNNNRASFSQYGAGLDIVAPGVNVQSTYPGSTYASLNGTSMATPHVAGAAALVKQKNPSWSNVQIRNHLKNTATSLGSTNLYGSGLVNAEAATR

SEQ ID NO: 53993 - protein, 269 aa, Unidentified
AQSVPWGISRVQAPAAHNRGLAGSGVKVAVLDTGISTHPDLNIRGGASFVPGEPSTQDGNGHGTHVAGTIAALNNSIGVLGVAPSAELYAVKVLGASGSGAVSSIAQGLEWAGNNGMHVANLSLGSPSPSATLEQAVNSATSRGVIVVAASGNSGAGSISYPARYANAMAVGATDQNNNRASFSQYGAGLDIVAPGVNVQSTYPGSTYASLNGTSMATPHVAGAAALVKQKNPSWSNVQIRNHLKNTATSLGSTNLYGSGLVNAEAATR

SEQ ID NO: 53994 - protein, 269 aa, Unidentified
AQSVPWGISRVQAPAAHNRGLTGSGVKVAVLDTGISTHPDLNIRGGASFVPGEPSTQDGNGHGTHVAGTIAALNNSIGVLGVAPSAELYAVKVLSASGNGSVSSIAQGLEWAGNNGMHVANLSLGAPSPSATLEQAVNSATSRGVLVVAASGNSGAGSISYPARYANAMAVGATDQNNNRASFSQYGAGLDIVAPGVNVQSTYPGSTYASLNGTSMATPHVAGAAALVKQKNPSWSNVQIRNHLKNTATSLGSTNLYGSGLVNAEAATR

SEQ ID NO: 53995 - protein, 269 aa, Unidentified
AQSVPWGISRVQAPAAHNRGLTGSGVKVAVLDTGISTHPDLNIRGGASFVPGEPSTQDGNGHGTHVAGTIAALNNSIGVLGVAPSAELYAVKVLGAAGSASISSIAQGLEWAGNNGMHVANLSLGSPSPSATLEQAVNSATSRGVLVVAASGNSGAGSISYPARYANAMAVGATDQNNNRASFSQYGAGLDIVAPGVNVQSTYPGSTYASLNGTSMATPHVAGAAALVKQKNPSWSNVQIRNHLKNTATSLGSTNLYGSGLVNAEAATR

SEQ ID NO: 53996 - protein, 269 aa, Unidentified
AQSVPWGISRVQAPAAHNRGLTGGGVKVAVLDTGISTHPDLNIRGGASFVPGEPSTQDGNGHGTHVAGTIAALNNNIGVLGVAPSAELYAVKVLSASGNGSVSSIAQGLEWAGNNGMHVANLSLGSPSPSATLEQAVNSATSRGVLVVAASGNSGAGSISYPARYANAMAVGATDQNNNRASFSQYGAGLDIVAPGVNVQSTYPGSTYASLNGTSSATPHVAGAAALVKQKNPSWSNVQIRNHLKNTATSLGSTNLYGSGLVNAEAATR

SEQ ID NO: 53997 - protein, 269 aa, Unidentified
AQSVPWGISRVQAPAAHNRGLTGSGVKVAVLDTGISTHPDLNIRGGASFVPGEPSTQDGNGHGTHVAGTIAALNNSIGVLGVAPDAELYAVKVLGASGSGSVSSIARGLEWAGNNGMHVANLSLGSPSPSATLEQAVNSATSRGVLVVAASGNSGAGSISYPARYANAMAVGATDQNNNRADFSQYGAGLDIVAPGVNVQSTYPGSTYASLNGTSMATPHVAGAAALVKQKNPSWSNVQIRNHLKNTATSLGSTNLYGSGLVNAEAATR

SEQ ID NO: 53998 - protein, 269 aa, Unidentified
AQSVPWGISRVQAPAAHNRGLTGRGVKVAVLDTGISTHPDLNIRGGASFVPGEPSTQDGEGHGTHVAGTIAALNNSIGVLGVAPSAELYAVKVLGASGSGSVSSIAQGLEWAGNNGMHVANLSLGSPSPSATLEQAVNSATSRGVLVVAASGNSGEGSISYPARYANAMAVGATDQNNNRASFSQYGAGLDIVAPGVNVQSTYPGSTYASLNGTSMATPHVAGAAALVKQKNPSWSNVQIRNHLKNTATSLGSTNLYGSGLVNAEAATR

SEQ ID NO: 53999 - protein, 269 aa, Synthetic construct
AQSVPWGISRVQAPAAHNRGLTGSGVKVAVLDTGISTHPDLNIRGGASFVPGEPSTQDGNGHGTHVAGTIAALDNSIGVLGVAPSAELYAVKVLGASGSGAYSSIAQGLEWAGNNGMHVANLSLGSPSPSATLEQAVNSATSRGVLVVAASGNSGAGSISYPARYANAMAVGATDQNNNRASFSQYGAGLDIVAPGVNVQSTYPGSTYASLNGTSMATPHVAGAAALVKQKNPSWSNVQIRNHLKNTATSLGSTNLYGSGLVNAEAATR

SEQ ID NO: 54000 - protein, 269 aa, Unidentified
AQSVPWGISRVQAPAAHNRGLTGSGVKVAVLDTGISTHPDLNIRGGASFVPGEPSTQDGNGHGTHVAGTIAALNNSIGVLGVAPNAELYAVKVLGASGSGSVSSIAQGLEWAGNNGMHVANLSLGVMSPSATLEQAVNSATSRGVLVVAASGNSGAGSISYPARYANAMAVGATDQNNNRASFSQYGAGLDIVAPGVNVQSTYPGSTYASLNGTSMATPHVAGAAALVKQKNPSWSNVQIRNHLKNTATSLGSTNLYGSGLVNAEAATR

SEQ ID NO: 54001 - protein, 269 aa, Bacillus lentus
AQSVPWGISRVQAPAAHNRGLTGSGVKVAVLDTGISTHPDLNIRGGASFVPGEPSTQDGNGHGTHVAGTIAALNNSIGVLGVAPSAELYAVKVLGASGSGSVSSIAQGLEWAGNNGMHVANLSLGSPSPSATLEQAVNSATSRGVLVVAASGNSGAGSISAPASYANALAVGATDQNNNRASFSQYGAGLDIVAPGVNVQSTYPGSTYASLNGTSMATPHVAGAAALVKQKNPSWSNVQIRNHLKNTATSLGSTNLYGSGLVNAEAATR

SEQ ID NO: 54002 - protein, 269 aa, Unidentified
AQVVPWGISRVQAPAAHNRGLTGSGVKVAVLDTGISTHPDLNIRGGASFVPGEPSTQDGNGHGTHVAGTIAALNNDINVLGVAPSAELYAVKVLGASGSGSVSSIAQGLEWAGNNGMHVANLSLGSPSPSATLEQAVNSATSRGVLVVAASGNSGAGSISYPARYANAMAVGATDQNNNRASFSQYGAGLDIVAPGVNVQSTYPGSTYASLNGTSMATPHVAGAAALVKQKNPSWSNVQIRNHLKNTATSLGSTNLYGSGLVNAEAATR

SEQ ID NO: 54003 - protein, 269 aa, Unidentified
AQSVPWGISRVQAPAAHNRGLTGSGVKVAVLDTGISTHPDLNIRGGASFVPGEPSTQDGNGHGTHVAGTIAALNNSINVLGVAPSAELYAVKVLGASGSGSVSSIAQGLEWAGNNGMHVANLSLGSPSPSATLEQAVNSATSRGVLVVAASGNSGAGSISYPARYQNAMAVGATDQNNNRASFSQYGAGLDIVAPGVNVQSTYPGSTYAILNGTSMATPHVAGAAALVKQKNPSWSNVQIRNHLKNTATSLGSTNLYGSGLVNAEAATR

SEQ ID NO: 54004 - protein, 269 aa, Unidentified
AQSVPWGISRVQAPAAHNRGLTGSGVKVAVLDTGISTHPDLNIRGGASFVPGEPSTQDGNGHGTHVAGTVAALNNSIGVLGVAPSAELYAVKVLGASGQGSVSSIAQGLEWAGNNGMHVANLSLGAPSPSATLEQAVNSATSRGVLVVAASGNSGAGSISYPARYANAMAVGATDQNNNRASFSQYGAGLDIVAPGVNVQSTYPGSTYASLNGTSMATPHVAGAAALVKQKNPSWSNVQIRNHLKNTATSLGSTNLYGSGLVNAEAATR

SEQ ID NO: 54005 - protein, 269 aa, Unidentified
AQSVPWGISRVQAPAAHNRGLTGSGVKVAVLDTGISTHPDLNIRGGASFVPGEPSTQDGNGHGTHVAGTIAALNNSIGVLGVAPSAELYAVKVLPASGSGALSSIAQGLEWAGNNGMHVANLSLGSPSPSATLEQAVNSATSRGVLVVAASGNSGAGSISYPARYANAMAVGATDQNNNRASFSQYGAGLDIVAPGVNVQSTYPGSTYASLNGTSMATPHVAGAAALVKQKNPSWSNVQIRNHLKNTATSLGSTNLYGSGLVNAEAATR

SEQ ID NO: 54006 - protein, 269 aa, Unidentified
AQSVPWGISRVQAPAAHNRGLTGSGVKVAVLDTGISTHPDLNIRGGASFVPGEPSTQDGNGHGTHVAGTIAALNNSIGVLGVAPNAELYAVKVLGASGSGSVSSIAQGLEWAGNNGMHVANLSLGFXSPSATLEQAVNSATSRGVLVVAASGNSGAGSISYPARYANAMAVGATDQNNNRASFSQYGAGLDIVAPGVNVQSTYPGSTYASLNGTSMATPHVAGAAALVKQKNPSWSNVQIRNHLKNTATSLGSTNLYGSGLVNAEAATR

SEQ ID NO: 54007 - protein, 269 aa, Unidentified
AQSVPWGISRVQAPAAHNRGLTGSGVKVAVLDTGISTHPDLNIRGGASFVPGEPSTQDGNGHGTHVAGTIAALNNSIGVLGVAPNAELYAVKVLGASGSGSVSSIAQGLEWAGNNGMHVANLSLGSPSPSATLEQAVNSATSRGVLVVAASGNSGAGSISYPARYANAMAVGATDQNNNRASFSQYGAGLDIAAPGVNVQSTLPGSTYASLNGTSMATPHVAGAAALVKQKNPSWSNVQIRNHLKNTATSLGSTNLYGSGLVNAEAATR

SEQ ID NO: 54008 - protein, 269 aa, Unidentified
AQSVPWGISAVQAPAAHNRRLTGSGVKVAVLDTGISTHPDLRIRGGASFVPGEPSTQDGNGHGTHVAGTIAALNNSIGVLGVAPSAELYAVKVLGASGSGSVSSIAQGLEWAGNNGMHVANLSLGSPSPSATLEQAVNSATSRGVLVVAASGNSGAGSISYPARYANAMAVGATDQNNNRASFSQYGAGLDIVAPGVNVQSTYPGSTYASLNGTSMATPHVAGAAALVKQKNPSWSNVQIRNHLKNTATSLGSTNLYGSGLVNAEAATR

SEQ ID NO: 54009 - protein, 269 aa, Unidentified
AQSVPWGISRVQAPAAHNRRLTGSGVKVAVLDTGISTHPDRNIRGGASFVPGEPSTQDGNGHGTHVAGTIAALNNSIGVLGVAPSAELYAVKVLGASGSGSVSSIAQGLEWAGNNGMHVANLSLGSPSPSATLEQAVNSATSRGVLVVAASGNSGAGSISYPARYANAMAVGATDQNNNRASFSQYGAGLDIVAPGVNVQSTYPGSTYASLNGTSMATPHVAGAAALVKQKNPSWRNVQIRNHLKNTATSLGSTNLYGSGLVNAEAATR

SEQ ID NO: 54010 - protein, 269 aa, Unidentified
AQSVPWGISRVQAPAAHNRGLTGSGVKVAVLDTGISTHPDLNIRGGASFVPGEPSTQDGNGHGTHVAGTIAALNNSIGVLGVAPSAELYAVKVLGASGSGSVSGIAQGLEWAGNFGMHVANLSLGSPSPSATLEQAVNSATSRGVLVVAASGNSGAGSISYPARYANAMAVGATDQNNNRASFSQYGAGLDIVAPGVNVQSTYPGSTYASLNGTSMATPHVAGAAALVKQKLPSWSNVQIRNHLKNTATSLGSTNLYGSGLVNAEAATR

SEQ ID NO: 54011 - protein, 269 aa, Unidentified
AQSVPWGISRVQAPAAHNRGLTGSGVKVAVLDTGISTHPDLNIRGGASFVPGEPSTQDGEGHGTHVAGTIAALNNSIGVLGVAPSAELYAVKVLGASGSGSVSSIAQGLEWAGNNGMHVANLSLGSPSPSATLEQAVNSATSRGVLVVAASGNSGEGSISYPARYANAMAVGATDQNNNRASFSQYGAGLDIVAPGVNVQSTYPGSTYASLNGTSMATPHVAGAAALVKQKNPSWSNVQIRNHLKRTATSLGSTNLYGSGLVNAEAATR

SEQ ID NO: 54012 - protein, 270 aa, Synthetic construct
AQSVPWGISRVQAPAAHNRGLTGSGVKVAVLDTGIDSTHPDLNIRGGASFVPGEPSTQDGNGHGTHVAGTIAALNNSIGVLGVAPSAELYAVKVLGASGSGSVSSIAQGLEWAGNNGMDVANLSLGSPSPSATLEQAVNSATSRGVLVVAASGNSGAGSISYPARYANAMAVGATDQNNNRASFSQYGPELDIVAPGVNVQSTYPGSTYASLNGTSMATPHVAGAAALVKQKNPSWSNVQIRNHLKNTATSLGSTNLYGSGLVNAEAATR

SEQ ID NO: 54013 - protein, 269 aa, Unidentified
AQTVPWGISRVQAPAAHNLGLTGSGVKVAVLDTGISTHPDLNIRGGASFVPGEPSTQDGNGHGTHVAGTIAALNNSIGVLGVAPSAELYAVKVLGASGSGSVSSIAQGLEWAGNNGMHVANLSLGSPSPSATLEQAVNSATSRGVLVVAASGNSGAGSISYPARYANAMAVGATDQNNNRASFSQYGPGLDIVAPGVNVQSTYPGSTYASLNGTSMATPHVAGAAALVKQKNPSWSNVQIRNHLKNTATSLGSTNLYGSGLVNAEAATR

SEQ ID NO: 54014 - protein, 269 aa, Unidentified
AQSVPWGISRVQAPAAHNRKLTGSGVKVAVLDTGISTHPDLNIRGGASFVPGEPSTQDGEGHGTHVAGTIAALNNNIGVLGVAPSAELYAVKVLGASGSGSVSSIAQGLEWAGNNGMHVANLSLGSPSPSATLEQAVNSATSRGVLVVAASGNSGAGSISYPARYANAMAVGATDQNNNRASFSQYGAGLDIVAPGVNVQSTYPGSTYASLNGTSMATPHVAGAAALVKQKNPSWSNVQIRNHLKNTATSLGSTNLYGSGLVNAEAATR

SEQ ID NO: 54015 - protein, 269 aa, Unidentified
AQSVPWGISRVQAPAAHNRGLAGSGVKVAVLDTGISTHPDLNIRGGASFVPGEPSTQDGNGHGTHVAGTIAALNNSIGVLGVAPSAELYAVKVLGASGSGAISSIAQGLEWAGNNGMHVANLSLGSPSPSATLEQAVNSATSRGVLVVAASGNSGAGSISYPARYANAMAVGATDQNNNRASFSQYGAGLDIVAPGVNVQSTYPGSTYASLNGTSMATPHVAGAAALVKQKNPSWSNVQIRNHLKNTATSLGSTNLYGSGLVNAEAATR

SEQ ID NO: 54016 - protein, 269 aa, Unidentified
AQSVPWGISRVQAPAAHNRGLTGSGVKVAVLDTGISTHPDLNIRGGASFVPGEPSTQDGNGHGTHVAGTIAALNNSIGVLGVAWSAELYAVKVLGASGSGSVSSIAQGLEWAGNNGMHVANLSLGSPSPSATLEQAVNSATSRGVLVVAASGNSGAGSISYPARYANAMAVGATDQNNNRASFSQYGAGLDIVAPGVNVQSTAPGSTYASLNGTSMATPHVAGAAALVFQKNPSWSNVQIRNHLKNTATSLGSTNLYGSGLVNAEAATR

SEQ ID NO: 54017 - protein, 269 aa, Unidentified
AQSVPWGISRVQAPAAHNRGLTGSGVKVAVLDTGISTHPDLNIRGGASFVPGEPSTQDGNGHGTHVAGTIAALNNSIGVLGVAPSAELYAVKVLGASGSGSVSSIARGLEWAGNNGMHVANLSLGSPSPSATLEQAVNSATSRGVLVVAASGNSGAGSISYPARYANAMAVGATDQNNNRARFSQYGAGLDIVAPGVNVQSTYPGSTYASLNGTSMATPHVAGAAALVKQKNPSWSNVQIRRHLKNTATSLGSTNLYGSGLVNAEAATR

SEQ ID NO: 54018 - protein, 269 aa, Unidentified
AQSVPWGISRVQAPAAHNRRLTGSGVKVAVLDTGISTHPDLNIRGGASFVPGEPSTQDGNGHGTHVAGTIAALNNSIGVLGVAPSAELYAVKVLGASGSGSVSSIAQGLEWAGNNGMHVANLSLGSPSPSATLEQAVNSATSRGVLVVAASGNSGAGSISYPARYANAMAVGATDQNNNRASFSQYGAGLDIVAPGVNVQSTYPGSTYASLNGTSMATPHVAGAAALVKQKNPSWRNVQIRNHLKNTATSLGSTNLYGSGLVRAEAATR

SEQ ID NO: 54019 - protein, 269 aa, Unidentified
AQSVPWGISRVQAPAAHNRGLTGSGVKVAVLDTGISTHPDLNIRGGASFVPGEPSTQDGNGHGTHVAGTIAALNNSIGVLGVAPSAELYAVKVLPASGAGSLSSIAQGLEWAGNNGMHVANLSLGSPSPSATLEQAVNSATSRGVLVVAASGNSGAGSISYPARYANAMAVGATDQNNNRASFSQYGAGLDIVAPGVNVQSTYPGSTYASLNGTSMATPHVAGAAALVKQKNPSWSNVQIRNHLKNTATSLGSTNLYGSGLVNAEAATR

SEQ ID NO: 54020 - protein, 269 aa, Bacillus lentus
AQSVPWGISRVQAPAAHNRGLTGSGVKVAVLDTGISTHPDLNIRGGASFVPGEPSTQDGNGHGTHVAGTIAALNNSIGVLGVAPDAELYAVKVLGASGSGSVSSIAQGLEWAGNNGMHVANLSLGSPSPSATLEQAVNSATSRGVLVVAASGNSGAGSISYPARYANAMAVGATDQNNNRARFSQYGAGLDIVAPGVNVQSTYPGSTYASLNGTSMATPHVAGAAALVKQKNPSWSNVQIRRHLKNTATSLGSTNLYGSGLVNAEAATR

SEQ ID NO: 54021 - protein, 269 aa, Unidentified
AQSVPWGISRVQAPAAHNRGLTGSGVKVAVLDTGISTHPDLNIRGGASFVPGEPSTQDGNGHGTHVAGTIAALNNSIGVLGVAPSAELYAVKVLGASGSGSVSSIAQGLEWAGNNGMHVANLSLGSPSPSATLEQAVNSATSRGVLVVAASGNSGAGSISYPARYANAMAVGATDQNNNRADFSQYGAGLDIVAPGVNVQSTYPGSTYASLNGTSMATPHVAGAAALVKQKNPSWSNVRIRDHLKNTATSLGSTNLYGSGLVNAEAATR

SEQ ID NO: 54022 - protein, 269 aa, Unidentified
AQSVPWGISRVQAPAAHNRGLTGSGVKVAVLDTGISTHPDLNIRGGASFVPGEPSTQDGNGHGTHVAGTIAALNNDINVLGVAPSAELYAVKVLGASGSGSVSSIAQGLEWAGNNGMHVANLSLGSPSPSATLEQAVNSATSRGVLVVAASGNSGAGSISYPARYANAMAVGATDQNNNRASFSQYGAGLDIVAPGVNVQSTYPGSTYASLNGTSMLTPHVAGAAALVKQKNPSWSNVQIRNHLKNTATSLGSTNLYGSGLVNAEAATR

SEQ ID NO: 54023 - protein, 269 aa, Unidentified
AQSVPWGISRVQAPAAHNRGLTGSGVKVAVLDTGISTHPDLNIRGGASFVPGEPSTQDGNGHGTHVAGTIAALNNSIGVLGVAPSAELYAVKVLGASGSGSVSSIARGLEWAGNNGMHVANLSLGSPSPSATLEQAVNSATSRGVLVVAASGNSGAGSISYPARYANAMAVGATDQNNNRADFSQYGAGLDIVAPGVNVQSTYPGSTYASLNGTSMATPHVAGAAALVKQKNPSWSNVQIRRHLKNTATSLGSTNLYGSGLVNAEAATR

SEQ ID NO: 54024 - protein, 270 aa, Aspergillus oryzae
AQSVPWGISRVQAPAAHNRGLTGSGVKVAVLDTGISTHPDLNIRGGASFVPGEPSTQDGNGHGTHVAGTIAALNNSIGVLGVAPSAELYAVKVLGASEGSGSVSSIAQGLEWAGNNGMHVANLSLGSPSPSATLEQAVNSATSRGVLVVAASGNSGASSISYPARYANAMAVGATDQNNNRASFSQYGAGLDIVAPGVNVQSTYPSSTYASLNGTSMATPHVAGAAALVKQKNPSWSNVQIRNHLKNTATSLGSNNLYGSGLVNAEAATR

SEQ ID NO: 54025 - protein, 269 aa, Bacillus lentus
AQSVPWGISRVQAPAAHNRGLTGSGVKVAVLDTGISTHPDLNIRGGASFVPGEPSTQDGNGHGTHVAGTIAALNNSIGVLGVAPRAELYAVKVLGASGSGSVSSIADGLEWAGNNGMHVANLSLGSPSPSATLEQAVNSATSRGVLVVAASGNSGAGSISYPARYANAMAVGATDQNNNRARFSQYGAGLDIVAPGVNVQSTYPGSTYASLNGTSMATPHVAGAAALVKQKNPSWSNVQIRNHLKNTATSLGSTNLYGSGLVNAEAATR

SEQ ID NO: 54026 - protein, 269 aa, Unidentified
AQSVPWGISRVQAPAAHNRGLTGRGVKVAVLDTGISTHPDLNIRGGASFVPGEPSTQDGNGHGTHVAGTIAALNNSIGVLGVAPSAELYAVKVLGASGGGSVSSIAQGLEWAGNNGMHVANLSLGSPSPSATLEQAVNSATSRGVLVVAASGNSGAGSISYPARYANAMAVGATDQNNNRASFSQYGAGLDIVAPGVNVQSTYPGSTYASLNGTSMATPHVAGAAALVKQKNPSWSNVRIRNHLKNTATSLGSTNLYGSGLVNAEAATR

SEQ ID NO: 54027 - protein, 269 aa, Bacillus lentus
AQSVPWGISRVQAPAAHNRGLTGSGVKVAVLDTGISTHPDLNIRGGASFVPGEPSTQDGNGHGTHVAGTIAALNNSIGVLGVAPSAELYAVKVLGASGSGSVSSIAQGLEWAGNNGMHVANLSLGSPSPSATLEQAVNSATSRGVLVVAASGNSGAGSISIPALYANAMAVGATDQNNNRASFSQYGAGLDIVAPGVNVESTYPGSTYASLNGTSMATPHVAGAAALVKQKNPSWSNVQIRNHLKNTATSLGSTNLYGSGLVNAEAATR

SEQ ID NO: 54028 - protein, 269 aa, Unidentified
AQSVPWGISRVQAPAAHNRGLTGSGVKVAVLDTGISTHPDLNIRGGASFVPGEPSTQDGNGHGTHVAGTIAALNNSIGVLGVAPSAELYAVKVLPFSGSGSISSIAQGLEWAGNNGMHVANLSLGSPSPSATLEQAVNSATSRGVLVVAASGNSGAGSISYPARYANAMAVGATDQNNNRASFSQYGAGLDIVAPGVNVQSTYPGSTYASLNGTSMATPHVAGAAALVKQKNPSWSNVQIRNHLKNTATSLGSTNLYGSGLVNAEAATR

SEQ ID NO: 54029 - protein, 270 aa, Bacillus subtilis
AQSVPWGISRVQAPAAHNRGLTGSGVKVAVLDTGISTHPDLNIRGGASFVPGEPSTQDGNGHGTHVAGTIAALDNSIGVLGVAPSAELYAVKVLGASGSGAISSIAQGLEWAGNNGMHVANLSLGSPSPSATLEQAVNSATSRGVLVVAASGNSGAGSISYFPARYANAMAVGATDQNNNRASFSQYGAGLDIVAPGVNVQSTYPGSTYASLNGTSMATPHVAGAAALVKQKNPSWSNVQIRNHLKNTATSLGSTNLYGSGLVNAEAATR

SEQ ID NO: 54030 - protein, 269 aa, Synthetic construct
AQSVPWGISRVQAPAAHNRGLTGSGVKVAVLDTGISTHPDLNIRGGASFVPGEPSTQDGNGHGTHVAGTIAALDNSIGVLGVAPSAELYAVKVLGASGSGASSSIAQGLEWAGNNGMHVANLSLGSPSPSATLEQAVNSATSRGVLVVAASGNSGAGSISYPARYANAMAVGATDQNNNRASFSQYGAGLDIVAPGVNVQSTYPGSTYASLNGTSMATPHVAGAAALVKQKNPSWSNVQIRNHLKNTATSLGSTNLYGSGLVNAEAATR

SEQ ID NO: 54031 - protein, 269 aa, Unidentified
AQSVPWGISRVQAPAAHNRGLTGRGVKVAVLDTGISTHPDLNIRGGASFVPGEPSTQDGNGHGTHVAGTIAALNNSIGVLGVAPSAELYAVKVLGASGGGAVSSIAQGLEWAGNNGMHVANLSLGSPSPSATLEQAVNSATSRGVLVVAASGNSGAGSISYPARYANAMAVGATDQNNNRASFSQYGAGLDIVAPGVNVQSTYPGSTYASLNGTSMATPHVAGAAALVKQKNPSWSNVQIRNHLKNTATSLGSTNLYGSGLVNAEAATR

SEQ ID NO: 54032 - protein, 269 aa, Unidentified
AQSVPWGISRVQAPAAHNRGLTGRGVKVAVLDTGISTHPDLRIRGGASFVPGEPSTQDGNGHGTHVAGTIAALNNSIGVLGVAPSAELYAVKVLGASGSGSVSSIAQGLEWAGNNGMHVANLSLGSPSPSATLEQAVNSATSRGVLVVAASGNSGAGSISYPARYANAMAVGATDQNNNRASFSQYGAGLDIVAPGVNVQSTYPGSTYFSLNGTSMATPHVAGAAALVKQKNPSWSNVQIRNHLKNTATSLGSTNLYGSGLVNAEAATR

SEQ ID NO: 54033 - protein, 269 aa, Unidentified
AQSVPWGISRVQAPAAHNRGLTGSGVKVAVLDTGISTHPDLNIRGGASFVPGEPSTQDGNGHGTHVAGTIAALNNSIGVLGVAPSAELYAVKVLPQSSSGSVSSIAQGLEWAGNNGMHVANLSLGSPSPSATLEQAVNSATSRGVLVVAASGNSGAGSISYPARYANAMAVGATDQNNNRASFSQYGAGLDIVAPGVNVQSTYPGSTYASLNGTSMATPHVAGAAALVKQKNPSWSNVQIRNHLKNTATSLGSTNLYGSGLVNAEAATR

SEQ ID NO: 54034 - protein, 269 aa, Unidentified
AQSVPWGISRVQAPAAHNRGLTGSGVKVAVLDTGISTHPDLNIRGGASFVPGEPSTQDGNGHGTHVAGTIAALNNSIGVLGVAPSAELYAVKVLGASGGGGVSSIAQGLEWAGNNGMHVANLSLGSPSPSATLEQAVNSATSRGVIVVAASGNSGAGSISYPARYANAMAVGATDQNNNRASFSQYGAGLDIVAPGVNVQSTYPGSTYASLNGTSMATPHVAGAAALVKQKNPSWSNVQIRNHLKNTATSLGSTNLYGSGLVNAEAATR

SEQ ID NO: 54035 - protein, 269 aa, Unidentified
AQSVPWGISRVQAPAAHNRGLTGSGVKVAVLDTGISTHPDLNIRGGASFVPGEPSTQDGNGHGTHVAGTIAALNNSIGVLGVAPSAELYAVKVLGASGSGSVSSIAQGLEWAGNNGMHVANLSLGDPSPSATLEQAVNSATSRGVLVVAASGNSGAGSISYPARYANAMAVGATDQNNNRASFSQYGAGLDIVAPGVNVQSTYPGSAYASENGTSMATPHVAGAAALVKQKNPSWSNVQIRNHLKNTATSLGSTNLYGSGLVNAEAATR

SEQ ID NO: 54036 - protein, 269 aa, Unidentified
AQSVPWGISRVQAPAAHNRGLTGSGVKVAVLDTGISTHPDLNIRGGASFVPGEPSTQDGNGHGTHVAGTIAALNNSIGVLGVAPSAELYAVKVLGASGSGSVSSIAQGLEWAGNNRMHVANLSLGSPSPSATLEQAVNSATSRGVLVVAASGNSGAGSIDYPARYANAMAVGATDQNNNRADFSQYGAGLDIVAPGVNVQSTYPGSTYASLNGTSMATPHVAGAAALVKQKNPSWSNVQIRNHLKNTATSLGSTNLYGSGLVNAEAATR

SEQ ID NO: 54037 - protein, 269 aa, Unidentified
AQSVPWGISRVQAPAAHNRGLTGSGVKVAVLDTGISTHPDLNIRGGASFVPGEPSTQDGNGHGTHVAGTIAALNNSIGVLGVAPSAELYAVKVLGATGSAGVSSIAQGLEWAGNNGMHVANLSLGSPSPSATLEQAVNSATSRGVLVVAASGNSGAGSISYPARYANAMAVGATDQNNNRASFSQYGAGLDIVAPGVNVQSTYPGSTYASLNGTSMATPHVAGAAALVKQKNPSWSNVQIRNHLKNTATSLGSTNLYGSGLVNAEAATR

SEQ ID NO: 54038 - protein, 269 aa, Unidentified
AQVVPWGISRVQAPAAHNRGLTGSGVKVAVLDTGISTHPDLNIRGGASFVPGEPSTQDGNGHGTHVAGTIAALNNSIGVLGVAPSAELYAVKVLGASGSGSVSSIAQGLEWAGNNGMHVANLSLGSPSPSATLEQAVNSATSRGRLVVAASGNSGAGSISYPARYQNAMAVGATDQNNNRASFSQYGAGLDIVAPGVNVQSTYPGSTYASLNGTSMATPHVAGAAALVKQKNPSWSNVQIRNHLKNTATSLGSTNLYGSGLVNAEAATR

SEQ ID NO: 54039 - protein, 269 aa, Unidentified
AQSVPWGISRVQAPAAHNRGLTGSGVKVAVLDTGISTHPDLNIRGGASFVPGEPSTQDGNGHGTHVAGTIAALNNSIGVLGVAPSAELYAVKVLGASGSGSVSSIAQGLEWAGNNGMHVANLSLGLPSPSATLEQAVNSATSRGVLVVAASGNSGAGSISYPARYANAMAVGATDQNNNRASFSQYGAGLDIVAPGVNVQSTYPGSTYASENGTSMATPHVAGAAALVKQKNPSWSNVQIRNHLKNTATSLGSTNLYGSGLVNALAATR

SEQ ID NO: 54040 - protein, 269 aa, Unidentified
AQSVPWGISRVQAPAAHNRGLTGSGVKVAVLDTGISTHPDLNIRGGASFVPGEPSTQDGNGHGTHVAGTIAALNNSIGVLGVAPSAELYAVKVLPQSGAGSVSSIAQGLEWAGNNGMHVANLSLGSPSPSATLEQAVNSATSRGVLVVAASGNSGAGSISYPARYANAMAVGATDQNNNRASFSQYGAGLDIVAPGVNVQSTYPGSTYASLNGTSMATPHVAGAAALVKQKNPSWSNVQIRNHLKNTATSLGSTNLYGSGLVNAEAATR

SEQ ID NO: 54041 - protein, 269 aa, Unidentified
AQSVPWGISRVQAPAAHNRGLTGSGVKVAVLDTGISTHPDLNIRGGASFVPGEPSTQDGNGHGTHVAGTIAALNNNIGVLGVAPSAELYAVKVLGASGSGSVSSIAQGLEWAGNNGMHVANLSLGDPSPSATLEQAVNSATSRGVLVVAASGNSGAGSISYPARYANAMAVGATDQNNNRASFSQYGAGLDIVAPGVNVQSTYPGSTYASENGTSMATPHVAGAAALVKQKNPSWSNVQIRNHLKNTATSLGSTNLYGSGLVNAEAATR

SEQ ID NO: 54042 - protein, 269 aa, Unidentified
AQVVPWGISRVQAPAAHNRGLTGSGVKVAVLDTGISTHPDLNIRGGASFVPGEPSTQDGNGHGTHVAGTIAALNNSIGVLGVAPSAELYAVKVLGASGSGSVSSIAQGLEWAGNNGMHVANLSLGSPSPSATLEQAVNSATSRGVLVVAASGNSGAGSISYPARYQNAMAVGATDQNNNRAEFSQYGAGLDIVAPGVNVQSTYPGSTYASLNGTSMATPHVAGAAALVKQKNPSWSNVQIRNHLKNTATSLGSTNLYGSGLVNAEAATR

SEQ ID NO: 54043 - protein, 269 aa, Unidentified
AQSVPWGISRVQAPAAHNRGLTGQGVKVAVLDTGISTHPDLNIRGGASFVPGEPSTQDGNGHGTHVAGTIAALNNDIGVLGVAPSAELYAVKVLGASGSGSVSSIAQGLEWAGNNGMHVANLSLGSPSPSATLEQAVNSATSRGVLVVAASGNSGAGSISYPARYQNAMAVGATDQNNNRASFSQYGAGLDIVAPGVNVQSTYPGSTYASLNGTSMATPHVAGAAALVKQKNPSWSNVQIRNHLKNTATSLGSTNLYGSGLVNAEAATR

SEQ ID NO: 54044 - protein, 269 aa, Unidentified
AQSVPWGISRVQAPAAHNRGLTGGGVKVAVLDTGISTHPDLNIRGGASFVPGEPSTQDGNGHGTHVAGTIAALNNSIGVLGVAPSAELYAVKVLGASGQGSVSSIAQGLEWAGNNGMHVANLSLGSPSPSATLEQAVNSATSRGVLVVAASGNSGAGSISYPARYANAMAVGATDQNNNRASFSQYGAGLDIVAPGVNVQSTYPGSTYASQNGTSMATPHVAGAAALVKQKNPSWSNVQIRNHLKNTATSLGSTNLYGSGLVNAEAATR

SEQ ID NO: 54045 - protein, 269 aa, Unidentified
AQVVPWGISRVQAPAAHNRGLTGSGVKVAVLDTGISTHPDLNIRGGASFVPGEPSTQDGNGHGTHVAGTIAALNNDIGVLGVAPSAELYAVKVLGASGSGSVSSIAQGLEWAGNNGMHVANLSLGSPSPSATLEQAVNSATSRGVLVVAASGNSGAGSISYPARYANAMAVGATDQNNNRAEFSQYGAGLDIVAPGVNVQSTYPGSTYASLNGTSMATPHVAGAAALVKQKNPSWSNVQIRNHLKNTATSLGSTNLYGSGLVNAEAATR

SEQ ID NO: 54046 - protein, 269 aa, Bacillus lentus
AQSVPWGISRVQAPAAHNRGLTGSGVKVAVLDTGISTHPDLNIRGGASFVPGEPSTQDGNGHGTHVAGTIAALNNSIGVLGVAPSAELYAVKVLGASGSGSVSSIADGLEWAGNNGMHVANLSLGSPSPSATLEQAVNSATSRGVLVVAASGNSGAGSISYPARYANAMAVGATDQNNNRARFSQYGAGLDIVAPGVNVQSTYPGSTYASLNGTSMATPHVAGAAALVKQKNPSWSNVQIRRHLKNTATSLGSTNLYGSGLVNAEAATR

SEQ ID NO: 54047 - protein, 269 aa, Unidentified
AQSRPWGISRVQAPAAHNRRLTGRGVKVAVLDTGISTHPDLNIRGGASFVPGEPSTQDGNGHGTHVAGTIAALNNSIGVLGVAPSAELYAVKVLGASGSGSVSSIAQGLEWAGNNGMHVANLSLGSPSPSATLEQAVNSATSRGVLVVAASGNSGAGSISYPARYANAMAVGATDQNNNRASFSQYGAGLDIVAPGVNVQSTYPGSTYASLNGTSMATPHVAGAAALVKQKNPSWSNVQIRNHLKNTATSLGSTNLYGSGLVNAEAATR

SEQ ID NO: 54048 - protein, 269 aa, Unidentified
AQSVPWGISRVQAPAAHNRGLTGSGVKVAVLDTGISTHPDLNIRGGASFVPGEPSTQDGNGHGTHVAGTIAALNNSIGVLGVAPSAELYAVKVLGASGSGSVSSIAQGLEWAGNNGMHVANLSLGSPSPSATLEQAVNSATSRGVLVVAASGNSGAGSISYPARYQNAMAVGATDQNNNRASFSQYGAGLDIVAPGVNVQSTYPGSTYASLNGTSMASPHVAGAAALVKQKNPSWSNVQIRNHLKNTDTSLGSTNLYGSGLVNAEAATR

SEQ ID NO: 54049 - protein, 269 aa, Unidentified
AQSVPWGISRVQAPAAHNRGLTGSGVKVAVLDTGISTHPDLNIRGGASFVPGEPSTQDGNGHGTHVAGTIAALNNSIGVLGVAPNAELYAVKVLGASGSGSVSSIAQGLEWAGNNGMHVANLSLGSPSPGATLEQAVNSATSRGVLVVAASGNSGAGSISYPARYANAMAVGATDQNNNRASFSQYGAGLDIVAPGVNVQSTWPGSTYASLNGTSMATPHVAGAAALVKQKNPSWSNVQIRNHLKNTATSLGSTNLYGSGLVNAEAATR

SEQ ID NO: 54050 - protein, 269 aa, Unidentified
AQSVPWGISRVQAPAAHNRGLTGSGVKVAVLDTGISTHPDLNIRGGASFVPGEPSTQDGNGHGTHVAGTIAALNNSIGVLGVAPSAELYAVKVLPATGSGSLSSIAQGLEWAGNNGMHVANLSLGSPSPSATLEQAVNSATSRGVLVVAASGNSGAGSISYPARYANAMAVGATDQNNNRASFSQYGAGLDIVAPGVNVQSTYPGSTYASLNGTSMATPHVAGAAALVKQKNPSWSNVQIRNHLKNTATSLGSTNLYGSGLVNAEAATR

SEQ ID NO: 54051 - protein, 269 aa, Unidentified
AQSVPWGISRVQAPAAHNRGLTGSGVKVAVLDTGISTHPDLNIRGGASFVPGEPSTQDGNGHGTHVAGTIAALNNSIGVLGVAPSAELYAVKVLGASGGGGLSSIAQGLEWAGNNGMHVANLSLGSPSPSATLEQAVNSATSRGVLVVAASGNSGAGSISYPARYANAMAVGATDQNNNRASFSQYGAGLDIVAPGVNVQSTYPGSTYASLNGTSMATPHVAGAAALVKQKNPSWSNVQIRNHLKNTATSLGSTNLYGSGLVNAEAATR

SEQ ID NO: 54052 - protein, 269 aa, Unidentified
AQSVPWGISRVQAPAAHNRGLTGSGVKVAVLDTGISTHPDLRIRGGASFVPGEPSTQDGNGHGTHVAGTIAALNNSIGVLGVAPSAELYAVKVLGASGSGSVSSIAQGLEWAGNNGMHVANLSLGSPSPSATLEQAVNSATSRGVLVVAASGNSGAGSISYPARYANAMAVGATDQNNNRASFSQYGAGLDIVAPGVNVQSTYPGSTYASLNGTSMATPHVAGAAALVKQKNPSWRNVQIRNRLKNTATSLGSTNLYGSGLVNAEAATR

SEQ ID NO: 54053 - protein, 269 aa, Unidentified
AQSVPWGISRVQAPAAHNRGLTGSGVKVAVLDSGISTHPDLNIRGGASFVPGEPSTQDGNGHGTHVAGTIAALNNSIGVLGVAPSAELYAVKVLGASGSGSVSSIAQGLEWAGNNRMHVANLSLGSPSPSATLEQAVNSATSRGVLVVAASGNSGAGSISYPARYANAMAVGATDQNNNRASFSQYGAGLDIVAPGVNVQSTYPGSTYASLNGTSMATPHVAGAAALVKQKNPSWSFVQIRNHLKNTATSLGSTNLYGSGLVNAEAATR

SEQ ID NO: 54054 - protein, 269 aa, Unidentified
AQSVPWGISRVQAPAAHNRGLTGSGVKVAVLDTGISTHPDLNIRGGASFVPGEPSTQDGNGHGTHVAGTIAALNNSIGVLGVAPSAELYAVKVLGAGGAGSLSSIAQGLEWAGNNGMHVANLSLGSPSPSATLEQAVNSATSRGVLVVAASGNSGAGSISYPARYANAMAVGATDQNNNRASFSQYGAGLDIVAPGVNVQSTYPGSTYASLNGTSMATPHVAGAAALVKQKNPSWSNVQIRNHLKNTATSLGSTNLYGSGLVNAEAATR

SEQ ID NO: 54055 - protein, 269 aa, Bacillus lentus
AQSVPWGISRVQAPAAHNRGLTGSGVKVAVLDTGISTHPDLNIRGGASFVPGEPSTQDGNGHGTHVAGTIAALNNSIGVLGVAPDAELYAVKVLGASGSGSVSSIADGLEWAGNNGMHVANLSLGSPSPSATLEQAVNSATSRGVLVVAASGNSGAGSISYPARYANAMAVGATDQNNNRADFSQYGAGLDIVAPGVNVQSTYPGSTYASLNGTSMATPHVAGAAALVKQKNPSWSNVQIRNHLKNTATSLGSTNLYGSGLVNAEAATR

SEQ ID NO: 54056 - protein, 269 aa, Unidentified
AQSVPWGISRVQAPAAHNRGLTGSGVKVAVLDTGISTHPDLNIRGGASFVPGEPSTQDGNGHGTHVAGTIAALNNSIGVLGVAPSAELYAVKVLPASSSGAVSSIAQGLEWAGNNGMHVANLSLGSPSPSATLEQAVNSATSRGVLVVAASGNSGAGSISYPARYANAMAVGATDQNNNRASFSQYGAGLDIVAPGVNVQSTYPGSTYASLNGTSMATPHVAGAAALVKQKNPSWSNVQIRNHLKNTATSLGSTNLYGSGLVNAEAATR

SEQ ID NO: 54057 - protein, 269 aa, Unidentified
AQSVPWGISRVQAPAAHNRGLTGSGVKVAVLDSGISTHPDLNIRGGASFVPGEPSTQDGNGHGTHVAGTIAALNNSIGVLGVAPSAELYAVKVLGASGSGSVSSIAQGLEWAGLNGMHVANLSLGSPSPSATLEQAVNSATSRGVLVVAASGNSGAGSISYPARYANAMAVGATDQNNNRADFSQYGAGLDIVAPGVNVQSTYPGSTYASLNGTSMATPHVAGAAALVKQKNPSWSNVQIRNHLKNTATSLGSTNLYGSGLVNAEAATR

SEQ ID NO: 54058 - protein, 269 aa, Unidentified
AQSVPWGISRVQAPAAHNRKLTGSGVKVAVLDTGISTHPDLNIRGGASFVPGEPSTQDGNGHGTHVAGTIAALNNNIGVLGVAPSAELYAVKVLGASGDGSVSSIAQGLEWAGNNGMHVANLSLGSPSPSATLEQAVNSATSRGVLVVAASGNSGAGSISYPARYANAMAVGATDQNNNRASFSQYGAGLDIVAPGVNVQSTYPGSTYASLNGTSMATPHVAGAAALVKQKNPSWSNVQIRNHLKNTATSLGSTNLYGSGLVNAEAATR

SEQ ID NO: 54059 - protein, 269 aa, Unidentified
AQSVPWGISRVQAPASHNRGLTGSGVKVAVLDTGISTHPDLNIRGGASFVPGEPSTQDGNGHGTHVAGTIAALNNSIGVLGVAPSAELYAVKVLGASGGGAVSSIAQGLEWAGNNGMHVANLSLGSPSPSATLEQAVNSATSRGVLVVAASGNSGAGSISYPARYANAMAVGATDQNNNRASFSQYGAGLDIVAPGVNVQSTYPGSTYASLNGTSMATPHVAGAAALVKQKNPSWSNVQIRNHLKNTATSLGSTNLYGSGLVNAEAATR

SEQ ID NO: 54060 - protein, 269 aa, Unidentified
AQSVPWGISRVQAPAAHNRGLTGSGVKVAVLDSGISTHPDLNIRGGASFVPGEPSTQDGNGHGTHVAGTIAALNNSIGVLGVAPSAELYAVKVLGASGSGSVSSIAQGLEWAGNNGMHVANLSLGSPSPSATLEQAVNSATSRGVLVVAASGNSGAGSISYPARYANAMAVGATDQNNNRASFSQYGAGLDIVAPGVNVQSTAPGSTYASLNGTSMATPHVAGAAALVKQKNPSWSFVQIRNHLKNTATSLGSTNLYGSGLVNAEAATR

SEQ ID NO: 54061 - protein, 269 aa, Unidentified
AQSVPWGISRVQAPAAHNRGLAGSGVKVAVLDTGISTHPDLNIRGGASFVPGEPSTQDGNGHGTHVAGTIAALNNSIGVLGVAPSAELYAVKVLGASGSGGVSSIAQGLEWAGNNGMHVANLSLGSPSPSATLEQAVNSATSRGVIVVAASGNSGAGSISYPARYANAMAVGATDQNNNRASFSQYGAGLDIVAPGVNVQSTYPGSTYASLNGTSMATPHVAGAAALVKQKNPSWSNVQIRNHLKNTATSLGSTNLYGSGLVNAEAATR

SEQ ID NO: 54062 - protein, 269 aa, Unidentified
AQSVPWGISRVQAPAAHNRKLTGFGVKVAVLDTGISTHPDLNIRGGASFVPGEPSTQDGEGHGTHVAGTIAALNNSIGVLGVAPSAELYAVKVLGASGSGSVSSIAQGLEWAGNNGMHVANLSLGSPSPSATLEQAVNSATSRGVLVVAASGNSGAGSISYPARYANAMAVGATDQNNNRASFSQYGAGLDIVAPGVNVQSTYPGSTYASLNGTSMATPHVAGAAALVKQKNPSWSNVQIRNHLKNTATSLGSTNLYGSGLVNAEAATR

SEQ ID NO: 54063 - protein, 269 aa, Unidentified
AQSVPWGISRVQAPAAHNRRLTGSGVKVAVLDTGISTHPDLRIRGGASFVPGEPSTQDGNGHGTHVAGTIAALNNSIGVLGVAPSAELYAVKVLGASGSGSVSSIAQGLEWAGNNGMHVANLSLGSPSPSATLEQAVNSATSRGVLVVAASGNSGAGSISYPARYANAMAVGATDQNNNRASFSQYGAGLDIVAPGVNVQSTYPGSTYASLNGTSMATPHVAGAAALVKQKNPSWLNVQIRNHLKNTATSLGSTNLYGSGLVNAEAATR

SEQ ID NO: 54064 - protein, 269 aa, Unidentified
AQSVPWGISRVQAPAAHNRRLRGSGVKVAVLDTGISTHPDLNIRGGASFVPGEPSTQDGNGHGTHVAGTIAALNNSIGVLGVAPSAELYAVKVLGASGSGSVSSIAQGLEWAGNNGMHVANLSLGSPSPSATLEQAVNSATSRGVLVVAASGNSGAGSISYPARYANAMAVGATDQNNNRASFSQYGAGLDIVAPGVNVQSTYPGSTYASLNGTSMATPHVAGAAALVKQKNPSWSNVQIRNHLKNTATSLGSTNLYGSGLVNALAATR

SEQ ID NO: 54065 - protein, 269 aa, Unidentified
AQVVPWGISRVQAPAAHNRGLTGSGVKVAVLDTGISTHPDLNIRGGASFVPGEPSTQDGNGHGTHVAGTIAALNNSIGVLGVAPSAELYAVKVLGASGSGSVSSIAQGLEWAGNNGMHVANLSLGSPSPSATLEQAVNSATSRGVLVVAASGNSGAGSISYPARYQNAMAVGATDQNNNRASFSQYGAGLDIVAPGVNVQSTYPGSTYAILNGTSMATPHVAGAAALVKQKNPSWSNVQIRNHLKNTATSLGSTNLYGSGLVNAEAATR

SEQ ID NO: 54066 - protein, 269 aa, Unidentified
AQSVPWGISRVQAPAAHNRGLTGRGVKVAVLDTGISTHPDLNIRGGASFVPGEPSTQDGNGHGTHVAGTIAALNNSIGVLGVAPSAELYAVKVLGASGSGSISSIAQGLEWAGNNGMHVANLSLGSPSPSATLEQAVNSATSRGVLVVAASGNSGAGSISYPARYANAMAVGATDQNNNRASFSQYGAGLDIVAPGVNVQSTYPGSTYASLNGTSMATPHVAGAAALVKQKNPSWSNVRIRNHLKNTATSLGSTNLYGSGLVNAEAATR

SEQ ID NO: 54067 - protein, 269 aa, Unidentified
AQSVPWGISRVQAPAAHNRGLAGSGVKVAVLDTGISTHPDLNIRGGASFVPGEPSTQDGNGHGTHVAGTIAALNNSIGVLGVAPSAELYAVKVLGASGSGSVSSIAQGLEWAGNNRMHVANLSLGSPSPSATLEQAVNSATSRGVLVVAASGNSGAGSISYPARYANAMAVGATDQNNNRADFSQYGAGLDIVAPGVNVQSTYPGSTYASLNGTSMATPHVAGAAALVKQKNPSWSNVQIRNHLKNTATSLGSTNLYGSGLVNAEAATR

SEQ ID NO: 54068 - protein, 269 aa, Unidentified
AQSVPWGISRVQAPAAHNRGLTGRGVKVAVLDTGISTHPDLNIRGGASFVPGEPSTQDGEGHGTHVAGTIAALNNSIGVLGVAPSAELYAVKVLGASGSGSVSSIAQGLEWAGNNRMHVANLSLGSPSPSATLEQAVNSATSRGVLVVAASGNSGAGSISYPARYANAMAVGATDQNNNRASFSQYGAGLDIVAPGVNVQSTYPGSTYASLNGTSMATPHVAGAAALVKQKNPSWSNVQIRNHLKNTATSLGSTNLYGSGLVNAEAATR

SEQ ID NO: 54069 - protein, 269 aa, Unidentified
AQSVPWGISRVQAPAAHNRGLTGSGVKVAVLDTGISTHPDLNIRGGASFVPGEPSTQDGNGHGTHVAGTIAALNNSIGVLGVAPSAELYAVKVLGFAGSASVSSIAQGLEWAGNNGMHVANLSLGSPSPSATLEQAVNSATSRGVLVVAASGNSGAGSISYPARYANAMAVGATDQNNNRASFSQYGAGLDIVAPGVNVQSTYPGSTYASLNGTSMATPHVAGAAALVKQKNPSWSNVQIRNHLKNTATSLGSTNLYGSGLVNAEAATR

SEQ ID NO: 54070 - protein, 269 aa, Unidentified
AQSVPWGISRVQAPAAHNRRLTGSGVKVAVLDTGISTHPDLNIRGGASFVPGEPSTQDGEGHGTHVAGTIAALNNSIGVLGVAPSAELYAVKVLGASGSGSVSSIAQGLEWAGNNRMHVANLSLGSPSPSATLEQAVNSATSRGVLVVAASGNSGAGSISYPARYANAMAVGATDQNNNRASFSQYGAGLDIVAPGVNVQSTYPGSTYASLNGTSMATPHVAGAAALVKQKNPSWSNVQIRNHLKNTATSLGSTNLYGSGLVNAEAATR

SEQ ID NO: 54071 - protein, 269 aa, Unidentified
AQSVPWGISRVQAPAAHNRGLTGSGVKVAVLDTGISTHPDLNIRGGASFVPGEPSTQDGNGHGTHVAGTIAALNNSIGVLGVAPRAELYAVKVLGASGSGSVSSIARGLEWAGNNGMHVANLSLGSPSPSATLEQAVNSATSRGVLVVAASGNSGAGSISYPARYANAMAVGATDQNNNRASFSQYGAGLDIVAPGVNVQSTYPGSTYASLNGTSMATPHVAGAAALVKQKNPSWSNVQIRDHLKNTATSLGSTNLYGSGLVNAEAATR

SEQ ID NO: 54072 - protein, 269 aa, Unidentified
AQSVPWGISRVQAPAAHNRGLTGSGVKVAVLDTGISTHPDLNIRGGASFVPGEPSTQDGNGHGTHVAGTIAALNNSIGVLGVAPSAELYAVKVLGASGSGSLSSIAQGVEWAGNNGMHVANLSLGNPSPSATLEQAVNSATSRGVLVVAASGNSGAGSISYPARYANAMAVGATDQNNNRASFSQYGAGLDIVAPGVNVQSTYPGSTYASLNGTSMATPHVAGAAALVKQKNPSWSNVQIRNHLKNTATSLGSTNLYGSGLVNAEAATR

SEQ ID NO: 54073 - protein, 269 aa, Unidentified
AQSVPWGISRVQAPAAHNRGLTGSGVKVAVLDTGISTHPDLNIRGGASFVPGEPSTQDGNGHGTHVAGTIAALNNSIGVLGVAPSAELYAVKVLPAGSSGSVSSIAQGLEWAGNNGMHVANLSLGSPSPSATLEQAVNSATSRGVLVVAASGNSGAGSISYPARYANAMAVGATDQNNNRASFSQYGAGLDIVAPGVNVQSTYPGSTYASLNGTSMATPHVAGAAALVKQKNPSWSNVQIRNHLKNTATSLGSTNLYGSGLVNAEAATR

SEQ ID NO: 54074 - protein, 269 aa, Unidentified
AQSVPWGISRVQAPAAHNRGLTGSGVKVAVLDTGISTHPDLNIRGGASFVPGEPSTQDGNGHGTHVAGTIAALNNNIGVLGVAPSAELYAVKVLGASGDGSVSSIAQGLEWAGNNGMHVANLSLGSPSPSATLEQAVNSATSRGVLVVAASGNSGAGSISYPARYANAMAVGATDQNNNRASFSQYGAGLDIVAPGVNVQSTYPGSTYASENGTSMATPHVAGAAALVKQKNPSWSNVQIRNHLKNTATSLGSTNLYGSGLVNAEAATR

SEQ ID NO: 54075 - protein, 269 aa, Unidentified
AQSVPWGISRVQAPAAHNRGLAGRGVKVAVLDTGISTHPDLNIRGGASFVPGEPSTQDGNGHGTHVAGTIAALNNSIGVLGVAPSAELYAVKVLGASGSGSVSSIAQGLEWAGNNGMHVANLSLGSPSPSATLEQAVNSATSRGVLVVAASGNSGEGSISYPARYANAMAVGATDQNNNRASFSQYGAGLDIVAPGVNVQSTYPGSTYASLNGTSMATPHVAGAAALVKQKNPSWSNVQIRNHLKNTATSLGSTNLYGSGLVNAEAATR

SEQ ID NO: 54076 - protein, 269 aa, Unidentified
AQSVPWGISRVQAPAAHNRGLTGSGVKVAVLDTGISTHPDLNIRGGASFVPGEPSTQDGEGHGTHVAGTIAALNNSIGVLGVAPSAELYAVKVLGASGSGSVSSIAQGLEWAGLNGMHVANLSLGSPSPSATLEQAVNSATSRGVLVVAASGNSGAGSISYPARYANAMAVGATDQNNNRADFSQYGAGLDIVAPGVNVQSTYPGSTYASLNGTSMATPHVAGAAALVKQKNPSWSNVQIRNHLKNTATSLGSTNLYGSGLVNAEAATR

SEQ ID NO: 54077 - protein, 269 aa, Unidentified
AQSVPWGISRVQAPAAHNRRLTGSGVKVAVLDTGISTHPDLNIRGGASFVPGEPSTQDGNGHGTHVAGTIAALNNGIGVLGVAPSAELYAVKVLGASGSGSVSSIAQGLEWAGNNDMHVANLSLGSPSPSATLEQAVNSATSRGVLVVAASGNSGAGSISYPARYANAMAVGATDQNNNRASFSQYGAGLDIVAPGVNVQSTYPGSTYASLNGTSMATPHVAGAAALVKQKNPSWSNVQIRNHLKNTATSLGSTNLYGSGLVNAEAATR

SEQ ID NO: 54078 - protein, 269 aa, Unidentified
AQSVPWGISRVQAPAAHNRGLTGSGVKVAVLDTGISTHPDLNIRGGASFVPGEPSTQDGNGHGTHVAGTIAALNNSIGVLGVAPSAELYAVKVLGASGSGSVSSIAQGLEWAGNNVMHVANLSLGLQAPSATLEQAVNSATSRGVLVVAASGNSGAGSISYPARYANAMAVGATDQNNNRASFSQYGAGLDIVAPGVNVQSTYPGSTYASLNGTSSATPHVAGAAALVKQKNPSWSNVQIRNHLKNTATSLGSTNLYGSGLVNAEAATR

SEQ ID NO: 54079 - protein, 269 aa, Unidentified
AQSVPWGISRVQAPAAHNRGLTGSGVKVAVLDTGISTHPDLNIRGGASFVPGEPSTQDGNGHGTHVAGTIAALNNDIGVLGVAPSAELYAVKVLGASGSGSVSSIAQGLEWAGNNGMHVANLSLGSPRPSATLEQAVNSATSRGVLVVAASGNSGAGSISYPARYQNAMAVGATDQNNNRASFSQYGAGLDIVAPGVNVQSTYPGSTYASLNGTSMATPHVAGAAALVKQKNPSWSNVQIRNHLKNTATSLGSTNLYGSGLVNAEAATR

SEQ ID NO: 54080 - protein, 269 aa, Unidentified
AQSVPWGISRVQAPAAHNRGLTGSGVKVAVLDTGISTHPDLRIRGGASFVPGEPSTQDGNGHGTHVAGTIAALNNSIGVLGVAPSAELYAVKVLGASGSGSVSSIAQGLEWAGNNGMHVANLSLGLPSPSATLEQAVNSATSRGVLVVAASGNSGAGSISYPARYANAMAVGATDQNNNRASFSQYGAGLDIVAPGVNVQSTYPGSTYASLNGTSMATPHVAGAAALVKQKNPRWSNVQIRNHLKNTATSLGSTNLYGSGLVNAEAATR

SEQ ID NO: 54081 - protein, 269 aa, Unidentified
AQSVPWGISRVQAPAAHNRGLRGRGVKVAVLDTGISTHPDRNIRGGASFVPGEPSTQDGNGHGTHVAGTIAALNNSIGVLGVAPSAELYAVKVLGASGSGSVSSIAQGLEWAGNNGMHVANLSLGSPSPSATLEQAVNSATSRGVLVVAASGNSGAGSISYPARYANAMAVGATDQNNNRASFSQYGAGLDIVAPGVNVQSTYPGSTYASLNGTSMATPHVAGAAALVKQKNPSWSNVQIRNHLKNTATSLGSTNLYGSGLVNAEAATR

SEQ ID NO: 54082 - protein, 269 aa, Bacillus subtilis
AQSVPWGISRVQAPAAHNRGLTGSGVKVAVLDTGISTHPDLNIRGGASFVPGEPSTQDGNGHGTHVAGTIAALNNSIGVLGVAPNAELYAVKVLGASGSGSVSSIAQGLEWAGNNGMHVANLSLGSPSPSATLEQAVNSATSRGVLVVAASGNSGAGSISYPARYANAMAVGATDQNNNRASFSQYGPGLDIVAPGVNVQSTYPGSTYASLNGTSMATPHVAGAAALVKQKNPSWSNVQIRNHLKNTATSLGSTNLYGSGLINAEAATR

SEQ ID NO: 54083 - protein, 269 aa, Unidentified
AQSVPWGISRVQAPAAHNRGLTGSGVKVAVLDTGISTHPDLNIRGGASFVPGEPSTQDGNGHGTHAAGTIAALDNSIGVLGVAPSAELYAVKVLGASGSGAISSIAQGLEWAGNNGMHVANLSLGSPSPSATLEQAVNSATSRGVLVVAASGNSGAGSISYPARYANAMAVGATDQNNNRASFSQYGAGLDIVAPGVNVQSTYPGSTYASLNGTSSATPHVAGAAALVKQKNPSWSNVQIRNHLKNTATSLGSTNLYGSGLVNAEAATR

SEQ ID NO: 54084 - protein, 269 aa, Unidentified
AQSVPWGISRVQAPAAHNRGLTGSGVKVAVLDTGISTHPDLNIRGGASFVPGEPSTQDGNGHGTHVAGTIAALNNSIGVLGVAPSAELYAVKVLPASGSASISSIAQGLEWAGNNGMHVANLSLGSPSPSATLEQAVNSATSRGVLVVAASGNSGAGSISYPARYANAMAVGATDQNNNRASFSQYGAGLDIVAPGVNVQSTYPGSTYASLNGTSMATPHVAGAAALVKQKNPSWSNVQIRNHLKNTATSLGSTNLYGSGLVNAEAATR

SEQ ID NO: 54085 - protein, 269 aa, Unidentified
AQSVPWGISRVQAPAAHNRGLAGRGVKVAVLDTGISTHPDLNIRGGASFVPGEPSTQDGNGHGTHVAGTIAALNNSIGVLGVAPSAELYAVKVLGASGSGSVSSIAQGLEWAGNNRMHVANLSLGSPSPSATLEQAVNSATSRGVLVVAASGNSGAGSISYPARYANAMAVGATDQNNNRASFSQYGAGLDIVAPGVNVQSTYPGSTYASLNGTSMATPHVAGAAALVKQKNPSWSNVQIRNHLKNTATSLGSTNLYGSGLVNAEAATR

SEQ ID NO: 54086 - protein, 269 aa, Unidentified
AQSVPWGISRVQAPAAHNRGLTGFGVKVAVLDTGISTHPDLNIRGGASFVPGEPSTQDGNGHGTHVAGTIAALNNSIGVLGVAPSAELYAVKVLGASGSGSVSSIAQGLEWAGNNGMHVANLSLGSPSPSATLEQAVNSATSRGVLVVAASGNSGAGSIDYPARYANAMAVGATDQNNNRASFSQYGAGLDIVAPGVNVQSTYPGSTYASENGTSMATPHVAGAAALVKQKNPSWSNVQIRNHLKNTATSLGSTNLYGSGLVNAEAATR

SEQ ID NO: 54087 - protein, 269 aa, Unidentified
AQSVPWGISRVQAPAAHNRKLTGSGVKVAVLDTGISTHPDLNIRGGASFVPGEPSTQDGNGHGTHVAGTIAALNNSIGVLGVAPSAELYAVKVLGASGSGSVSSIAQGLEWAGLNGMHVAGLSLGSPSPSATLEQAVNSATSRGVLVVAASGNSGAGSISYPARYANAMAVGATDQNNNRASFSQYGAGLDIVAPGVNVQSTYPGSAYASLNGTSSATPHVAGAAALVKQKNPSWSNVQIRNHLKNTATSLGSTNLYGSGLVNAEAATR

SEQ ID NO: 54088 - protein, 269 aa, Unidentified
AQSVPWGISRVQAPAAHRRRLTGSGVKVAVLDTGISTHPDLRIRGGASFVPGEPSTQDGNGHGTHVAGTIAALNNSIGVLGVAPSAELYAVKVLGASGSGSVSSIAQGLEWAGNNGMHVANLSLGSPSPSATLEQAVNSATSRGVLVVAASGNSGAGSISYPARYANAMAVGATDQNNNRASFSQYGAGLDIVAPGVNVQSTYPGSTYASLNGTSMATPHVAGAAALVKQKNPSWSNVQIRNHLKNTATSLGSTNLYGSGLVNAEAATR

SEQ ID NO: 54089 - protein, 269 aa, Unidentified
AQSVPWGISRVQAPAAHNRGLTGSGVKVAVLDTGISTHPDLNIRGGASFVPGEPSTQDGNGHGTHVAGTIAALNNSIGVLGVAPSAELYAVKVLPASGAGGVSSIAQGLEWAGNNGMHVANLSLGSPSPSATLEQAVNSATSRGVLVVAASGNSGAGSISYPARYANAMAVGATDQNNNRASFSQYGAGLDIVAPGVNVQSTYPGSTYASLNGTSMATPHVAGAAALVKQKNPSWSNVQIRNHLKNTATSLGSTNLYGSGLVNAEAATR

SEQ ID NO: 54090 - protein, 269 aa, Unidentified
AQSVPWGISRVQAPAAHNRGLTGSGVKVAVLDTGISTHPDLNIRGGASFVPGEPSTQDGNGHGTHVAGTIAALNNSIGVLGVAPSAELYAVKVLPQSGSGAVSSIAQGLEWAGNNGMHVANLSLGSPSPSATLEQAVNSATSRGVLVVAASGNSGAGSISYPARYANAMAVGATDQNNNRASFSQYGAGLDIVAPGVNVQSTYPGSTYASLNGTSMATPHVAGAAALVKQKNPSWSNVQIRNHLKNTATSLGSTNLYGSGLVNAEAATR

SEQ ID NO: 54091 - protein, 269 aa, Unidentified
AQVVPWGISRVQAPAAHNRGLTGQGVKVAVLDTGISTHPDLNIRGGASFVPGEPSTQDGNGHGTHVAGTIAALNNDIGVLGVAPSAELYAVKVLGASGSGSVSSIAQGLEWAGNNGMHVANLSLGSPSPSATLEQAVNSATSRGVLVVAASGNSGAGSISYPARYANAMAVGATDQNNNRASFSQYGAGLDIVAPGVNVQSTYPGSTYASLNGTSMATPHVAGAAALVKQKNPSWSNVQIRNHLKNTATSLGSTNLYGSGLVNAEAATR

SEQ ID NO: 54092 - protein, 269 aa, Unidentified
AQSVPWGISRVQAPAAHNRRLTGSGVKVAVLDTGISTHPDLNIRGGASFVPGEPSTQDGNGHGTHVAGTIAALNNSIGVLGVAPSAELYAVKVLGASGSGSVSSIAQGLEWAGNNGMHVANLSLGSPSPSATLEQAVNSATSRGVLVVAASGNSGAGSISYPARYANAMAVGATDQNNNRASFSQYGAGLDIVAPGVNVQSTYPGSTYASLNGTSMATPHVAGAAALVKQKNPSWSNVQIRNRLKNTATSLGSTNLYGSGLVRAEAATR

SEQ ID NO: 54093 - protein, 269 aa, Unidentified
AQSVPWGISRVQAPAAHNRRLTGSGVKVAVLDTGISTHPDLRIRGGASFVPGEPSTQDGNGHGTHVAGTIAALNNSIGVLGVAPSAELYAVKVLGASGSGSVSSIAQGLEWAGNNGMHVANLSLGSPSPSATLEQAVNSATSRGVLVVAASGNSGAGSISYPARYANAMAVGATDQNNNRASFSQYGAGLDIVAPGVNVQSTYPGSTYASLNGTSMATPHVAGAAALVKQKNPSWSNVQIRNHLKNTATSLRSTNLYGSGLVNAEAATR

SEQ ID NO: 54094 - protein, 269 aa, Unidentified
AQSVPWGISRVQAPAAHNRGLTGSGVKVAVLDTGISTHPDLNIRGGASFVPGEPSTQDGNGHGTHVAGTIAALNNSIGVLGVAPSAELYAVKVLPAAGAGSVSSIAQGLEWAGNNGMHVANLSLGSPSPSATLEQAVNSATSRGVLVVAASGNSGAGSISYPARYANAMAVGATDQNNNRASFSQYGAGLDIVAPGVNVQSTYPGSTYASLNGTSMATPHVAGAAALVKQKNPSWSNVQIRNHLKNTATSLGSTNLYGSGLVNAEAATR

SEQ ID NO: 54095 - protein, 269 aa, Unidentified
AQSVPWGISRVQAPAAHNRGLTGSGVKVAVLDTGISTHPDLNIRGGASFVPGEPSTQDGNGHGTHVAGTIAALNNSIGVLGVAPSAELYAVKVLGAASSGSISSIAQGLEWAGNNGMHVANLSLGSPSPSATLEQAVNSATSRGVLVVAASGNSGAGSISYPARYANAMAVGATDQNNNRASFSQYGAGLDIVAPGVNVQSTYPGSTYASLNGTSMATPHVAGAAALVKQKNPSWSNVQIRNHLKNTATSLGSTNLYGSGLVNAEAATR

SEQ ID NO: 54096 - protein, 269 aa, Unidentified
AQSVPWGISRVQAPAAHNRGLTGSGVKVAVLDTGISTHEDLNIRGGASFVPGEPSTQDGNGHGTHVAGTIAALNNSIGVLGVAPSAELYAVKVLGASGRGSVSSIAQGLEWAGNNGMHVANLSLGSPAPSATLEQAVNSATSRGVLVVAASGNSGAGSISYPARYANAMAVGATDQNNNRASFSQYGAGLDIVAPGVNVQSTYPGSTYASLNGTSMATPHVAGAAALVKQKNPSWSNVQIRNHLKNTATSLGSTNLYGSGLVNAEAATR

SEQ ID NO: 54097 - protein, 269 aa, Unidentified
AQSVPWGIARVQAPAAHNRGLTGRGVKVAVLDTGISTHPDRNIRGGASFVPGEPSTQDGNGHGTHVAGTIAALNNSIGVLGVAPSAELYAVKVLGASGSGSVSSIAQGLEWAGNNGMHVANLSLGSPSPSATLEQAVNSATSRGVLVVAASGNSGAGSISYPARYANAMAVGATDQNNNRASFSQYGAGLDIVAPGVNVQSTYPGSTYASLNGTSMATPHVAGAAALVKQKNPSWSNVQIRNHLKNTATSLGSTNLYGSGLVNAEAATR

SEQ ID NO: 54098 - protein, 269 aa, Unidentified
AQSVPWGISRVQAPASHNRGLTGSGVKVAVLDTGISTHPDLNIRGGASFVPGEPSTQDGNGHGTHVAGTIAALNNSIGVLGVAPSAELYAVKVLGASGAGAVSSIAQGLEWAGNNGMHVANLSLGSPSPSATLEQAVNSATSRGVLVVAASGNSGAGSISYPARYANAMAVGATDQNNNRASFSQYGAGLDIVAPGVNVQSTYPGSTYASLNGTSMATPHVAGAAALVKQKNPSWSNVQIRNHLKNTATSLGSTNLYGSGLVNAEAATR

SEQ ID NO: 54099 - protein, 269 aa, Unidentified
AQVVPWGISRVQAPAAHNRGLTGSGVKVAVLDTGISTHPDLNIRGGASFVPGEPSTQDGNGHGTHVAGTIAALNNSIGVLGVAPSAELYAVKVLGASGSGSVSSIAQGLEWAGNNGMHVANLSLGSPSPSATLEQAVNSATSRGVLVVAASGNSGAGSISYPARYQNAMAVGATDQNNNRASFSQYGAGLDIVAPGVNVQSTYPGSTYASLNGTSMASPHVAGAAALVKQKNPSWSNVQIRNHLKNTATSLGSTNLYGSGLVNAEAATR

SEQ ID NO: 54100 - protein, 269 aa, Unidentified
AQSVPWGISRVQAPAAHNRGLTGSGVKVAVLDTGISTHPDLNIRGGASFVPGEPSTQDGNGHGTHVAGTIAALNNSIGVLGVAPSAELYAVKVLGASGNGSVSSIAGGLEWAGNNGMHVANLSLGSPSPSATLEQAVNSATSRGVLVVAASGNSGAGSISYPARYANAMAVGATDQNNNRADFSQYGAGLDIVAPGVNVQSTYPGSTYASLNGTSMATPHVAGAAALVKQKNPSWSNVQIRNHLKNTATSLGSTNLYGSGLVNAEAATR

SEQ ID NO: 54101 - protein, 269 aa, Bacillus lentus
AQSVPWGISRVQAPAAHNRGLTGSGVKVAVLDTGISTHPDLNIRGGASFVPGEPSTQDGNGHGTHVAGTIAALNNSIGVLGVAPDAELYAVKVLGASGSGSVSSIADGLEWAGNNGMHVANLSLGSPSPSATLEQAVNSATSRGVLVVAASGNSGAGSISYPARYANAMAVGATDQNNNRASFSQYGAGLDIVAPGVNVQSTYPGSTYASLNGTSMATPHVAGAAALVKQKNPSWSNVQIRRHLKNTATSLGSTNLYGSGLVNAEAATR

SEQ ID NO: 54102 - protein, 269 aa, Unidentified
AQSVPWGISRVQAPAAHNRGLTGRGVKVAVLDTGISTHPDLNIRGGASFVPGEPSTQDGNGHGTHVAGTIAALNNSIGVLGVAPSAELYAVKVLGASGAGSVSSIAQGLEWAGNNGMHVANLSLGSPSPSATLEQAVNSATSRGVLVVAASGNSGAGSISYPARYANAMAVGATDQNNNRASFSQYGAGLDIVAPGVNVQSTYPGSTYASLNGTSMATPHVAGAAALVKQKNPSWSNVQIRNHLKNTATSLGSTNLYGSGLVRAEAATR

SEQ ID NO: 54103 - protein, 270 aa, Unidentified
AQSVPWGISRVQAPAAHNRGLTGSGVKVAVLDTGISTHPDLNIRGGASFVPGEPSTQDGNGHGTHVAGTIAALNNSIGVLGVAPNAELYAVKVLGASGXGGSNSSIAQGLEWAGNNGMHVANLSLGSPSPSATLEQAVNSATSRGVLVVAASGNSGAGSISYPARYANAMAVGATDQNNNRASFSQYGAGLDIVAPGVNVQSTYPGSTYASLNGTSMATPHVAGAAALVKQKNPSWSNVQIRNHLKNTATSLGSTNLYGSGLVNAEAATR

SEQ ID NO: 54104 - protein, 269 aa, Unidentified
AQSVPWGISRVQAPAAHNRGLTGRGVKVAVLDTGISTHPDLRIRGGASFVPGEPSTQDGNGHGTHVAGTIAALNNSIGVLGVAPSAELYAVKVLGASGSGSVSSIAQGLEWAGNNGMHVANLSLGSPSPSATLEQAVNSATSRGVLVVAASGNSGAGSISYPARYANAMAVGATDQNNNRASFSQYGAGLDIVAPGVNVQSTYPGSTYASLNGTSMATPHVAGAAALVKQKNPSWRNVQIRNHLKNTATSLGSTNLYGSGLVNAEAATR

SEQ ID NO: 54105 - protein, 269 aa, Unidentified
AQSVPWGISRVQAPAAHNRGLTGSGVKVAVLDTGISTHPDLNIRGGASFVPGEPSTQDGNGHGTHVAGTIAALNNDIGVLGVAPSAELYAVKVLGASGSGSVSSIAQGLEWAGNNGMHVANLSLGSPSPSATLEQAVNSATSRGVLVVAASGNSGAGSISYPARYQNAMAVGATDQNNNRASFSQYGAGLDIVAPGVNVQSTYPGSTYASLNGTSMATPHVAGAAALVKQKNPSWSNVQIRNHLKNTATSLGSTNLYGPGLVNAEAATR

SEQ ID NO: 54106 - protein, 269 aa, Bacillus lentus
AQSVPWGISRVQAPAAHNRGLTGSGVKVAVLDTGISTHPDLNIRGGASFVPGEPSTQDGNGHGTHVAGTIAALNNSIGVLGVAPSAELYAVKVLGASGSGSVSSIAQGLEWAGNNGMHVANLSLGSPSPSATLEQAVNSATSRGVLVVAASGNSGAGSISIPALYANAMAVGATDQNNNRASFSQYGAGLDIVAPGVNVQSTYPGSTYASLSGTSMATPHVAGAAALVKQKNPSWSNVQIRNHLKNTATSLGSTNLYGSGLVNAEAATR

SEQ ID NO: 54107 - protein, 269 aa, Unidentified
AQSVPWGISRVQAPASHNRGLTGSGVKVAVLDTGISTHPDLNIRGGASFVPGEPSTQDGNGHGTHVAGTIAALNNSIGVLGVAPSAELYAVKVLGASGSGGLSSIAQGLEWAGNNGMHVANLSLGSPSPSATLEQAVNSATSRGVLVVAASGNSGAGSISYPARYANAMAVGATDQNNNRASFSQYGAGLDIVAPGVNVQSTYPGSTYASLNGTSMATPHVAGAAALVKQKNPSWSNVQIRNHLKNTATSLGSTNLYGSGLVNAEAATR

SEQ ID NO: 54108 - protein, 269 aa, Unidentified
AQSVPWGISRVQAPAAHNRRLTGSGVKVAVLDTGISTHPDLRIRGGASFVPGEPSTQDGNGHGTHVAGTIAALNNSIGVLGVAPSAELYAVKVLGASGSGSVSSIAQGLEWAGNNGMHVANLSLGSPSPSATLEQAVNSATSRGVLVVAASGNSGAGSISYPARYANAMAVGATDQNNNRASFSQYGAGLDIVAPGVNVQSTYPGSTYASLNGTSMATPHVAGAAALVKQKNPSWSNVQIRNHLKNTATSLGSTNLYGSGLVRAEAATR

SEQ ID NO: 54109 - protein, 269 aa, Unidentified
AQSVPWGISRVQAPASHNRGLTGSGVKVAVLDTGISTHPDLNIRGGASFVPGEPSTQDGNGHGTHVAGTIAALNNSIGVLGVAPSAELYAVKVLGASGGGSLSSIAQGLEWAGNNGMHVANLSLGSPSPSATLEQAVNSATSRGVLVVAASGNSGAGSISYPARYANAMAVGATDQNNNRASFSQYGAGLDIVAPGVNVQSTYPGSTYASLNGTSMATPHVAGAAALVKQKNPSWSNVQIRNHLKNTATSLGSTNLYGSGLVNAEAATR

SEQ ID NO: 54110 - protein, 269 aa, Unidentified
AQSVPWGISRVQAPAAHNRGLTGSGVKVAVLDTGISTHEDLNIRGGASFVPGEPSTQDGNGHGTHVAGTIAALNNSIGVLGVAPSAELYAVKVLGASGRGSVSSIAQGLEWAGNNGMHVANLSLGTPSPSATLEQAVNSATSRGVLVVAASGNSGAGSISYPARYANAMAVGATDQNNNRASFSQYGAGLDIVAPGVNVQSTYPGSTYASLNGTSMATPHVAGAAALVKQKNPSWSNVQIRNHLKNTATSLGSTNLYGSGLVNAEAATR

SEQ ID NO: 54111 - protein, 269 aa, Unidentified
AQSVPWGISRVQAPAAHRRGLTGSGVKVAVLDTGISTHPDLNIRGGASFVPGEPSTQDGNGHGTHVAGTIAALNNSIGVLGVAPSAELYAVKVLGASGGGSVSSIAQGLEWAGNNGMHVANLSLGSPSPSATLEQAVNSATSRGVLVVAASGNSGAGSISYPARYANAMAVGATDQNNNRASFSQYGAGLDIVAPGVNVQSTYPGSTYASLNGTSMATPHVAGAAALVKQKNPSWSNVRIRNHLKNTATSLGSTNLYGSGLVNAEAATR

SEQ ID NO: 54112 - protein, 269 aa, Unidentified
AQSVPWGISRVQAPAAHNRGLTGSGVKVAVLDTGISTHPDLNIRGGASFVPGEPSTQDGNGHGTHVAGTIAALNNSIGVLGVAPSAELYAVKVLSASGGGSVSSIANGLEWAGNNGMHVANLSLGAPSPSATLEQAVNSATSRGVLVVAASGNSGAGSISYPARYANAMAVGATDQNNNRASFSQYGAGLDIVAPGVNVQSTYPGSTYASLNGTSSATPHVAGAAALVKQKNPSWSNVQIRNHLKNTATSLGSTNLYGSGLVNAEAATR

SEQ ID NO: 54113 - protein, 269 aa, Unidentified
AQSVPWGISRVQAPAAHNRRLTGSGVKVAVLDTGTSTHPDLRIRGGASFVPGEPSTQDGNGHGTHVAGTIAALNNSIGVLGVAPSAELYAVKVLGASGSGSVSSIAQGLEWAGNNGMHVANLSLGSPSPSATLEQAVNSATSRGVLVVAASGNSGAGSISYPARYANAMAVGATDQNNNRASFSQYGAGLDIVAPGVNVQSTYPGSTYASLNGTSMATPHVAGAAALVKQKNPSWSNVQIRNHLKNTATSLGSTNLYGSGLVNAEAATR

SEQ ID NO: 54114 - protein, 269 aa, Unidentified
AQSVPWGISRVQAPAAHNRKLTGSGVKVAVLDTGISTHPDLNIRGGASFVPGEPSTQDGNGHGTHVAGTIAALNNSIGVLGVAPSAELYAVKVLGASGDGSVSSIAQGLEWAGNNGMHVANLSLGLPSPSATLEQAVNSATSRGVLVVAASGNSGAGSISYPARYANAMAVGATDQNNNRASFSQYGAGLDIVAPGVNVQSTYPGSTYASLNGTSMATPHVAGAAALVKQKNPSWSNVQIRNHLKNTATSLGSTNLYGSGLVNAEAATR

SEQ ID NO: 54115 - protein, 269 aa, Unidentified
AQSVPWGISRVQAPAAHNRGLAGSGVKVAVLDTGISTHPDLNIRGGASFVPGEPSTQDGNGHGTHVAGTIAALNNSIGVLGVAPSAELYAVKVLGASGAGAVSSIAQGLEWAGNNGMHVANLSLGSPSPSATLEQAVNSATSRGVLVVAASGNSGAGSISYPARYANAMAVGATDQNNNRASFSQYGAGLDIVAPGVNVQSTYPGSTYASLNGTSMATPHVAGAAALVKQKNPSWSNVQIRNHLKNTATSLGSTNLYGSGLVNAEAATR

SEQ ID NO: 54116 - protein, 269 aa, Unidentified
AQSVPWGISRVQAPAAHNRGLTGSGVKVAVLDTGISTHPDLNIRGGASFVPGEPSTQDGNGHGTHVAGTIAALNNSIGVLGVAPSAELYAVKVLPQTGSGSVSSIAQGLEWAGNNGMHVANLSLGSPSPSATLEQAVNSATSRGVLVVAASGNSGAGSISYPARYANAMAVGATDQNNNRASFSQYGAGLDIVAPGVNVQSTYPGSTYASLNGTSMATPHVAGAAALVKQKNPSWSNVQIRNHLKNTATSLGSTNLYGSGLVNAEAATR

SEQ ID NO: 54117 - protein, 269 aa, Unidentified
AQSVPWGISRVQAPAAHNRGLTGSGVKVAVLDTGISTHPDLNIRGGASFVPGEPSTQDGNGHGTHVAGTIAALNNSIGVLGVAPNAELYAVKVLGASGSGSVSSIAQGLEWAGNNGMHVANLSLGSPSPSATLEQAVNSATSRGVLVVAASGNSGAGELSYPARYANAMAVGATDQNNNRASFSQYGAGLDIVAPGVNVQSTYPGSTYASLNGTSMATPHVAGAAALVKQKNPSWSNVQIRNHLKNTATSLGSTNLYGSGLVNAEAATR

SEQ ID NO: 54118 - protein, 269 aa, Unidentified
AQSVPWGISRVQAPAAHNRRLTGSGVKVAVLDTGISTHPDRNIRGGASFVPGEPSTQDGNGHGTHVAGTIAALNNRIGVLGVAPSAELYAVKVLGASGSGSVSSIAQGLEWAGNNGMHVANLSLGSPSPSATLEQAVNSATSRGVLVVAASGNSGAGSISYPARYANAMAVGATDQNNNRASFSQYGAGLDIVAPGVNVQSTYPGSTYASLNGTSMATPHVAGAAALVKQKNPSWSNVQIRNHLKNTATSLGSTNLYGSGLVNAEAATR

SEQ ID NO: 54119 - protein, 269 aa, Unidentified
AQSVPWGISRVQAPAAHNRGLTGSGVKVAVLDTGISTHPDLNIRGGASFVPGEPSTQDGNGHGTHVAGTIAALNNSIGVLGVAPSAELYAVKVLGASGAGSVSSIAQGLEWAGNNGMHVANLSLGSPSPSATLEQAVNSATSRGVLVVAASGNSGAGSISYPARYANAMAVGATDQNNNRASFSQYGAGLDIVAPGVNVQSTYPQSAYASLNGTSMATPHVAGAAALVKQKNPSWSNVQIRNHLKNTATSLGSTNLYGSGLVNAEAATR

SEQ ID NO: 54120 - protein, 269 aa, Unidentified
AQSVPWGISRVQAPAAHNRKLTGSGVKVAVLDTGISTHPDLNIRGGASFVPGEPSTQDGNGHGTHVAGTIAALNNSIGVLGVAPSAELYAVKVLGASGSGSVSSIAQGLEWAGLNGMHVANLSLGLPSPSATLEQAVNSATSRGVLVVAASGNSGAGSISYPARYANAMAVGATDQNNNRASFSQYGAGLDIVAPGVNVQSTYPGSAYASLNGTSSATPHVAGAAALVKQKNPSWSNVQIRNHLKNTATSLGSTNLYGSGLVNAEAATR

SEQ ID NO: 54121 - protein, 269 aa, Unidentified
AQSVPWGISRVQAPASHNRGLAGSGVKVAVLDTGISTHPDLNIRGGASFVPGEPSTQDGNGHGTHVAGTIAALNNSIGVLGVAPSAELYAVKVLGASGSGSVSSIAQGVEWAGNNGMHVANLSLGSPSPSATLEQAVNSATSRGVLVVAASGNSGAGSISYPARYANAMAVGATDQNNNRASFSQYGAGLDIVAPGVNVQSTYPGSTYASLNGTSMATPHVAGAAALVKQKNPSWSNVQIRNHLKNTATSLGSTNLYGSGLVNAEAATR

SEQ ID NO: 54122 - protein, 269 aa, Unidentified
AQTVPWGISRVQAPAAHNRGLTGSGVKVAVLDTGISTHPELNIRGGASFVPGEPSTQDGNGHGTHVAGTIAALNNDIGVLGVAPSAELYAVKVLGASGSGSVSSIAQGLEWAGNNGMHVANLSLGSPSPSATLEQAVNSATSRGVLVVAASGNSGAGSISYPARYANAMAVGATDQNNNRASFSQYGAGLDIVAPGVNVQSTYPGSTYASLNGTSMATPHVAGAAALVKQKNPSWSNVQIRNHLKNTATSLGSTNLYGSGLVNAEAATR

SEQ ID NO: 54123 - protein, 269 aa, Unidentified
AQSVPWGISRVQAPAAHNRGLTGSGVKVAVLDTGISTHPDLNIRGGASFVPGEPSTQDGNGHGTHVAGTIAALNNSIGVLGVAPNAELYAVKVLGASGGGSVSSIAQGLEWAGNNGMHVANLSLGSPSPSATLEQAVNSATSRGVLVVAASGNSGAGSISYPARYANAMAVGATDQNNNRASFSQYGAGLDIVAPGVNVQSTWPGSTYASLNGTSMATPHVAGAAALVKQKNPSWSNVQIRNHLKNTATSLGSTNLYGSGLVNAEAATR

SEQ ID NO: 54124 - protein, 269 aa, Unidentified
AQSVPWGISRVQAPAAHNRRLTGSGVKVAVLDTGISTHPDLNIRGGASFVPGEPSTQDGNGHGTHVAGTIAALNNSIGVLGVAPSAELYAVKVLGASGSGSVSSIAQGLEWAGNNGMHVANLSLGSPSPSATLEQAVNSATSRGVLVVAASGNSGAGSISYPARYANAMAVGATDQNNNRADFSQYGAGLDIVAPGVNVQSTYPGSTYASLNGTSMATPHVAGAAALVKQKNPSWSNVQIRNRLKNTATSLGSTNLYGSGLVNAEAATR

SEQ ID NO: 54125 - protein, 269 aa, Unidentified
AQSVPWGISRVQAPAAHNRKLTGSGVKVAVLDTGISTHPDLNIRGGASFVPGEPSTQDGNGHGTHVAGTIAALNNSIGVLGVAPSAELYAVKVLGASGSGSVSSIAQGLEWAGNNGMHVANLSLGQPSPSATLEQAVNSATSRGVLVVAASGNSGAGSISYPARYANAMAVGATDQNNNRASFSQYGAGLDIVAPGVNVQSTYPGSTYASENGTSMATPHVAGAAALVKQKNPSWSNVQIRNHLKNTATSLGSTNLYGSGLVNAEAATR

SEQ ID NO: 54126 - protein, 269 aa, Unidentified
AQSVPWGISRVQAPAAHNRGLTGSGVKVAVLDTGISTHPDLNIRGGASFVPGEPSTQDGNGHGTHVAGTIAALNNSIGVLGVAPSAELYAVKVLPATGSGAVSSIAQGLEWAGNNGMHVANLSLGSPSPSATLEQAVNSATSRGVLVVAASGNSGAGSISYPARYANAMAVGATDQNNNRASFSQYGAGLDIVAPGVNVQSTYPGSTYASLNGTSMATPHVAGAAALVKQKNPSWSNVQIRNHLKNTATSLGSTNLYGSGLVNAEAATR

SEQ ID NO: 54127 - protein, 269 aa, Unidentified
AQSVPWGISRVQAPAAHNRKLTGSGVKVAVLDTGISTHPDLNIRGGASFVPGEPSTQDGEGHGTHVAGTIAALNNNIGVLGVAPSAELYAVKVLGASGSGSVSSIAQGLEWAGNNGMHVANLSLGSPSPSATLEQAVNSATSRGVLVVAASGNSGAGSISYPARYANAMAVGATDQNNNRASFSQYGAGLDIVAPGVNVQSTYPGSAYASLNGTSSATPHVAGAAALVKQKNPSWSNVQIRNHLKNTATSLGSTNLYGSGLVNAEAATR

SEQ ID NO: 54128 - protein, 269 aa, Unidentified
AQSVPWGISRVQAPAAHNRGLTGSGVKVAVLDTGISTHPDLNIRGGASFVPGEPSTQDGNGHGTHVAGTIAALNNSINVLGVAPSAELYAVKVLGASGSGSVSSIAQGLEWAGNNGMHVANLSLGSPSPSATLEQAVNSATSRGVLVVAASGNSGAGSISYPARYQNAMAVGATDQNNNRASFSQYGAGLDIVAPGVNVQSTYPGSTYASLNGTSMATPHVAGAAALVKQKNPSWSNVQIRNHLKNTATSLGSTNLYGPGLVNAEAATR

SEQ ID NO: 54129 - protein, 269 aa, Unidentified
AQSVPWGISRVQAPAAHNRGLTGSGVKVAVLDTGISTHEDLNIRGGASFVPGEPSTQDGNGHGTHVAGTIAALNNSIGVLGVAPSADLYAVKVLGASGSGSVSSIAQGLEWAGNNGMHVANLSLGSPSPSATLEQAVNSATSRGVLVVAASGNSGAGSISYPARYANAMAVGATDQNNNRASFSQYGAGLDIVAPGVNVQSTYPGSTYASLNGTSMATPHVAGAAALVKQKNPSWSNVQIRDHLKNTATSLGSTNLYGSGLVNAEAATR

SEQ ID NO: 54130 - protein, 269 aa, Unidentified
AQSVPWGISRVQAPAAHNRGLTGSGVKVAVLDTGISTHPDLNIRGGASFVPGEPSTQDGNGHGTHVAGTIAALNNNIGVLGVAPSAELYAVKVLGASGSGSVSSIAQGLEWAGNNRMHVANLSLGSPSPSATLEQAVNSATSRGVLVVAASGNSGAGSIDYPARYANAMAVGATDQNNNRASFSQYGAGLDIVAPGVNVQSTYPGSTYASLNGTSMATPHVAGAAALVKQKNPSWSNVQIRNHLKNTATSLGSTNLYGSGLVNAEAATR

SEQ ID NO: 54131 - protein, 269 aa, Unidentified
AQSVPWGISRVQAPAAHNRGLTGSGVKVAVLDTGISTHPDLNIRGGASFVPGEPSTQDGNGHGTHVAGTIAALNNDIGVLGVAPSAELYAVKVLGASGSGSVSSIAQGLEWAGNNGMHVANLSLGSPSPSATLEQAVNSATSRGVLVVAASGNSGAGSISYPARYANAMAVGATDQNNNRASFSQYGAGLDIVAPGVNVQSTYPGSTYASLNGTSMQTPHVAGAAALVKQKNPSWSNVQIRNHLKNTDTSLGSTNLYGSGLVNAEAATR

SEQ ID NO: 54132 - protein, 269 aa, Unidentified
AQSVPWGISRVQAPAAHNRGLTGSGVKVAVLDTGISTHPDLNIRGGASFVPGEPSTQDGNGHGTHVAGTIAALNNSIGVLGVAPSAELYAVKVLGASGSGSVSSIAQGLEWAGNNGMHVANLSMGSPSPSATLEQAVNSATSRGVLVVAASGNSGAGSISYPARYANAMAVGATDQNNNRASFSQYGAGLDIVAPGVNVQSTYPGSTYASLNGTSMASPHVAGAAALVKQKNPSWSNVQIRNHLKNTDTSLGSTNLYGSGLVNAEAATR

SEQ ID NO: 54133 - protein, 269 aa, Unidentified
AQSVPWGISRVQAPAAHNRRLRGSGVKVAVLDTGISTHPDLNIRGGASFVPGEPSTQDGNGHGTHVAGTIAALNNSIGVLGVAPSAELYAVKVLGASGSGSVSSIAQGLEWAGNNGMHVANLSLGSPSPSATLEQAVNSATSRGVLVVAASGNSGAGSISYPARYANAMAVGATDQNNNRASFSQYGAGLDIVAPGVNVQSTYPGSTYASLNGTSMATPHVAGAAALVKQKNPSRSNVQIRNHLKNTATSLGSTNLYGSGLVNAEAATR

SEQ ID NO: 54134 - protein, 269 aa, Unidentified
AQSVPWGISRVQAPAAHNRRLRGSGVKVAVLDTGISTHPDLRIRGGASFVPGEPSTQDGNGHGTHVAGTIAALNNSIGVLGVAPSAELYAVKVLGASGSGSVSSIAQGLEWAGNNGMHVANLSLGSPSPSATLEQAVNSATSRGVLVVAASGNSGAGSISYPARYANAMAVGATDQNNNRASFSQYGAGLDIVAPGVNVQSTYPGSTYASLNGTSMATPHVAGAAALVKQKNPSWSNVQIRNHLKNTATSLGSTNLYGSGLVNAEAATR

SEQ ID NO: 54135 - protein, 269 aa, Unidentified
AQSVPWGISRVQAPAAHNRGLTGSGVKVAVLDTGISTHPDLNIRGGASFVPGEPSTQDGNGHGTHVAGTIAALNNSIGVLGVAWSAELYAVKVLGASGSGSVSSIAQGLEWAGNNRMHVANLSLGSPSPSATLEQAVNSATSRGVLVVAASGNSGAGSISYPARYANAMAVGATDQNNNRASFSQYGAGLDIVAPGVNVQSTYPGSTYASLNGTSMATPHVAGAAALVKQKNPSWSFVQIRNHLKNTATSLGSTNLYGSGLVNAEAATR

SEQ ID NO: 54136 - protein, 269 aa, Unidentified
AQVVPWGISRVQAPAAHNRGLTGSGVKVAVLDTGISTHPDLNIRGGASFVPGEPSTQDGNGHGTHVAGTIAALNNSIGVLGVAPSAELYAVKVLGASGSGSVSSIAQGLEWAGNNGMHVANLSLGSPSPSATLEQAVNSATSRGVLVVAASGNSGAGSISYPARYANAMAVGATDQNNNRASFSQYGAGLDIVAPGVNVQSTYPGSTYASLNGTSMASPHVAGAAALVKQKNPSWSNVQIRNHLKNTDTSLGSTNLYGSGLVNAEAATR

SEQ ID NO: 54137 - protein, 269 aa, Unidentified
AQVVPWGISRVQAPAAHNRGLTGSGVKVAVLDTGISTHPDLNIRGGASFVPGEPSTQDGNGHGTHVAGTIAALNNSINVLGVAPSAELYAVKVLGASGSGSVSSIAQGLEWAGNNGMHVANLSLGSPSPSATLEQAVNSATSRGVLVVAASGNSGAGSISYPARYQNAMAVGATDQNNNRASFSQYGAGLDIVAPGVNVQSTYPGSTYASLNGTSMATPHVAGAAALVKQKNPSWSNVQIRNHLKNTATSLGSTNLYGSGLVNAEAATR

SEQ ID NO: 54138 - protein, 269 aa, Unidentified
AQSVPWGISRVQAPAAHNRRLRGSGVKVAVLDTGISTHPDRNIRGGASFVPGEPSTQDGNGHGTHVAGTIAALNNSIGVLGVAPSAELYAVKVLGASGSGSVSSIAQGLEWAGNNGMHVANLSLGSPSPSATLEQAVNSATSRGVLVVAASGNSGAGSISYPARYANAMAVGATDQNNNRASFSQYGAGLDIVAPGVNVQSTYPGSTYASLNGTSMATPHVAGAAALVKQKNPSWSNVQIRNHLKNTATSLGSTNLYGSGLVNAEAATR

SEQ ID NO: 54139 - protein, 269 aa, Unidentified
AQSVPWGISRVQAPAAHNRGLTGSGVKVAVLDTGISTHPDLNIRGGASFVPGEPSTQDGNGHGTHVAGTIAALNNSIGVLGVAPSAELYAVKVLPASGSAAVSSIAQGLEWAGNNGMHVANLSLGSPSPSATLEQAVNSATSRGVLVVAASGNSGAGSISYPARYANAMAVGATDQNNNRASFSQYGAGLDIVAPGVNVQSTYPGSTYASLNGTSMATPHVAGAAALVKQKNPSWSNVQIRNHLKNTATSLGSTNLYGSGLVNAEAATR

SEQ ID NO: 54140 - protein, 269 aa, Unidentified
AQSVPWGISRVQAPASHNRGLTGSGVKVAVLDTGISTHPDLNIRGGASFVPGEPSTQDGNGHGTHVAGTIAALNNSIGVLGVAPSAELYAVKVLGASGSGAVSSIAQGLEWAGNNGMHVANLSLGNPSPSATLEQAVNSATSRGVLVVAASGNSGAGSISYPARYANAMAVGATDQNNNRASFSQYGAGLDIVAPGVNVQSTYPGSTYASLNGTSMATPHVAGAAALVKQKNPSWSNVQIRNHLKNTATSLGSTNLYGSGLVNAEAATR

SEQ ID NO: 54141 - protein, 269 aa, Unidentified
AQSVPWGISRVQAPAAHNRGLTGSGVKVAVLDTGISTHPDLRIRGGASFVPGEPSTQDGNGHGTHVAGTIAALNNSIGVLGVAPSAELYAVKVLGASGAGSVSSIAQGLEWAGNNGMHVANLSLGSPSPSATLEQAVNSATSRGVLVVAASGNSGAGSISYPARYANAMAVGATDQNNNRASFSQYGAGLDIVAPGVNVQSTYPQSTYASLNGTSMATPHVAGAAALVKQKNPSWSNVQIRNHLKNTATSLGSTNLYGSGLVNAEAATR

SEQ ID NO: 54142 - protein, 269 aa, Unidentified
AQSVPWGISRVQAPAAHNRRLTGSGVKVAVLDTGISTHPDLNIRGGASFVPGEPSTQDGNGHGTHVAGTIAALNNSIGVLGVAPSAELYAVKVLGASGSGSVSSIAQGLEWAGNNRMHVANLSLGSESPSATLEQAVNSATSRGVLVVAASGNSGAGSISYPARYANAMAVGATDQNNNRASFSQYGAGLDIVAPGVNVQSTYPGSTYASLNGTSMATPHVAGAAALVKQKNPSWSNVQIRNHLKNTATSLGSTNLYGSGLVNAEAATR

SEQ ID NO: 54143 - protein, 269 aa, Unidentified
AQSVPWGISRVQAPAAHNRGLTGRGVKVAVLDTGISTHPDLNIRGGASFVPGEPSTQDGEGHGTHVAGTIAALNNSIGVLGVAPSAELYAVKVLGASGSGSVSSIAQGLEWAGLNGMHVANLSLGSPSPSATLEQAVNSATSRGVLVVAASGNSGAGSISYPARYANAMAVGATDQNNNRASFSQYGAGLDIVAPGVNVQSTYPGSTYASLNGTSMATPHVAGAAALVKQKNPSWSNVQIRNHLKNTATSLGSTNLYGSGLVNAEAATR

SEQ ID NO: 54144 - protein, 269 aa, Unidentified
AQSVPWGISRVQAPAAHNRGLTGRGVKVAVLDSGISTHPDLNIRGGASFVPGEPSTQDGEGHGTHVAGTIAALNNSIGVLGVAPSAELYAVKVLGASGSGSVSSIAQGLEWAGNNGMHVANLSLGSPSPSATLEQAVNSATSRGVLVVAASGNSGAGSISYPARYANAMAVGATDQNNNRASFSQYGAGLDIVAPGVNVQSTYPGSTYASLNGTSMATPHVAGAAALVKQKNPSWSNVQIRNHLKNTATSLGSTNLYGSGLVNAEAATR

SEQ ID NO: 54145 - protein, 269 aa, Unidentified
AQSVPWGISRVQAPAAHNRGLTGSGVKVAVLDTGISTHPDLNIRGGASFVPGEPSTQDGNGHGTHVAGTIAALNNRIGVLGVAPSAELYAVKVLGASGSGSVSSIAQGLEWAGNNGMHVANLSLGSESPSATLEQAVNSATSRGVLVVAASGNSGAGSISYPARYANAMAVGATDQNNNRASFSQYGAGLDIVAPGVNVQSTYPGSTYASLNGTSMATPHVAGAAALVKQKNPSWSNVRIRNHLKNTATSLGSTNLYGSGLVNAEAATR

SEQ ID NO: 54146 - protein, 269 aa, Unidentified
AQSVPWGISRVQAPAAHNRGLTGSGVKVAVLDTGISTHPDLNIRGGASFVPGEPSTQDGNGHGTHVAGTIAALNNSINVLGVAPSAELYAVKVLGASGSGSVSSIAQGLEWAGNNGMHVANLSLGSPSPSATLEQAVNSATSRGRLVVAASGNSGAGSISYPARYQNAMAVGATDQNNNRASFSQYGAGLDIVAPGVNVQSTYPGSTYASLNGTSMATPHVAGAAALVKQKNPSWSNVQIRNHLKNTATSLGSTNLYGSGLVNAEAATR

SEQ ID NO: 54147 - protein, 269 aa, Unidentified
AQSVPWGISRVQAPAAHNRGLTGSGVKVAVLDTGISTHPDLDIRGGASFVPGEPSTQDGNGHGTHVAGTIAALNNSIGVLGVAPSAELYAVKVLGASGSGSVSSIAQGLEWAGNNGMHVANLSLGSPSPSATLEQAVNSATSRGVLVVAASGNSGAGSISYPARYANAMAVGATDQNNNRASFSQYGAGLDIVAPGVNVQSTYPGSTYASLNGTSMATPHVAGAAALVKQKNPSWRNVQIRNRLKNTATSLGSTNLYGSGLVNAEAATR

SEQ ID NO: 54148 - protein, 269 aa, Unidentified
AQSVPWGISRVQAPAAHNRGLTGSGVKVAVLDTGISTHPDLNIRGGASFVPGEPSTQDGNGHGTHVAGTIAALNNSIGVLGVAPSAELYAVKVLGASGSGSVSSIAQGLEWAGNNRMHVANLSLGSPSPSATLEQAVNSATSRGVLVVAASGNSGAGSISYPARYANAMAVGATDQNNNRASFSQYGAGLDIVAPGVNVQSTAPGSTYASLNGTSMATPHVAGAAALVKQKNPSWSFVQIRNHLKNTATSLGSTNLYGSGLVNAEAATR

SEQ ID NO: 54149 - protein, 269 aa, Unidentified
AQSVPWGISRVQAPAAHNRGLTGSGVKVAVLDTGISTHPDLNIRGGASFVPGEPSTQDGNGHGTHVAGTIAALNNSIGVLGVAPSAELYAVKVLGQTGSASVSSIAQGLEWAGNNGMHVANLSLGSPSPSATLEQAVNSATSRGVLVVAASGNSGAGSISYPARYANAMAVGATDQNNNRASFSQYGAGLDIVAPGVNVQSTYPGSTYASLNGTSMATPHVAGAAALVKQKNPSWSNVQIRNHLKNTATSLGSTNLYGSGLVNAEAATR

SEQ ID NO: 54150 - protein, 269 aa, Unidentified
AQSVPWGISRVQAPAAHNRRLTGRGVKVAVLDTGISTHPDLNIRGGASFVPGEPSTQDGNGHGTHVAGTIAALNNSIGVLGVAPSAELYAVKVLGASGSGSVSSIAQGLEWAGANGMHVANLSLGSPSPSATLEQAVNSATSRGVLVVAASGNSGAGSISYPARYANAMAVGATDQNNNRASFSQYGAGLDIVAPGVNVQSTYPGSTYASLNGTSMATPHVAGAAALVKQKNPSWSNVQIRNHLKNTATSLGSTNLYGSGLVNAEAATR

SEQ ID NO: 54151 - protein, 271 aa, Unidentified
AQSVPWGISRVQAPAAHNRGLTGSGVKVAVLDTGISTHPDLNIRGGASFVPGEPSTQDGNGHGTHVAGTIAALNNSIGVLGVAPSAELYAVKVLGATXSGSGSVSSIAQGLEWAGNNGMHVANLSLGSPSPSATLEQAVNSATSRGVLVVAASGNSGAGSISAPASYANAMAVGATDQNNNRASFSQYGPGLDIVAPGVNVQSTYPGSTYASLNGTSMATPHVAGAAALVKQKNPSWSNVQIRNHLKNTATSLGSTNLYGSGLVNAEAATR

SEQ ID NO: 54152 - protein, 269 aa, Unidentified
AQSVPWGISRVQAPAAHNRGLTGRGVKVAVLDSGISTHPDLNIRGGASFVPGEPSTQDGNGHGTHVAGTIAALNNSIGVLGVAPSAELYAVKVLGASGSGSVSSIAQGLEWAGNNGMHVANLSLGSPSPSATLEQAVNSATSRGVLVVAASGNSGAGSISYPARYANAMAVGATDQNNNRASFSQYGAGLDIVAPGVNVQSTYPGSTYASLNGTSMATPHVAGAAALVKQKNPSWSFVQIRNHLKNTATSLGSTNLYGSGLVNAEAATR

SEQ ID NO: 54153 - protein, 269 aa, Synthetic construct
AQSVPWGISRVQAPAAHNRGLTGSGVKVAVLDTGISTHPDLNIRGGASFVPGEPSTQDGNGHGTHVAGTIAALDNSIGVLGVAPSAELYAVKVLGASGSGAFSSIAQGLEWAGNNGMHVANLSLGSPSPSATLEQAVNSATSRGVLVVAASGNSGAGSISYPARYANAMAVGATDQNNNRASFSQYGAGLDIVAPGVNVQSTYPGSTYASLNGTSMATPHVAGAAALVKQKNPSWSNVQIRNHLKNTATSLGSTNLYGSGLVNAEAATR

SEQ ID NO: 54154 - protein, 269 aa, Unidentified
AQSVPWGISRVQAPAAHNRGLTGRGVKVAVLDTGISTHPDLNIRGGASFVPGEPSTQDGNGHGTHVAGTIAALNNSIGVLGVAPSAELYAVKVLGASGSGSVSSIAQGLEWAGNNRMHVANLSLGIPSPSATLEQAVNSATSRGVLVVAASGNSGAGSISYPARYANAMAVGATDQNNNRASFSQYGAGLDIVAPGVNVQSTYPGSTYASLNGTSMATPHVAGAAALVKQKNPSWSNVQIRNHLKNTATSLGSTNLYGSGLVNAEAATR

SEQ ID NO: 54155 - protein, 269 aa, Unidentified
AQSVPWGISRVQAPAAHNRGLTGRGVKVAVLDTGISTHPDLNIRGGASFVPGEPSTQDGNGHGTHVAGTIAALNNSIGVLGVAPSAELYAVKVLGASGSGAVSSIAQGLEWAGNNGMHVANLSLGSPSPSATLEQAVNSATSRGVLVVAASGNSGAGSISYPARYANAMAVGATDQNNNRASFSQYGAGLDIVAPGVNVQSTYPGSTYASLNGTSMATPHVAGAAVLVKQKNPSWSNVQIRNHLKNTATSLGSTNLYGSGLVNAEAATR

SEQ ID NO: 54156 - protein, 269 aa, Unidentified
AQSVPWGISRVQAPAAHNRGLTGGGVKVAVLDTGISTHPDLNIRGGASFVPGEPSTQDGNGHGTHVAGTIAALNNSIGVLGVAPSAELYAVKVLGASGQGSVSSIAQGLEWAGNNGMHVANLSLGAPSPSATLEQAVNSATSRGVLVVAASGNSGAGSISYPARYANAMAVGATDQNNNRADFSQYGAGLDIVAPGVNVQSTYPGSTYASLNGTSSATPHVAGAAALVKQKNPSWSNVQIRNHLKNTATSLGSTNLYGSGLVNAEAATR

SEQ ID NO: 54157 - protein, 269 aa, Unidentified
AQSVPWGISRVQAPAAHNRKLTGSGVKVAVLDTGISTHPDLNIRGGASFVPGEPSTQDGNGHGTHVAGTIAALNNSIGVLGVAPSAELYAVKVLGASSSGSVSSIAQGLEWAGNNGMHVANLSLGLPSPSATLEQAVNSATSRGVLVVAASGNSGAGSISYPARYANAMAVGATDQNNNRASFSQYGAGLDIVAPGVNVQSTYPGSTYASLNGTSMATPHVAGAAALVKQKNPSWSNVQIRNHLKNTATSLGSTNLYGSGLVNAEAATR

SEQ ID NO: 54158 - protein, 269 aa, Unidentified
AQSVPWGISRVQAPAAHNRGLTGSGVKVAVLDTGISTHPDLNIRGGASFVPGEPSTQDGEGHGTHVAGTIAALNNDIGVLGVAPSAELYAVKVLGASGSGSVSSIAQGLEWAGNNSMHVANLSLGSPSPSATLEQAVNSATSRGVLVVAASGNSGAGSISYPARYANAMAVGATDQNNNRASFSQYGAGLDIVAPGVNVQSTYPGSTYASLNGTSMATPHVAGAAALVKQKNPSWSNVQIRNHLKNTATSLGSTNLYGSGLVNAEAATR

SEQ ID NO: 54159 - protein, 269 aa, Unidentified
AQSVPWGISRVQAPAAHNRGLTGSGVKVAVLDTGISTHPDLNIRGGASFVPGEPSTQDGNGHGTHVAGTIAALNNSIGVLGVAPSAELYAVKVLGASSGGSISSIAQGLEWAGNNGMHVANLSLGSPSPSATLEQAVNSATSRGVLVVAASGNSGAGSISYPARYANAMAVGATDQNNNRASFSQYGAGLDIVAPGVNVQSTYPGSTYASLNGTSMATPHVAGAAALVKQKNPSWSNVQIRNHLKNTATSLGSTNLYGSGLVNAEAATR

SEQ ID NO: 54160 - protein, 269 aa, Unidentified
AQSVPWGISRVQAPAAHNRGLTGSGVKVAVLDTGISTHPDLNIRGGASFVPGEPSTQDGNGHGTHVAGTIAALNNSIGVLGVAPRAELYAVKVLGASGSGSVSSIAQGLEWAGNNGMHVANLSLGSPSPSATLEQAVNSATSRGVLVVAASGNSGAGSISYPARYANAMAVGATDQNNNRARFSQYGAGLDIVAPGVNVQSTYPGSTYASLNGTSMATPHVAGAAALVKQKNPSWSNVQIRDHLKNTATSLGSTNLYGSGLVNAEAATR

SEQ ID NO: 54161 - protein, 269 aa, Unidentified
AQSVPWGISRVQAPAAHNRGLTGSGVKVAVLDTGISTHPDLNIRGGASFVPGEPSTQDGNGHGTHVAGTIAALNNSIGVLGVAPSAELYAVKVLPFSGSGAVSSIAQGLEWAGNNGMHVANLSLGSPSPSATLEQAVNSATSRGVLVVAASGNSGAGSISYPARYANAMAVGATDQNNNRASFSQYGAGLDIVAPGVNVQSTYPGSTYASLNGTSMATPHVAGAAALVKQKNPSWSNVQIRNHLKNTATSLGSTNLYGSGLVNAEAATR

SEQ ID NO: 54162 - protein, 269 aa, Unidentified
AQSVPWGISRVQAPAAHNRGLTGSGVKVAVLDSGISTHPDLNIRGGASFVPGEPSTQDGNGHGTHVAGTIAALNNSIGVLGVAPSAELYAVKVLGASGSGSVSSIAQGLEWAGNNGMHVANLSLGIPSPSATLEQAVNSATSRGVLVVAASGNSGAGSIDYPARYANAMAVGATDQNNNRASFSQYGAGLDIVAPGVNVQSTYPGSTYASLNGTSMATPHVAGAAALVKQKNPSWSNVQIRNHLKNTATSLGSTNLYGSGLVNAEAATR

SEQ ID NO: 54163 - protein, 269 aa, Unidentified
AQSVPWGISRVQAPAAHNRGLTGSGVKVAVLDTGISTHPDLNIRGGASFVPGEPSTQDGNGHGTHVAGTIAALNNSIGVLGVAPSAELYAVKVLGASGSGAISSIAQGLEWAGNNGMHVANLSLGSPSPSATLEQAVNSATSRGVLVVAASGNSGADSISYPARYANAMAVGATDQNNNRASFSQYGAGLDIVAPGVNVQSTYPGSTYASLNGTSMATPHVAGAAALVKQKNPSWSNVQIRNHLKNTATSLGSTNLYGSGLVNAEAATR

SEQ ID NO: 54164 - protein, 269 aa, Unidentified
AQSVPWGISRVQAPAAHNRGLTGSGVKVAVLDTGISTHPDLNIRGGASFVPGEPSTQDGNGHGTHVAGTIAALNNSIGVLGVAPSAELYAVKVLGAGSSGSLSSIAQGLEWAGNNGMHVANLSLGSPSPSATLEQAVNSATSRGVLVVAASGNSGAGSISYPARYANAMAVGATDQNNNRASFSQYGAGLDIVAPGVNVQSTYPGSTYASLNGTSMATPHVAGAAALVKQKNPSWSNVQIRNHLKNTATSLGSTNLYGSGLVNAEAATR

SEQ ID NO: 54165 - protein, 269 aa, Unidentified
AQSVPWGISRVQAPAAHNRRLTGSGVKVAVLDTGISTHPDLRIRGGASFVPGEPSTQDGNGHGTHVAGTIAALNNSIGVLGVAPSAELYAVKVLGASGSGSVSSIAQGLEWAGNNGMHVANLSLGSPSPSATLEQAVNSATSRGVLVVAASGNSGAGSISYPARYANAMAVGATDQNNNRASFSQYGAGLDIVAPGVNVQSTYPGSTYASLNGTSMATPHVAGAAALVKQKNPSWSNVQIRNRLKNTATSLGSTNLYGSGLVNAEAATR

SEQ ID NO: 54166 - protein, 269 aa, Unidentified
AQSVPWGISRVQAPAAHNRGLTGSGVKVAVLDTGISTHPDLNIRGGASFVPGEPSTQDGNGHGTHVAGTIAALNNSIGVLGVAPSAELYAVKVLGASGSGSVSSIAQGLEWAGNNGMHVANLSLGSPSPSATLEQAVNSATSRGVLVVAASGNSGEGSIDYPARYANAMAVGATDQNNNRADFSQYGAGLDIVAPGVNVQSTYPGSTYASLNGTSMATPHVAGAAALVKQKNPSWSNVQIRNHLKNTATSLGSTNLYGSGLVNAEAATR

SEQ ID NO: 54167 - protein, 269 aa, Unidentified
AQSVPWGISRVQAPAAHNRGLTGSGVKVAVLDTGISTHPDLNIRGGASFVPGEPSTQDGNGHGTHVAGTIAALNNSIGVLGVAPSAELYAVKVLGASGSGAVSSIAQGLEWAGNNGMHVANLSLGNPSPSATLEQAVNSATSRGVIVVAASGNSGAGSISYPARYANAMAVGATDQNNNRASFSQYGAGLDIVAPGVNVQSTYPGSTYASLNGTSMATPHVAGAAALVKQKNPSWSNVQIRNHLKNTATSLGSTNLYGSGLVNAEAATR

SEQ ID NO: 54168 - protein, 269 aa, Unidentified
AQSVPWGISRVQAPAAHNRGLTGSGVKVAVLDTGISTHPDLNIRGGASFVPGEPSTQDGNGHGTHVAGTIAALNNSIGVLGVAPSAELYAVKVLGQTGSGAVSSIAQGLEWAGNNGMHVANLSLGSPSPSATLEQAVNSATSRGVLVVAASGNSGAGSISYPARYANAMAVGATDQNNNRASFSQYGAGLDIVAPGVNVQSTYPGSTYASLNGTSMATPHVAGAAALVKQKNPSWSNVQIRNHLKNTATSLGSTNLYGSGLVNAEAATR

SEQ ID NO: 54169 - protein, 269 aa, Unidentified
AQSVPWGISRVQAPAAHNRRLTGSGVKVAVLDTGISTHPDLRIRGGASFVPGEPSTQDGNGHGTHVAGTIAALNNRIGVLGVAPSAELYAVKVLGASGSGSVSSIAQGLEWAGNNGMHVANLSLGSPSPSATLEQAVNSATSRGVLVVAASGNSGAGSISYPARYANAMAVGATDQNNNRASFSQYGAGLDIVAPGVNVQSTYPGSTYASLNGTSMATPHVAGAAALVKQKNPSWSNVQIRNHLKNTATSLGSTNLYGSGLVNAEAATR

SEQ ID NO: 54170 - protein, 269 aa, Unidentified
AQSVPWGISRVQAPAAHNRGLTGRGVKVAVLDSGISTHPDLNIRGGASFVPGEPSTQDGNGHGTHVAGTIAALNNSIGVLGVAPSAELYAVKVLGASGSGSVSSIAQGLEWAGNNGMHVANLSLGSPSPSATLEQAVNSATSRGVLVVAASGNSGEGSISYPARYANAMAVGATDQNNNRASFSQYGAGLDIVAPGVNVQSTYPGSTYASLNGTSMATPHVAGAAALVKQKNPSWSNVQIRNHLKNTATSLGSTNLYGSGLVNAEAATR

SEQ ID NO: 54171 - protein, 269 aa, Unidentified
AQSVPWGISRVQAPAAHNRGLTGSGVKVAVLDTGISTHPDLNIRGGASFVPGEPSTQDGNGHGTHVAGTIAALNNSIGVLGVAPSAELYAVKVLAASGQGSVSSIAQGLEWAGNNGMHVANLSLGAPSPSATLEQAVNSATSRGVLVVAASGNSGAGSISYPARYANAMAVGATDQNNNRASFSQYGAGLDIVAPGVNVQSTYPGSTYASLNGTSMATPHVAGAAALVKQKNPSWSNVQIRNHLKNTATSLGSTNLYGSGLVNAEAATR

SEQ ID NO: 54172 - protein, 269 aa, Unidentified
AQSVPWGISRVQAPAAHNRGLTGSGVKVAVLDSGISTHPDLNIRGGASFVPGEPSTQDGNGHGTHVAGTIAALNNSIGVLGVAPSAELYAVKVLGASGSGSVSSIAQGLEWAGNNGMHVANLSLGSPSPSATLEQAVNSATSRGVLVVAASGNSGEGSISYPARYANAMAVGATDQNNNRADFSQYGAGLDIVAPGVNVQSTYPGSTYASLNGTSMATPHVAGAAALVKQKNPSWSNVQIRNHLKNTATSLGSTNLYGSGLVNAEAATR

SEQ ID NO: 54173 - protein, 269 aa, Unidentified
AQSVPWGISRVQAPAAHNRKLTGSGVKVAVLDTGISTHPDLNIRGGASFVPGEPSTQDGEGHGTHVAGTIAALNNSIGVLGVAPSAELYAVKVLGASGSGSVSSIAQGLEWAGNNGMHVANLSLGSPSPSATLEQAVNSATSRGVLVVAASGNSGAGSISYPARYANAMAVGATDQNNNRADFSQYGAGLDIVAPGVNVQSTYPGSAYASLNGTSSATPHVAGAAALVKQKNPSWSNVQIRNHLKNTATSLGSTNLYGSGLVNAEAATR

SEQ ID NO: 54174 - protein, 269 aa, Unidentified
AQSVPWGISRVQAPAAHNRGLTGRGVKVAVLDTGISTHPDLNIRGGASFVPGEPSTQDGNGHGTHVAGTIAALNNSIGVLGVAPSAELYAVKVLGASGSGSVSSIAQGLEWAGNNGMHVANLSLGSPSPSATLEQAVNSATSRGVLVVAASGNSGAGSISYPARYANAMAVGATDQNNNRASFSQYGAGLDIVAPGVNVQSTAPGSTYASLNGTSMATPHVAGAAALVKQKNPSRSNVQIRNHLKNTATSLGSTNLYGSGLVNAEAATR

SEQ ID NO: 54175 - protein, 269 aa, Unidentified
AQSVPWGISRVQAPAAHNRGLTGSGVKVAVLDTGISTHPDLNIRGGASFVPGEPSTQDGNGHGTHVAGTIAALDNSIGVLGVAPSAELYAVKVLGASGSGSISSIAQGLEWAGNNGMHVASLSLGSPSPSATLEQAVNSATSRGVLVVAASGNSGAGSISYPARYANAMAVGATDQNNNRASFSQYGAGLDIVAPGVNVQSTYPGSTYASLNGTSMATPHVAGAAALVKQKNPSWSNVQIRNHLKNTATSLGSTNLYGSGLVNAEAATR

SEQ ID NO: 54176 - protein, 269 aa, Unidentified
AQSVPWGISRVQAPAAHNRGLTGSGVKVAVLDTGISTHPDLNIRGGASFVPGEPSTQDGNGHGTHVAGTIAALNNSIGVLGVAPNAELYAVKVLGASGSGSNSSIAQGLEWAGNNGMHVANLSLGSPSPSATLEQAVNSATSRGVLVVAASGNSGAGSISYPARYANAMAVGATDQNNNRASFSQYGAGLDIVAPGVNVQSTWPGSTYASLNGTSMATPHVAGAAALVKQKNPSWSNVQIRNHLKNTATSLGSTNLYGSGLVNAEAATR

SEQ ID NO: 54177 - protein, 269 aa, Unidentified
AQSVPWGISRVQAPAAHNRKLLGSGVKVAVLDTGISTHPDLNIRGGASFVPGEPSTQDGNGHGTHVAGTIAALNNSIGVLGVAPSAELYAVKVLGASGSGSVSSIAQGLEWAGNNGMHVANLSLGSPSPSATLEQAVNSATSRGVLVVAASGNSGAGSISYPARYANAMAVGATDQNNNRASFSQYGAGLDIVAPGVNVQSTYPGSTYASLNGTSMATPHVAGAAALVKQKNPSWSNVRIRNHLKNTATSLGSTNLYGSGLVNAEAATR

SEQ ID NO: 54178 - protein, 269 aa, Bacillus lentus
AQSVPWGISRVQAPAAHNRGLTGSGVKVAVLDTGISTHPDLNIRGGASFVPGEPSTQDGNGHGTHVAGTIAALNNSIGVLGVAPRAELYAVKVLGASGSGSVSSIAQGLEWAGNNGMHVANLSLGSPSPSATLEQAVNSATSRGVLVVAASGNSGAGSISYPARYANAMAVGATDQNNNRADFSQYGAGLDIVAPGVNVQSTYPGSTYASLNGTSMATPHVAGAAALVKQKNPSWSNVQIRRHLKNTATSLGSTNLYGSGLVNAEAATR

SEQ ID NO: 54179 - protein, 269 aa, Unidentified
AQSVPWGISRVQAPAAHNRGLTGGGVKVAVLDTGISTHPDLNIRGGASFVPGEPSTQDGNGHGTHVAGTIAALNNSIGVLGVAPSAELYAVKVLGASGNGSVSSIAQGLEWAGNNGMHVANLSLGAPSPSATLEQAVNSATSRGVLVVAASGNSGAGSISYPARYANAMAVGATDQNNNRADFSQYGAGLDIVAPGVNVQSTYPGSTYASLNGTSSATPHVAGAAALVKQKNPSWSNVQIRNHLKNTATSLGSTNLYGSGLVNAEAATR

SEQ ID NO: 54180 - protein, 269 aa, Unidentified
AQSVPWGISRVQAPAAHNRGLLGSGVKVAVLDTGISTHPDLNIRGGASFVPGEPSTQDGNGHGTHVAGTIAALNNSIGVLGVAPSAELYAVKVLGASGSGSVSSIAQGLEWAGNNGMHVANLSLGSPSPSATLEQAVNSATSRGVLVVAASGNSGAGSISYPARYANAMAVGATDQNNNRASFSQYGAGLDIVAPGVNVQSTYPGSAYASENGTSMATPHVAGAAALVKQKNPSWSNVQIRNHLKNTATSLGSTNLYGSGLVNAEAATR

SEQ ID NO: 54181 - protein, 269 aa, Bacillus sp.
AQSVPWGISRVQAPAAHNRGLTGSGVKVAVLDTGISTHPDLNIRGGASFVPGEPSTQDGNGHGTHVAGTIAALNNSIGVLGVAPNAELYAVKVLGASGSGSVSSIAQGLEWAGNNGMHVANLSLGSPSPSATLEQAVNSATSRGVLVVAASGNSGAGSISYPARYANAMAVGATDQNNNRASFSQYGAGLDIVAPGVNVQSTYPGSTYASLNGTSMATPHVAGAAALVKQKNPSRSNVQIRNRLKNTATSLGSTNLYGSGLVNAEAATR

SEQ ID NO: 54182 - protein, 269 aa, Unidentified
AQSVPWGISRVQAPAAHNRGLTGSGVKVAVLDTGISTHPDLNIRGGASFVPGEPSTQDGNGHGTHVAGTIAALNNRIGVLGVAWSAELYAVKVLGASGSGSVSSIAQGLEWAGNNGMHVANLSLGSPSPSATLEQAVNSATSRGVLVVAASGNSGAGSISYPARYANAMAVGATDQNNNRASFSQYGAGLDIVAPGVNVQSTYPGSTYASLNGTSMATPHVAGAAALVFQKNPSWSNVQIRNHLKNTATSLGSTNLYGSGLVNAEAATR

SEQ ID NO: 54183 - protein, 269 aa, Unidentified
AQSVPWGISRVQAPAAHNRGLTGRGVKVAVLDTGISTHPDLNIRGGASFVPGEPSTQDGNGHGTHVAGTIAALNNSIGVLGVAWSAELYAVKVLGASGSGSVSSIAQGLEWAGNNRMHVANLSLGSPSPSATLEQAVNSATSRGVLVVAASGNSGAGSISYPARYANAMAVGATDQNNNRASFSQYGAGLDIVAPGVNVQSTYPGSTYASLNGTSMATPHVAGAAALVKQKNPSWSNVQIRNHLKNTATSLGSTNLYGSGLVNAEAATR

SEQ ID NO: 54184 - protein, 269 aa, Unidentified
AQSVPWGISRVQAPAAHNRRLTGRGVKVAVLDTGISTHPDLNIRGGASFVPGEPSTQDGNGHGTHVAGTIAALNNSIGVLGVAPSAELYAVKVLGASGSGSVSSIAQGLEWAGNNGMHVANLSLGSPSPSATLEQAVNSATSRGVLVVAASGNSGAGSISYPARYANAMAVGATDQNNNRASFSQYGAGLDIVAPGVNVQSTYPGSAYASLNGTSMATPHVAGAAALVKQKNPSWSNVQIRNHLKNTATSLGSTNLYGSGLVNAEAATR

SEQ ID NO: 54185 - protein, 269 aa, Unidentified
AQSVPWGISRVQAPAAHNRGLTGSGVKVAVLDTGISTHPDLNIRGGASFVPGEPSTQDGNGHGTHVAGTIAALNNSIGVLGVAPSAELYAVKVLGQTGSGSLSSIAQGLEWAGNNGMHVANLSLGSPSPSATLEQAVNSATSRGVLVVAASGNSGAGSISYPARYANAMAVGATDQNNNRASFSQYGAGLDIVAPGVNVQSTYPGSTYASLNGTSMATPHVAGAAALVKQKNPSWSNVQIRNHLKNTATSLGSTNLYGSGLVNAEAATR

SEQ ID NO: 54186 - protein, 269 aa, Bacillus lentus
AQSVPWGISRVQAPAAHNRGLTGSGVKVAVLDTGISTHPDLNIRGGASFVPGEPSTQDGNGHGTHVAGTIAALNNSIGVLGVAPSAELYAVKVLGSDSSGSVSSIAQGLEWAGNNGMHVANLSLGSPSPSATLEQAVNSATSRGVLVVAASGNSGAGSISYPARYANAMAVGATDQNNNRASFSQYGAGLDIVAPGVNVQSTYPGSTYASLNGTSMATPHVAGAAALVKQKNPSWSNVQIRNHLKNTATSLGSTNLYGSGLVNAEAATR

SEQ ID NO: 54187 - protein, 269 aa, Unidentified
AQSVPWGISRVQAPAAHNRGLTGSGVKVAVLDTGISTHPDLNIRGGASFVPGEPSTQDGNGHGTHVAGTIAALNNNIGVLGVAPSAELYAVKVLGASSDGSVSSIAQGLEWAGNNGMHVANLSLGSPSPSATLEQAVNSATSRGVLVVAASGNSGAGSISYPARYANAMAVGATDQNNNRASFSQYGAGLDIVAPGVNVQSTYPGSTYASLNGTSMATPHVAGAAALVKQKNPSWSNVQIRNHLKNTATSLGSTNLYGSGLVNAEAATR

SEQ ID NO: 54188 - protein, 269 aa, Unidentified
AQSVPWGISRVQAPAAHNRGLTGSGVKVAVLDTGISTHPDLNIRGGASFVPGEPSTQDGNGHGTHVAGTIAALNNNIGVLGVAPSAELYAVKVLGASGDGSVSSIAQGLEWAGNNGMHVANLSLGLPSPSATLEQAVNSATSRGVLVVAASGNSGAGSISYPARYANAMAVGATDQNNNRASFSQYGAGLDIVAPGVNVQSTYPGSTYASLNGTSMATPHVAGAAALVKQKNPSWSNVQIRNHLKNTATSLGSTNLYGSGLVNAEAATR

SEQ ID NO: 54189 - protein, 269 aa, Unidentified
AQSVPWGISRVQAPAAHNRGLTGSGVKVAVLDTGISTHPDLNIRGGASFVPGEPSTQDGNGHGTHVAGTIAALNNSIGVLGVAPSAELYAVKVLPQAGSGSVSSIAQGLEWAGNNGMHVANLSLGSPSPSATLEQAVNSATSRGVLVVAASGNSGAGSISYPARYANAMAVGATDQNNNRASFSQYGAGLDIVAPGVNVQSTYPGSTYASLNGTSMATPHVAGAAALVKQKNPSWSNVQIRNHLKNTATSLGSTNLYGSGLVNAEAATR

SEQ ID NO: 54190 - protein, 269 aa, Synthetic construct
AQSVPWGISRVQAPAAHNRGLTGSGVKVAVLDTGISTHPDLNIRGGASFVPGEPSTQDGNGHGTHVAGTIAALDNSIGVLGVAPSAELYAVKVLGASGSGANSSIAQGLEWAGNNGMHVANLSLGSPSPSATLEQAVNSATSRGVLVVAASGNSGAGSISYPARYANAMAVGATDQNNNRASFSQYGAGLDIVAPGVNVQSTYPGSTYASLNGTSMATPHVAGAAALVKQKNPSWSNVQIRNHLKNTATSLGSTNLYGSGLVNAEAATR

SEQ ID NO: 54191 - protein, 269 aa, Unidentified
AQSVPWGISRVQAPAAHNRGLTGSGVKVAVLDTGISTHPDLNIRGGASFVPGEPSTQDGNGHGTHVAGTIAALNNSIGVLGVAPSAELYAVKVLGAASSGAVSSIAQGLEWAGNNGMHVANLSLGSPSPSATLEQAVNSATSRGVLVVAASGNSGAGSISYPARYANAMAVGATDQNNNRASFSQYGAGLDIVAPGVNVQSTYPGSTYASLNGTSMATPHVAGAAALVKQKNPSWSNVQIRNHLKNTATSLGSTNLYGSGLVNAEAATR

SEQ ID NO: 54192 - protein, 269 aa, Unidentified
AQSVPWGISRVQAPAAHNRRLTGSGVKVAVLDTGISTHPDLRIRGGASFVPGEPSTQDGNGHGTHVAGTIAALNNSIGVLGVAPSAELYAVKVLGASGSGSVSSIAQGLEWAGNNGMHVANLSLGSPSPSATLEQAVNSATSRGVLVVAASGNSGAGSISYPARYANAMAVGATDQNNNRASFSQYGAGLDIVAPGVNVQSTYPGSTYASLNGTSMATPHVAGAAALVKQKNPSWRNVQIRNHLKNTATSLGSTNLYGSGLVNAEAATR

SEQ ID NO: 54193 - protein, 269 aa, Unidentified
AQSVPWGISRVQAPAAHNRRLTGRGVKVAVLDTGISTHPDLNIRGGASFVPGEPSTQDGNGHGTHVAGTIAALNNSIGVLGVAPSAELYAVKVLGASGSGSVSSIAQGLEWAGNNGMHVANLSLGSPSPSATLEQAVNSATSRGVLVVAASGNSGAGSISYPARYANAMAVGATDQNNNRASFSQYGAGLDIVAPGVNVQSTYPGSTYFSLNGTSMATPHVAGAAALVKQKNPSWSNVQIRNHLKNTATSLGSTNLYGSGLVNAEAATR

SEQ ID NO: 54194 - protein, 269 aa, Unidentified
AQSVPWGISRVQAPAAHNRGLTGSGVKVAVLDTGISTHPDLNIRGGASFVPGEPSTQDGNGHGTHVAGTIAALNNDIGVLGVAPSADLYAVKVLGASGSGSVSSIAQGLEWAGNNGMHVANLSLGSPSPSATLEQAVNSATSRGVLVVAASGNSGAGSISYPARYQNAMAVGATDQNNNRASFSQYGAGLDIVAPGVNVQSTYPGSTYASLNGTSMATPHVAGAAALVKQKNPSWSNVQIRNHLKNTATSLGSTNLYGSGLVNAEAATR

SEQ ID NO: 54195 - protein, 269 aa, Synthetic construct
AQSVPWGISRVQAPAAHNRGLTGSGVKVAVLDTGISTHPDLNIRGGASFVPGEPSTQDGNGHGTHVAGTIAALNNSIGVLGVAPSAELYAVKVLGASGSGSVSSIAQGLEWAGNNGMHVANLSLGSPSPSATLEQAVNSATSRGVLVVAASNNSGAQSISMPARYANAMAVGATDQNNNRASFSQYGAGLDIVAPGVNVQSTYPGSTYASLNGTSMATPHVAGAAALVKQKNPSWSNVQIRNHLKNTATSLGSTNLYGSGLVNAEAATR

SEQ ID NO: 54196 - protein, 269 aa, Unidentified
AQSVPWGISRVQAPAAHNRGLTGSGVKVAVLDTGISTHPDLNIRGGASFVPGEPSRQDGNGHGTHVAGTIAALNNSIGVLGVAPSAELYAVKVLGASGSGSVSSIAQGLEWAGNNGMHVANLSLGSPSPSATLEQAVNSATSRGVLVVAASGNSGAGSISYPARYANAMAVGATDQDNNRASFSQYGAGLDIVAPGVNVQSTYPGSTYASLNGTSMATPHVAGAAALVKNKNPSWSNVQIRNHLKNTATSLGSTNLYGSGLVNAEAATR

SEQ ID NO: 54197 - protein, 269 aa, Unidentified
AQSVPWGISRVQAPAAHNRGLTGSGVKVAVLDTGISTHPDLNIRGGASFVPGEPSTQDGEGHGTHVAGTIAALNNSIGVLGVAPSAELYAVKVLGASGSGSVSSIAQGLEWAGLNGMHVANLSLGIPSPSATLEQAVNSATSRGVLVVAASGNSGAGSISYPARYANAMAVGATDQNNNRASFSQYGAGLDIVAPGVNVQSTYPGSTYASLNGTSMATPHVAGAAALVKQKNPSWSNVQIRNHLKNTATSLGSTNLYGSGLVNAEAATR

SEQ ID NO: 54198 - protein, 269 aa, Unidentified
AQSVPWGISRVQAPAAHNRGLTGSGVKVAVLDTGISTHPELNIRGGASFVPGEPSTQDGNGHGTHVAGTIAALNNDIGVLGVAPSAELYAVKVLGASGSGSVSSIAQGLEWAGNNGMHVANLSLGSPSPSATLEQAVNSATSRGVLVVAASGNSGAGSISYPARYQNAMAVGATDQNNNRASFSQYGAGLDIVAPGVNVQSTYPGSTYASLNGTSMATPHVAGAAALVKQKNPSWSNVQIRNHLKNTATSLGSTNLYGSGLVNAEAATR

SEQ ID NO: 54199 - protein, 270 aa, Aspergillus oryzae
AQSVPWGISRVQAPAAHNRGLTGSGVKVAVLDTGISTHPDLNIRGGASFVPGEPSTQDGNGHGTHVAGTIAALNNSIGVLGVAPSAELYAVKVLGASEGSGSVSSIAQGLEWAGNNGMHVANLSLGSPSPSATLEQAVNGATSRGVLVVAASGNNGAGSISYPARYANAMAVGATDQNNNRASFSEYGAGLDIVAPGVNVQSTYPGSTYASLNGTSMATPHVAGAAALVKQKNPSWSNVQIRNHLKNTATSLGSTNLYGSGLVNAEAATR

SEQ ID NO: 54200 - protein, 269 aa, Unidentified
AQSVPWGISRVHAPAAHNRGLTGSGVKVAVLDTGISTHPDLNIRGGASFVPGEPSTQDGNGHGTHVAGTIAALNNSIGVLGVAPSAELYAVKVLGASGSGSASSIAQGLEWAGNNRMHVANLSLGSPSPSATLEQAVNSATSRGVLVVAASGNSGAGSISYPARYANAMAVGATDQNNNRASFSQYGAGLDIVAPGVNVQSTYPGSTYASLNGTSMATPHVAGAAALVKQKNPSWSNVQIRNHLKNTATSLGSTNLYGSGLVNAEAATR

SEQ ID NO: 54201 - protein, 269 aa, Unidentified
AQSVPWGISRVQAPAAHNRGLAGSGVKVAVLDTGISTHPDLNIRGGASFVPGEPSTQDGNGHGTHVAGTIAALNNSIGVLGVAPSAELYAVKVLGASGSGSVSSIAQGLEWAGNNRMHVANLSLGSPSPSATLEQAVNSATSRGVLVVAASGNSGEGSISYPARYANAMAVGATDQNNNRASFSQYGAGLDIVAPGVNVQSTYPGSTYASLNGTSMATPHVAGAAALVKQKNPSWSNVQIRNHLKNTATSLGSTNLYGSGLVNAEAATR

SEQ ID NO: 54202 - protein, 269 aa, Unidentified
AQSVPWGISRVQAPAAHNRGLTGSGVKVAVLDTGISTHPDLNIRGGASFVPGEPSTQDGNGHGTHVAGTIAALNNSIGVLGVAPSAELYAVKVLGQASSGSVSSIAQGLEWAGNNGMHVANLSLGSPSPSATLEQAVNSATSRGVLVVAASGNSGAGSISYPARYANAMAVGATDQNNNRASFSQYGAGLDIVAPGVNVQSTYPGSTYASLNGTSMATPHVAGAAALVKQKNPSWSNVQIRNHLKNTATSLGSTNLYGSGLVNAEAATR

SEQ ID NO: 54203 - protein, 269 aa, Unidentified
AQSVPWGISRVQAPAAHNRKLLGSGVKVAVLDTGISTHPDLNIRGGASFVPGEPSTQDGNGHGTHVAGTIAALNNNIGVLGVAPSAELYAVKVLGASGSGSVSSIAQGLEWAGNNGMHVANLSLGSPSPSATLEQAVNSATSRGVLVVAASGNSGAGSISYPARYANAMAVGATDQNNNRASFSQYGAGLDIVAPGVNVQSTYPGSTYASLNGTSMATPHVAGAAALVKQKNPSWSNVQIRNHLKNTATSLGSTNLYGSGLVNAEAATR

SEQ ID NO: 54204 - protein, 269 aa, Unidentified
AQSVPWGISRVQAPAAHNRGLTGSGVKVAVLDTGISTHPDLNIRGGASFVPGEPSTQDGNGHGTHVAGTIAALNNSIGVLGVAPSAELYAVKVLPASGAGAVSSIAQGLEWAGNNGMHVANLSLGSPSPSATLEQAVNSATSRGVLVVAASGNSGAGSISYPARYANAMAVGATDQNNNRASFSQYGAGLDIVAPGVNVQSTYPGSTYASLNGTSMATPHVAGAAALVKQKNPSWSNVQIRNHLKNTATSLGSTNLYGSGLVNAEAATR

SEQ ID NO: 54205 - protein, 269 aa, Unidentified
AQSVPWGISRVQAPAAHNRGLTGSGVKVAVLDTGISTHPDLNIRGGASFVPGEPSTQDGNGHGTHVAGTIAALNNSIGVLGVAPSAELYAVKVLGATGSAAVSSIAQGLEWAGNNGMHVANLSLGSPSPSATLEQAVNSATSRGVLVVAASGNSGAGSISYPARYANAMAVGATDQNNNRASFSQYGAGLDIVAPGVNVQSTYPGSTYASLNGTSMATPHVAGAAALVKQKNPSWSNVQIRNHLKNTATSLGSTNLYGSGLVNAEAATR

SEQ ID NO: 54206 - protein, 269 aa, Unidentified
AQSVPWGISRVQAPAAHNRGLAGSGVKVAVLDTGISTHPDLNIRGGASFVPGEPSTQDGNGHGTHVAGTIAALNNSIGVLGVAPSAELYAVKVLGASGSGSVSSIAQGLEWAGNNGMHVANLSLGSPSPSATLEQAVNSATSRGVLVVAASGNSGAGSIDYPARYANAMAVGATDQNNNRADFSQYGAGLDIVAPGVNVQSTYPGSTYASLNGTSMATPHVAGAAALVKQKNPSWSNVQIRNHLKNTATSLGSTNLYGSGLVNAEAATR

SEQ ID NO: 54207 - protein, 269 aa, Unidentified
AQSVPWGISRVQAPAAHNRRLTGSGVKVAVLDTGISTHPDLNIRGGASFVPGEPSTQDGNGHGTHVAGTIAALNNDIGVLGVAPSAELYAVKVLGASGSGSVSSIAQGLEWAGNNSMHVANLSLGSPSPSATLEQAVNSATSRGVLVVAASGNSGAGSISYPARYANAMAVGATDQNNNRASFSQYGAGLDIVAPGVNVQSTYPGSTYASLNGTSMATPHVAGAAALVKQKNPSWSNVQIRNHLKNTATSLGSTNLYGSGLVNAEAATR

SEQ ID NO: 54208 - protein, 269 aa, Unidentified
AQVVPWGISRVQAPAAHNRGLTGSGVKVAVLDTGISTHPDLNIRGGASFVPGEPSTQDGNGHGTHVAGTIAALNNDIGVLGVAPSAELYAVKVLGASGSGSVSSIAQGLEWAGNNGMHVANLSLGSPSPSATLEQAVNSATSRGVLVVAASGNSGAGSISYPARYANAMAVGATDQNNNRASFSQYGAGLDIVAPGVNVQSTYPGSTYASLNGTSMQTPHVAGAAALVKQKNPSWSNVQIRNHLKNTATSLGSTNLYGSGLVNAEAATR

SEQ ID NO: 54209 - protein, 269 aa, Unidentified
AQSVPWGISRVQAPAAHNRGLTGSGVKVAVLDTGISTHPDLNIRGGASFVPGEPSTQDGNGHGTHVAGTIAALNNSIGVLGVAPSAELYAVKVLGASGSGSVSSIADGLEWAGNNGMHVANLSLGSPSPSATLEQAVNSATSRGVLVVAASGNSGAGSISYPARYANAMAVGATDQNNNRADFSQYGAGLDIVAPGVNVQSTYPGSTYASLNGTSMATPHVAGAAALVKQKNPSWSNVQIRRHLKNTATSLGSTNLYGSGLVNAEAATR

SEQ ID NO: 54210 - protein, 269 aa, Unidentified
AQSVPWGISRVQAPAAHNRGLTGRGVKVAVLDTGISTHPDLNIRGGASFVPGEPSTQDGNGHGTHVAGTIAALNNGIGVLGVAPSAELYAVKVLGASGSGSVSSIAQGLEWAGNNDMHVANLSLGSPSPSATLEQAVNSATSRGVLVVAASGNSGAGSISYPARYANAMAVGATDQNNNRASFSQYGAGLDIVAPGVNVQSTYPGSTYASLNGTSMATPHVAGAAALVKQKNPSWSNVQIRNHLKNTATSLGSTNLYGSGLVNAEAATR

SEQ ID NO: 54211 - protein, 269 aa, Unidentified
AQSVPWGISRVQAPAAHNRGLTGSGVKVAVLDSGISTHPDLNIRGGASFVPGEPSTQDGEGHGTHVAGTIAALNNSIGVLGVAPSAELYAVKVLGASGSGSVSSIAQGLEWAGNNRMHVANLSLGSPSPSATLEQAVNSATSRGVLVVAASGNSGAGSISYPARYANAMAVGATDQNNNRASFSQYGAGLDIVAPGVNVQSTYPGSTYASLNGTSMATPHVAGAAALVKQKNPSWSNVQIRNHLKNTATSLGSTNLYGSGLVNAEAATR

SEQ ID NO: 54212 - protein, 269 aa, Unidentified
AQSVPWGISRVQAPAAHNRGLTGSGVKVAVLDTGISTHPDLNIRGGASFVPGEPSTQDGNGHGTHVAGTIAALNNSIGVLGVAPSAELYAVKVLPAGGSGGVSSIAQGLEWAGNNGMHVANLSLGSPSPSATLEQAVNSATSRGVLVVAASGNSGAGSISYPARYANAMAVGATDQNNNRASFSQYGAGLDIVAPGVNVQSTYPGSTYASLNGTSMATPHVAGAAALVKQKNPSWSNVQIRNHLKNTATSLGSTNLYGSGLVNAEAATR

SEQ ID NO: 54213 - protein, 269 aa, Unidentified
AQSVPWGISRVQAPAAHNRRLTGSGVKVAVLDTGISTHPDLRIRGGASFVPGEPSTQDGNGHGTHVAGTIAALNNSIGVLGVAPSAELYAVKVLGASGSGSVSSIAQGLEWAGNNGMHVANLSLGSPSPSATLEQAVNSATSRGVLVVAASGNSGAGSISYPARYANAMAVGATDQNNNRASFSQYGAGLDIVAPGVNVQSTYPGSTYASLNGTSMATPHVAGAAALVKQKNPSWSNVQIRNHLKNTATSLGSTNLYGSGLVNAAAATR

SEQ ID NO: 54214 - protein, 269 aa, Unidentified
AQSVPWGISRVQAPAAHNRGLTGSGVKVAVLDTGISTHPDLNIRGGASFVPGEPSTQDGNGHGTHVAGTIAALNNSIGVLGVAPSAELYAVKVLGASGSGAISSIAQGLEWAGNNGMHVANLSLGSPSPSATLEQAVNSATSRGVLVVAASGNSGAGSISYPARYANAMAVGATDQNNNRASFSQYGAGLDIVAPGVNVQSTYPGSTYASLNGTSMATPHVTGAAALVKQKNPSWSNVQIRNHLKNTATSLGSTNLYGSGLVNAEAATR

SEQ ID NO: 54215 - protein, 269 aa, Unidentified
AQVVPWGISRVQAPAAHNRGLTGSGVKVAVLDTGISTHPDLNIRGGASFVPGEPSTQDGNGHGTHVAGTIAALNNDIGVLGVAPSAELYAVKVLGASGSGSVSSIAQGLEWAGNNGMHVANLSLGSPSPSATLEQAVNSATSRGVLVVAASGNSGAGSISYPARYANAMAVGATDQNNNRASFSQYGAGLDIVAPGVNVQSTYPGSTYASLNGTSMATPHVAGAAALVKQKNPSWSNVQIRNHLKNTATSLGSTNLYGPGLVNAEAATR

SEQ ID NO: 54216 - protein, 269 aa, Unidentified
AQSVPWGISRVQAPAAHNRGLTGSGVKVAVLDTGISTHPDLNIRGGASFVPGEPSTQDGNGHGTHVAGTIAALNNSIGVLGVAPSAELYAVKVLGASGSGSVSSIAQGLEWAGNNGMHVANLSLGNPSPSATLEQAVNSATSRGVLVVAASGNSGEGSISYPARYANAMAVGATDQNNNRASFSQYGAGLDIVAPGVNVQSTYPGSTYASLNGTSMATPHVAGAAALVKQKNPSWSNVQIRNRLKNTATSLGSTNLYGSGLVNAEAATR

SEQ ID NO: 54217 - protein, 269 aa, Unidentified
AQSVPWGISRVQAPAAHRRGLTGRGVKVAVLDTGISTHPDLNIRGGASFVPGEPSTQDGNGHGTHVAGTIAALNNSIGVLGVAPSAELYAVKVLGASGSGSVSSIAQGLEWAGNNGMHVANLSLGSPSPSATLEQAVNSATSRGVLVVAASGNSGAGSISYPARYANAMAVGATDQNNNRASFSQYGAGLDIVAPGVNVQSTYPGSTYASLNGTSMATPHVAGAAALVKQKNPSWSNVRIRNHLKNTATSLGSTNLYGSGLVNAEAATR

SEQ ID NO: 54218 - protein, 270 aa, Unidentified
AQSVPWGISRVQAPAAHNRGLTGSGVKVAVLDTGISTHPDLNIRGGASFVPGEPSTQDGNGHGTHVAGTIAALDNSIGVLGVAPSAELYAVKVLGAXSGSGAISSIAQGLEWAGNNGMHVANLSLGSPSPSATLEQAVNSATSRGVLVVAASGNSGAGSISYPARYANAMAVGATDQNNNRASFSQYGAGLDIVAPGVNVQSTYPGSTYASLNGTSMATPHVAGAAALVKQKNPSWSNVQIRNHLKNTATSLGSTNLYGSGLVNAEAATR

SEQ ID NO: 54219 - protein, 269 aa, Unidentified
AQSVPWGISRVQAPAAHNRRLTGSGVKVAVLDTGISTHPDLRIRGGASFVPGEPSTQDGNGHGTHVAGTIAALDNSIGVLGVAPSAELYAVKVLGASGSGSVSSIAQGLEWAGNNGMHVANLSLGSPSPSATLEQAVNSATSRGVLVVAASGNSGAGSISYPARYANAMAVGATDQNNNRASFSQYGAGLDIVAPGVNVQSTYPGSTYASLNGTSMATPHVAGAAALVKQKNPSWSNVQIRNHLKNTATSLGSTNLYGSGLVNAEAATR

SEQ ID NO: 54220 - protein, 269 aa, Unidentified
AQQVPWGISRVQAPAAHNRGLTGSGVKVAVLDTGISTHPDLNIRGGASFVPGEPSTQDGNGHGTHVAGTIAALNNDIGVLGVAPSAELYAVKVLGASGSGSVSSIAQGLEWAGNNGMHVANLSLGSPSPSATLEQAVNSATSRGVLVVAASGNSGAGSISYPARYANAMAVGATDQNNNRASFSQYGAGLDIVAPGVNVQSTYPGSTYAILNGTSMATPHVAGAAALVKQKNPSWSNVQIRNHLKNTATSLGSTNLYGSGLVNAEAATR

SEQ ID NO: 54221 - protein, 269 aa, Unidentified
AQSVPWGISRVQAPAAHNRGLTGSGVKVAVLDTGISTHPDLNIRGGASFVPGEPSTQDGNGHGTHVAGTIAALNNSIGVLGVAPSAELYAVKVLPAAGSGAVSSIAQGLEWAGNNGMHVANLSLGSPSPSATLEQAVNSATSRGVLVVAASGNSGAGSISYPARYANAMAVGATDQNNNRASFSQYGAGLDIVAPGVNVQSTYPGSTYASLNGTSMATPHVAGAAALVKQKNPSWSNVQIRNHLKNTATSLGSTNLYGSGLVNAEAATR

SEQ ID NO: 54222 - protein, 269 aa, Unidentified
AQSVPWGISRVQAPAAHNRKLTGSGVKVAVLDTGISTHPDLNIRGGASFVPGEPSTQDGNGHGTHVAGTIAALNNSIGVLGVAPSAELYAVKVLGASGSASVSSIAQGLEWAGNNGMHVANLSLGSPSPSATLEQAVNSATSRGVLVVAASGNSGAGSISYPARYANAMAVGATDQNNNRASFSQYGAGLDIVAPGVNVQSTYPGSTYASENGTSMATPHVAGAAALVKQKNPSWSNVQIRNHLKNTATSLGSTNLYGSGLVNAEAATR

SEQ ID NO: 54223 - protein, 269 aa, Unidentified
AQSVPWGISRVQAPAAHNRGLTGSGVKVAVLDTGISTHPDLNIRGGASFVPGEPSTQDGNGHGTHVAGTIAALNNSIGVLGVAPNAELYAVKVLGASGSGSLSSIAQGLEWAGNNGMHVANLSLGSPSPGATLEQAVNSATSRGVLVVAASGNSGAGSISYPARYANAMAVGATDQNNNRASFSQYGAGLDIVAPGVNVQSTYPGSTYASLNGTSMATPHVAGAAALVKQKNPSWSNVQIRNHLKNTATSLGSTNLYGSGLVNAEAATR

SEQ ID NO: 54224 - protein, 269 aa, Unidentified
AQSVPWGISRVQAPAAHNRGLTGSGVKVAVLDTGISTHPDLNIRGGASFVPGEPSTQDGNGHGTHVAGTIAALNNSIGVLGVAPNAELYAVKVLGASGSGSNSSIAQGLEWAGNNGMHVANLSLGSPSPSATLEQAVNSATSRGVLVVAASGNSGAGSISYPAYYANAMAVGATDQNNNRASFSQYGAGLDIVAPGVNVQSTYPGSTYASLNGTSMATPHVAGAAALVKQKNPSWSNVQIRNHLKNTATSLGSTNLYGSGLVNAEAATR

SEQ ID NO: 54225 - protein, 269 aa, Unidentified
AQSVPWGISRVQAPAAHRRGLTGSGVKVAVLDTGISTHPDLNIRGGASFVPGEPSTQDGNGHGTHVAGTIAALDNSIGVLGVAPSAELYAVKVLGASGSGSVSSIAQGLEWAGNNGMHVANLSLGSPSPSATLEQAVNSATSRGVLVVAASGNSGAGSISYPARYANAMAVGATDQNNNRASFSQYGAGLDIVAPGVNVQSTYPGSTYASLNGTSMATPHVAGAAVLVKQKNPSWSNVQIRNHLKNTATSLGSTNLYGSGLVNAEAATR

SEQ ID NO: 54226 - protein, 269 aa, Unidentified
AQSVPWGISRVQAPAAHNRGLTGSGVKVAVLDTGISTHPDLNIRGGASFVPGEPSTQDGNGHGTHVAGTIAALNNSIGVLGVAPSAELYAVKVLGASGSGAVSSIAQGVEWAGNNGMHVANLSLGSPSPSATLEQAVNSATSRGVIVVAASGNSGAGSISYPARYANAMAVGATDQNNNRASFSQYGAGLDIVAPGVNVQSTYPGSTYASLNGTSMATPHVAGAAALVKQKNPSWSNVQIRNHLKNTATSLGSTNLYGSGLVNAEAATR

SEQ ID NO: 54227 - protein, 269 aa, Unidentified
AQSVPWGISRVQAPAAHNRGLTGSGVKVAVLDTGISTHPDLNIRGGASFVPGEPSTQDGNGHGTHVAGTIAALNNSIGVLGVAPSAELYAVKVLGASGSGGVSSIAQGLEWAGNNGMHVANLSLGNPSPSATLEQAVNSATSRGVIVVAASGNSGAGSISYPARYANAMAVGATDQNNNRASFSQYGAGLDIVAPGVNVQSTYPGSTYASLNGTSMATPHVAGAAALVKQKNPSWSNVQIRNHLKNTATSLGSTNLYGSGLVNAEAATR

SEQ ID NO: 54228 - protein, 269 aa, Unidentified
AQSVPWGISRVQAPAAHNRGLTGSGVKVAVLDTGISTHPDLNIRGGASFVPGEPSTQDGNGHGTHVAGTIAALNNSIGVLGVAPSAELYAVKVLGASGSAGISSIAQGLEWAGNNGMHVANLSLGSPSPSATLEQAVNSATSRGVLVVAASGNSGAGSISYPARYANAMAVGATDQNNNRASFSQYGAGLDIVAPGVNVQSTYPGSTYASLNGTSMATPHVAGAAALVKQKNPSWSNVQIRNHLKNTATSLGSTNLYGSGLVNAEAATR

SEQ ID NO: 54229 - protein, 269 aa, Unidentified
AQSVPWGISRVQAPAAHNRGLAGSGVKVAVLDTGISTHPDLNIRGGASFVPGEPSTQDGEGHGTHVAGTIAALNNSIGVLGVAPSAELYAVKVLGASGSGSVSSIAQGLEWAGNNGMHVANLSLGIPSPSATLEQAVNSATSRGVLVVAASGNSGAGSISYPARYANAMAVGATDQNNNRASFSQYGAGLDIVAPGVNVQSTYPGSTYASLNGTSMATPHVAGAAALVKQKNPSWSNVQIRNHLKNTATSLGSTNLYGSGLVNAEAATR

SEQ ID NO: 54230 - protein, 269 aa, Unidentified
AQSVPWGISRVQAPAAHNRGLTGSGVKVAVLDTGISTHPDLNIRGGASFVPGEPSTQDGNGHGTHVAGTIAALNNSIGVLGVAPSAELYAVKVLAASGNGSVSSIAQGLEWAGNNGMHVANLSLGAPSPSATLEQAVNSATSRGVLVVAASGNSGAGSISYPARYANAMAVGATDQNNNRASFSQYGAGLDIVAPGVNVQSTYPGSTYASLNGTSMATPHVAGAAALVKQKNPSWSNVQIRNHLKNTATSLGSTNLYGSGLVNAEAATR

SEQ ID NO: 54231 - protein, 269 aa, Unidentified
AQSVPWGISRVQAPAAHNRGLTGSGVKVAVLDTGISTHPDLNIRGGASFVPGEPSTQDGNGHGTHVAGTIAALNNDIGVLGVAPSAELYAVKVLGASGSGSVSSIAQGLEWAGNNGMHVANLSLGSPSPSATLEQAVNSATSRGVLVVAASGNSGAGSISYPARYQNAMAVGATDQNNNRASFSQYGAGLDIVAPGVNVQSTYPGSTYASLNGTSMASPHVAGAAALVKQKNPSWSNVQIRNHLKNTATSLGSTNLYGSGLVNAEAATR

SEQ ID NO: 54232 - protein, 269 aa, Unidentified
AQSVPWGISRVQAPAAHNRRLTGSGVKVAVLDTGISTHPDLRIRGGASFVPGEPSTQDGNGHGTHVAGTIAALNNSIGVLGVAPSAELYAVKVLGASGSGSVSSIAQGLEWAGNNGMHVANLSLGSPSPSATLEQAVNSATSRGVLVVAASGNSGAGSISYPARYANAMAVGATDQNNNRASFSQYGAGLDIVAPGVNVQSTYPGSTYASLNGTSMATPHVAGAAALVKQKNPSWSNVQIRNHLKNTATSLGSTNLYGSGNVNAEAATR

SEQ ID NO: 54233 - protein, 269 aa, Bacillus sp.
AQSVPWGISRVQAPAAHNRGLTGSGVKVAVLDTGISTHPDLNIRGGASFVPGEPSTQDGNGHGTHVAGTIAALNNSIGVLGVAPNAELYAVKVLGASGSGSVSSIAQGLEWAGNNGLDVANLSLGSPSPSATLEQAVNSATSRGVLVVAASGNSGAGSISYPARYANAMAVGATDQNNNRASFSQYGAGLDIVAPGVNVQSTYPGSTYASLNGTSMATPHVAGAAALVKQKNPSWSNVQIRNHLKNTATSLGSTNLYGSGLVNAEAATR

SEQ ID NO: 54234 - protein, 269 aa, Unidentified
AQSVPWGISRVQAPAAHNRGLTGSGVKVAVLDTGISTHPDLNIRGGASFVPGEPSTQDGNGHGTHVAGTIAALNNSIGVLGVAPSAELYAVKVLGASGAGSISSIAQGVEWAGNNGMHVANLSLGSPSPSATLEQAVNSATSRGVLVVAASGNSGAGSISYPARYANAMAVGATDQNNNRASFSQYGAGLDIVAPGVNVQSTYPGSTYASLNGTSMATPHVAGAAALVKQKNPSWSNVQIRNHLKNTATSLGSTNLYGSGLVNAEAATR

SEQ ID NO: 54235 - protein, 269 aa, Unidentified
AQSVPWGISRVQAPAAHNRGLTGSGVKVAVLDTGISTHPDLNIRGGASFVPGEPSTQDGNGHGTHVAGTIAALNNSIGVLGVAPRAELYAVKVLGASGSGSVSSIAQGLEWAGNNGMHVANLSLGSPSPSATLEQAVNSATSRGVLVVAASGNSGAGSISYPARYANAMAVGATDQNNNRADFSQYGAGLDIVAPGVNVQSTYPGSTYASLNGTSMATPHVAGAAALVKQKNPSWSNVQIRDHLKNTATSLGSTNLYGSGLVNAEAATR

SEQ ID NO: 54236 - protein, 269 aa, Unidentified
AQSVPWGISRVQAPAAHNRGLTGSGVKVAVLDTGISTHPDLNIRGGASFVPGEPSTQDGNGHGTHVAGTIAALNNSIGVLGVAPSAELYAVKVLGQGSSGSVSSIAQGLEWAGNNGMHVANLSLGSPSPSATLEQAVNSATSRGVLVVAASGNSGAGSISYPARYANAMAVGATDQNNNRASFSQYGAGLDIVAPGVNVQSTYPGSTYASLNGTSMATPHVAGAAALVKQKNPSWSNVQIRNHLKNTATSLGSTNLYGSGLVNAEAATR

SEQ ID NO: 54237 - protein, 269 aa, Unidentified
AQSVPWGISRVQAPAAHNRGLTGRGVKVAVLDTGISTHPDLNIRGGASFVPGEPSTQDGNGHGTHVAGTIAALNNSIGVLGVAPSAELYAVKVLGASGSGSVSSIAQGLEWAGNNGMHVANLSLGSPSPSATLEQAVNSATSRGVLVVAASGNSGAGSISYPARYANAMAVGATDQNNNRADFSQYGAGLDIVAPGVNVQSTYPGSTYASLNGTSMATPHVAGAAALVKQKNPSWSNVQIRDHLKNTATSLGSTNLYGSGLVNAEAATR

SEQ ID NO: 54238 - protein, 269 aa, Synthetic construct
AQSVPWGISRVQAPAAHNRGLTGSGVKVAVLDTGISTHPDLNIRGGASFVPGEPSTQDGNGHGTHVAGTIAALNNSIGVLGVAPSAELYAVKVLGASGSGSVSSIAQGLEWAGNNGMHVANLSLGSPSPSATLEQAVNSATSRGVLVVAASGNSGAGSISYPARYANAMAVGATDQNNNRTSHSDYGAGLDIVAPGVNVQSTYPGSTYASLNGTSMATPHVAGAAALVKQKNPSWSNVQIRNHLKNTATSLGSTNLYGSGLVNAEAATR

SEQ ID NO: 54239 - protein, 269 aa, Unidentified
AQSVPWGISRVQAPAAHNRRLRGSGVKVAVLDTGISTHPDLNIRGGASFVPGEPSTQDGNGHGTHVAGTIAALNNSIGVLGVAPSAELYAVKVLGASGSGSVSSIAQGLEWAGNNGMHVANLSLGSPSPSATLEQAVNSATSRGVLVVAASGNSGAGSISYPARYANAMAVGATDQNNNRASFSQYGAGLDIVAPGVNVQSTYPGSTYASLNGTSMATPHVAGAAALVKQKNPSWRNVQIRNHLKNTATSLGSTNLYGSGLVNAEAATR

SEQ ID NO: 54240 - protein, 269 aa, Unidentified
AQSVPWGISRVQAPAAHNRGLTGSGVKVAVLDTGISTHPDLNIRGGASFVPGEPSTQDGNGHGTHVAGTIAALNNSIGVLGVAPSAELYAVKVLGASGSGSVSSIAQGIEWAGNNGMHVANLSLGSPSPSATLEQAVNSATSRGVLVVAASGNSGAGSISYPARYANAMAVGATDQNNNRASFSQYGAGLDIVAPGVNVQSTYPGSTYFSLNGTSMATPHVAGAAALVKQKNSSWSNVQIRNHLKNTATSLGSTNLYGSGLVNAEAATR

SEQ ID NO: 54241 - protein, 269 aa, Unidentified
AQSVPWGISRVQAPAAHNRGLTGSGVKVAVLDTGISTHPDLNIRGGASFVPGEPSTQDGNGHGTHVAGTIAALNNSIGVLGVAPSAELYAVKVLGASGDGSVSSIAQGLEWAGNNGMHVANLSLGSPSPSATLEQAVNSATSRGVLVVAASGNSGAGSISYPARYANAMAVGATDQNNNRASFSQYGAGLDIVAPGVNVQSTYPGSTYASLNGTSMATPHVAGAAALVKQKNPRWSNVQIRNHLKNTATSLGSTNLYGSGLVNALAATR

SEQ ID NO: 54242 - protein, 269 aa, Unidentified
AQVVPWGISRVQAPAAHNRGLTGSGVKVAVLDTGISTHPDLNIRGGASFVPGEPSTQDGNGHGTHVAGTIAALNNSIGVLGVAPSADLYAVKVLGASGSGSVSSIAQGLEWAGNNGMHVANLSLGSPSPSATLEQAVNSATSRGVLVVAASGNSGAGSISYPARYANAMAVGATDQNNNRASFSQYGAGLDIVAPGVNVQSTYPGSTYASLNGTSMATPHVAGAAALVKQKNPSWSNVQIRNHLKNTDTSLGSTNLYGSGLVNAEAATR

SEQ ID NO: 54243 - protein, 269 aa, Unidentified
AQSVPWGISRVQAPAAHNRGLTGSGVKVAVLDSGISTHPDLNIRGGASFVPGEPSTQDGNGHGTHVAGTIAALNNSIGVLGVAPSAELYAVKVLGASGSGSVSSIAQGLEWAGNNGMHVANLSLGIPSPSATLEQAVNSATSRGVLVVAASGNSGAGSISYPARYANAMAVGATDQNNNRADFSQYGAGLDIVAPGVNVQSTYPGSTYASLNGTSMATPHVAGAAALVKQKNPSWSNVQIRNHLKNTATSLGSTNLYGSGLVNAEAATR

SEQ ID NO: 54244 - protein, 269 aa, Unidentified
AQSVPWGISRVQAPAAHNRGLTGSGVKVAVLDTGISTHPDLNIRGGASFVPGEPSTQDGNGHGTHVAGTIAALNNSIGVLGVAPSAELYAVKVLGASGGGSVSSIAQGLEWAGNNGMHVANLSLGSPSPSATLEQAVNSATSRGVLVVAASGNSGAGSISYPARYANAMAVGATDQNNNRADFSQYGAGLDIVAPGVNVQSTYPGSTYASQNGTSMATPHVAGAAALVKQKNPSWSNVQIRNHLKNTATSLGSTNLYGSGLVNAEAATR

SEQ ID NO: 54245 - protein, 269 aa, Unidentified
AQSVPWGISRVQAPAAHNRGLTGSGVKVAVLDTGISTHPDLNIRRGASFVPGEPSTQDGNGHGTHVAGTIAALNNSIGVLGVAPSAELYAVKVLGASGSGSVSSIAQGLEWAGNNGMHVANLSLGSPSPSATLEQAVNSATSRGVLVVAASGNSGAGSISYPARYANAMAVGATDQDNNRASFSQYGAGLDIVAPGVNVQSTYPGSTYASLNGTSMATPHVAGAAALVKQKLPSWSNVQIRNHLKNTATSLGSTNLYGSGLVNAEAATR

SEQ ID NO: 54246 - protein, 269 aa, Unidentified
AQSVPWGISRVQAPAAHNRRLWGSGVKVAVLDTGISTHPDLNIRGGASFVPGEPSTQDGNGHGTHVAGTIAALNNRIGVLGVAPSAELYAVKVLGASGSGSVSSIAQGLEWAGNNGMHVANLSLGSPSPSATLEQAVNSATSRGVLVVAASGNSGAGSISYPARYANAMAVGATDQNNNRASFSQYGAGLDIVAPGVNVQSTYPGSTYASLNGTSMATPHVAGAAALVKQKNPSWSNVQIRNHLKNTATSLGSTNLYGSGLVNAEAATR

SEQ ID NO: 54247 - protein, 269 aa, Unidentified
AQSVPWGISRVQAPAAHNRGLTGSGVKVAVLDTGISTHPDLNIRGGASFVPGEPSTQDGNGHGTHVAGTIAALNNSIGVLGVAPSAELYAVKVLGAGGSASISSIAQGLEWAGNNGMHVANLSLGSPSPSATLEQAVNSATSRGVLVVAASGNSGAGSISYPARYANAMAVGATDQNNNRASFSQYGAGLDIVAPGVNVQSTYPGSTYASLNGTSMATPHVAGAAALVKQKNPSWSNVQIRNHLKNTATSLGSTNLYGSGLVNAEAATR

SEQ ID NO: 54248 - protein, 269 aa, Unidentified
AQSVPWGISRVQAPAAHNRRLTGSGVKVAVLDTGISTHPDLRIRGGASFVPGEPSTQDGNGHGTHVAGTIAALNNSIGVLGVAPSAELYAVKVLGASGSGSVSSIAQGLEWAGNNGMHVANLSLGSPSPSATLEQAVNSATSRGVLVVAASGNSGAGSISYPARYANAMAVGATDQNNNRASFSQYGAGLDIVAPGVNVQSTYPGSTYASLNGTSMATPHVAGAAALVKQKNPSWSNRQIRNHLKNTATSLGSTNLYGSGLVNAEAATR

SEQ ID NO: 54249 - protein, 269 aa, Unidentified
AQSVPWGISRVQAPAAHNRGLTGSGVKVAVLDTGISTHPDLNIRGGASFVPGEPSTQDGEGHGTHVAGTIAALNNSIGVLGVAPSAELYAVKVLGASGSGSVSSIAQGLEWAGNNRMHVANLSLGSPSPSATLEQAVNSATSRGVLVVAASGNSGAGSIDYPARYANAMAVGATDQNNNRASFSQYGAGLDIVAPGVNVQSTYPGSTYASLNGTSMATPHVAGAAALVKQKNPSWSNVQIRNHLKNTATSLGSTNLYGSGLVNAEAATR

SEQ ID NO: 54250 - protein, 269 aa, Unidentified
AQSVPWGISRVQAPAAHNRGLTGSGVKVAVLDTGISTHPDLNIRGGASFVPGEPSTQDGNGHGTHVAGTIAALNNSIGVLGVAPSAELYAVKVLPFSGSGSLSSIAQGLEWAGNNGMHVANLSLGSPSPSATLEQAVNSATSRGVLVVAASGNSGAGSISYPARYANAMAVGATDQNNNRASFSQYGAGLDIVAPGVNVQSTYPGSTYASLNGTSMATPHVAGAAALVKQKNPSWSNVQIRNHLKNTATSLGSTNLYGSGLVNAEAATR

SEQ ID NO: 54251 - protein, 269 aa, Unidentified
AQVVPWGISRVQAPAAHNRGLTGSGVKVAVLDTGISTHPDLNIRGGASFVPGEPSTQDGNGHGTHVAGTIAALNNSIGVLGVAPSAELYAVKVLGASGSGSVSSIAQGLEWAGNNGMRVANLSLGSPSPSATLEQAVNSATSRGVLVVAASGNSGAGSISYPARYANAMAVGATDQNNNRASFSQYGAGLDIVAPGVNVQSTYPGSTYASLNGTSMASPHVAGAAALVKQKNPSWSNVQIRNHLKNTATSLGSTNLYGSGLVNAEAATR

SEQ ID NO: 54252 - protein, 269 aa, Unidentified
AQSVPWGISRVQAPAAHNRRLTGSGVKVAVLDTGISTHPDLNIRGGASFVPGEPSTQDGNGHGTHVAGTIAALNNSIGVLGVAPSAELYAVKVLGASGSGSVSSIAQGLEWAGNNGMHVANLSLGSPSPSATLEQAVNSATSRGVLVVAASGNSGADSISYPARYANAMAVGATDQNNNRADFSQYGAGLDIVAPGVNVQSTYPGSTYASLNGTSMATPHVAGAAALVKQKNPSWSNVQIRNHLKNTATSLGSTNLYGSGLVNAEAATR

SEQ ID NO: 54253 - protein, 269 aa, Unidentified
AQSVPWGISRVQAPAAHNRGLAGSGVKVAVLDTGISTHPDLNIRGGASFVPGEPSTQDGNGHGTHVAGTIAALNNSIGVLGVAPSAELYAVKVLGASGSGSLSSIAQGLEWAGNNGMHVANLSLGSPSPSATLEQAVNSATSRGVIVVAASGNSGAGSISYPARYANAMAVGATDQNNNRASFSQYGAGLDIVAPGVNVQSTYPGSTYASLNGTSMATPHVAGAAALVKQKNPSWSNVQIRNHLKNTATSLGSTNLYGSGLVNAEAATR

SEQ ID NO: 54254 - protein, 269 aa, Unidentified
AQSVPWGISRVQAPAAHNRGLTGSGVKVAVLDSGISTHPDLNIRGGASFVPGEPSTQDGNGHGTHVAGTIAALNNSIGVLGVAWSAELYAVKVLGASGSGSVSSIAQGLEWAGNNRMHVANLSLGSPSPSATLEQAVNSATSRGVLVVAASGNSGAGSISYPARYANAMAVGATDQNNNRASFSQYGAGLDIVAPGVNVQSTYPGSTYASLNGTSMATPHVAGAAALVKQKNPSWSNVQIRNHLKNTATSLGSTNLYGSGLVNAEAATR

SEQ ID NO: 54255 - protein, 269 aa, Unidentified
AQSVPWGISRVQAPAAHNRRLTGSGVKVAVLDTGISTHPDLNIRGGASFVPGEPSTQDGNGHGTHVAGTIAALNNSIGVLGVAPSAELYAVKVLGASGAGSVSSIAQGLEWAGNNGMHVANLSLGSPSPSATLEQAVNSATSRGVLVVAASGNSGAGSISYPARYANAMAVGATDQNNNRASFSQYGAGLDIVAPGVNVQSTYPGSAYASLNGTSMATPHVAGAAALVKQKNPSWSNVQIRNHLKNTATSLGSTNLYGSGLVNAEAATR

SEQ ID NO: 54256 - protein, 269 aa, Unidentified
AQSVPWGISRVQAPAAHNRGLTGSGVKVAVLDTGISTHPDLNIRGGASFVPGEPSTQDGNGHGTHVAGTIAALNNSIGVLGVAWSAELYAVKVLGASGSGSVSSIAQGLEWAGNNRMHVANLSLGSPSPSVTLEQAVNSATSRGVLVVAASGNSGAGSISYPARYANAMAVGATDQNNNRASFSQYGAGLDIVAPGVNVQSTYPGSTYASLNGTSMATPHVAGAAALVKQKNPSWSNVQIRNHLKNTATSLGSTNLYGSGLVNAEAATR

SEQ ID NO: 54257 - protein, 269 aa, Unidentified
AQSVPWGISRVQAPAAHNRGLTGSGVKVAVLDTGISTHPDLNIRGGASFVPGEPSTQDGNGHGTHVAGTIAALNNSIGVLGVAPSAELYAVKVLGASGSGSVSSIAQGLEWAGNNGMHVANLSLGSPSPSATLEQAVNSATSRGVLVVAASGNSGAGSISYPARYANAMAVGATDQNNNRASFSQYGAGLDIVAPGVNVQSTYPGSTYASLNGTSMATPHVAGAAALVRQRNPSWSNVQIRNHLKNTATSLGSTNLFGSGLVNAEAATR

SEQ ID NO: 54258 - protein, 269 aa, Unidentified
AQSVPWGISRVQAPAAHNRGLTGSGVKVAVLDSGISTHPDLNIRGGASFVPGEPSTQDGNGHGTHVAGTIAALNNSIGVLGVAPSAELYAVKVLGASGSGSVSSIAQGLEWAGNNGMHVANLSLGSPSPSATLEQAVNSATSRGVLVVAASGNSGEGSIDYPARYANAMAVGATDQNNNRASFSQYGAGLDIVAPGVNVQSTYPGSTYASLNGTSMATPHVAGAAALVKQKNPSWSNVQIRNHLKNTATSLGSTNLYGSGLVNAEAATR

SEQ ID NO: 54259 - protein, 269 aa, Unidentified
AQSVPWGISRVQAPAAHNRGLTGSGVKVAILDTGISTHPDLNIRGGASFVPGEPSTQDGNGHGTHVAGTIAALNNSIGVLGVAPSAELYAVKVLGATSSGSVSSIAQGLEWAGNNGMHVANLSLGSPSPSATLEQAVNSATSRGVLVVAASGNSGAGSISYPARYANAMAVGATDQNNNRASFSQYGAGLDIVAPGVNVQSTYPGSTYASLNGTSMATPHVAGAAALVKQKNPSWSNVQIRNHLKNTATSLGSTNLYGSGLVNAEAATR

SEQ ID NO: 54260 - protein, 269 aa, Unidentified
AQVVPWGISRVQAPAAHNRGLTGSGVKVAVLDTGISTHPDLNIRGGASFVPGEPSTQDGNGHGTHVAGTIAALNNDIGVLGVAPSAELYAVKVLGASGSGSVSSIAQGLEWAGNNGMHVANLSLGSPSPSATLEQAVNSATSRGVLVVAASGNSGAGSISYPARYANAMAVGATDQNNNRASFSQYGAGLDIVAPGVNVQSTYPGSTYASLNGTSMASPHVAGAAALVKQKNPSWSNVQIRNHLKNTATSLGSTNLYGSGLVNAEAATR

SEQ ID NO: 54261 - protein, 269 aa, Unidentified
AQSVPWGISRVQAPAAHNRGLTGSGVKVAVLDTGISTHPDLNIRGGASFVPGEPSTQDGNGHGTHVAGTIAALNNSIGVLGVAPSAELYAVKVLGASGSGSVSSIAQGLEWAGLNRMHVANLSLGSPSPSATLEQAVNSATSRGVLVVAASGNSGAGSISYPARYANAMAVGATDQNNNRADFSQYGAGLDIVAPGVNVQSTYPGSTYASLNGTSMATPHVAGAAALVKQKNPSWSNVQIRNHLKNTATSLGSTNLYGSGLVNAEAATR

SEQ ID NO: 54262 - protein, 269 aa, Unidentified
AQSVPWGISRVQAPAAHNRGLTGSGVKVAVLDTGISTHPDLNIRGGASFVPGEPSTQDGNGHGTHVAGTIAALNNSIGVLGVAPSAELYAVKVLPATGSGSISSIAQGLEWAGNNGMHVANLSLGSPSPSATLEQAVNSATSRGVLVVAASGNSGAGSISYPARYANAMAVGATDQNNNRASFSQYGAGLDIVAPGVNVQSTYPGSTYASLNGTSMATPHVAGAAALVKQKNPSWSNVQIRNHLKNTATSLGSTNLYGSGLVNAEAATR

SEQ ID NO: 54263 - protein, 269 aa, Synthetic construct
AQSVPWGISRVQAPAAHNRGLTGSGVKVAVLDTGISTHPDLNIRGGASFVPGEPSTQDGNGHGTHVAGTIAALDNSIGVLGVAPSAELYAVKVLGASGRGSISSIAQGLEWAGNNGMHVANLSLGSPSPSATLEQAVNSATSRGVLVVAASGNSGAGSISYPARYANAMAVGATDQNNNRASFSQYGAGLDIVAPGVNVQSTYPGSTYASLNGTSMATPHVAGAAALVKQKNPSWSNVQIRNHLKNTATSLGSTNLYGSGLVNAEAATR

SEQ ID NO: 54264 - protein, 269 aa, Unidentified
AQSVPWGISRVQAPAAHNRGMTGRGVKVAVLDSGISTHPDLNIRGGASFVPGEPSTQDGNGHGTHVAGTIAALNNSIGVLGVAPSAELYAVKVLGASGSGSVSSIAQGLEWAGNNGMHVANLSLGSPSPSATLEQAVNSATSRGVLVVAASGNSGAGSISYPARYANAMAVGATDQNNNRASFSQYGAGLDIVAPGVNVQSTYPGSTYASLNGTSMATPHVAGAAALVKQKNPSWSNVQIRNHLKNTATSLGSTNLYGSGLVNAEAATR

SEQ ID NO: 54265 - protein, 269 aa, Unidentified
AQSVPWGISRVQAPAAHNRGLTGRGVKVAVLDTGISTHPDLNIRGGASFVPGEPSTQDGNGHGTHVAGTIAALDNSIGVLGVAPSAELYAVKVLGASGSGSVSSIAQGLEWAGNNGMHVANLSLGSPSPSATLEQAVNSATSRGVLVVAASGNSGAGSISYPARYANAMAVGATDQNNNRASFSQYGAGLDIVAPGVNVQSTYPGSTYASLNGTSMATPHVAGAAALVKQKNPSWSNVRIRNHLKNTATSLGSTNLYGSGLVNAEAATR

SEQ ID NO: 54266 - protein, 269 aa, Unidentified
AQSVPWGISRVQAPAAHNRGLTGFGVKVAVLDTGISTHPDLNIRGGASFVPGEPSTQDGNGHGTHVAGTIAALNNSIGVLGVAPSAELYAVKVLGASGSGSVSSIAQGLEWAGNNGMHVANLSLGSPSPSATLEQAVNSATSRGVLVVAASGNSGAGSISYPARYANAMAVGATDQNNNRASFSQYGAGLDIVAPGVNVQSTYPGSAYASENGTSMATPHVAGAAALVKQKNPSWSNVQIRNHLKNTATSLGSTNLYGSGLVNAEAATR

SEQ ID NO: 54267 - protein, 269 aa, Unidentified
AQSVPWGISRVQAPAAHNRGLTGSGVKVAVLDTGISTHPDLNIRRGASFVPGEPSTQDGNGHGTHVAGTIAALNNSIGVLGVAPSAELYAVKVLGASGSGSVSSIAQGLEWAGNNGMHVANLSLGSPSPSATLEQAVNSATSRGVLVVAASGNSGAGSISYPARYANAMAVGATDQNNNRASFSQYGFGLDIVAPGVNVQSTYPGMTYASLNGTSMATPHVAGAAALVKQKNPSWSNVQIRNHLKNTATSLGSTNLYGSGLVNAEAATR

SEQ ID NO: 54268 - protein, 269 aa, Unidentified
AQSVPWGISRVQAPAAHNRGLTGRGVKVAVLDTGISTHPDLNIRGGASFVPGEPSTQDGNGHGTHVAGTIAALNNSIGVLGVASSAELYAVKVLGASGSGSVSSIAQGLEWAGNNGMHVANLSLGSPSPSATLEQAVNGATSRGVLVVAASGNSGAGSISYPARYANAMAVGATDQNNNRASFSQYGAGLDIVAPGVNVQSTYPGSTYASLNGTSMATPHVAGAAALVKQKNPSWSNVQIRNHLKNTATSLGSTNLYGSGLVNAEAATR

SEQ ID NO: 54269 - protein, 269 aa, Unidentified
AQSRPWGISRVQAPAAHNRRLTGSGVKVAVLDTGISTHPDLNIRGGASFVPGEPSTQDGNGHGTHVAGTIAALNNSIGVLGVAPSAELYAVKVLGASGSGSVSSIAQGLEWAGNNGMHVANLSLGSPSPSATLEQAVNSATSRGVLVVAASGNSGAGSISYPARYANAMAVGATDQNNNRASFSQYGAGLDIVAPGVNVQSTYPGSTYASLNGTSMATPHVAGAAALVKQKNPSWSNVQIRNRLKNTATSLGSTNLYGSGLVNAEAATR

SEQ ID NO: 54270 - protein, 269 aa, Synthetic construct
AQSVPWGISRVQAPAAHNRGLTGSGVKVAVLDTGISTHPDLNIRGGASFVPGEPSTQDGNGHGTHVAGTIAALNNSIGVLGVAPSAELYAVKQTGASGEGSVSSIAQGLEWAGNNGMHVANLSLGSPSPSATLEQAVNSATSRGVLVVAASGNSGAGSISYPARYANAMAVGATDQNNNRASFSQYGAGLDIVAPGVNVQSTYPGSTYASLNGTSMATPHVAGAAALVKQKNPSWSNVQIRNHLKNTATSLGSTNLYGSGLVNAEAATR

SEQ ID NO: 54271 - protein, 269 aa, Bacillus sp.
AQSVPWGISRVQAPAAHNRGLTGSGVKVAVLDTGISTHPDLNIRGGASFVPGEPSTQDGNGHGTHVAGTIAALNNSIGVLGVAPNAELYAVKVLGASGSGSVSSIAQGLEWAGNNGMHVANLSLGSPSPSATLEQAVNSATSRGVLVVAASGNSGAGSISYPARYANAMAVGATDQNNNRASFSQYGAGLDIVAPGVNVQSTYPGSTYASYSGTSMATPHVAGAAALVKQKNPSWSNVQIRNHLKNTATSLGSTNLYGSGLVNAEAATR

SEQ ID NO: 54272 - protein, 269 aa, Unidentified
AQSVPWGISRVQAPAAHNRGLTGSGVKVAVLDTGISTHPDLNIRGGASFVPGEPSTQDGNGHGTHVAGTIAALNNSIGVLGVAPSAELYAVKVLGASGSGSNSSIAQGLEWAGNNGMHVANLSLGSPSPSATLEQAVNSATSRGVLVVAASGNSGAGSISYPARYANAMAVGATDQNNNRASFSQYGAGLDIVAPGVGVQSTWPGSTYASLNGTSMATPHVAGAAALVKQKNPSWSNVQIRNHLKNTATSLGSTNLYGSGLVNAEAATR

SEQ ID NO: 54273 - protein, 269 aa, Unidentified
AQSVPWGISRVQAPAAHNRGLTGSGVKVAVLDTGISTHPDLNIRGGASFVPGEPSTQDGNGHGTHVAGTIAALNNSIGVLGVAPSAELYAVKVLGASGSGSVSSIVQGLEWAGNNGMHVANLSLGDPSPSATLEQAVNSATSRGVLVVAASGNSGAGSISYPARYANAMAVGATDQNNNRASFSQYGAGLDIVAPGVNVQSTYPGSAYASLNGTSMATPHVAGAAALVKQKNPSWSNVQIRNHLKNTATSLGSTNLYGSGLVNAEAATR

SEQ ID NO: 54274 - protein, 269 aa, Unidentified
AQSVPWGISRVQAPAAHNRGLTGSGVKVAVLDTGISTHPDLNIRGGASFVPGEPSTQDGNGHGTHVAGTIAALNNSIGVLGVAPNAELYAVKVLGASGSGSVSSIAQGLEWAGNNGMHVANLSLGSPSPSATLEQAVNSATSRGVLVVAASGNSGAGSISYPARYANAMAVGATDQNNNRASFSQYGAGLDIVAPGVNVQSTYPGSTYASXXGTSMATPHVAGAAALVKQKNPSWSNVQIRNHLKNTATSLGSTNLYGSGLVNAEAATR

SEQ ID NO: 54275 - protein, 269 aa, Unidentified
AQSVPWGISRVQAPAAHNRKLTGSGVKVAVLDTGISTHPDLNIRGGASFVPGEPSTQDGNGHGTHVAGTIAALNNSIGVLGVAPSAELYAVKVLGASGSGSVSSIAQGLEWAGNNGMHVANLSLGSPSPSATLEQAVNSATSRGVLVVAASGNSGAGSISYPARYANAMAVGATDQNNNRASFSQYGAGLDIVAPGVNVQSTYPGSTYASENGTSMATPHVAGAAALVKQKNPSWSNVQIRNHLKNTATSLGSTNLYGSGLVNALAATR

SEQ ID NO: 54276 - protein, 270 aa, Unidentified
AQSVPWGISRVQAPAAHNRGLTGSGVKVAVLDTGISTHPDLNIRGGASFVPGEPSTQDGNGHGTHVAGTIAALNNSIGVLGVAPNAELYAVKVLGAXSGGGSNSSIAQGLEWAGNNGMHVANLSLGSPSPSATLEQAVNSATSRGVLVVAASGNSGAGSISYPARYANAMAVGATDQNNNRASFSQYGAGLDIVAPGVNVQSTYPGSTYASLNGTSMATPHVAGAAALVKQKNPSWSNVQIRNHLKNTATSLGSTNLYGSGLVNAEAATR

SEQ ID NO: 54277 - protein, 269 aa, Unidentified
AQSVPWGISRVQAPAAHNRGLTGSGVKVAVLDTGISTHPDLNIRGGASFVPGEPSTQDGNGHGTHVAGTIAALNNSIGVLGVAPDAELYAVKVLGASGSGSVSSIARGLEWAGNNGMHVANLSLGSPSPSATLEQAVNSATSRGVLVVAASGNSGAGSISYPARYANAMAVGATDQNNNRASFSQYGAGLDIVAPGVNVQSTYPGSTYASLNGTSMATPHVAGAAALVKQKNPSWSNVQIRRHLKNTATSLGSTNLYGSGLVNAEAATR

SEQ ID NO: 54278 - protein, 269 aa, Unidentified
AQQVPWGISRVQAPAAHNRGLTGSGVKVAVLDTGISTHPELNIRGGASFVPGEPSTQDGNGHGTHVAGTIAALNNDIGVLGVAPSAELYAVKVLGASGSGSVSSIAQGLEWAGNNGMHVANLSLGSPSPSATLEQAVNSATSRGVLVVAASGNSGAGSISYPARYANAMAVGATDQNNNRASFSQYGAGLDIVAPGVNVQSTYPGSTYASLNGTSMATPHVAGAAALVKQKNPSWSNVQIRNHLKNTATSLGSTNLYGSGLVNAEAATR

SEQ ID NO: 54279 - protein, 269 aa, Unidentified
AQVVPWGISRVQAPAAHNRGLTGSGVKVAVLDTGISTHPDLNIRGGASFVPGEPSTQDGNGHGTHVAGTIAALNNSINVLGVAPSAELYAVKVLGASGSGSVSSIAQGLEWAGNNGMHVANLSMGSPSPSATLEQAVNSATSRGVLVVAASGNSGAGSISYPARYANAMAVGATDQNNNRASFSQYGAGLDIVAPGVNVQSTYPGSTYASLNGTSMATPHVAGAAALVKQKNPSWSNVQIRNHLKNTATSLGSTNLYGSGLVNAEAATR

SEQ ID NO: 54280 - protein, 269 aa, Unidentified
AQSVPWGISRVQAPAAHNRGLTGSGVKVAVLDTGISTHPDLNIRGGASFVPGEPSTQDGNGHGTHVAGTIAALNNSIGVLGVAPSAELYAVKVLPFTGSGSVSSIAQGLEWAGNNGMHVANLSLGSPSPSATLEQAVNSATSRGVLVVAASGNSGAGSISYPARYANAMAVGATDQNNNRASFSQYGAGLDIVAPGVNVQSTYPGSTYASLNGTSMATPHVAGAAALVKQKNPSWSNVQIRNHLKNTATSLGSTNLYGSGLVNAEAATR

SEQ ID NO: 54281 - protein, 269 aa, Unidentified
AQSVPWGISRVQAPAAHNRGLTGSGVKVAVLDTGISTHPDLNIRGGASFVPGEPSTQDGNGHGTHVAGTIAALNNSIGVLGVAPSAELYAVKVLPAGGGGSVSSIAQGLEWAGNNGMHVANLSLGSPSPSATLEQAVNSATSRGVLVVAASGNSGAGSISYPARYANAMAVGATDQNNNRASFSQYGAGLDIVAPGVNVQSTYPGSTYASLNGTSMATPHVAGAAALVKQKNPSWSNVQIRNHLKNTATSLGSTNLYGSGLVNAEAATR

SEQ ID NO: 54282 - protein, 269 aa, Unidentified
AQSVPWGISRVQAPAAHNRKLTGSGVKVAVLDTGISTHPDLNIRGGASFVPGEPSTQDGNGHGTHVAGTIAALNNSIGVLGVAPSAELYAVKVLGASGSGSVSSIAQGLEWAGLNGMHVANLSLGSPSPSATLEQAVNSATSRGVLVVAASGNSGAGSISYPARYANAMAVGATDQNNNRASFSQYGAGLDIVAPGVNVQSTYPGSAYASLNGTSMATPHVAGAAALVKQKNPSWSNVQIRNHLKNTATSLGSTNLYGSGLVNAEAATR

SEQ ID NO: 54283 - protein, 269 aa, Unidentified
AQSVPWGISRVQAPAAHNRRLTGSGVKVAVLDTGISTHPDLRIRGGASFVPGEPSTQDGNGHGTHVAGTIAALNNSIGVLGVAPSAELYAVKVLGASGSGSVSSIAQGLEWTGNNGMHVANLSLGSPSPSATLEQAVNSATSRGVLVVAASGNSGAGSISYPARYANAMAVGATDQNNNRASFSQYGAGLDIVAPGVNVQSTYPGSTYASLNGTSMATPHVAGAAALVKQKNPSWSNVQIRNHLKNTATSLGSTNLYGSGLVNAEAATR

SEQ ID NO: 54284 - protein, 269 aa, Unidentified
AQTIPWGISRVQAPAAHNRGLTGSGVKVAVLDTGISTHPDLNIRGGASFVPGEPSTQDGNGHGTHVAGTIAALNNSIGVLGVAPSAELYAVKVLGASGSGSVSSIAQGLEWAGNNGMHVANLSLGSPSPSATLEQAVNSATSRGVLVVAASGNSGAGSISYPARYANAMAVGATDQNNNRASFSQYGAGLDIVAPGVNIQSTYPGSTYASLNGTSMATPHVAGAAALVKQKNPSWSNVQIRNHLKNTATSLGSTNLYGSGLVNAEAATR

SEQ ID NO: 54285 - protein, 269 aa, Unidentified
AQSVPWGISRVQAPAAHNRGLLGSGVKVAVLDTGISTHPDLNIRGGASFVPGEPSTQDGNGHGTHVAGTIAALNNSIGVLGVAPSAELYAVKVLGASGSGSVSSIAQGLEWAGNNGMHVANLSLGSPSPSATLEQAVNSATSRGVLVVAASGNSGAGSIDYPARYANAMAVGATDQNNNRASFSQYGAGLDIVAPGVNVQSTYPGSAYASLNGTSMATPHVAGAAALVKQKNPSWSNVQIRNHLKNTATSLGSTNLYGSGLVNAEAATR

SEQ ID NO: 54286 - protein, 269 aa, Unidentified
AQSVPWGISRVQAPAAHNRGLAGSGVKVAVLDTGISTHPDLNIRGGASFVPGEPSTQDGNGHGTHVAGTIAALNNSIGVLGVAPSAELYAVKVLGASGSGSVSSIAQGLEWAGNNGMHVANLSLGIPSPSATLEQAVNSATSRGVLVVAASGNSGAGSISYPARYANAMAVGATDQNNNRADFSQYGAGLDIVAPGVNVQSTYPGSTYASLNGTSMATPHVAGAAALVKQKNPSWSNVQIRNHLKNTATSLGSTNLYGSGLVNAEAATR

SEQ ID NO: 54287 - protein, 269 aa, Unidentified
AQSVPWGISRVQAPAAHNRGLTGRGVKVAVLDSGISTHPDLNIRGGASFVPGEPSTQDGNGHGTHVAGTIAALNNSIGVLGVAPSAELYAVKVLGASGSGSVSSIAQGLEWAGNNGMHVANLSLGSPSPSATLEQAVNSATSRGVLVVAASGNSGAGSISYPARYANAMAVGATDQNNNRADFSQYGAGLDIVAPGVNVQSTYPGSTYASLNGTSMATPHVAGAAALVKQKNPSWSNVQIRNHLKNTATSLGSTNLYGSGLVNAEAATR

SEQ ID NO: 54288 - protein, 269 aa, Unidentified
AQVVPWGISRVQAPAAHNRGLTGSGVKVAVLDTGISTHPDLNIRGGASFVPGEPSTQDGNGHGTHVAGTIAALNNSIGVLGVAPSAELYAVKVLGASGSGSVSSIAQGLEWAGNNGMHVANLSLGSPSPSATLEQAVNSATSRGVLVVAASGNSGAGSISYPARYQNAMAVGATDQNNNRASFSQYGAGLDIVAPGVNVQSTYPGSTYASLNGTSMATPHVAGAAALVKQKNPSWSNVQIRNHLKNTATSLGSTNLYGPGLVNAEAATR

SEQ ID NO: 54289 - protein, 269 aa, Unidentified
AQSVPWGISRVQAPAAHNRGLTGSGVKVAVLDTGISTHPDLNIRGGASFVPGEPSTQDGNGHGTHVAGTIAALNNSIGVLGVAPSAELYAVKVLGFSSAGSVSSIAQGLEWAGNNGMHVANLSLGSPSPSATLEQAVNSATSRGVLVVAASGNSGAGSISYPARYANAMAVGATDQNNNRASFSQYGAGLDIVAPGVNVQSTYPGSTYASLNGTSMATPHVAGAAALVKQKNPSWSNVQIRNHLKNTATSLGSTNLYGSGLVNAEAATR

SEQ ID NO: 54290 - protein, 269 aa, Unidentified
AQSVPWGISRVQAPAAHNRGLTGSGVKVAVLDTGISTHPDLNIRGGASFVPGEPSTQDGNGHGTHVAGTIAALNNSIGVLGVAPSAELYAVKVLGASGSGSLSSIAQGLEWAGNNGMHVANLSLGSPSPSATLEQAVNSATSRGVLVVAASGNSGEGSISYPARYANAMAVGATDQNNNRASFSQYGAGLDIVAPGVNVQSTYPGSTYASLNGTSMATPHVAGAAALVKQKNPSWSNVQIRNHLKRTATSLGSTNLYGSGLVNAEAATR

SEQ ID NO: 54291 - protein, 269 aa, Bacillus lentus
AQSVPWGISRVQAPAAHNRGLTGSGVKVAVLDTGISTHPDLNIRGGASFVPGEPSTQDGNGHGTHVAGTIAALNNSIGVLGVAPSAELYAVKVLGASGSGSVSSIAQGLEWAGNNGMHVANLSLGSPSPSATLEQAVNSATSRGVLVVAASGNSGAGSISAPASYANAIAVGATDQNNNRASFSQYGAGLDIVAPGVNVQSTYPGSTYASLNGTSMATPHVAGAAALVKQKNPSWSNVQIRNHLKNTATSLGSTNLYGSGLVNAEAATR

SEQ ID NO: 54292 - protein, 269 aa, Unidentified
AQSVPWGISRVQAPAAHNRGLTGSGVKVAVLDTGISTHPDLNIRGGASFVPGEPSTQDGNGHGTHVAGTIAALNNSIGVLGVAPSAELYAVKVLPATGAGSVSSIAQGLEWAGNNGMHVANLSLGSPSPSATLEQAVNSATSRGVLVVAASGNSGAGSISYPARYANAMAVGATDQNNNRASFSQYGAGLDIVAPGVNVQSTYPGSTYASLNGTSMATPHVAGAAALVKQKNPSWSNVQIRNHLKNTATSLGSTNLYGSGLVNAEAATR

SEQ ID NO: 54293 - protein, 269 aa, Unidentified
AQSVPWGISRVQAPAAHNRGLTGSGVKVAVLDTGISTHPDLNIRGGASFVPGEPSTQDGNGHGTHVAGTIAALDNSIGVLGVAPSAELYAVKVLGASGSGAISSIARGLEWAGNNGMHVANLSLGSPSPSATLEQAVNSATSRGVLVVAASGNSGAGSISYPARYANAMAVGATDQNNNRASFSQYGAGLDIVAPGVNVQSTYPGSTYASLNGTSSATPHVAGAAALVKQKNPSWSNVQIRNHLKNTATSLGSTNLYGSGLVNAEAATR

SEQ ID NO: 54294 - protein, 269 aa, Unidentified
AQSVPWGISRVQAPAAHNRRLTGSGVKAAVLDTGISTHPDLRIRGGASFVPGEPSTQDGNGHGTHVAGTIAALNNSIGVLGVAPSAELYAVKVLGASGSGSVSSIAQGLEWAGNNGMHVANLSLGSPSPSATLEQAVNSATSRGVLVVAASGNSGAGSISYPARYANAMAVGATDQNNNRASFSQYGAGLDIVAPGVNVQSTYPGSTYASLNGTSMATPHVAGAAALVKQKNPSWSNVQIRNHLKNTATSLGSTNLYGSGLVNAEAATR

SEQ ID NO: 54295 - protein, 269 aa, Unidentified
AQSVPWGISRVQAPAAHNRGLTGSGVKVAVLDTGISTHPDLNIRGGASFVPGEPSTQDGNGHGTHVAGTIAALNNSIGVLGVAPNAELYAVKVLGASGSGSVSSIAQGLEWAGNNGMHVANLSLGSPSPSATLEQAVNSATSRGVLVVAASGNSGAGSISYPARYANAMAVGATDQNNNRASFSQYGAGLDIAAPGVNVQSTVPGSTYASLNGTSMATPHVAGAAALVKQKNPSWSNVQIRNHLKNTATSLGSTNLYGSGLVNAEAATR

SEQ ID NO: 54296 - protein, 269 aa, Unidentified
AQSVPWGISRVQAPAAHNRGLTGSGVKVAVLDTGISTHPDLNIRGGASFVPGEPSTQDGNGHGTHVAGTIAALNNSIGVLGVAPSAELYAVKVLGQAGSASVSSIAQGLEWAGNNGMHVANLSLGSPSPSATLEQAVNSATSRGVLVVAASGNSGAGSISYPARYANAMAVGATDQNNNRASFSQYGAGLDIVAPGVNVQSTYPGSTYASLNGTSMATPHVAGAAALVKQKNPSWSNVQIRNHLKNTATSLGSTNLYGSGLVNAEAATR

SEQ ID NO: 54297 - protein, 269 aa, Unidentified
AQSVPWGISRVQAPAAHNRGLTGSGVKVAVLDTGISTHPDLNIRGGASFVPGEPSTQDGNGHGTHVAGTIAALNNSIGVLGVAPSAELYAVKVLGQSGSAGVSSIAQGLEWAGNNGMHVANLSLGSPSPSATLEQAVNSATSRGVLVVAASGNSGAGSISYPARYANAMAVGATDQNNNRASFSQYGAGLDIVAPGVNVQSTYPGSTYASLNGTSMATPHVAGAAALVKQKNPSWSNVQIRNHLKNTATSLGSTNLYGSGLVNAEAATR

SEQ ID NO: 54298 - protein, 269 aa, Unidentified
AQSVPWGISRVQAPAAHNRGLTGGGVKVAVLDTGISTHPDLNIRGGASFVPGEPSTQDGNGHGTHVAGTIAALNNSIGVLGVAPSAELYAVKVLAASGQGSVSSIAQGLEWAGNNGMHVANLSLGSPSPSATLEQAVNSATSRGVLVVAASGNSGAGSISYPARYANAMAVGATDQNNNRADFSQYGAGLDIVAPGVNVQSTYPGSTYASLNGTSSATPHVAGAAALVKQKNPSWSNVQIRNHLKNTATSLGSTNLYGSGLVNAEAATR

SEQ ID NO: 54299 - protein, 269 aa, Unidentified
AQSVPWGISRVQAPAAHNRGLTGSGVKVAVLDTGISTHPDLNIRGGASFVPGEPSTQDGNGHGTHVAGTIAALNNNIGVLGVAPSAELYAVKVLGASGNGSVSSIAGGLEWAGNNGMHVANLSLGAPSPSATLEQAVNSATSRGVLVVAASGNSGAGSISYPARYANAMAVGATDQNNNRASFSQYGAGLDIVAPGVNVQSTYPGSTYASLNGTSSATPHVAGAAALVKQKNPSWSNVQIRNHLKNTATSLGSTNLYGSGLVNAEAATR

SEQ ID NO: 54300 - protein, 269 aa, Unidentified
AQSVPWGISRVQAPAAHNRRLTGSGVKVAVLDTGISTHPDLNIRGGASFVPGEPSTQDGNGHGTHVAGTIAALNNSIGVLGVAPSAELYAVKVLGASGSGSVSSIAQGLEWAGNNGMHVANLSLGSPSPSATLEQAVNSATSRGVLVVAASGNSGAGSISYPARYANAMAVGATDQNNNRASFSQYGAGLDIVAPGVNVQSTYPGSTYASLNGTSMATPHVAGAAVLVKQKNPSWRNVQIRNHLKNTATSLGSTNLYGSGLVNAEAATR

SEQ ID NO: 54301 - protein, 269 aa, Unidentified
AQSVPWGISRVQAPAAHNRGLTGSGVKVAVLDTGISTHPDLNIRGGASFVPGEPSTQDGNGHGTHVAGTIAALNNSIGVLGVAPSAELYAVKVLPFSGAGSVSSIAQGLEWAGNNGMHVANLSLGSPSPSATLEQAVNSATSRGVLVVAASGNSGAGSISYPARYANAMAVGATDQNNNRASFSQYGAGLDIVAPGVNVQSTYPGSTYASLNGTSMATPHVAGAAALVKQKNPSWSNVQIRNHLKNTATSLGSTNLYGSGLVNAEAATR

SEQ ID NO: 54302 - protein, 269 aa, Unidentified
AQSVPWGISRVQAPAAHNRGLTGGGVKVAVLDTGISTHPDLNIRGGASFVPGEPSTQDGNGHGTHVAGTIAALNNNIGVLGVAPSAELYAVKVLGASGGGSVSSIAGGLEWAGNNGMHVANLSLGSPSPSATLEQAVNSATSRGVLVVAASGNSGAGSISYPARYANAMAVGATDQNNNRASFSQYGAGLDIVAPGVNVQSTYPGSTYASLNGTSSATPHVAGAAALVKQKNPSWSNVQIRNHLKNTATSLGSTNLYGSGLVNAEAATR

SEQ ID NO: 54303 - protein, 269 aa, Unidentified
AQSVPWGISRVQAPAAHNRGLTGSGVKVAVLDTGISTHPDLNIRGGASFVPGEPSTQDGNGHGTHVAGTIAALDNSIGVLGVAPSAELYAVKVLGASGSGAISSIAQGLEWAGNNGMHVANLSLGSPSPSATLEQAVNSATSRGVLVVAASGNSGAGSISYPARYARAMAVGATDQNNNRASFSQYGAGLDIVAPGVNVQSTYPGSTYASLNGTSSATPHVAGAAALVKQKNPSWSNVQIRNHLKNTATSLGSTNLYGSGLVNAEAATR

SEQ ID NO: 54304 - protein, 269 aa, Bacillus lentus
AQSVPWGISRVQAPAAHNRGLTGSGVKVAVLDTGISTHPDLNIRGGASFVPGEPSTQDGNGHGTHAAGTIAALNNSIGVLGVAPSAELYAVKVLGASGSGSVSMIAQGLEWAGNNGMHVANLSLGSPSPSATLEQAVNSATSRGVLVVAASGNSGAGSISYPARYANAMAVGATDQNDNRASFSQYGAGLDIVAPGVNVQSTYPGSTYASLNGTSMATPHVAGAAALVKQKNPSWSNVQIRNHLKNTATSLGSTNLYGSGLVNAEAATR

SEQ ID NO: 54305 - protein, 269 aa, Unidentified
AQSVPWGISRVQAPAAHNRGLTGSGVKVAVLDTGISTHPDLNIRGGASFVPGEPSTQDGNGHGTHVAGTIAALNNRIGVLGVAPSAELYAVKVLGASGSGSVSSIAQGLEWAGNNRMHVANLSLGSPSPSATLEQAVNSATSRGVLVVAASGNSGADSISYPARYANAMAVGATDQNNNRASFSQYGAGLDIVAPGVNVQSTYPGSTYASLNGTSMATPHVAGAAALVKQKNPSWSNVQIRNHLKNTATSLGSTNLYGSGLVNAEAATR

SEQ ID NO: 54306 - protein, 269 aa, Unidentified
AQSVPWGISRVQAPAAHNRGLTGSGVKVAVLDTGISTHPDLNIRGGASFVPGEPSTQDGNGHGTHVAGTIAALNNDIGVLGVAPSAELYAVKVLGASGSGSVSSIAQGLEWAGNNDMHVANLSLGSPSPSATLEQAVNSATSRGVLVVAASGNSGAGSISYPARYANAMAVGATDQNNNRASFSQYGAGLDIVAPGVNVQSTYPGSTYASLNGTSMATPHVAGAAALVKQKNPSWSNVQIRNRLKNTATSLGSTNLYGSGLVNAEAATR

SEQ ID NO: 54307 - protein, 270 aa, Aspergillus oryzae
AQSVPWGISRVQAPAAHNRGLAGSGVKVAVLDTGISTHPDLNIRGGASFVPGEPSTQDGNGHGTHVAGTIAALNNSIGVLGVAPSAELYAVKVLGASEGSGSVSSIAQGLEWAGNNGMHVANLSLGSPSPSATLEQAVNSATSRGVLVVAASGNSGANSISYPARYANAMAVGATDQNNNRASFSQYGAGLDIVAPGVNVQSTYPGSTYASLNGTSMATPHVAGAAALVKQKNPSWSNVQIRNHLKNTATSLGSLNLYGSGLVNAEAATR

SEQ ID NO: 54308 - protein, 269 aa, Unidentified
AQSVPWGISRVQAPAAHNRGLTGSGVKVAVLDTGISTHPDLNIRGGASFVPGEPSTQDGNGHGTHVAGTIAALNNSIGVLGVAPSAELYAVKVLGFAGAGSVSSIAQGLEWAGNNGMHVANLSLGSPSPSATLEQAVNSATSRGVLVVAASGNSGAGSISYPARYANAMAVGATDQNNNRASFSQYGAGLDIVAPGVNVQSTYPGSTYASLNGTSMATPHVAGAAALVKQKNPSWSNVQIRNHLKNTATSLGSTNLYGSGLVNAEAATR

SEQ ID NO: 54309 - protein, 269 aa, Unidentified
AQSVPWGISRVQAPAAHNRKLTGFGVKVAVLDTGISTHPDLNIRGGASFVPGEPSTQDGNGHGTHVAGTIAALNNSIGVLGVAPSAELYAVKVLGASGSGSVSSIAQGLEWAGNNGMHVANLSLGDPSPSATLEQAVNSATSRGVLVVAASGNSGAGSISYPARYANAMAVGATDQNNNRASFSQYGAGLDIVAPGVNVQSTYPGSTYASLNGTSMATPHVAGAAALVKQKNPSWSNVQIRNHLKNTATSLGSTNLYGSGLVNAEAATR

SEQ ID NO: 54310 - protein, 269 aa, Unidentified
AQVVPWGISRVQAPAAHNRGLTGSGVKVAVLDTGISTHPDLNIRGGASFVPGEPSTQDGNGHGTHVAGTIAALNNSIGVLGVAPSAELYAVKVLGASGSGSVSSIAQGLEWAGNNGMHVANLSLGSPSPSATLEQAVNSATSRGVLVVAASGNSGAGSISYPARYANAMAVGATDQNNNRASFSQYGAGLDIVAPGVNVQSTYPGSTYASLNGTSMASPHVAGAAALVKQKNPSWSNVQIRNHLKNTATSLGSTNLYGPGLVNAEAATR

SEQ ID NO: 54311 - protein, 269 aa, Unidentified
AQSVPWGISRVQAPASHNRGLTGSGVKVAVLDTGISTHPDLNIRGGASFVPGEPSTQDGNGHGTHVAGTIAALNNSIGVLGVAPSAELYAVKVLGASGSGAISSIAQGLEWAGNNGMHVANLSLGSPSPSATLEQAVNSATSRGVLVVAASGNSGAGSISYPARYANAMAVGATDQNNNRASFSQYGAGLDIVAPGVNVQSTYPGSTYASLNGTSMATPHVAGAAALVKQKNPSWSNVQIRNHLKNTATSLGSTNLYGSGLVNAEAATR

SEQ ID NO: 54312 - protein, 269 aa, Unidentified
AQSVPWGISRVQAPAAHNRRLTGSGVKVAVLDTGISTHPDLNIRGGASFVPGEPSTQDGNGHGTHVAGTIAALNNDIGVLGVAPSAELYAVKVLGASGSGSVSSIAQGLEWAGNNDMHVANLSLGSPSPSATLEQAVNSATSRGVLVVAASGNSGAGSISYPARYANAMAVGATDQNNNRASFSQYGAGLDIVAPGVNVQSTYPGSTYASLNGTSMATPHVAGAAALVKQKNPSWSNVQIRNHLKNTATSLGSTNLYGSGLVNAEAATR

SEQ ID NO: 54313 - protein, 269 aa, Unidentified
AQSVPWGISRVQAPAAHNRGLTGSGVKVAVLDTGISTHPDLNIRGGASFVPGEPSTQDGNGHGTHVAGTIAALNNSIGVLGVAPSAELYAVKVLGASGGGSISSIAQGLEWAGNNGMHVANLSLGSPSPSATLEQAVNSATSRGVLVVAASGNSGAGSISYPARYANAMAVGATDQNNNRASFSQYGAGLDIVAPGVNVQSTYPGSTYASLNGTSMATPHVAGAAVLVKQKNPSWSNVQIRNHLKNTATSLGSTNLYGSGLVNAEAATR

SEQ ID NO: 54314 - protein, 269 aa, Unidentified
AQSVPWGISRVQAPAAHNRGLTGSGVKVAVLDTGISTHPDLNIRGGASFVPGEPSTQDGEGHGTHVAGTIAALNNSIGVLGVAPSAELYAVKVLGASGSGSVSSIAQGLEWAGNNGMHVANLSLGSPSPSATLEQAVNSATSRGVLVVAASGNSGAESISYPARYANAMAVGATDQNNNRASFSQYGAGLDIVAPGVNVQSTYPGSTYASLNGTSMATPHVAGAAALVKQKNPSWSNVQIRNRLKNTATSLGSTNLYGSGLVNAEAATR

SEQ ID NO: 54315 - protein, 269 aa, Unidentified
AQVVPWGISRVQAPAAHNRGLTGSGVKVAVLDTGISTHPELNIRGGASFVPGEPSTQDGNGHGTHVAGTIAALNNSIGVLGVAPSAELYAVKVLGASGSGSVSSIAQGLEWAGNNGMHVANLSLGSPSPSATLEQAVNSATSRGVLVVAASGNSGAGSISYPARYQNAMAVGATDQNNNRASFSQYGAGLDIVAPGVNVQSTYPGSTYASLNGTSMATPHVAGAAALVKQKNPSWSNVQIRNHLKNTATSLGSTNLYGSGLVNAEAATR

SEQ ID NO: 54316 - protein, 269 aa, Unidentified
AQSVPWGISRVQAPAAHNRRLTGSGVKVAVLDTGISTHPDLRIRGGASFVPGEPSTQDGNGHGTHVAGTIAALNNSIGVLGVAPSAELYAVKVLGASGSGSVSSIAQGLEWAGNNGMHVANLSLGSPSPSATLEQAVNSATSRGVLVVAASGNSGAGSISYPARYANAMAVGATDQNNNRASFSQYGAGLDIVAPGVNVQSTYPGSTYASLNGTSMATPHVAGAAALFKQKNPSWSNVQIRNHLKNTATSLGSTNLYGSGLVNAEAATR

SEQ ID NO: 54317 - protein, 269 aa, Unidentified
AQSVPWGISRVQAPAAHNRGLTGSGVKVAVLDTGISTHPDLNIRGGASFVPGEPSTQDGNGHGTHVAGTIAALNNSIGVLGVAPNAELYAVKVLGASGSGSISSIAQGLEWAGNNGMHVANLSLGSPSPGATLEQAVNSATSRGVLVVAASGNSGAGSISYPARYANAMAVGATDQNNNRASFSQYGAGLDIVAPGVNVQSTYPGSTYASLNGTSMATPHVAGAAALVKQKNPSWSNVQIRNHLKNTATSLGSTNLYGSGLVNAEAATR

SEQ ID NO: 54318 - protein, 269 aa, Unidentified
AQSVPWGISRVQAPAAHNRRLTGSGVKVAVLDTGISTHPDLNIRGGASFVPGEPSTQDGNGHGTHVAGTIAALNNSIGVLGVAPSAELYAVKVLGASGAGSVSSIAQGLEWAGNNGMHVANLSLGSPSPSATLEQAVNSATSRGVLVVAASGNSGAGSISYPARYANAMAVGATDQNNNRASFSQYGAGLDIVAPGVNVQSTYIGSTYASLNGTSMATPHVAGAAALVKQKNPSWSNVQIRNHLKNTATSLGSTNLYGSGLVNAEAATR

SEQ ID NO: 54319 - protein, 269 aa, Unidentified
AQSVPWGISRVQAPAAHNRGLTGSGVKVAVLDTGISTHPDLNIRGGASFVPGEPSTQDGEGHGTHVAGTIAALNNNIGVLGVAPSAELYAVKVLGASGSGSVSSIAQGLEWAGNNGMHVANLSLGSPSPSATLEQAVNSATSRGVLVVAASGNSGAGSISYPARYANAMAVGATDQNNNRASFSQYGAGLDIVAPGVNVQSTYPGSTYASENGTSMATPHVAGAAALVKQKNPSWSNVQIRNHLKNTATSLGSTNLYGSGLVNAEAATR

SEQ ID NO: 54320 - protein, 269 aa, Bacillus lentus
AQSVPWGISRVQAPAAHNRGLTGSGVKVAVLDTGISTHPDLNIRGGASFVPGEPSTQDGNGHGTHVAGTIAALNNSIGVLGVAPRAELYAVKVLGASGSGSVSSIAQGLEWAGNNGMHVANLSLGSPSPSATLEQAVNSATSRGVLVVAASGNSGAGSISYPARYANAMAVGATDQNNNRARFSQYGAGLDIVAPGVNVQSTYPGSTYASLNGTSMATPHVAGAAALVKQKNPSWSNVQIRRHLKNTATSLGSTNLYGSGLVNAEAATR

SEQ ID NO: 54321 - protein, 269 aa, Unidentified
AQSVPWGISRVQAPAAHNRGLTGSGVKVAVLDTGISTHPDLNIRGGASFVPGEPSTQDGEGHGTHVAGTIAALNNNIGVLGVAPSAELYAVKVLGASGSGSVSSIAQGLEWAGNNGMHVANLSLGLPSPSATLEQAVNSATSRGVLVVAASGNSGAGSISYPARYANAMAVGATDQNNNRASFSQYGAGLDIVAPGVNVQSTYPGSTYASLNGTSMATPHVAGAAALVKQKNPSWSNVQIRNHLKNTATSLGSTNLYGSGLVNAEAATR

SEQ ID NO: 54322 - protein, 269 aa, Unidentified
AQSVPWGIERVQAPAAHNRGLTGSGVKVAVLDTGISTHPDLNIRGGASFVPGEPSTQDGNGHGTHVAGTIAALNNDIGVLGVAPSAELYAVKVLGASGSGSVSSIAQGLEWAGNNGMHVANLSLGSPSPSATLEQAVNSATSRGVLVVAASGNSGAGSISYPARYANAMAVGATDQNNNRAEFSQYGAGLDIVAPGVNVQSTYPGSTYASLNGTSMATPHVAGAAALVKQKNPSWSNVQIRNHLKNTATSLGSTNLYGSGLVNAEAATR

SEQ ID NO: 54323 - protein, 269 aa, Unidentified
AQSVPWGNSRVQAPAAHNRRLTGSGVKVAVLDTGISTHPDLRIRGGASFVPGEPSTQDGNGHGTHVAGTIAALNNSIGVLGVAPSAELYAVKVLGASGSGSVSSIAQGLEWAGNNGMHVANLSLGSPSPSATLEQAVNSATSRGVLVVAASGNSGAGSISYPARYANAMAVGATDQNNNRASFSQYGAGLDIVAPGVNVQSTYPGSTYASLNGTSMATPHVAGAAALVKQKNPSWSNVQIRNHLKNTATSLGSTNLYGSGLVNAEAATR

SEQ ID NO: 54324 - protein, 269 aa, Unidentified
AQSVPWGISRVQAPAAHNRGLAGRGVKVAVLDTGISTHPDLNIRGGASFVPGEPSTQDGNGHGTHVAGTIAALNNSIGVLGVAPSAELYAVKVLGASGSGSVSSIAQGLEWAGLNGMHVANLSLGSPSPSATLEQAVNSATSRGVLVVAASGNSGAGSISYPARYANAMAVGATDQNNNRASFSQYGAGLDIVAPGVNVQSTYPGSTYASLNGTSMATPHVAGAAALVKQKNPSWSNVQIRNHLKNTATSLGSTNLYGSGLVNAEAATR

SEQ ID NO: 54325 - protein, 269 aa, Unidentified
AQSVPWGISRVQAPAAHNRGLTGSGVKVAVLDTGISTHPDLNIRGGASFVPGEPSTQDGNGHGTHVAGTIAALDNSIGVLGVAPSAELYAVKVLGASGSGSISSIAQGLEWAGNNGMHVANLSLGSPSPSATLEQAVNSATSRGVLVVAASGNSGAGSISYPARYANAMAVGATDQNNNRASFSQYGAGLDIVAPGVNVQSTYPGSTYASLNGTSMATPHVAGAAALVKQKNPSWSNVQIRNRLKNTATSLGSTNLYGSGLVNAEAATR

SEQ ID NO: 54326 - protein, 269 aa, Unidentified
AQSVPWGISRVQAPAAHNRGLWGSGVKVAVLDTGISTHPDLNIRGGASFVPGEPSTQDGNGHGTHVAGTIAALNNSIGVLGVAPSAELYAVKVLGASGAGSVSSIAQGLEWAGNNGMHVANLSLGSPSPSATLEQAVNSATSRGVLVVAASGNSGAGSISYPARYANAMAVGATDQNNNRASFSQYGAGLDIVAPGVNVQSTYPGSAYASLNGTSMATPHVAGAAALVKQKNPSWSNVQIRNHLKNTATSLGSTNLYGSGLVNAEAATR

SEQ ID NO: 54327 - protein, 269 aa, Unidentified
AQSVPWGISRVQAPAAHNRGLTGSGVKVAVLDTGISTHPDLNIRGGASFVPGEPSTQDGNGHGTHVAGTIAALNNSIGVLGVAPSAELYAVKVLGASGSGSVSSIAQGLEWAGNNGMRVANLSMGSPSPSATLEQAVNSATSRGVLVVAASGNSGAGSISYPARYANAMAVGATDQNNNRASFSQYGAGLDIVAPGVNVQSTYPGSTYASLNGTSMATPHVAGAAALVKQKNPSWSNVQIRNHLKNTDTSLGSTNLYGSGLVNAEAATR

SEQ ID NO: 54328 - protein, 269 aa, Unidentified
AQSVPWGISRVQAPAAHNRRLTGSGVKVAVLDTGISTHPDLRIRGGASFVPGEPSTQDGNGHGTHVAGTIAALNNSIGVLGVAPSAELYAVKVLGASGSGSVSSIAQGLEWAGNNGMHVANLSLGSPSPSATLEQAVNSATSRGVLVVAASGNSGAGSISYPARYANAMAVGATDQNNNRASFSQYGAGLDIVAPGVNVQSTYPGSTYASLNGTSMATPHVAGAAALVKQKNPSWSNVQIRNHLKNTATSLGSTNLYGSGLVNAHAATR

SEQ ID NO: 54329 - protein, 269 aa, Unidentified
AQSVPWGISRVQAPAAHNRRLTGRGVKVAVLDTGISTHPDLRIRGGASFVPGEPSTQDGNGHGTHVAGTIAALNNSIGVLGVAPSAELYAVKVLGASGSGSVSSIAQGLEWAGNNGMHVANLSLGSPSPSATLEQAVNSATSRGVLVVAASGNSGAGSISYPARYANAMAVGATDQNNNRASFSQYGAGLDIVAPGVNVQSTYPGSTYASLNGTSMATPHVAGAAALVKQKNPSWSNVQIRNHLKNTATSLGSTNLYGSGLVNAEAATR

SEQ ID NO: 54330 - protein, 271 aa, Unidentified
AQSVPWGISRVQAPAAHNRGLTGSGVKVAVLDTGISTHPDLNIRGGASFVPGEPSTQDGNGHGTHVAGTIAALNNSIGVLGVAPSAELYAVKVLGGSGAXAGTVSSIAQGLEWAGNNGMHVANLSLGSPSPSATLEQAVNSATSRGVLVVAASGNSGAGSISYPARYANAMAVGATDQNNNRASFSQYGAGLDIVAPGVNVQSTYPGSTYASLNGTSMATPHVAGAAALVKQKNPSWSNVQIRNHLKNTATSLGSTNLYGSGLVNAEAATR

SEQ ID NO: 54331 - protein, 269 aa, Unidentified
AQSVPWGISRVQAPAAHNRGLTGSGVKVAVLDTGISTHPDLNIRGGASFVPGEPSTQDGNGHGTHVAGTIAALNNSIGVLGVAPNAELYAVKVLGASGSGSVSSIAQGLEWAGNNGMHVANLSLGSPSPSATLEQAVNSATSRGVLVVAASGNGGAGSIGYPARYANAMAVGATDQNNNRASFSQYGAGLDIVAPGVNVQSTYPGSTYASLNGTSMATPHVAGAAALVKQKNPSWSNVQIRNHLKNTATSLGSTNLYGSGLVNAEAATR

SEQ ID NO: 54332 - protein, 269 aa, Unidentified
AQSVPWGISRVQAPAAHNRGLTGSGVKVAVLDTGISTHPDLNIRGGASFVPGEPSTQDGNGHGTHVAGTIAALNNSIGVLGVAPNAELYAVKVLGASGSGSVSSIAQGLEWAGNNGMHVANLSLGSPSPSATLEQAVNSATSRGVLVVAASGNDGAGSIGYPARYANAMAVGATDQNNNRASFSQYGAGLDIVAPGVNVQSTYPGSTYASLNGTSMATPHVAGAAALVKQKNPSWSNVQIRNHLKNTATSLGSTNLYGSGLVNAEAATR

SEQ ID NO: 54333 - protein, 269 aa, Bacillus lentus
AQSVPWGISRVQAPAAHNRGLTGSGVKVAVLDTGISTHPDLNIRGGASFVPGEPSTQDGNGHGTHAAGTIAALNNSIGVLGVAPSAELYAVKVLGASGSGSVSAIAQGLEWAGNNGMNVANLSLGSPSPSATLEQAVNSATSRGVLVVAASGNSGAGSISYPARYANAMAVGATDQNNNRASFSQYGAGLDIVAPGVNVQSTYPGSTYASLNGTSMATPHVAGAAALVKQKNPSWSNVQIRNHLKNTATSLGSTNLYGSGLVNAEAATR

SEQ ID NO: 54334 - protein, 269 aa, Unidentified
AQSVPWGISRVQAPAAHNRGLTGSGVKVAVLDTGISTHPDLNIRGGASFVPGEPSTQDGNGHGTHVAGTIAALNNSIGVLGVAPSAELYAVKVLGASGSGSVSSIAQGLEWAGNNGMHVANLSLGMAGPSATLEQAVNSATSRGVLVVAASGNSGAGSISYPARYANAMAVGATDQNNNRASFSQYGAGLDIVAPGVNVQSTYPGSTYASLNGTSQATPHVAGAAALVKQKNPSWSNVQIRNHLKNTATSLGSTNLYGSGLVNAEAATR

SEQ ID NO: 54335 - protein, 269 aa, Synthetic construct
AQSVPWGISRVQAPAAHNRGLTGSGVKVAVLDTGISTHPDLNIRGGASFVPGEPSTDDGNGHGTHVAGTIAALNNSIGVLGVAPSAELYAVKVLGASGSGSVSSIAQGLEWAGNNGMHVANLSLGSPSPSATLEQAVNSATSRGVLVVAASGNSGAGSISYPARYANAMAVGATDQNNNRASFSQYGAGLDIVNPGVNVQSTYQGSTYASLNGTSMATPHVAGAAALVKQKNPSWSNVQIRNHLKNTATSLGSTNLYGSGLVNAEAATR

SEQ ID NO: 54336 - protein, 269 aa, Unidentified
AQSVPWGISRVQAPAAHNRRLTGSGVKVAVLDTGISTHPDLRIRGGASFVPGEPSTQDGNGHGTHVAGTIAALNNSIGVLGVAPSAELYAVKVLGASGSGSVSSIAQGLEWAGNNGMHVANLSLGSPSPSATLEQAVNSATSRGVLVVAASGNSGAGSISYPARYANAMAVGATDQNNNRASFSQYGAGLDIVAPGVNVQSTYPGSTYASLNGTSMATPHVAGAAALVKQKNPSWSNVQIRNHLKNTATSLGSTNLYGSGLVNAFAATR

SEQ ID NO: 54337 - protein, 269 aa, Unidentified
AQSVPWGISRVQAPAAHRRGLTGSGVKVAVLDTGISTHPDLNIRGGASFVPGEPSTQDGNGHGTHVAGTIAALDNSIGVLGVAPSAELYAVKVLGASGSGSISSIAQGLEWAGNNGMHVANLSLGSPSPSATLEQAVNSATSRGVLVVAASGNSGAGSISYPARYANAMAVGATDQNNNRASFSQYGAGLDIVAPGVNVQSTYPGSTYASLNGTSMATPHVAGAAALVKQKNPSWSNVQIRNHLKNTATSLGSTNLYGSGLVNAEAATR

SEQ ID NO: 54338 - protein, 269 aa, Synthetic construct
AQSVPWGISRVQAPAAHNRGLTGSGVKVAVLDTGISTHPDLNIRGGASFVPGEPSTQDGNGHGTHVAGTIAALNNSIGVLGVAPSAELYAVKVLGASGSGSVSSIAQGLEWAGNNGMHVANLSLGSPSPSATLEQAVNSATSRGVLVVAASGNSGAGSISYPARYANAMAVGATDQNNNRASFSQYGAGLDITAPGVNVQSTYPGETCASLNGTSMATPHVAGAAALVKQKNPSWSNVQIRNHLKNTATSLGSTNLYGSGLVNAEAATR

SEQ ID NO: 54339 - protein, 269 aa, Unidentified
AQQVPWGISRVQAPAAHNRGLTGSGVKVAVLDTGISTHPDLNIRGGASFVPGEPSTQDGNGHGTHVAGTIAALNNDIGVLGVAPSAELYAVKVLGASGSGSVSSIAQGLEWAGNNGMHVANLSLGSPSPSATLEQAVNSATSRGVLVVAASGNSGAGSISYPARYANAMAVGATDQNNNRASFSQYGAGLDIVAPGVNVQSTYPGSTYASLNGTSMATPHVAGAAALVKQKNPSWSNVQIRNHLKNTATSLGSTNLYGPGLVNAEAATR

SEQ ID NO: 54340 - protein, 269 aa, Unidentified
AQSVPWGISRVQAPAAHNRGLTGSGVKVAVLDTGISTHPDLNIRGGASFVPGEPSTQDGNGHGTHVAGTIAALNNDINVLGVAPSAELYAVKVLGASGSGSVSSIAQGLEWAGNNGMHVANLSLGSPSPSATLEQAVNSATSRGVLVVAASGNSGAGSISYPARYANAMAVGATDQNNNRASFSQYGAGLDIVAPGVNVQSTYPGSTYASLNGTSMQTPHVAGAAALVKQKNPSWSNVQIRNHLKNTATSLGSTNLYGSGLVNAEAATR

SEQ ID NO: 54341 - protein, 269 aa, Bacillus lentus
AQSVPWGISRVQAPAAHNRGLTGSGVKVAVLDTGISTHPDLNIRGGASFVPGEPSTQDGNGHGTHVAGTIAALNNSIGVLGVAPSAELYAVKVLGASGSGSVSSIAQGLEWAGNNGMHVANLSLGSPSPSATLEQAVNSATSRGVLVVAASGNSGAGSISAPASYANTMAVGATDQNNNRASFSQYGAGLDIVAPGVNVQSTYPGSTYASLNGTSMATPHVAGAAALVKQKNPSWSNVQIRNHLKNTATSLGSTNLYGSGLVNAEAATR

SEQ ID NO: 54342 - protein, 269 aa, Unidentified
AQSVPWGISRVQAPAAHNRRLTGSGVKVAVLDTGISTHPDLRIRGGASFVPGEPSTQDGNGHGTHVAGTIAALNNSIGVLGVAPSAELYAVKVLGASGSGSVSSIAQGLEWAGNNGMHVANLSLGSPSPSATLEQAVNSATSRGVLVVAASGNSGAGSISYPARYANAMAVGATDQNNNRASFSQYGAGLDIVAPGVNVQSTYPGSTYASLNGTSMATPHVAGAAALVKQKNGSWSNVQIRNHLKNTATSLGSTNLYGSGLVNAEAATR

SEQ ID NO: 54343 - protein, 269 aa, Unidentified
AQSVPWGISRVQAPAAHNRGLTGSGVKVAVLDTGISTHPDLNIRGGASFVPGEPSTQDGNGHGTHVAGTIAALNNSIGVLGVAPNAELYAVKVLGASGSGSVSSIAQGLEWAGNNGMHVANLSLGSESPSATLEQAVNSATSRGVLVVAASGNSGAGSISYPARYANAMAVGATDQNNNRASFSQYGAGLDIVAPGVNVQSTWPGSTYASLNGTSMATPHVAGAAALVKQKNPSWSNVQIRNHLKNTATSLGSTNLYGSGLVNAEAATR

SEQ ID NO: 54344 - protein, 269 aa, Synthetic construct
AQSVPWGISRVQAPAAHNRGLTGSGVKVAVLDTGISTHPDLNINGGASFVPGEPSTQDGNGHGTHVAGTIAALNNSIGVLGVAPSAELYAVKVLGASGSGSVSSIAQGLEWAGNNEMHVANLSLGSPSPSATLEQAVNSATSRGVLVVAASGNSGAGSISYPARYANAMAVGATDQNNNRASFSQYGAGLDIVAPGVNVQSTYPGSTYASLNGTSMATPHVAGAAALVKQKNPSWSNVQIRNHLKNTATSLGSTNLYGSGLVNARAATR

SEQ ID NO: 54345 - protein, 269 aa, Unidentified
AQVVPWGISRVQAPAAHNRGLTGSGVKVAVLDTGISTHPDLNIRGGASFVPGEPSTQDGNGHGTHVAGTIAALNNSIGVLGVAPSAELYAVKVLGASGSGSVSSIAQGLEWAGNNGMHVANLSMGSPSPSATLEQAVNSATSRGVLVVAASGNSGAGSISYPARYQNAMAVGATDQNNNRASFSQYGAGLDIVAPGVNVQSTYPGSTYASLNGTSMATPHVAGAAALVKQKNPSWSNVQIRNHLKNTATSLGSTNLYGSGLVNAEAATR

SEQ ID NO: 54346 - protein, 269 aa, Bacillus lentus
AQSVPWGISRVQAPAAHNRGLTGSGVKVAVLDTGISTHPDLNIRGGASFVPGEPSTQDGNGHGTHAAGTIAALNNSIGVLGVAPSAELYAVKVLGAAGSGSVSSIAQGLEWAGNNGMHVANLSLGSPSPSATLEQAVNSATSRGVLVVAASGNSGAGSISYPARYANAMAVGATDQNNNRASFSQYGAGLDIVAPGVNVQSTYPGSAYASLNGTSMATPHVAGAAALVKQKNPSWSNVQIRNHLKNTATSLGSTNLYGSGLVNAEAATR

SEQ ID NO: 54347 - protein, 269 aa, Unidentified
AQSVPWGISRVQAPAAHNRKLTGSGVKVAVLDTGISTHPDLNIRGGASFVPGEPSTQDGNGHGTHVAGTIAALNNSIGVLGVAPSAELYAVKVLGASGSASVSSIAQGLEWAGNNGMHVANLSLGSPSPSATLEQAVNSATSRGVLVVAASGNSGAGSISYPARYANAMAVGATDQNNNRASFSQYGAGLDIVAPGVNVQSTYPGSTYASLNGTSMATPHVAGAAALVKQKNPRWSNVQIRNHLKNTATSLGSTNLYGSGLVNAEAATR

SEQ ID NO: 54348 - protein, 269 aa, Unidentified
AQSVPWGISRVQAPAAHNRRLTGSGVKVAVLDTGISTHPDRNIRGGASFVPGEPSTQDGNGHGTHVAGTIAALNNSIGVLGVAPSAELYAVKVLGASGSGSVSSIAQGLEWAGNNGMHVANLSLGSPSPSATLEQAVNSATSRGVLVVAASGNSGAGSISYPARYANAMAVGATDQNNNRASFSQYGAGLDIVAPGVNVQSTYPGSTYASLNGTSMATPHVAGAAALVKQKNPSWSNVQIRNHLKNTATSLGSTNLYGSGLVNALAATR

SEQ ID NO: 54349 - protein, 269 aa, Unidentified
AQSVPWGISRVQAPAAHNRKLTGSGVKVAVLDTGISTHPDLNIRGGASFVPGEPSTQDGEGHGTHVAGTIAALNNSIGVLGVAPSAELYAVKVLGASGSGSVSSIAQGLEWAGNNGMHVANLSLGLPSPSATLEQAVNSATSRGVLVVAASGNSGAGSISYPARYANAMAVGATDQNNNRASFSQYGAGLDIVAPGVNVQSTYPGSTYASLNGTSMATPHVAGAAALVKQKNPSWSNVQIRNHLKNTATSLGSTNLYGSGLVNAEAATR

SEQ ID NO: 54350 - protein, 269 aa, Unidentified
AQSVPWGISRVQAPAAHNRGLTGSGVKVAVLDTGISTHPDLNIRGGASFVPGEPSTQDGNGHGTHVAGTIAALNNSIGVLGVAPSAELYAVKVLPATSSGSVSSIAQGLEWAGNNGMHVANLSLGSPSPSATLEQAVNSATSRGVLVVAASGNSGAGSISYPARYANAMAVGATDQNNNRASFSQYGAGLDIVAPGVNVQSTYPGSTYASLNGTSMATPHVAGAAALVKQKNPSWSNVQIRNHLKNTATSLGSTNLYGSGLVNAEAATR

SEQ ID NO: 54351 - protein, 269 aa, Unidentified
AQSVPWGISRVQAPAAHNRGLTGRGVKVAVLDTGISTHPDLNIRGGASFVPGEPSTQDGNGHGTHVAGTIAALNNSIGVLGVAPSAELYAVKVLGASGAGSVSSIAQGLEWAGNNGMHVANLSLGSPSPSATLEQAVNSATSRGVLVVAASGNSGAGSISYPARYANAMAVGATDQNNNRASFSQYGAGLDIVAPGVNVQSTYPQSTYASLNGTSMATPHVAGAAALVKQKNPSWSNVQIRNHLKNTATSLGSTNLYGSGLVNAEAATR

SEQ ID NO: 54352 - protein, 269 aa, Unidentified
AQSVPWGISRVQAPAAHNRGLTGGGVKVAVLDTGISTHPDLNIRGGASFVPGEPSTQDGNGHGTHVAGTIAALNNNIGVLGVAPSAELYAVKVLSASGGGSVSSIAQGLEWAGNNGMHVANLSLGSPSPSATLEQAVNSATSRGVLVVAASGNSGAGSISYPARYANAMAVGATDQNNNRASFSQYGAGLDIVAPGVNVQSTYPGSTYASLNGTSSATPHVAGAAALVKQKNPSWSNVQIRNHLKNTATSLGSTNLYGSGLVNAEAATR

SEQ ID NO: 54353 - protein, 269 aa, Unidentified
AQSVPWGISRVQAPAAHNRGLTGRGVKVAVLDTGISTHPDLNIRGGASFVPGEPSTQDGNGHGTHVAGTIAALDNSIGVLGVAPSAELYAVKVLGASGGGSVSSIAQGLEWAGNNGMHVANLSLGSPSPSATLEQAVNSATSRGVLVVAASGNSGAGSISYPARYANAMAVGATDQNNNRASFSQYGAGLDIVAPGVNVQSTYPGSTYASLNGTSMATPHVAGAAALVKQKNPSWSNVQIRNHLKNTATSLGSTNLYGSGLVNAEAATR

SEQ ID NO: 54354 - protein, 269 aa, Unidentified
AQSVPWGISRVQAPAAHNRGLTGSGVKVAVLDTGISTHPDLNIRGGASFVPGEPSTQDGNGHGTHVAGTIAALNNSINVLGVAPSAELYAVKVLGASGSGSVSSIAQGLEWAGNNGMHVANLSLGSPSPSATLEQAVNSATSRGVLVVAASGNSGAGSISYPARYANAMAVGATDQNNNRASFSQYGAGLDIVAPGVNVQSTYPGSTYASLNGTSMASPHVAGAAALVKQKNPSWSNVQIRNHLKNTATSLGSTNLYGPGLVNAEAATR

SEQ ID NO: 54355 - protein, 269 aa, Unidentified
AQSVPWGISRVQAPAAHNRKLLGSGVKVAVLDTGISTHPDLNIRGGASFVPGEPSTQDGNGHGTHVAGTIAALNNSIGVLGVAPSAELYAVKVLGASGSGSVSSIAQGLEWAGNNRMHVANLSLGSPSPSATLEQAVNSATSRGVLVVAASGNSGAGSISYPARYANAMAVGATDQNNNRASFSQYGAGLDIVAPGVNVQSTYPGSTYASLNGTSMATPHVAGAAALVKQKNPSWSNVQIRNHLKNTATSLGSTNLYGSGLVNAEAATR

SEQ ID NO: 54356 - protein, 269 aa, Unidentified
AQSVPWGISRVQAPAAHNRGLLGSGVKVAVLDTGISTHPDLNIRGGASFVPGEPSTQDGNGHGTHVAGTIAALNNNIGVLGVAPSAELYAVKVLGASGSGSVSSIAQGLEWAGNNGMHVANLSLGSPSPSATLEQAVNSATSRGVLVVAASGNSGAGSISYPARYANAMAVGATDQNNNRASFSQYGAGLDIVAPGVNVQSTYPGSTYASENGTSMATPHVAGAAALVKQKNPSWSNVQIRNHLKNTATSLGSTNLYGSGLVNAEAATR

SEQ ID NO: 54357 - protein, 269 aa, Unidentified
AQSVPWGISRVQAPAAHNRGLTGSGVKVAVLDTGISTHPDLNIRGGASFVPGEPSTQDGNGHGTHVAGTIAALNNDIGVLGVAPSAELYAVKVLGASGSGSVSSIAQGLEWAGNNDMHVANLSLGSPSPSATLEQAVNSATSRGVLVVAASGNSGAGSISYPARYANAMAVGATDQNNNRASFSQYGAGLDIVAPGVNVQSTYPGSTYASLNGTSMATPHVAGAAALVKQKNPSWSNVRIRNHLKNTATSLGSTNLYGSGLVNAEAATR

SEQ ID NO: 54358 - protein, 269 aa, Unidentified
AQSVPWGISRVQAPAAHNRGLTGRGVKVAVLDTGISTHPDLNIRGGASFVPGEPSTQDGNGHGTHVAGTIAALNNSIGVLGVAPSAELYAVKVLGASGSGAVSSIAQGLEWAGNNGMHVANLSLGSPSPSATLEQAVNSATSRGVLVVAASGNSGAGSISYPARYANAMAVGATDQNNNRASFSQYGAGLDIVAPGVNVQSTYPGSTYASLNGTSMATPHVAGAAALVKQKNPSWSNVRIRNHLKNTATSLGSTNLYGSGLVNAEAATR

SEQ ID NO: 54359 - protein, 269 aa, Unidentified
AQSVPWGISRVQAPAAHRRRLTGSGVKVAVLDTGISTHPDLDIRGGASFVPGEPSTQDGNGHGTHVAGTIAALNNSIGVLGVAPSAELYAVKVLGASGSGSVSSIAQGLEWAGNNGMHVANLSLGSPSPSATLEQAVNSATSRGVLVVAASGNSGAGSISYPARYANAMAVGATDQNNNRASFSQYGAGLDIVAPGVNVQSTYPGSTYASLNGTSMATPHVAGAAALVKQKNPSWSNVQIRNHLKNTATSLGSTNLYGSGLVNAEAATR

SEQ ID NO: 54360 - protein, 269 aa, Unidentified
AQSVPWGISRVQAPAAHNRGLTGSGVKVAVLDTGISTHPDLNIRGGASFVPGEPSTQDGNGHGTHVAGTIAALNNSIGVLGVAPSAELYAVKVLGASGSASVSSIAQGLEWAGNNGMHVANLSLGSPSPSATLEQAVNSATSRGVLVVAASGNSGAGSISYPARYANAMAVGATDQNNNRASFSQYGAGLDIVAPGVNVQSTYPGSTYASEDGTSMATPHVAGAAALVKQKNPSWSNVQIRNHLKNTATSLGSTNLYGSGLVNAEAATR

SEQ ID NO: 54361 - protein, 269 aa, Unidentified
AQSVPWGISRVQAPAAHNRGLTGSGVKVAVLDTGISTHPDLNIRGGASFVPGEPSTQDGNGHGTHVAGTIAALNNSIGVLGVAPSAELYAVKVLGASGSGSVSSIAQGLEWAGNNGMHVANLSLGSPSPSATLEQAVNSATSRGVLVVAASGNSGAGSIDYPARYANAMAVGATDQNNNRASFSQYGAGLDIVAPGVNVQSTYPGSAYASENGTSMATPHVAGAAALVKQKNPSWSNVQIRNHLKNTATSLGSTNLYGSGLVNAEAATR

SEQ ID NO: 54362 - protein, 269 aa, Unidentified
AQSVPWGISRVQAPASHNRGLTGSGVKVAVLDTGISTHPDLNIRGGASFVPGEPSTQDGNGHGTHVAGTIAALNNSIGVLGVAPSAELYAVKVLGASGSGSLSSIAQGVEWAGNNGMHVANLSLGSPSPSATLEQAVNSATSRGVLVVAASGNSGAGSISYPARYANAMAVGATDQNNNRASFSQYGAGLDIVAPGVNVQSTYPGSTYASLNGTSMATPHVAGAAALVKQKNPSWSNVQIRNHLKNTATSLGSTNLYGSGLVNAEAATR

SEQ ID NO: 54363 - protein, 270 aa, Aspergillus oryzae
AQSVPWGISRVQAPAAHNRGLTGSGVKVAVLDTGISTHPDLNIRGGASFVPGEPSTQDGNGHGTHVAGTIAALNNPIGVLGVAPSAELYAVKVLGASEGSGSVSSIAQGLEWAGNNGMHVANLSLGSPSPSATLEQAVNSATSRGVLVVAASGNSGAGSISYPARYANAMAVGATDQNNSRASFSQYGAGLDIVAPGVNVLSTYPGSTYASLNGTSMATPHVAGAAALVKQKNPSWSNVQIRNHLKNTATSLGSTNLYGSGLVNAEAATR

SEQ ID NO: 54364 - protein, 269 aa, Synthetic construct
AQSVPWGISRVQAPAAHNRGLTGSGVKVAVLDTGISTHPDLNIRGGASFVPGEPSTQDGNGHGTHVAGTIAALNNSIGVLGVAPSAELYAVKVLGASGSGSVSSIAQGLEWAGNNGMHVANLSLQEPSPSHTLEQAVNSATSRGVLVVAASGNSGAGSISYPARYANAMAVGATDQNNNRASFSQYGAGLDIVAPGVNVQSTYPGSTYASLNGTSMATPHVAGAAALVKQKNPSWSNVQIRNHLKNTATSLGSTNLYGSGLVNAEAATR

SEQ ID NO: 54365 - protein, 269 aa, Unidentified
AQSVPWGISRVQAPAAHNRGLTGSGVKVAVLDTGISTHPDLNIRGGASFVPGEPSTQDGEGHGTHVAGTIAALNNRIGVLGVAPSAELYAVKVLGASGSGSVSSIAQGLEWAGNNGMHVANLSLGSPSPSATLEQAVNSATSRGVLVVAASGNSGADSISYPARYANAMAVGATDQNNNRASFSQYGAGLDIVAPGVNVQSTYPGSTYASLNGTSMATPHVAGAAALVKQKNPSWSNVQIRNHLKNTATSLGSTNLYGSGLVNAEAATR

SEQ ID NO: 54366 - protein, 269 aa, Unidentified
AQSVPWGISRVQAPAAHNRGLTGSGVKVAVLDTGISTHPDLNIRGGASFVPGEPSTQDGNGHGTHVAGTIAALNNSIGVLGVAPSAELYAVKVLGAAGAGAVSSIAQGLEWAGNNGMHVANLSLGSPSPSATLEQAVNSATSRGVLVVAASGNSGAGSISYPARYANAMAVGATDQNNNRASFSQYGAGLDIVAPGVNVQSTYPGSTYASLNGTSMATPHVAGAAALVKQKNPSWSNVQIRNHLKNTATSLGSTNLYGSGLVNAEAATR

SEQ ID NO: 54367 - protein, 269 aa, Unidentified
AQSVPWGISRVQAPAAHNRGLTGSGVKVAVLDTGISTHPDLNIRGGASFVPGEPSTQDGNGHGTHVAGTIAALNNSIGVLGVAPSAELYAVKVLGAGGAASVSSIAQGLEWAGNNGMHVANLSLGSPSPSATLEQAVNSATSRGVLVVAASGNSGAGSISYPARYANAMAVGATDQNNNRASFSQYGAGLDIVAPGVNVQSTYPGSTYASLNGTSMATPHVAGAAALVKQKNPSWSNVQIRNHLKNTATSLGSTNLYGSGLVNAEAATR

SEQ ID NO: 54368 - protein, 269 aa, Bacillus lentus
AQSVPWGISRVQAPAAHNRGLTGSGVKVAVLDTGISTHPDLNIRGGASFVPGEPSTQDGDGHGTHVAGTIAALNNSIGVLGVAPSAELYAVKVLGASGSGSVSSIAQGLEWAGNNGMHVANLSLGSPSPSATLEQAVNSATSRGVLVVGASGNSGAGSISYPARYANAMAVGATDQNNNRASFSQYGAGLDIVAPGVNVQSTYPGSTYASLNGTSMATPHVAGAAALVKQKNPSWSNVRIRNHLKNTATSLGSTNLYGSGLVNAEAATR

SEQ ID NO: 54369 - protein, 269 aa, Unidentified
AQSVPWGISRVQAPAAHNRKLTGFGVKVAVLDTGISTHPDLNIRGGASFVPGEPSTQDGNGHGTHVAGTIAALNNNIGVLGVAPSAELYAVKVLGASGSGSVSSIAQGLEWAGNNGMHVANLSLGSPSPSATLEQAVNSATSRGVLVVAASGNSGAGSISYPARYANAMAVGATDQNNNRASFSQYGAGLDIVAPGVNVQSTYPGSTYASLNGTSMATPHVAGAAALVKQKNPSWSNVQIRNHLKNTATSLGSTNLYGSGLVNAEAATR

SEQ ID NO: 54370 - protein, 269 aa, Unidentified
AQSVPWGISRVQAPAAHNRGLAGSGVKVAVLDTGISTHPDLNIRGGASFVPGEPSTQDGNGHGTHVAGTIAALNNSIGVLGVAPSAELYAVKVLGASGSGSVSSIAQGLEWAGLNGMHVANLSLGSPSPSATLEQAVNSATSRGVLVVAASGNSGAGSISYPARYANAMAVGATDQNNNRADFSQYGAGLDIVAPGVNVQSTYPGSTYASLNGTSMATPHVAGAAALVKQKNPSWSNVQIRNHLKNTATSLGSTNLYGSGLVNAEAATR

SEQ ID NO: 54371 - protein, 269 aa, Unidentified
AQTVPWGISRVQAPAAHNRGLTGSGVKVAVLDTGISTHPDLNIRGGASFVPGEPSTQDGNGHGTHVAGTIAALNNDIGVLGVAPSAELYAVKVLGASGSGSVSSIAQGLEWAGNNGMHVANLSLGSPSPSATLEQAVNSATSRGVLVVAASGNSGAGSISYPARYANAMAVGATDQNNNRASFSQYGAGLDIVAPGVNVQSTYPGSTYASLNGTSMASPHVAGAAALVKQKNPSWSNVQIRNHLKNTATSLGSTNLYGSGLVNAEAATR

SEQ ID NO: 54372 - protein, 269 aa, Bacillus sp
AQSVPWGISRVQAPAAHNRGLTGSGVKVAVLDTGISTHPDLNIRGGASFVPGEPSTQDGNGHGTHVAGTIAALNNSIGVLGVAPNAELYAVKVLGASGSGSVSSIAQGLEWAGNNGMHVANLSLGSPSPSATLEQAVNSATSRGVLVVAASGNSGAGSISYPARYDNAIAVGATDQNNNRASFSQYGAGLDIVAPGVNVQSTYPGSTYASLNGTSMATPHVAGAAALVKQKNPSWSNVQIRNHLKNTATSLGSTNLYGSGLVNAEAATR

SEQ ID NO: 54373 - protein, 269 aa, Unidentified
AQSVPWGISRVQAPAAHNRGLLGSGVKVAVLDTGISTHPDLNIRGGASFVPGEPSTQDGNGHGTHVAGTIAALNNSIGVLGVAPSAELYAVKVLGASGSGSVSSIAQGLEWAGNNRMHVANLSLGSPSPSATLEQAVNSATSRGVLVVAASGNSGAGSIDYPARYANAMAVGATDQNNNRASFSQYGAGLDIVAPGVNVQSTYPGSTYASLNGTSMATPHVAGAAALVKQKNPSWSNVQIRNHLKNTATSLGSTNLYGSGLVNAEAATR

SEQ ID NO: 54374 - protein, 269 aa, Unidentified
AQSVPWGISRVQAPAAHNRGLTGSGVKVAVLDTGISTHPDLNIRGGASFVPGEPSTQDGNGHGTHVAGTIAALNNSIGVLGVAPSAELYAVKVLPQSGSASVSSIAQGLEWAGNNGMHVANLSLGSPSPSATLEQAVNSATSRGVLVVAASGNSGAGSISYPARYANAMAVGATDQNNNRASFSQYGAGLDIVAPGVNVQSTYPGSTYASLNGTSMATPHVAGAAALVKQKNPSWSNVQIRNHLKNTATSLGSTNLYGSGLVNAEAATR

SEQ ID NO: 54375 - protein, 269 aa, Unidentified
AQSVPWGISRVQAPAAHNRGLTGSGVKVAVLDTGISTHPDLRIRGGASFVPGEPSTQDGNGHGTHVAGTIAALNNSIGVLGVAPSAELYAVKVLGASGSGSVSSIAQGLEWAGNNGMHVANLSLGLPSPSATLEQAVNSATSRGVLVVAASGNSGAGSISYPARYANAMAVGATDQNNNRASFSQYGAGLDIVAPGVNVQSTYPGSTYASENGTSMATPHVAGAAALVKQKNPSWSNVQIRNHLKNTATSLGSTNLYGSGLVNAEAATR

SEQ ID NO: 54376 - protein, 269 aa, Unidentified
AQSVPWGISRVQAPAAHNRGLTGRGVKVAVLDTGISTHPDLNIRGGASFVPGEPSTQDGNGHGTHVAGTIAALNNSIGVLGVAPSAELYAVKVLGASGSGSVSSIAQGLEWAGNNGMHVANLSLGSPSPSATLEQAVNSATSRGVLVVAASGNSGAGSIDYPARYANAMAVGATDQNNNRADFSQYGAGLDIVAPGVNVQSTYPGSTYASLNGTSMATPHVAGAAALVKQKNPSWSNVQIRNHLKNTATSLGSTNLYGSGLVNAEAATR

SEQ ID NO: 54377 - protein, 269 aa, Unidentified
AQSVPWGISRVQAPAAHNRGLTGFGVKVAVLDTGISTHPDLNIRGGASFVPGEPSTQDGNGHGTHVAGTIAALNNSIGVLGVAPSAELYAVKVLGASGSGSVSSIAQGLEWAGNNGMHVANLSLGSPSPSATLEQAVNSATSRGVLVVAASGNSGAGSIDYPARYANAMAVGATDQNNNRASFSQYGAGLDIVAPGVNVQSTYPGSAYASLNGTSMATPHVAGAAALVKQKNPSWSNVQIRNHLKNTATSLGSTNLYGSGLVNAEAATR

SEQ ID NO: 54378 - protein, 269 aa, Unidentified
AQSVPWGISRVQAPAAHRRGLTGRGVKVAVLDTGISTHPDLNIRGGASFVPGEPSTQDGNGHGTHVAGTIAALNNSIGVLGVAPSAELYAVKVLGASGSGSVSSIAQGLEWAGNNGMHVANLSLGSPSPSATLEQAVNSATSRGVLVVAASGNSGAGSISYPARYANAMAVGATDQNNNRASFSQYGAGLDIVAPGVNVQSTYPGSTYASLNGTSMATPHVAGAAALVKQKNPSWSNRQIRNHLKNTATSLGSTNLYGSGLVNAEAATR

SEQ ID NO: 54379 - protein, 269 aa, Bacillus lentus
AQSVPWGISRVQAPAAHNRGLTGSGVKVAVLDTGISTHPDLNIRGGASFVPGEPSTQDGNGHGTHVAGTIAALNNSIGVLGVAPSAELYAVKVLGASGSGSVSSIAQGLEWAGNNGMHVANLSLGSPSPSATLEQAVNSATSRGVLVVAASGNSGAGSISIPALYANAMAVGATDQNNNRASFSQYGPGLDIVAPGVNVQSTYPGSTYASLNGTSMATPHVAGAAALVKQKNPSWSNVQIRNHLKNTATSLGSTNLYGSGLVNAEAATR

SEQ ID NO: 54380 - protein, 269 aa, Synthetic construct
AQSVPWGISRVQAPAAHNRGLTGSGVKVAVLDTGISTHPDLNIRGGASFVPGEPSTQDGNGHGTHVAGTIAALDNSIGVLGVAPSAELYAVKVLGADGRGSVSSIAQGLEWAGNNGMHVANLSLGSPSPSATLEQAVNSATSRGVLVVAASGNSGAGSISYPARYANAMAVGATDQNNNRASFSQYGAGLDIVAPGVNVQSTYPGSTYASLNGTSMATPHVAGAAALVKQKNPSWSNVQIRNHLKNTATSLGSTNLYGSGLVNAEAATR

SEQ ID NO: 54381 - protein, 269 aa, Unidentified
AQSVPWGISRVQAPAAHNRGLTGSGVKVAVLDTGISTHPDLNIRGGASFVPGEPSTQDGNGHGTHVAGTIAALNNSIGVLGVAPSAELYAVKVLGQTSSGSVSSIAQGLEWAGNNGMHVANLSLGSPSPSATLEQAVNSATSRGVLVVAASGNSGAGSISYPARYANAMAVGATDQNNNRASFSQYGAGLDIVAPGVNVQSTYPGSTYASLNGTSMATPHVAGAAALVKQKNPSWSNVQIRNHLKNTATSLGSTNLYGSGLVNAEAATR

SEQ ID NO: 54382 - protein, 269 aa, Unidentified
AQSVPWGISRVQAPAAHRRGLTGSGVKVAVLDTGISTHPDLNIRGGASFVPGEPSTQDGNGHGTHVAGTIAALDNSIGVLGVAPSAELYAVKVLGASGGGSVSSIAQGLEWAGNNGMHVANLSLGSPSPSATLEQAVNSATSRGVLVVAASGNSGAGSISYPARYANAMAVGATDQNNNRASFSQYGAGLDIVAPGVNVQSTYPGSTYASLNGTSMATPHVAGAAALVKQKNPSWSNVQIRNHLKNTATSLGSTNLYGSGLVNAEAATR

SEQ ID NO: 54383 - protein, 269 aa, Unidentified
AQSVPWGISRVQAPAAHNRGLTGSGVKVAVLDTGISTHPDLNIRGGASFVPGEPSTQDGNGHGTHVAGTIAALNNSINVLGVAPSAELYAVKVLGASGSGSVSSIAQGLEWAGNNGMHVANLSLGSPRPSATLEQAVNSATSRGVLVVAASGNSGAGSISYPARYQNAMAVGATDQNNNRASFSQYGAGLDIVAPGVNVQSTYPGSTYASLNGTSMATPHVAGAAALVKQKNPSWSNVQIRNHLKNTATSLGSTNLYGSGLVNAEAATR

SEQ ID NO: 54384 - protein, 269 aa, Unidentified
AQVVPWGISRVQAPAAHNRGLTGSGVKVAVLDTGISTHPDLNIRGGASFVPGEPSTQDGNGHGTHVAGTIAALNNSIGVLGVAPSAELYAVKVLGASGSGSVSSIAQGLEWAGNNGMRVANLSLGSPSPSATLEQAVNSATSRGVLVVAASGNSGAGSISYPARYQNAMAVGATDQNNNRASFSQYGAGLDIVAPGVNVQSTYPGSTYASLNGTSMATPHVAGAAALVKQKNPSWSNVQIRNHLKNTATSLGSTNLYGSGLVNAEAATR

SEQ ID NO: 54385 - protein, 269 aa, Unidentified
AQSVPWGISRVQAPAAHNRGLTGSGVKVAVLDTGISTHPDLNIRGGASFVPGEPSTQDGNGHGTHVAGTIAALNNSIGVLGVAPSAELYAVKVLGASGSGSVSSIAQGLEWAGNNGMHVANLSLGSESPSATLEQAVNSATSRGVLVVAASGNSGADSISYPARYANAMAVGATDQNNNRASFSQYGAGLDIVAPGVNVQSTYPGSTYASLNGTSMATPHVAGAAALVKQKNPSWSNVQIRDHLKNTATSLGSTNLYGSGLVNAEAATR

SEQ ID NO: 54386 - protein, 269 aa, Bacillus lentus
AQSVPWGISRVQAPAAHNRGLTGSGVKVAVLDTGISTHPDLNIRGGASFVPGEPSTQDGNGHGTHVAGTIAALNNSIGVLGVAPSAELYAVKVLGASGSGSVSSIAQGLEWAGNNGMHVANLSLGSPSPSATLEQAVNSATSRGVLVVAASGNSGAGSISAPASYENAMAVGATDQNNNRASFSQYGAGLDIVAPGVNVQSTYPGSTYASLNGTSMATPHVAGAAALVKQKNPSWSNVQIRNHLKNTATSLGSTNLYGSGLVNAEAATR

SEQ ID NO: 54387 - protein, 269 aa, Unidentified
AQSVPWGISRVQAPAAHNRGLTGSGVKVAVLDTGISTHPDLNIRGGASFVPGEPSTQDGNGHGTHVAGTIAALNNSIGVLGVAPSAELYAVKVLPFGGSGSVSSIAQGLEWAGNNGMHVANLSLGSPSPSATLEQAVNSATSRGVLVVAASGNSGAGSISYPARYANAMAVGATDQNNNRASFSQYGAGLDIVAPGVNVQSTYPGSTYASLNGTSMATPHVAGAAALVKQKNPSWSNVQIRNHLKNTATSLGSTNLYGSGLVNAEAATR

SEQ ID NO: 54388 - protein, 269 aa, Unidentified
AQSVPWGISRVQAPAAHNRGLLGFGVKVAVLDTGISTHPDLNIRGGASFVPGEPSTQDGNGHGTHVAGTIAALNNSIGVLGVAPSAELYAVKVLGASGSGSVSSIAQGLEWAGNNGMHVANLSLGSPSPSATLEQAVNSATSRGVLVVAASGNSGAGSISYPARYANAMAVGATDQNNNRASFSQYGAGLDIVAPGVNVQSTYPGSAYASLNGTSMATPHVAGAAALVKQKNPSWSNVQIRNHLKNTATSLGSTNLYGSGLVNAEAATR

SEQ ID NO: 54389 - protein, 269 aa, Unidentified
AQSVPWGISRVQAPAAHNRGLTGSGVKVAVLDTGISTHPDLNIRGGASFVPGEPSTQDGNGHGTHVAGTIAALNNSIGVLGVAPDAELYAVKVLGASGSGSVSSIAQGLEWAGNNGMHVANLSLGSPSPSATLEQAVNSATSRGVLVVAASGNSGAGSISYPARYANAMAVGATDQNNNRADFSQYGAGLDIVAPGVNVQSTYPGSTYASLNGTSMATPHVAGAAALVKQKNPSWSNVQIRDHLKNTATSLGSTNLYGSGLVNAEAATR

SEQ ID NO: 54390 - protein, 269 aa, Unidentified
AQSVPWGISRVQAPAAHNRGLTGSGVKVAVLDSGISTHPDLNIRGGASFVPGEPSTQDGNGHGTHVAGTIAALNNSIGVLGVAPSAELYAVKVLGASGSGSVSSIAQGLEWAGLNGMHVANLSLGSPSPSATLEQAVNSATSRGVLVVAASGNSGEGSISYPARYANAMAVGATDQNNNRASFSQYGAGLDIVAPGVNVQSTYPGSTYASLNGTSMATPHVAGAAALVKQKNPSWSNVQIRNHLKNTATSLGSTNLYGSGLVNAEAATR

SEQ ID NO: 54391 - protein, 269 aa, Unidentified
AQSVPWGISRVQAPAAHNRGLLGSGVKVAVLDTGISTHPDLNIRGGASFVPGEPSTQDGNGHGTHVAGTIAALNNNIGVLGVAPSAELYAVKVLGASGSGSVSSIAQGLEWAGNNGMHVANLSLGSPSPSATLEQAVNSATSRGVLVVAASGNSGAGSISYPARYANAMAVGATDQNNNRASFSQYGAGLDIVAPGVNVQSTYPGSAYASLNGTSMATPHVAGAAALVKQKNPSWSNVQIRNHLKNTATSLGSTNLYGSGLVNAEAATR

SEQ ID NO: 54392 - protein, 269 aa, Unidentified
AQSVPWGISRVQAPAAHNRGLTGSGVKVAVLDTGISTHPDLNIRGGASFVPGEPSTQDGNGHGTHVAGTIAALNNNIGVLGVAPSAELYAVKVLGASGSGSVSSIAQGLEWAGNNGMHVANLSLGQPSPSATLEQAVNSATSRGVLVVAASGNSGAGSISYPARYANAMAVGATDQNNNRASFSQYGAGLDIVAPGVNVQSTYPGSTYASENGTSMATPHVAGAAALVKQKNPSWSNVQIRNHLKNTATSLGSTNLYGSGLVNAEAATR

SEQ ID NO: 54393 - protein, 269 aa, Unidentified
AQSVPWGISRVQAPAAHNRGLTGRGVKVAVLDTGISTHPDLNIRGGASFVPGEPSTQDGNGHGTHVAGTIAALNNDIGVLGVAPSAELYAVKVLGASGSGSVSSIAQGLEWAGNNSMHVANLSLGSPSPSATLEQAVNSATSRGVLVVAASGNSGAGSISYPARYANAMAVGATDQNNNRASFSQYGAGLDIVAPGVNVQSTYPGSTYASLNGTSMATPHVAGAAALVKQKNPSWSNVQIRNHLKNTATSLGSTNLYGSGLVNAEAATR

SEQ ID NO: 54394 - protein, 269 aa, Unidentified
AQSVPWGISRVQAPAAHNRGLTGSGVKVAVLDTGISTHPDLNIRGGASFVPGEPSTQDGNGHGTHVAGTIAALNNSIGVLGVAPSAELYAVKVLGASGSGSVSSIAQGLEWAGNNGMHVANLSLGSPSPSATLEQAVNSATSRGVLVVAASGNSGEGSISYPARYANAMAVGATDQNNNHASFSQYGAGLDIVAPGVNVQSTYPGSTYASLNGTSMATPHVAGAAALVKQKNPSWSNVQIRNHLKRTATSLGSTNLYGSGLVNAEAATR

SEQ ID NO: 54395 - protein, 269 aa, Unidentified
AQSVPWGISRVQAPAAHNRGLTGSGVKVAVLDTGISTHPDLNIRGGASFVPGEPSTQDGNGHGTHVAGTIAALNNSIGVLGVAPDAELYAVKVLGASGSGSVSSIARGLEWAGNNGMHVANLSLGSPSPSATLEQAVNSATSRGVLVVAASGNSGAGSISYPARYANAMAVGATDQNNNRARFSQYGAGLDIVAPGVNVQSTYPGSTYASLNGTSMATPHVAGAAALVKQKNPSWSNVQIRNHLKNTATSLGSTNLYGSGLVNAEAATR

SEQ ID NO: 54396 - protein, 269 aa, Unidentified
AQSVPWGISRVQAPAAHNRGLTGSGVKVAVLDTGISTHPDLNIRGGASFVPGEPSTQDGNGHGTHVAGTIAALNNSIGVLGVAPSAELYAVKVLGASGQGSVSSIANGLEWAGNNGMHVANLSLGSPSPSATLEQAVNSATSRGVLVVAASGNSGAGSISYPARYANAMAVGATDQNNNRASFSQYGAGLDIVAPGVNVQSTYPGSTYASQNGTSMATPHVAGAAALVKQKNPSWSNVQIRNHLKNTATSLGSTNLYGSGLVNAEAATR

SEQ ID NO: 54397 - protein, 269 aa, Unidentified
AQSVPWGISRVQAPAAHNRGLRGRGVKVAVLDTGISTHPDLRIRGGASFVPGEPSTQDGNGHGTHVAGTIAALNNSIGVLGVAPSAELYAVKVLGASGSGSVSSIAQGLEWAGNNGMHVANLSLGSPSPSATLEQAVNSATSRGVLVVAASGNSGAGSISYPARYANAMAVGATDQNNNRASFSQYGAGLDIVAPGVNVQSTYPGSTYASLNGTSMATPHVAGAAALVKQKNPSWSNVQIRNHLKNTATSLGSTNLYGSGLVNAEAATR

SEQ ID NO: 54398 - protein, 269 aa, Unidentified
AQSVPWGISRVQAPAAHNRGLTGSGVKVAVLDTGISTHPDLNIRGGASFVPGEPSTQDGNGHGTHVAGTIAALNNSIGVLGVAPSAELYAVKVLGASGNGSVSSIAGGLEWAGNNGMHVANLSLGAPSPSATLEQAVNSATSRGVLVVAASGNSGAGSISYPARYANAMAVGATDQNNNRASFSQYGAGLDIVAPGVNVQSTYPGSTYASLNGTSMATPHVAGAAALVKQKNPSWSNVQIRNHLKNTATSLGSTNLYGSGLVNAEAATR

SEQ ID NO: 54399 - protein, 269 aa, Unidentified
AQSVPWGISRVQAPAAHNRGLLGFGVKVAVLDTGISTHPDLNIRGGASFVPGEPSTQDGNGHGTHVAGTIAALNNSIGVLGVAPSAELYAVKVLGASGSGSVSSIAQGLEWAGNNGMHVANLSLGSPSPSATLEQAVNSATSRGVLVVAASGNSGAGSISYPARYANAMAVGATDQNNNRASFSQYGAGLDIVAPGVNVQSTYPGSTYASENGTSMATPHVAGAAALVKQKNPSWSNVQIRNHLKNTATSLGSTNLYGSGLVNAEAATR

SEQ ID NO: 54400 - protein, 269 aa, Unidentified
AQSVPWGISRVQAPAAHRRRLTGSGVKVAVLDTGISTHPDLNIRGGASFVPGEPSTQDGNGHGTHVAGTIAALDNSIGVLGVAPSAELYAVKVLGASGSGSVSSIAQGLEWAGNNGMHVANLSLGSPSPSATLEQAVNSATSRGVLVVAASGNSGAGSISYPARYANAMAVGATDQNNNRASFSQYGAGLDIVAPGVNVQSTYPGSTYASLNGTSMATPHVAGAAALVKQKNPSWSNVQIRNHLKNTATSLGSTNLYGSGLVNAEAATR

SEQ ID NO: 54401 - protein, 269 aa, Unidentified
AQSVPWGISRVQAPAAHNRGLTGSGVKVAVLDTGISTHPDLNIRGGASFVPGEPSTQDGNGHGTHVAGTIAALNNSIGVLGVAPDAELYAVKVLGASGSGSVSSIADGLEWAGNNGMHVANLSLGSPSPSATLEQAVNSATSRGVLVVAASGNSGAGSISYPARYANAMAVGATDQNNNRASFSQYGAGLDIVAPGVNVQSTYPGSTYASLNGTSMATPHVAGAAALVKQKNPSWSNVQIRDHLKNTATSLGSTNLYGSGLVNAEAATR

SEQ ID NO: 54402 - protein, 269 aa, Unidentified
AQSVPWGIARVQAPAAHNRGLTGSGVKVAVLDTGISTHPDRNIRGGASFVPGEPSTQDGNGHGTHVAGTIAALNNSIGVLGVAPSAELYAVKVLGASGSGSVSSIAQGLEWAGNNGMHVANLSLGSPSPSATLEQAVNSATSRGVLVVAASGNSGAGSISYPARYANAMAVGATDQNNNRASFSQYGAGLDIVAPGVNVQSTYPGFTYASLNGTSMATPHVAGAAALVKQKNPSWSNVQIRNHLKNTATSLGSTNLYGSGLVNAEAATR

SEQ ID NO: 54403 - protein, 269 aa, Unidentified
AQSVPWGISRVQAPAAHNRGLAGSGVKVAVLDTGISTHPDLNIRGGASFVPGEPSTQDGNGHGTHVAGTIAALNNSIGVLGVAPSAELYAVKVLGASGGGGVSSIAQGLEWAGNNGMHVANLSLGSPSPSATLEQAVNSATSRGVLVVAASGNSGAGSISYPARYANAMAVGATDQNNNRASFSQYGAGLDIVAPGVNVQSTYPGSTYASLNGTSMATPHVAGAAALVKQKNPSWSNVQIRNHLKNTATSLGSTNLYGSGLVNAEAATR

SEQ ID NO: 54404 - protein, 269 aa, Unidentified
AQSVPWGISRVQAPAAHNRGLTGRGVKVAVLDTGISTHPDLNIRGGASFVPGEPSTQDGNGHGTHVAGTIAALNNSIGVLGVAPSAELYAVKVLGASGAGSVSSIAQGLEWAGNNGMHVANLSLGSPSPSATLEQAVNSATSRGVLVVAASGNSGAGSISYPARYANAMAVGATDQNNNRASFSQYGAGLDIVAPGVNVQSTYPGSAYASLNGTSMATPHVAGAAALVKQKNPSWSNVQIRNHLKNTATSLGSTNLYGSGLVNAEAATR

SEQ ID NO: 54405 - protein, 269 aa, Unidentified
AQSVPWGISRVQAPAAHNRRLTGSGVKVAVLDTGISTHPDRNIRGGASFVPGEPSTQDGNGHGTHVAGTIAALNNSIGVLGVAPSAELYAVKVLGASGSGSVSSIAQGLEWAGNNGMHVANLSLGSPSPSATLEQAVNSATSRGVLVVAASGNSGAGSISYPARYANAMAVGATDQNNNRASFSQYGAGLDIVAPGVNVQSTYPGFTYASLNGTSMATPHVAGAAALVKQKNPSWSNVQIRNHLKNTATSLGSTNLYGSGLVNAEAATR

SEQ ID NO: 54406 - protein, 269 aa, Bacillus sp.
AQSVPWGISRVQAPAAHNRGLTGSGVKVAVLDTGISTHPDLNIRGGASFVPGEPSTQDGNGHGTHVAGTIAALNNSIGVLGVAPNAELYAVKVLGASGSGSVSSIAQGLEWAGNNGMHVANLSLGSPSPSATLEQAVNSATSRGVLVVAASGNSGAGSISYPARYANAMAVGATDQNNNRASFSQYGAGLDIVAPGVNVQSTYPGSTYASLNGTSMATPHVAGAAALVKQKNPSRSNVQIRNHLKNTATSLGSTNLYGKGLVNAEAATR

SEQ ID NO: 54407 - protein, 269 aa, Unidentified
AQTVPWGISRVQAPAAHNRGLTGSGVKVAVLDTGISTHPDLNIRGGASFVPGEPSTQDGNGHGTHVAGTIAALNNSIGVLGVAPSAELYAVKVLGASGSGSVSSIAQGLEWAGNNGMHVANLSLGSPSPSATLEQAVNSATSRGVLVVAASGNSGAGSISYPARYQNAMAVGATDQNNNRASFSQYGAGLDIVAPGVNVQSTYPGSTYASLNGTSMATPHVAGAAALVKQKNPSWSNVQIRNHLKNTDTSLGSTNLYGSGLVNAEAATR

SEQ ID NO: 54408 - protein, 269 aa, Unidentified
AQTVPWGISRVQAPAAHNRGLTGSGVKVAVLDTGISTHPDLNIRGGASFVPGEPSTQDGNGHGTHVAGTIAALNNDIGVLGVAPSAELYAVKVLGASGSGSVSSIAQGLEWAGNNGMHVANLSLGSPSPSATLEQAVNSATSRGVLVVAASGNSGAGSISYPARYANAMAVGATDQNNNRASFSQYGAGLDIVAPGVNVQSTYPGSTYASLNGTSMATPHVAGAAALVKQKNPSWSNVQIRNHLKNTDTSLGSTNLYGSGLVNAEAATR

SEQ ID NO: 54409 - protein, 269 aa, Unidentified
AQSVPWGISRVQAPAAHNRGLTGSGVKVAVLDTGISTHPDLNIRGGASFVPGEPSTQDGNGHGTHVAGTIAALNNSIGVLGVAPSAELYAVKVLGASGSGSVSSIAQGLEWAGNNVMHVANLSLGNSAPSATLEQAVNSATSRGVLVVAASGNSGAGSISYPARYANAMAVGATDQNNNRASFSQYGAGLDIVAPGVNVQSTYPGSTYASLNGTSSATPHVAGAAALVKQKNPSWSNVQIRNHLKNTATSLGSTNLYGSGLVNAEAATR

SEQ ID NO: 54410 - protein, 269 aa, Unidentified
AQSVPWGISRVQAPAAHRRRLTGSGVKVAVLDTGISTHPDLNIRGGASFVPGEPSTQDGNGHGTHVAGTIAALNNSIGVLGVAPSAELYAVKVLGASGSGSVSSIAQGLEWAGNNGMHVANLSLGSPSPSATLEQAVNSATSRGVLVVAASGNSGAGSISYPARYANAMAVGATDQNNNRASFSQYGAGLDIVAPGVNVQSTYPGSTYASLNGTSMATPHVAGAAALVKQKNPSWSNVQIRNRLKNTATSLGSTNLYGSGLVNAEAATR

SEQ ID NO: 54411 - protein, 269 aa, Unidentified
AQSVPWGISRVQAPAAHNRGLTGSGVKVAVLDTGISTHPDLNIRGGASFVPGEPSTQDGNGHGTHVAGTIAALNNGIGVLGVAPSAELYAVKVLGASGSGSVSSIAQGLEWAGNNSMHVANLSLGSPSPSATLEQAVNSATSRGVLVVAASGNSGADSISYPARYANAMAVGATDQNNNRASFSQYGAGLDIVAPGVNVQSTYPGSTYASLNGTSMATPHVAGAAALVKQKNPSWSNVQIRNHLKNTATSLGSTNLYGSGLVNAEAATR

SEQ ID NO: 54412 - protein, 269 aa, Unidentified
AQTVPWGISRVQAPAAHNRGLTGSGVKVAVLDTGISTHPDLNIRGGASFVPGEPSTQDGNGHGTHVAGTIAALNNDINVLGVAPSAELYAVKVLGASGSGSVSSIAQGLEWAGNNGMHVANLSLGSPSPSATLEQAVNSATSRGVLVVAASGNSGAGSISYPARYANAMAVGATDQNNNRASFSQYGAGLDIVAPGVNVQSTYPGSTYASLNGTSMATPHVAGAAALVKQKNPSWSNVQIRNHLKNTATSLGSTNLYGSGLVNAEAATR

SEQ ID NO: 54413 - protein, 269 aa, Unidentified
AQSVPWGISRVQAPAAHNRGLAGSGVKVAVLDTGISTHPDLNIRGGASFVPGEPSTQDGEGHGTHVAGTIAALNNSIGVLGVAPSAELYAVKVLGASGSGSVSSIAQGLEWAGNNGMHVANLSLGSPSPSATLEQAVNSATSRGVLVVAASGNSGAGSIDYPARYANAMAVGATDQNNNRASFSQYGAGLDIVAPGVNVQSTYPGSTYASLNGTSMATPHVAGAAALVKQKNPSWSNVQIRNHLKNTATSLGSTNLYGSGLVNAEAATR

SEQ ID NO: 54414 - protein, 269 aa, Unidentified
AQSVPWGISRVQAPAAHNRKLTGSGVKVAVLDTGISTHPDLNIRGGASFVPGEPSTQDGEGHGTHVAGTIAALNNSIGVLGVAPSAELYAVKVLGASGSGSVSSIAQGLEWAGNNGMHVANLSLGSPSPSATLEQAVNSATSRGVLVVAASGNSGAGSISYPARYANAMAVGATDQNNNRASFSQYGAGLDIVAPGVNVQSTYPGSAYASLNGTSMATPHVAGAAALVKQKNPSWSNVQIRNHLKNTATSLGSTNLYGSGLVNAEAATR

SEQ ID NO: 54415 - protein, 269 aa, Unidentified
AQSVPWGISRVQAPAAHNRGLTGSGVKVAVLDTGISTHPDLNIRGGASFVPGEPSTQDGNGHGTHVAGTIAALNNSIGVLGVAPNAELYAVKVLGASGGGSISSIAQGLEWAGNNGMHVANLSLGSPSPSATLEQAVNSATSRGVLVVAASGNSGAGSISYPARYANAMAVGATDQNNNRASFSQYGAGLDIVAPGVNVQSTYPGSTYASLNGTSMATPHVAGAAALVKQKNPSWSNVQIRNHLKNTATSLGSTNLYGSGLVNAEAATR

SEQ ID NO: 54416 - protein, 269 aa, Unidentified
AQSVPWGISRVQAPAAHNRGLTGSGVKVAVLDTGISTHPDLNIRGGASFVPGEPSTQDGNGHGTHVAGTIAALNNSIGVLGVAPSAELYAVKVLGASGSGSVSSIAQGLEWAGNNVMHVANLSLGRQDPSATLEQAVNSATSRGVLVVAASGNSGAGSISYPARYANAMAVGATDQNNNRASFSQYGAGLDIVAPGVNVQSTYPGSTYASLNGTSSATPHVAGAAALVKQKNPSWSNVQIRNHLKNTATSLGSTNLYGSGLVNAEAATR

SEQ ID NO: 54417 - protein, 269 aa, Unidentified
AQSVPWGISRVQAPAAHNRGLTGSGVKVAVLDTGISTHPDLNIRGGASFVPGEPSTQDGNGHGTHVAGTIAALNNSIGVLGVAPSAELYAVKVLGASGSGSVSSIAQGLEWAGNNRMHVANLSLGSESPSATLEQAVNSATSRGVLVVAASGNSGAGSISYPARYANAMAVGATDQNNNRASFSQYGAGLDIVAPGVNVQSTYPGSTYASLNGTSMATPHVAGAAALVKQKNPSWSNVQIRDHLKNTATSLGSTNLYGSGLVNAEAATR

SEQ ID NO: 54418 - protein, 269 aa, Unidentified
AQSVPWGISRVQAPAAHNRKLTGSGVKVAVLDTGISTHPDLNIRGGASFVPGEPSTQDGEGHGTHVAGTIAALNNSIGVLGVAPSAELYAVKVLGASGDGSVSSIAQGLEWAGNNGMHVANLSLGSPSPSATLEQAVNSATSRGVLVVAASGNSGAGSISYPARYANAMAVGATDQNNNRASFSQYGAGLDIVAPGVNVQSTYPGSTYASLNGTSMATPHVAGAAALVKQKNPSWSNVQIRNHLKNTATSLGSTNLYGSGLVNAEAATR

SEQ ID NO: 54419 - protein, 269 aa, Unidentified
AQSVPWGISRVQAPAAHNRGLAGSGVKVAVLDTGISTHPDLNIRGGASFVPGEPSTQDGNGHGTHVAGTIAALNNSIGVLGVAPSAELYAVKVLGASGSGGISSIAQGLEWAGNNGMHVANLSLGSPSPSATLEQAVNSATSRGVLVVAASGNSGAGSISYPARYANAMAVGATDQNNNRASFSQYGAGLDIVAPGVNVQSTYPGSTYASLNGTSMATPHVAGAAALVKQKNPSWSNVQIRNHLKNTATSLGSTNLYGSGLVNAEAATR

SEQ ID NO: 54420 - protein, 269 aa, Unidentified
AQSVPWGISRVQAPAAHNRGLTGSGVKVAVLDTGISTHPDLNIRGGASFVPGEPSTQDGNGHGTHVAGTIAALDNSIGVLGVAPSAELYAVKVLGASGSGAISSIAQGLEWAGNNGMHVANLSLGSPSPSATLEQAVNSATSRGVLVVAASGNSGAGSISYPARYANAMAVGATDQNNNRASFSQYGAGLDIVAPGVNVQSTYPGSTYASLNGTSSATPHVAGAAALVKQKNPSWSNVRIRNHLKNTATSLGSTNLYGSGLVNAEAATR

SEQ ID NO: 54421 - protein, 269 aa, Bacillus lentus
AQSVPWGISRVQAPAAHNRGLTGSGVKVAVLDTGISTHPDLNIRGGASFVPGEPSTQDGDGHGTHVAGTIAALNNSIGVLGVAPSAELYAVKVLGASGSGSVSSIAQGLEWAGNNGMHVANLSLGSPSPSATLEQAVNSATSRGVLVVGASGNSGAGSISYPARYANAMAVGATDQNNNRASFSQYGAGLDIVAPGVNVQSTYPGSTYASLNGTSMATPHVAGAAALVKQRNPSWSNVQIRNHLKNTATSLGSTNLYGSGLVNAEAATR

SEQ ID NO: 54422 - protein, 269 aa, Unidentified
AQSVPWGISRVQAPAAHNRGLTGRGVKVAVLDTGISTHPDLNIRGGASFVPGEPSTQDGNGHGTHVAGTIAALDNSIGVLGVAPSAELYAVKVLGASGSGSISSIAQGLEWAGNNGMHVANLSLGSPSPSATLEQAVNSATSRGVLVVAASGNSGAGSISYPARYANAMAVGATDQNNNRASFSQYGAGLDIVAPGVNVQSTYPGSTYASLNGTSMATPHVAGAAALVKQKNPSWSNVQIRNHLKNTATSLGSTNLYGSGLVNAEAATR

SEQ ID NO: 54423 - protein, 269 aa, Unidentified
AQSVPWGISRVQAPAAHNRGLTGSGVKVAVLDTGISTHPDLNIRGGASFVPGEPSTQDGNGHGTHVAGTIAALNNSIGVLGVAPNAELYAVKVLGASGSGSVSSIAQGLEWAGNNGMHVANLSLGSPSPSATLEQAVNSATSRGVLVVAASGNSGAGSIDYPARYANAMAVGATDQNNNRASFSQYGAGLDIVAPGVNVQSTYPGSTYASLDGTSMATPHVAGAAALVKQKNPSWSNVQIRNHLKNTATSLGSTNLYGSGLVNAEAATR

SEQ ID NO: 54424 - protein, 269 aa, Unidentified
AQSVPWGISRVQAPAAHNRGLTGSGVKVAVLDTGISTHPDLNIRGGASFVPGEPSTQDGEGHGTHVAGTIAALNNSIGVLGVAPSAELYAVKVLGASGAGSVSSIAQGLEWAGNNGMHVANLSLGSPSPSATLEQAVNSATSRGVLVVAASGNSGAGSISYPARYANAMAVGATDQNNNHASFSQYGAGLDIVAPGVNVQSTYPGSTYASLNGTSMATPHVAGAAALVKQKNPSWSNVQIRNHLKNTATSLGSTNLYGSGLVNAEAATR

SEQ ID NO: 54425 - protein, 269 aa, Unidentified
AQSVPWGISRVQAPAAHNRGLTGSGVKVAVLDTGISTHPDLNIRGGASFVPGEPSTQDGNGHGTHVAGTIAALNNSIGVLGVAPSAELYAVKVLGASGGGAVSSIAQGLEWAGNNGMHVANLSLGSPSPSATLEQAVNSATSRGVLVVAASGNSGAGSISYPARYANAMAVGATDQNNNRASFSQYGAGLDIVAPGVNVQSTYPGSTYASLNGTSMATPHVAGAAVLVKQKNPSWSNVQIRNHLKNTATSLGSTNLYGSGLVNAEAATR

SEQ ID NO: 54426 - protein, 269 aa, Unidentified
AQSVPWGISRVQAPAAHNRGLTGSGVKVAVLDTGISTHPDLNIRGGASFVPGEPSTQDGNGHGTHVAGTIAALNNRIGVLGVAPSAELYAVKVLGASGSGSVSSIAQGLEWAGNNRMHVANLSLGSESPSATLEQAVNSATSRGVLVVAASGNSGAGSISYPARYANAMAVGATDQNNNRASFSQYGAGLDIVAPGVNVQSTYPGSTYASLNGTSMATPHVAGAAALVKQKNPSWSNVQIRNHLKNTATSLGSTNLYGSGLVNAEAATR

SEQ ID NO: 54427 - protein, 268 aa, Unidentified
AQSVPWGISRVQAPAAHNRGLTGSGVKVAVLDGISTHPDLNIRGGASFVPGEPSTQDGNGHGTHVAGTIAALNNSIGVLGVAPSAELYAVKVLGASGSGSVSSIAQGLEWAGNNGMHVANLSLGSPSPSATLEQAVNSATSRGVLVVAASGNSGEGSIDYPARYANAMAVGATDQNNNRADFSQYGAGLDIVAPGVNVQSTYPGSTYASLNGTSMATPHVAGAAALVKQKNPSWSNVQIRNHLKNTATSLGSTNLYGSGLVNAEAATR

SEQ ID NO: 54428 - protein, 268 aa, Unidentified
AQSVPWGISRVQAPAAHNRRLTGSGVKVAVLDTGISTHPDLNIRGGASFVPGEPSTQDGNGHGTHVAGTIAALNNIGVLGVAPSAELYAVKVLGASGSGSVSSIAQGLEWAGNNDMHVANLSLGSPSPSATLEQAVNSATSRGVLVVAASGNSGADSISYPARYANAMAVGATDQNNNRASFSQYGAGLDIVAPGVNVQSTYPGSTYASLNGTSMATPHVAGAAALVKQKNPSWSNVQIRNHLKNTATSLGSTNLYGSGLVNAEAATR

SEQ ID NO: 54429 - protein, 268 aa, Unidentified
AQSVPWGISRVQAPAAHNRGLTGSGVKVAVLDTGISTHPDLNIRGGASFVPGEPSTQDGEGHGTHVAGTIAALNNSIGVLGVAPSAELYAVKVLGASGSGSVSSIAQGLEWAGNNRMHVANLSLGPSPSATLEQAVNSATSRGVLVVAASGNSGEGSISYPARYANAMAVGATDQNNNRASFSQYGAGLDIVAPGVNVQSTYPGSTYASLNGTSMATPHVAGAAALVKQKNPSWSNVQIRNHLKNTATSLGSTNLYGSGLVNAEAATR

SEQ ID NO: 54430 - protein, 268 aa, Unidentified
AQSVPWGISRVQAPAAHNRGLTGRGVKVAVLDTGISTHPDLNIRGGASFVPGEPSTQDGNGHGTHVAGTIAALNNSIGVLGVAWSAELYAVKVLGASGSGSVSSIAQGLEWAGNNRMHVANLSLGSPSPSATLEQAVNSATSRGVLVVAASGNSGAGSISYPARYANAMAVGATDQNNNRASFSQYGAGLDIVAPGNVQSTYPGSTYASLNGTSMATPHVAGAAALVKQKNPSWSNVQIRNHLKNTATSLGSTNLYGSGLVNAEAATR

SEQ ID NO: 54431 - protein, 268 aa, Unidentified
AQSVPWGISRVQAPAAHNRGLTGSGVKVAVLDTGISTHPDLNIRGGASFVPGEPSTQDGEGHGTHVAGTIAALNNGIGVLGVAPSAELYAVKVLGASGSGSVSSIAQGLEWAGNNMHVANLSLGSPSPSATLEQAVNSATSRGVLVVAASGNSGAGSISYPARYANAMAVGATDQNNNRASFSQYGAGLDIVAPGVNVQSTYPGSTYASLNGTSMATPHVAGAAALVKQKNPSWSNVQIRDHLKNTATSLGSTNLYGSGLVNAEAATR

SEQ ID NO: 54432 - protein, 268 aa, Unidentified
AQSVPWGISRVQAPAHNRGLTGSGVKVAVLDTGISTHPDLNIRGGASFVPGEPSTQDGNGHGTHVAGTIAALNNSIGVLGVAPSAELYAVKVLGASGGGSISSIAQGLEWAGNNGMHVANLSLGNPSPSATLEQAVNSATSRGVLVVAASGNSGAGSISYPARYANAMAVGATDQNNNRASFSQYGAGLDIVAPGVNVQSTYPGSTYASLNGTSMATPHVAGAAALVKQKNPSWSNVQIRNHLKNTATSLGSTNLYGSGLVNAEAATR

SEQ ID NO: 54433 - protein, 268 aa, Bacillus lentus
AQSVPWGIRRVQAPAAHNLGLTGSGVKVAVLDTGISTHPDLNIRGGASFVPGEPSTQDGDGHGTHVAGTIAALNNSIGVLGVAPSAELYAVKVLGASGSGSVSSIAQGLEWAGNNGMHVANLSLGSPSSATLEQAVNSATSRGVLVVAASGNSGAGSISYPARYANAMAVGATDQNNNRASFSQYGAGLDIVAPGVNVQSTYPGSTYASLNGTSMATPHVAGAAALVKQKNPSWSNVQIRNHLKNTATSLGSTNLYGSGLVNAEAATR

SEQ ID NO: 54434 - protein, 268 aa, Unidentified
AQSVPWGISRVQAPAHNRGLTGSGVKVAVLDTGISTHPDLNIRGGASFVPGEPSTQDGNGHGTHVAGTIAALNNSIGVLGVAPSAELYAVKVLGASGSGGISSIAQGLEWAGNNGMHVANLSLGNPSPSATLEQAVNSATSRGVLVVAASGNSGAGSISYPARYANAMAVGATDQNNNRASFSQYGAGLDIVAPGVNVQSTYPGSTYASLNGTSMATPHVAGAAALVKQKNPSWSNVQIRNHLKNTATSLGSTNLYGSGLVNAEAATR

SEQ ID NO: 54435 - protein, 268 aa, Unidentified
AQSVPWGISRVQAPAAHNRGLTGSGVKVAVLDTGISTHPDLNIRGGASFVPGEPSTQDGNGHGTHVAGTIAALNNIGVLGVAPSAELYAVKVLGASGSGSVSSIAQGLEWAGNNDMHVANLSLGSPSPSATLEQAVNSATSRGVLVVAASGNSGAGSISYPARYANAMAVGATDQNNNRADFSQYGAGLDIVAPGVNVQSTYPGSTYASLNGTSMATPHVAGAAALVKQKNPSWSNVRIRNHLKNTATSLGSTNLYGSGLVNAEAATR

SEQ ID NO: 54436 - protein, 268 aa, Unidentified
AQSVPWGISRVQAPAAHNRGLTGSGVKVAVLDTGISTHPDLNIRGGASFVPGEPSTQDGNGHGTHVAGTIAALNNSIGVLGVAPSAELYAVKVLGATSGAISSIAQGLEWAGNNGMHVANLSLGSPSPSATLEQAVNSATSRGVLVVAASGNSGAGSISYPARYANAMAVGATDQNNNRASFSQYGAGLDIVAPGVNVQSTYPGSTYASLNGTSMATPHVAGAAALVKQKNPSWSNVQIRNHLKNTATSLGSTNLYGSGLVNAEAATR

SEQ ID NO: 54437 - protein, 268 aa, Unidentified
AQSVPWGISRVQAPAAHNRGLAGSGVKVAVLDTGISTHPDLNIRGGASFVPGEPSTQDGNGHGTHVAGTIAALNNSIGVLGVAPSAELYAVKVLGASGSGSVSSIAQGLEWAGNNGMHVANLSLGPSPSATLEQAVNSATSRGVLVVAASGNSGEGSISYPARYANAMAVGATDQNNNRADFSQYGAGLDIVAPGVNVQSTYPGSTYASLNGTSMATPHVAGAAALVKQKNPSWSNVQIRNHLKNTATSLGSTNLYGSGLVNAEAATR

SEQ ID NO: 54438 - protein, 268 aa, Unidentified
AQSVPWGISRVQAPAAHNRGLTGSGVKVAVLDTGISTHPDLNIRGGASFVPGEPSTQDGNGHGTHVAGTIAALNNSIGVLGVAPSAELYAVKVLGASGSGSVSSIAQGLEWAGNNRMHVANLSLGPSPSATLEQAVNSATSRGVLVVAASGNSGEGSIDYPARYANAMAVGATDQNNNRASFSQYGAGLDIVAPGVNVQSTYPGSTYASLNGTSMATPHVAGAAALVKQKNPSWSNVQIRNHLKNTATSLGSTNLYGSGLVNAEAATR

SEQ ID NO: 54439 - protein, 268 aa, Unidentified
QSVPWGISRVQAPAAHNRGLTGSGVKVAVLDTGISTHPDLNIRGGASFVPGEPSTQDGNGHGTHVAGTIAALNNSIGVLGVAPSAELYAVKVLGASGSGSVSSIAQGLEWAGNNGMHFANLSLGSPSPSATLEQAVNSATSRGVLVVAASGNSGAGSISYPARYANAMAVGATDQNNNRASFSQYGAGLDIVAPGVNVQSTYPGSTYASLNGTSMAAPHVAGAAALVKQKNGSWSNVQIRNHLKNTATSLGSTNLYGSGLVNAEAATR

SEQ ID NO: 54440 - protein, 268 aa, Unidentified
QSVPWGISRVQAPAAHNRGLTGSGVKVAVLDTGISTHPDLNIRGGASFVPGEPSTQDGNGHGTHVAGTIAALDNSIGVLGVAPSAELYAVKVLGASGSGAISSIAQGLEWAGNNGMHVANLSLGSPSPSATLEQAVNSATSRGVLVVAASGNSGAGSISYPARYANAMAVGATDQNNNRASFSQYGAGLDIVAPGVNVQSTYPGSTYASLNGTSMATPHVAGAAALVKQKNPSWSNVQIRNHLKNTATSLGSTNLYGSGLVNAEAATR

SEQ ID NO: 54441 - protein, 384 aa, Bacillus lentus
MMRKKSFWLGMLTAFMLVFTMAFSDSASAARAEEAKEKYLIGFNEQEAVSEFVEQVEANDEVAILSEEEEVEIELLHEFETIPVLSVELSPEDVDALELDPAISYIEEDAEVTTMAQSVPWGISRVQAPAAHNRGLTGSGVKVAVLDTGISTHPDLNIRGGASFVPGEPSTQDGNGHGTHVAGTIAALNNSIGVLGVAPSAELYAVKVLGADGRGAISSIAQGLEWAGNNGMHVANLSLGSPSPSATLEQAVNSATSRGVLVVAASGNSGASSISYPARYANAMAVGATDQNNNRASFSQYGAGLDIVAPGVNVQSTYPGSTYASLNGTSMATPHVAGAAALVKQKNPSWSNVQIRNHLKNTATSLGSTNLYGSGLVNAEAATR

SEQ ID NO: 54442 - protein, 253 aa, Unidentified
NGVITGQSGVKVAVLDTGISTHPDLNIRGGASFVPGEPSTQDGNGHGTHVAGTIAALNNSIGVLGVAPSAELYAVKVLGASGSGSVSSIAQGLEWAGNNGMHVANLSLGSPSPSATLEQAVNSATSRGVLVVAASGNSGAGSISYPARYANAMAVGATDQNNNRASFSQYGAGLDIVAPGVNVQSTYPGSTYASLNGTSMATPHVAGAAALVKQKNPSWSNVQIRNHLKNTATSLGSTNLYGSGLVNAEAATR

SEQ ID NO: 54443 - protein, 249 aa, Unidentified
VSNSGVKVAVLDTGISTHPDLNIRGGASFVPGEPSTQDGNGHGTHVAGTIAALNNSIGVLGVAPSAELYAVKVLGASGSGSVSSIAQGLEWAGNNGMHVANLSLGSPSPSATLEQAVNSATSRGVLVVAASGNSGAGSISYPARYANAMAVGATDQNNNRASFSQYGAGLDIVAPGVNVQSTYPGSTYASLNGTSMATPHVAGAAALVKQKNPSWSNVQIRNHLKNTATSLGSTNLYGSGLVNAEAATR

SEQ ID NO: 54444 - protein, 249 aa, Unidentified
VANSGVKVAVLDTGISTHPDLNIRGGASFVPGEPSTQDGNGHGTHVAGTIAALNNSIGVLGVAPSAELYAVKVLGASGSGSVSSIAQGLEWAGNNGMHVANLSLGSPSPSATLEQAVNSATSRGVLVVAASGNSGAGSISYPARYANAMAVGATDQNNNRASFSQYGAGLDIVAPGVNVQSTYPGSTYASLNGTSMATPHVAGAAALVKQKNPSWSNVQIRNHLKNTATSLGSTNLYGSGLVNAEAATR

SEQ ID NO: 54445 - protein, 353 aa, unidentified
AEEAKEKYLIGFNEQEAVSEFVEQVEANDEVAILSEEEEVEIELLHEFETIPVLSVELSPEDVDALELDPAISYIEEDAEVTTMAQSVPWGISRVQAPAAHNRGLTGSGVKVAVLDTGISTHPDLNIRGGASFVPGEPSTQDGNGHGTHVAGTIAALNNSIGVLGVAPSAELYAVKVLGADGEGAISSIAQGLEWAGNNGMHVANLSLGSPSPSATLEQAVNSATSRGVLVVAASGNSGASSISYPARYANAMAVGATDQNNNRASFSQYGAGLDIVAPGVNVQSTYPGSTYASLNGTSMATPHVAGAAALVKQKNPSWSNVQIRNHLKNTATSLGSTNLYGSGLVNAEAATR

SEQ ID NO: 54446 - protein, 353 aa, Unidentified
AEEAKEKYLIGFNEQEAVSEFVEQVEANDEVAILSEEEEVEIELLHEFETIPVLSVELSPEDVDALELDPAISYIEEDAEVTTMAQSVPWGISRVQAPAAHNRGLTGSGVKVAVLDTGISTHPDLNIRGGASFVPGEPSTQDGNGHGTHVAGTIAALNNSIGVLGVAPNAELYAVKVLGASGSGSVSSIAQGLEWAGNNVMHVANLSLGLQAPSATLEQAVNSATSRGVLVVAASGNSGAGSISYPARYANAMAVGATDQNNNRASFSQYGAGLDIVAPGVNVQSTYPGSTYASLNGTSMATPHVAGAAALVKQKNPSWSNVQIRNHLKNTATSLGSTNLYGSGLVNAEAATR

SEQ ID NO: 54447 - protein, 274 aa, Synthetic construct
AQTVPYGIPLIKADKVQAQGFKGANVKVAVLDTGIQASHPDLNVVGGASFVAGEAYNTDGNGHGTHVAGTVAALDNTTGVLGVAPSVSLYAVKVLNSSGSGSYSGIVSGIEWATTNGMDVINMSNPGAEGSTAMKQAVDNAYARGVVVVAAAGNSGNSGSTNTIGYPAKYDSVIAVGAVDSNSNRASFSSVGAELEVMAPGAGVYSTYPTNTYATLNGTSMASPHVAGAAALILSKHPNLSASQVRNRLSSTATYLGSSFYYGKGLINVEAAAQ

SEQ ID NO: 54448 - protein, 274 aa, Synthetic construct
AQTVPYGIPLIKADKVQAQGFKGANVKVAVLDTGIQASHPDLNVVGGASFVAGEAYNQEGNGHGTHVAGTVAALDNTTGVLGVAPSVSLYAVKVLNSSGSGSYSGIVSGIEWATTNGMDVINMSLGGASGSTAMKQAVDNAYARGVVVVAAAGNSGNSGSTNTIGYPAKYDSVIAVGAVDSNSNRASFSSVGAELEVMAPGAGVYSTYPTNTYATQNGTSMASPHVAGAAALILSKHPNLSASQVRNRLSSTATYLGSSFYYGKGLINVEAAAQ

SEQ ID NO: 54449 - protein, 274 aa, Bacillus licheniformis
AQTVPYGIELIKADKVQAQGFKGANVKVAVLDTGIQASHPDLNVVGGASFVAGEAYNTDGNGHGTHVAGTVAALDNTTGVLGVAPSVSLYAVKVLNSSGSGSYSGIVSGIEWATTNGMDVINISLGGASGSTAMKRAVDNAYARGVVVVAAAGNSGSSGNTNTIQYPAKYDSVIAVGAVDSNSNRASFSSVGAELEVMAPGAGVYSTYPTNTYATLNGTSMASPHVAGAAALILSKHPNLSASQVRNRLSSTATYLGESFYYGKGLINVEAAAQ

SEQ ID NO: 54450 - protein, 274 aa, Synthetic construct
AQTVPYGIPLIKADKVQAQGFKGANVKVAVLDTGIQASHPDLNVVGGASFVAGEAYNTDGNGHGTHVAGTVAALDNTTGVLGVAPSVSLYAVKVLNSSGSGSYSGIVSGIEWATTNGMDVINMSLGGASGSTAMKQAVDNAYARGVVVVAAAGNSGNSGSTNTIGYPAKYDSVIAVGAVDSNSNRASFSSVGAELEVMAPGADVASTSPTNTYATLNGTSMASPHVAGAAALILSKHPNLSASQVRNRLSSTATYLGSSFYYGKGLINVEAAAQ

SEQ ID NO: 54451 - protein, 274 aa, Bacillus licheniformis
AQTVPYGIPMIKADKVQAQGFKGANVKVAVLDTGAQASHPDLNVVGGASFVAGEAYNTDGNGHGTHVAGTVAALDNTIGVLGVAPSVSLYAVKVLNSSGSGSYSGIVSGIEWATTNGMDVINMSLGGASGSTAMKQAVDNAYARGVVVVAAAGNSGSSGNTNTIGYPAKYDSVIAVGAVDSNSNRAEFSSVGAELEVMAPGVGVYSTYPTNTYATLNGTSMASPHVAGAAALILSKHPNLSASQVRNRLSSTATYLGSSFYYGKGLINVEAAAQ

SEQ ID NO: 54452 - protein, 274 aa, Bacillus licheniformis
AQTVPYGIPLIKADKVQAQGFKGANVKVAVLDTGIQASHPDLNVVGGASFVAGEAYNTDGNGHGTHVAGTVAALDNTTGVLGVAPSVSLYAVKVLNSSGSGTYSGIVSGIEWATTNGMDVINMSLGGPSGSTAMKQAVDNAYARGVVVVAAAGNSGSSGNTNTIGYPAKYDSVIAVGAVDSNSNRASFSSVGAELEVMAPGAGVYSTYPTSTYATWDGTSMASPHVAGAAALILSKHPNLSASQVRNRLSSTATYLGSSFYYGKGLINVEAAAQ

SEQ ID NO: 54453 - protein, 274 aa, Bacillus licheniformis
AQTVPYGAPLIKADKVQAQGFKGANVKVAVLDTGEQASHPDLNVVGGASFVAGEAYNTDGNGHGTHVAGTVAALDNTTGVLGVAPSVSLYAVKVLNSSGSGTYSGIVSGIEWATTNGMDVINMSLGGPSGSTAMKQAVDNAYARGVVVVAAAGNSGSSGNTNTIGYPAKYDSVIAVGAVDSNSNRASFSSVGAELEVMAPGAGVYSTYPTSTYATLNGTSMASPHVAGAAALILSKHPNLSASQVRNRLSSTATYLGSSFYYGKGLINVEAAAQ

SEQ ID NO: 54454 - protein, 274 aa, Bacillus licheniformis
AQTVPYGIPLIKADKVQAQGFKGANVKVAVLDTGIQASHPDLNVVGGASFVAGEAYNTDGNGHGTHVSGTVAALDNNTGVLGVAPSVSLYAVKVLNSSGSGSYSGIVSGIEWATTNGMDVINMSLGGASGSTAMKQAVDNAYARGVVVVAAAGNSGSSGNTNTIQYPAKYDSVIAVGAVDSNSQRASFSSVGAELEVMAPGAGVYSTYPTNTYATLSGTSMASPHVAGAAALILSKHPNLSASQVRNRLSSTATYLGSSFYYGKGLINVEAAAQ

SEQ ID NO: 54455 - protein, 274 aa, Bacillus licheniformis
AQTVPYGIPLIKADKVQAQGYKGANVKVAVLDTGIQASHPDLNVVGGASFVAGEAYNTDGNGHGTHVAGTVAALDNTTGVLGVAPNVSLYAVKVLNSSGSGSYSGIVSGIEWATTNGMDVINMSLGGPSGSTAMKQAVDNAYARGVVVVAAAGNSGSSGNTNTIGYPAKYDSVIAVGAVDPNSNRASFSSVGAELEVMAPGAGVYSTYPTSTYATLNGTSMASPHVAGAAALILSKHPNLSASQVRNRLSSTATYLGSSFYYGKGLINVEAAAQ

SEQ ID NO: 54456 - protein, 274 aa, Bacillus licheniformis
AQTVPYGIPLIKADKVQAQGYKGANVKVAVLDTGIQASHPDLNVVGGASFVAGEAYNTDGNGHGTHVAGTVAALDNTTGVLGVAPNVSLYAVKVLNSSGSGSYSGIVSGIEWATTNGMDVINMSLGGPSGSTAMKQAVDNAYARGVVVVAAAGNSGSSGNTNTIGYPAKYDSVIAVGAVDSNSNRASFSSVGAELEVMAPGAGVYSTYPTSTYATLNGTSMASPHVAGAAALILVKHPNLSASQVRNRLSSTATYLGSSFYYGKGLINVEAAAQ

SEQ ID NO: 54457 - protein, 274 aa, Bacillus licheniformis
AQTVPYGIPLIKADKVQAQGFKGANVKVAVLDTGAQASHPDLNVVGGASFVAGEAYNTDGNGHGTHVAGTVAALDNTTGVLGVAPSVSLYAVKVLNSSGSGSYSGIVSGIEWATTNGMDVINISLGTASGSTAMKQAVDNAYARGVVVVAAAGNSGSSGNTNTIGYPAKYDSVIAVGAVDSNSNRASFSSVGAELEVMAPGAGVYSTYPPNTYATLNGTSMASPHVAGAAALILSKHPNLSAIQVRNRLSSTATYLGSSFYYGKGLINVEAAAQ

SEQ ID NO: 54458 - protein, 274 aa, Bacillus licheniformis
AQTVPYGIPLIKADKVQAQGFKGANVKVAVLDTGIQASHPDLNVVGGASFVAGEAYNTDGNGHGTHVSGTAAALDNNTGVLGVAPSVSLYAVKVLNSSGSGSYSGIVSGIEWATTNGMDVINMSLGGASGSTAMKQAVDNAYARGVVVVAAAGNSGSSGNTNTIQYPAKYDSVIAVGAVDSNSNRASFSSVGAELEVMAPGAGVYSTYPTNTYATLSGTSMASPHVAGAAALILSKHPNLSASQVRNRLSSTATYLGSSFYYGKGLINVEAAAQ

SEQ ID NO: 54459 - protein, 274 aa, Bacillus licheniformis
AQTVPYGIPLIKADKVQAQGFKGANVKVAVLDTGIQASHPDLNVVGGASFVAGEAYNTDGNGHGTHVAGTVAALDNNTGVLGVAPSVSLYAVKVLNSSGSGSYSGIVSGIEWATTNGMDVINMSLGGPSGSTAMKQAVDNAYARGVVVVAAAGNSGSSGNTNTIQYPAKYDSVIAVGAVDSNSQRASFSSVGAELEVMAPGAGVYSTYPTNTYATLSGTSMASPHVAGAAALILSKHPNLSASQVRNRLSSTATYLGSSFYYGKGLINVEAAAQ

SEQ ID NO: 54460 - protein, 274 aa, Bacillus licheniformis
AQTVPYGIPLIKADKVQAQGFKGANVKVAVLDTGIQASHPDLNVVGGASFVAGEAYNTDGNGHGTHVAGTVAALDNTTGVLGVAPSVSLYAVKVLNSSGSGTYSGIVSGIEWATTNGMDVINMSLGGPSGSTAMKQAVDNAYARGVVVVAAAGNSGSSGNTNTIGYPAKYDSVIAVGAVDSNSNRASFSSVGAELEVMAPGAGVYSTYPTSTYATLNGTSMASPHIAGAAALIHSKHPNLSASQVRNRLSSTATYLGSSFYYGKGLINVEAAAQ

SEQ ID NO: 54461 - protein, 274 aa, Bacillus licheniformis
AQTVPYGIPLIKADKVQAQGFKGANVKVAVLDTGIQASHPDLNVVGGASFVAGEAYNTDGNGHGTHVSGTVAALDNNTGVLGVAPSVSLYAVKVLNSSGSGSYSGIVSGIEWATTNGMDVINMSLGGPSGSTAMKQAVDNAYARGVVVVAAAGNSGSSGNTNTIQYPAKYDSVIAVGAVDSNSNRASFSSVGAELEVMAPGAGVYSTYPTNTYATLSGTSMASPHVAGAAALILSKHPNLSASQVRNRLSSTATYLGSSFYYGKGLINVEAAAQ

SEQ ID NO: 54462 - protein, 274 aa, Bacillus licheniformis
AQTVPYGIPLIKADKVQAQGYKGANVKVAVLDTGIQASHPDLNVVGGASFVAGEAYNTDGNGHGTHVAGTVAALDNTTGVLGVAPSVSLYAVKVLNSSGSGSYSGIVSGIEWATTNGMDVINMSLGGASGSTAMKQAVDNAYAKGVVVVAAAGNSGSSGNANTIGYPAKYDSVIAVGAVDSNSNRASFSSVGAELEVMAPGASVYSTYPTSTYATLNGTSMASPHVAGAAALILSKHPNLSASQVRNRLSSTATYLGSSFYYGKGLINVEAAAQ

SEQ ID NO: 54463 - protein, 274 aa, Bacillus licheniformis
AQTVPYGIPLIKADKVQAQGFKGANVRVAVLDTGIQASHPDLAVVGGASFVAGEAYNTDGNGHGTHVAGTVAALDNTTGVLGVAPSVSLYAVKVLNSHGSGSYSGIVSGIEWATTNGMDVINISLGGASGSTAMKQAVDNAYARGVVVVAAAGNSGSSGNTNTIGYPAKYDSVIAVGAVDSNSNRASFSSVGAELEVMAPGAGVYSTYPHNTYATLNGTSMASPHVAGAAALILSKHPNLSASQVRNRLSSTATYLGSSFYYGKGLINVEAAAQ

SEQ ID NO: 54464 - protein, 274 aa, Synthetic construct
AQTVPYGIPLIKADKVQAQGFKGANVKVAVLDTGIQASHPDLNVVGGASFVAGEAYNTDGNGHGTHVAGTVAALDNTTGVLGVAPSVSLYAVKVLNSSGSGSYSGIVSGIEWATTNGMDVINMSLGGASGSTAMKQAVDNAYARGVVVVAAAGNSGNSGSTNTIGYPAKYDSVIAVGAVDSNSNRASFSSVGAELEVMASGAGVYSTYPTNTYGTLEGTSMASPHVAGAAALILSKHPNLSASQVRNRLSSTATYLGSSFYYGKGLINVEAAAQ

SEQ ID NO: 54465 - protein, 274 aa, unidentified
AQTVPYGIPLIKADKVQAQGFKGANVKVAVLDTGIQASHPDLNVVGGASFVAGEAYNTDGNGHGTHVAGTVAALDNTTGVLGVAPSVSLYAVKVLNSSGSGTYSGIVSGLEWATTNGMDVINMSLGGPSGSTAMKQAVDNAYARGVVVVAAAGNSGSSGNTNTIGYPAKYKSVIAVGAVDSNSNRASFSSVGAELEVMAPGAGVYSTYPTSTYATLNGTSMASPHVAGAAALILSKHPNLSASQVRNRLSSTATYLGSSFYYGKGLINVEAAAQ

SEQ ID NO: 54466 - protein, 274 aa, Bacillus licheniformis
AQTVPYGIELIKADKVQAQGFKGANVKVAVLDTGIQASHPDLNVVGGASFVAGEAYNTDGNGHGTHVAGTVAALDNSTGVLGVAPSTSLYAVKVLNSSGSGSYSGIVSGIEWATTNGMDVINMSLGGASGSTAMKQAVDNAYARGVVVVAAAGNSGSSGNTNTIGYPAKYDSVIAVGAVDSNSNRASFSSVGAELEVMAPGAGVYSTYPPNTYATLNGTSMASPHVAGAAALILSKHPKLSASQVRNRLSSTATYLGSSFYYGKGLINVEAAAQ

SEQ ID NO: 54467 - protein, 274 aa, Bacillus licheniformis
AQTVPYGIPLIKADKVQAQGFKGANVKVAVLDTGIQASHPDLNVVGGASFVAGEAYNTDGNGHGTHVSGTVAALDNNTGVLGVAPSVSLYAVKVLNSSGSGSYSGIVSGIEWATTNGMDVINMSLGGPSGSTAMKQAVDNAYARGVVVVAAAGNSGSSGNTNTIQYPAKYDSVIAVGAVDSNSQRASFSSVGAELEVMAPGAGVYSTYPTNTYATLNGTSMASPHVAGAAALILSKHPNLSASQVRNRLSSTATYLGSSFYYGKGLINVEAAAQ

SEQ ID NO: 54468 - protein, 274 aa, Bacillus licheniformis
AQTVPYGIPLIKADKVQAQGFKGANVKVAVLDTGIQASHPDLNVVGGASFVAGEAYNTDGNGHGTHVAGTVAALDNNTGVLGVAPSSSLYAVKVLNSSGSGSYSGIVSGIEWATTNGMDVINISLGGASGSTAMKQAVDNAYARGVVVVAAAGNGGSSGNTNTIQYPAKYDSVIAVGAVDSNSNRASFSSVGAELEVMAPGAGVYSTYPTNTYATLNGTSMASPHVAGAAALILSKHPNLSASQVRNRLSSTATYLGSSFYYGKGLINVEAAAQ

SEQ ID NO: 54469 - protein, 274 aa, Bacillus licheniformis
AQTVPYGIPLIKADKVQAQGFKGANVKVAVLDTGIQASHPDLNVVGGASFVAGEAYNTDGNGHGTHVSGTVAALDNNTGVLGVAPSVSLYAVKVLNSSGSGSYSGIVSGIEWATTNGMDVINMSLGGPSGSTAMKQAVDNAYARGVVVVAAAGNSGSSGNTNTIGYPAKYDSVIAVGAVDSNSQRASFSSVGAELEVMAPGAGVYSTYPTNTYATLSGTSMASPHVAGAAALILSKHPNLSASQVRNRLSSTATYLGSSFYYGKGLINVEAAAQ

SEQ ID NO: 54470 - protein, 274 aa, Bacillus licheniformis
AQTVPYGIPLIKADKVQAQGFKGANVKVAVLDTGIQASHPDLNVVGGASFVAGEAYNTDGNGHGTHVAGTVAALDNTTGVLGVAPSVSSYAVKVLNSSGSGTYSGIVSGIEWATTNGMDVINMSLGGPSGSTAMKQAVDNAYARGVVVVAAAGNSGSSGNTNTIGYPAKYDSVIAVGAVDSNSNRASFSSVGAELEVMAPGAGVYSTYPTSTYATWNGTSMASPHVAGAAALILSKHPNLSASQVRNRLSSTATYLGSSFYYGKGLINVEAAAQ

SEQ ID NO: 54471 - protein, 274 aa, Bacillus licheniformis
AQTVPYGIPLIKADKVQAQGFKGANVKVAVLDTGIQASHPDLNVVGGASFVAGEAYNTDGNGHGTHVAGTVAALGYTTGVLGVAPSVSLYAVKVLNSSGSGSYSGIVSGIEWATTNGMDVINMSLGGASGSTAMKQAVDNAYAKGVVVVAAAGNSGSSGSTNTIGYPAKYDSVIAVGAVDSNSNRASFSSVGAELEVMAPGAGVYSTYPTNTYATFNGTSMASPHVAGAAALILSKHPNLSASQVRNRLSSTATYLGSSFYYGKGLINVEAAAQ

SEQ ID NO: 54472 - protein, 274 aa, Bacillus licheniformis
AQTVPYGIPLIKADKVQAQGYKGANVKVAVLDTGIQASHPDLNVVGGASFVAGEAYNTDGNGHGTHVAGTVAALDNTTGVLGVAPNVSLYAVKVLNSSGSGSYSGIVSGIEWATTNGMDVINMSLGGPSGSTAMKQAVDNAYARGVVVVAAAGNSGSSGNTNTIGYPAKYDSVIAVGAVDSNSNRASFSSVGAELEVMAPGAGVYSTYPTSTYATLNGTSMASPHVAGAAALILLKHPNLSASQVRNRLSSTATYLGSSFYYGKGLINVEAAAQ

SEQ ID NO: 54473 - protein, 274 aa, Bacillus licheniformis
AQTVPYGIPLIKADKVQAQGFKGANVKVAVLDTGIQASHPDLNVVGGASFVAGEAYNTDGNGHGTHVAGTVAALDNNTGVLGVAPSSSLYAVKVLNSSGSGSYSGIVSGIEWATTNGMDVINMSLGGASGSTAMKQAVDNAYARGVVVVAAAGNGGSSGNTNTIQYPAKYDSVIAVGAVDSNSNRASFSSVGAELEVMAPGAGVYSTYPTNTYATLSGTSMASPHVAGAAALILSKHPNLSASQVRNRLSSTATYLGSSFYYGKGLINVEAAAQ

SEQ ID NO: 54474 - protein, 274 aa, Bacillus licheniformis
AQTVPYGIPLIKADKVQAQGYKGANVKVAVLDTGIQASHPDLNVVGGASFVAGEAYNTDGNGHGTHVAGTVAALDNTTGVLGVAPDVSLYAVKVLNSSGSGSYSGIVSGIEWATTNGMDVINMSLGEPSGSTAMKQAVDNAYARGVVVVAAAGNSGSSGNTNTIGYPAKYDSVIAVGAVDSNSNRASFSSVGAELEVMAPGAGVYSTYPTSTYATLNGTSMASPHVAGAAALILSKHPNLSASQVRNRLSSTATYLGSSFYYGKGLINVEAAAQ

SEQ ID NO: 54475 - protein, 274 aa, Bacillus licheniformis
AQTVPYGIPLIKADKVQAQGFKGANVKVAVLDTGIQASHPDLNVVGGASFVAGEAYNTDGNGHGTHVAGTVAALDNNTGVLGVAPSVSLYAVKVLNSSGSGSYSGIVSGIEWATTNGMDVINISLGGASGSTAMKQAVDNAYARGVVVVAAAGNSGSSGNTNTIQYPAKYDSVIAVGAVDSNSQRASFSSVGAELEVMAPGAGVYSTYPTNTYATLSGTSMASPHVAGAAALILSKHPNLSASQVRNRLSSTATYLGSSFYYGKGLINVEAAAQ

SEQ ID NO: 54476 - protein, 274 aa, Bacillus licheniformis
AQTVPYGIPLIKADKVQAQGFKGANVKVAVLDTGIQASHPDLNVVGGASFVAGEAYNTDGNGHGTHVSGTVAALDNTTGVLGVAPSVSLYAVKVLNSSGSGSYSGIVSGIEWATTNGMDVINMSLGGPSGSTAMKQAVDNAYARGVVVVAAAGNSGSSGNTNTIQYPAKYDSVIAVGAVDSNSQRASFSSVGAELEVMAPGAGVYSTYPTNTYATLSGTSMASPHVAGAAALILSKHPNLSASQVRNRLSSTATYLGSSFYYGKGLINVEAAAQ

SEQ ID NO: 54477 - protein, 274 aa, Synthetic construct
AQTVPYGIPLIKADKVQAQGFKGANVKVAVLDTGIQASHPDLNVVGGASFVAGEAYNPDGNGHSGHVAGTVAALDNTTGVLGVAPSVSLYAVKVLNSSGSGSYSGIVSGIEWATTNGMDVINMSLGGASGSTAMKQAVDNAYARGVVVVAAAGNSGNSGSTNTIGYPAKYDSVIAVGAVDSNSNRASFSSVGAELEVMAPGAGVYSTYPTNTYATLNGTSMASPHVAGAAALILSKHPNLSASQVRNRLSSTATYLGSSFYYGKGLINVEAAAQ

SEQ ID NO: 54478 - protein, 274 aa, Bacillus licheniformis
AQTVPYGIELIKADKVQAQGFKGANVKVAVLDTGIQASHPDLNVRGGASFVAGEAYNTDGNGHGTHVAGTVAALDNTTGVLGVAPSVSLYAVKVLNSSGSGSYSGIVSGIEWATTNGMDVINISLGGASGSTAMKRAVDNAYARGVVVVAAAGNSGSSGNTNTIQYPAKYDSVIAVGAVDSNSNRASFSSVGAELEVMAPGAGVYSTYPTNTYATLNGTSMASPHVAGAAALILSKHPNLSASQVRNRLSSTATYLGSSFYYGKGLINVEAAAQ

SEQ ID NO: 54479 - protein, 274 aa, Bacillus licheniformis
AQTVPYGIPLIKADKVQAQGFKGANVKVAVLDTGIQASHPDLNVVGGASFVAGEAYNTDGNGHGTHVAGTVAALDNTTGVLGVAPSVSLYAVKVLNSSGSGSISGIVSGIEWATTNGMDVINMSLGTASGSTAMKQAVDNAYARGSVVVAAAGNSGSSGNTNTISYPAKYDSVIAVGAVDSNSNRASFSSVGAELEVMAPGAGVYSTYPTNTYATLNGTSMASPHVAGAAALILSKHPSLSASQVRNRLSSTATYLGSSFYYGKGLINVEAAAQ

SEQ ID NO: 54480 - protein, 274 aa, Bacillus licheniformis
AQVVPYGIPLIKADKVQAQGFKGANVKVAVLDTGIQASHPDLNVVGGASFVAGEAYNTDGNGHGTHVAGTVAALDNTTGVLGVAPSVSLYAVKVLNSSGSGSYSGIVSGIEWATTNGMDVINMMLGGSSGSTAMKQAVDNAYARGVVVVAAAGNSGSSGNTNTIGQPAKYDSVIAVGAVDSNSNRASFSSVGAELEVMAPGAGVYSTYPTNTYATLNSTSMASPHVAGAAALILSKHPNLSASQVRNRLSSTATYLGSSFYYGKGLINVEAAAQ

SEQ ID NO: 54481 - protein, 274 aa, Bacillus licheniformis
AQTVPYGIPLIKADKVQAQGFKGANVKVAVLDTGIQASHPDLNVVGGASFVAGEAYNTDGNGHGTHVAGTVAALDNSTGVLGVAPSVSLYAVKVLNSSGSGSYSGIVSGIEWATTNGMDVINMSLGGPSGSTAMKQAVDNAYARGVVVVAAAGNSGSSGNTNTIGYPAKYDSVIAVGAVDSNSQRASFSSVGAELEVMAPGAGVYSTYPTNTYATLSGTSMASPHVAGAAALILSKHPNLSASQVRNRLSSTATYLGSSWYYGKGLINVEAAAQ

SEQ ID NO: 54482 - protein, 274 aa, Bacillus licheniformis
AQTVPYGIPLIKADKVQAQGFKGANVKVAVLDTGIQASHPDLNVRGGASFVAGEAYNTDGNGHGTHVAGTVAALDNTTGVLGVAPSVSLYAVKVLNSSGSGSYSGIVSGIEWATTNGMDVINISLGGASGSTAMKRAVDNAYARGVVVVAAAGNSGSSGNTNTIQYPAKYDSVIAVGAVDSNSNRASFSSVGAELEVMAPGAGVYSTYPTNTYATLNGTSMASPHVAGAAALILSKHPNLSASQVRNRLSSTATYLGESFYYGKGLINVEAAAQ

SEQ ID NO: 54483 - protein, 274 aa, Bacillus licheniformis
AQVVPYGIPLIKADKVQAQGFKGANVKVAVLDTGIQASHPDLNVVGGASFVAGEAYNTDGNGHGTHVAGTVAALDDTTGVLGVAPSVSLYAVKVLNSSGSGSYSGIVSGIEWATTNGMDVINMSLGGAPGSTAMKQAVDNAYARGVVVVAAAGNSGSSGNTNTIGQPAKYDSVIAVGAVDSNSNRASFSSVGAELEVMAPGAGVYSTYPTNTYATLNSTSMASPHVAGAAALILSKHPNLSASQVRNRLSSTATYLGSSFYYGKGLINVEAAAQ

SEQ ID NO: 54484 - protein, 277 aa, Bacillus licheniformis
AQTVPYGIPLIKADKVQAQGFKGANVKVAVLDTGIQASHPDLNVVGGASFVAGEAYNTDGNGHGTHVAGTVAALDNTTGVLGVAPSVSLYAVKVLNSGGGTXTGTYSGIVSGIEWATTNGMDVINMSLGGPSGSTAMKQAVDNAYARGVVVVAAAGNSGSSGNTNTIGYPAKYDSVIAVGAVDSNSNRASFSSVGAELEVMAPGAGVYSTYPTSTYATLNGTSMASPHVAGAAALILSKHPNLSASQVRNRLSSTATYLGSSFYYGKGLINVEAAAQ

SEQ ID NO: 54485 - protein, 274 aa, Bacillus licheniformis
AQTVPYGIPLIKADKVQAQGYKGANVKVAVLDTGIQASHPDLNVVGGASFVAGEAYNTDGNGHGTHVAGTVAALDNTTGVLGVAPNVSLYAVKVLNSSGSGSYSGIVSGIEWATTNGMDVINMSLGGPSGSTAMKQAVDNAYARGVVVVAAAGNSGSSGNTNTIGYPAKYDSVIAVGAVDSNSNRASFSSVGAELEVMAPGAGVYSTYPTSTYATLNGTSMASPHVAGAAALILFKHPNLSASQVRNRLSSTATYLGSSFYYGKGLINVEAAAQ

SEQ ID NO: 54486 - protein, 274 aa, Bacillus licheniformis
AQTVPYGIPLIKADKVQAQGFKGANVKVAVLDTGIQASHPDLNVVGGASFVAGEAYNTDGNGHGTHVAGTVAALDNTTGVLGVAPSVSLYAVKVLNSSGSGTYSGIVSGIEWATTNGMDVINMSLGGPSGSTAMKQAVDNAYARGVVVVAAAGNSGSSGNTNTIGYPAKYDSVIAVGIVDSNSNRASFSSVGAELEVMAPCAGVYSTYPTSTYATLNGTSMASPHVAGAAALILSKHPNLSASQVRNRLSSTATYLGSSFYYGKGLINVEAAAQ

SEQ ID NO: 54487 - protein, 274 aa, Bacillus licheniformis
AQTVPYGIELIKADKVQAQGFKGANVKVAVLDTGIQASHPDLNVRGGASFVAGEAYNTDGNGHGTHVAGTVAALDNTTGVLGVAPSVSLYAVKVLNSSGSGSYSGIVSGIEWATTNGMDVINISLGGASGSTAMKRAVDNAYARGVVVVAAAGNSGSSGNTNTIGYPAKYDSVIAVGAVDSNSNRASFSSVGAELEVMAPGAGVYSTYPTNTYATLNGTSMASPHVAGAAALILSKHPNLSASQVRNRLSSTATYLGESFYYGKGLINVEAAAQ

SEQ ID NO: 54488 - protein, 274 aa, Bacillus licheniformis
AQTVPYGIPMIKADKVQAQGFKGANVKVAVLDTGIQASHPDLNVVGGASFVAGEAYNTDGNGHGTHVAGTVAALDNTIGVLGVAPSSSLYAVKVLNSSGSGSYSGIVSGIEWATTNGMDVINMSLGGASGSTAMKQAVDNAYARGVVVVAAAGNSGSSGNTNTIGYPAKYDSVIAVGAVDSNSNRAEFSSVGAELEVMAPGVGVYSTYPTNTYATLNGTSMASPHVAGAAALILSKHPNLSASQVRNRLSSTATYLGSSFYYGKGLINVEAAAQ

SEQ ID NO: 54489 - protein, 274 aa, Bacillus licheniformis
AQTVPYGIPLIKADKVQAQGYKGANVKVAVLDTGIQASHPDLNAVGGASFVAGEAYNTDGNGHGTHVAGTVAALDNTTGVLGVAPDVSLYAVKVLNSSGSGSYSGIVSGIEWATTNGMDVINMSLGGPSGSTAMKQAVDNAYARGVVVVAAAGNSGSSGNTNTIGYPAKYDSVIAVGAVDSNSNRASFSSVGAELEVMAPGAGVYSTYPTSTYATLNGTSMASPHVAGAAALILSKHPNLSASQVRNRLSSTATYLGSSFYYGKGLINVEAAAQ

SEQ ID NO: 54490 - protein, 274 aa, Bacillus licheniformis
AQTVPYGIPLIKADKVQAQGYKGANVKVAVLDTGIQASHPDLNVVGGASFVAGEAYNTDGNGHGTHVAGTVAALDNTTGVLGVAPNVSLYAVKVLNSSGSGSYSGIVSGIEWATTNGMDVINMSLGGPSGSTAMKQAVDNAYARGVVVVAAAGNSGSSGNTNTIGYPAKYDSVIAVGAVDSNSNRASFSSVGAELEVMAPGAGVYSTYPTSTYATLNGTSMASPHVAGAAALILEKHPNLSASQVRNRLSSTATYLGSSFYYGKGLINVEAAAQ

SEQ ID NO: 54491 - protein, 274 aa, Bacillus licheniformis
AQTVPYGIPHIKADKVQAQGYKGANVKVAVLDTGIQASHPDLNVVGGASFVAGEAYNTDGNGHGTHVAGTVAALDNTTGVLGVAPNVSLYAVKVLNSSGSGSYSGIVSGIEWATTNGMDVINMSLGGPSGSTAMKQAVDNAYARGVVVVAAAGNSGSSGNTNTIGYPAKYDSVIAVGAVDSNSNRASFSSVGAELEVMAPGAGVYSTYPTSTYATLNGTSMASPHVAGAAALILSKHPNLSASQVRNRLSSTATYLGSSFYYGKGLINVEAAAQ

SEQ ID NO: 54492 - protein, 274 aa, Bacillus licheniformis
AQTVPYGIPLIKADIVQAQGFKGANVKVAVLDTGIQASHPDLNVVGGASFVAGEAYNTDGNGHGTHVAGTVAALDNTTGVLGVAPSVSLYAVKVLNSSGSGSYSGIVSGIEWATTNGMDVINMSLGGASGSTAMKQAVDNAYARGSVVVAAAGNSGSSGNTNTISYPAKYDSVIAVGAVDSNSNRASFSSVGAELEVMAPGAGVYSTYPPNTYATLNGTSMASPHVAGAAALILSKHPSLSASQVRNRLSSTATYLGSSFYYGKGLINVEAAAQ

SEQ ID NO: 54493 - protein, 274 aa, Bacillus licheniformis
AQTVPYGIPLIKADKVQAQGFKGANVKVAVLDTGIQASHPDLNVVGGASFVAGEAYNTDGNGHGTHVAGTVAALDNDTGVLGVAPRVSLYAVKVLNSSGSGSYSGIVSGIEWATTNGMDVINMSLGGASGSTAMKQAVDNAYARGVVVVAAAGNEGSSGNTNTIAYPAKYDSVIAVGAVDSNSQRASFSSVGAELEVMAPGAGVYSTYPTNTYATLNGTSMASPHVAGAAALILSKHPNLSASQVRNRLSSTATYLGSSFYYGKGLINVEAAAQ

SEQ ID NO: 54494 - protein, 274 aa, Bacillus licheniformis
AQVVPYGIPLIKADKVQAQGFKGANVKVAVLDTGIQASHPDLNVVGGASFVAGEAYNTDGNGHGTHVAGTVAALDDTTGVLGVAPSVSLYAVKVLNSSGSGSYSGIVSGIEWATTNGMDVINMSLGGAPGSTAMKQAVDNAYARGVVVVAAAGNSGSSGNTNTIGQPAKYDSVIAVGAVDSNSNRASFSSVGAELEVMAPGAGVYSTYPTNTYATLNGTSMASPHVAGAAALILSKHPNLSASQVRNRLSSTATYLGSPFYYGKGLINVEAAAQ

SEQ ID NO: 54495 - protein, 274 aa, Bacillus licheniformis
AQTVPYGIPLIKADKVQAQGFKGANVKVAVLDTGIQASHPDLNVVGGASFVAGEAYNADGNGHGTHVAGTVAALDNTTGVLGVAPSVSLYAVKVLNSSGSGTYSGIVSGIEWATTNGMDVINMSLGGPSGSTAMKQAVDNAYARGVVVVAAAGNSGSSGNTNTIGYPAKYDSVIAVGAVDSNSNRASFSSVGAELEVMAPGAGVYSTYPTSTYATWNGTSMASPHVAGAAALILSKHPNLSASQVRNRLSSTATYLGSSFYYGKGLINVEAAAQ

SEQ ID NO: 54496 - protein, 274 aa, Bacillus licheniformis
AQTVPYGIPLIKADKVQAQGFKGANVKVAVLDTGIQASHPDLNVVGGASFVAGEAYNTDGNGHGTHVAGTVAALDNSTGVLGVAPSVSLYAVKVLNSSGSGSYSGIVSGIEWATTNGMDVINMSLGGASGSTAMKQAVDNAYARGVVVVAAAGNSGSSGNTNTIAYPAKYDSVIAVGAVDSNSQRASFSSVGAELEVMAPGAGVYSTYPPNTYATLSGTSMASPHVAGAAALILSKHPNLSASQVRNRLSSTATYLGSSFYYGKGLINVEAAAQ

SEQ ID NO: 54497 - protein, 274 aa, Bacillus licheniformis
AQTVPYGIPLIKADKVQAQGFKGANVKVAVLDTGIQASHPDLNVVGGASFVAGEAYNTDGNGHGTHVAGTVAALDNTTGVLGVAPNVSLYAVKVLNSSGSGSYSDIVSGIEWATTNGMDVINMSLGGPSGSTAMKQAVDNAYARGVVVVAAAGNSGSSGNTNTIGYPAKYDSVIAVGAVDSNSNRASFSSVGAELEVMAPGAGVYSTYPTSTYATLNGTSQASPHVAGAAALILSKHPNLSASQVRNRLSSTATYLGSSFYYGKGLINVEAAAQ

SEQ ID NO: 54498 - protein, 274 aa, Bacillus mojavensis
AQTVPYGIPLIKADKVQAQGFKGANVKVAVLDTGIQASHPDLNVVGGASFVAGEAYNTDGNGHGTHVAGIVAALDNTTGVLGVAPSVKLYAVKVLNSSGSGSYSQIVSGIEWATTNGMDVINMSLGGASGSTAMKQAVDNAYARGVVVVAAAGNSGSSGNTNTISYPAKYDSVIAVGAVDSNMNRASFSSVGAELEVMAPGAGVYSTYPTNTYATLNGTSMASPHVAGAAALILSKHPNLSASQVRNRLSSTATYLGSSFYYGKGLINVEAAAQ

SEQ ID NO: 54499 - protein, 269 aa, Synthetic construct
AQSVPWGISRVQAPAAHNRGLTGSGVKVAVLDTGISTHPDLNIRGGASFVPGEPSTQDGNGHGTHVAGTIAALDNSIGVLGVAPSAELYAVKVLGASGSGAISSIAQGLEWAGNNGMHVANLSLGSPSPSATLEQAVNSATSRGVLVVAASGNSGAGSISYPARYANAMAVGATDQNNNRASFSQYGAGLDIVAPGVNVQSTYPGSTYASLNGTSMATPHVAGAAALVKQKNPSWSNVQIRNHLKNTATSLGSTNLYGNGLVNAEAATR

SEQ ID NO: 54500 - protein, 269 aa, Unidentified
AQSVPWGISRVQAPAAHNRRLTGSGVKVAVLDTGISTHPDLRITGGASFVPGEPSTQDGNGHGTHVAGTIAALNNSIGVLGVAPSAELYAVKVLGASGSGSVSSIAQGLEWAGNNGMHVANLSLGSPSPSATLEQAVNSATSRGVLVVAASGNSGAGSISYPARYANAMAVGATDQNNNRASFSQYGAGLDIVAPGVNVQSTYPGSTYASLNGTSMATPHVAGEAALVKQKNPSWSNVQIRNHLKNTATSLGSTNLYGSGLVNAEAATR

SEQ ID NO: 54501 - protein, 269 aa, Synthetic construct
AQSVPWGISRVQAPAAHNRGLTGSGVKVAVLDTGISTHPDLNIRGGASFVPGEPSTQDGNGHGTHVAGTIAALDNSIGVLGVAPSAELYAVKVLGASGSGSISSVAQGLEWAGNNGMHVASLSLGSPSPSATLEQAVNSATSRGVLVVAASGNSGAGSISYPARYANAMAVGATDQNNNRASFSQYGAGLDIVAPGVNVQSTYPGSTYASLNGTSMATPHVAGAAALVKQKNPSWSNVQIRNHLKNTATSLGSTNLYGSGLVNAEAATR

SEQ ID NO: 54502 - protein, 269 aa, Unidentified
AQSVPWGISRVQAPAAHNRKLTGSGVKVAVLDTGISTHPDLNIRGGASFVPGEPSTQDGNGHGTHVAGTIAALNNNIGVLGVAPSAELYAVKVLGASGSGSVSSIAQGLEWAGNNGMHVANLSLGDPSPSATLEQAVNSATSRGVLVVAASGNSGAGSISYPARYANAMAVGATDQNNNRASFSQYGAGLDIVAPGVNVQSTYPGSAYASLNGTSMATPHVAGAAALVKQKNPSWSNVQIRNHLKNTATSLGSTNLYGSGLVNAEAATR

SEQ ID NO: 54503 - protein, 269 aa, Unidentified
AQSVPWGISRVQAPAAHNRGLAGRGVKVAVLDSGISTHPDLNIRGGASFVPGEPSTQDGNGHGTHVAGTIAALNNSIGVLGVAPSAELYAVKVLGASGSGSVSSIAQGLEWAGNNGMHVANLSLGSPSPSATLEQAVNSATSRGVLVVAASGNSGAGSIDYPARYANAMAVGATDQNNNRASFSQYGAGLDIVAPGVNVQSTYPGSTYASLNGTSMATPHVAGAAALVKQKNPSWSNVQIRNHLKNTATSLGSTNLYGSGLVNAEAATR

SEQ ID NO: 54504 - protein, 269 aa, Unidentified
AQSVPWGISRVQAPAAHNRKLTGSGVKVAVLDTGISTHPDLNIRGGASFVPGEPSTQDGNGHGTHVAGTIAALNNSIGVLGVAPSAELYAVKVLGASGSGSVSSIAQGLEWAGLNGMHVANLSLGQPSPSATLEQAVNSATSRGVLVVAASGNSGAGSISYPARYANAMAVGATDQNNNRASFSQYGAGLDIVAPGVNVQSTYPGSAYASLNGTSMATPHVAGAAALVKQKNPSWSNVQIRNHLKNTATSLGSTNLYGSGLVNAEAATR

SEQ ID NO: 54505 - protein, 269 aa, Unidentified
AQSVPWGISRVQAPAAHNRGLAGSGVKVAVLDTGISTHPDLNIRGGASFVPGEPSTQDGEGHGTHVAGTIAALNNSIGVLGVAPSAELYAVKVLGASGSGSVSSIAQGLEWAGLNGMHVANLSLGSPSPSATLEQAVNSATSRGVLVVAASGNSGAGSIDYPARYANAMAVGATDQNNNRASFSQYGAGLDIVAPGVNVQSTYPGSTYASLNGTSMATPHVAGAAALVKQKNPSWSNVQIRNHLKNTATSLGSTNLYGSGLVNAEAATR

SEQ ID NO: 54506 - protein, 269 aa, Unidentified
AQVVPWGISRVQAPAAHNRGLTGSGVKVAVLDTGISTHPDLNIRGGASFVPGEPSTQDGNGHGTHVAGTIAALNNSIGVLGVAPSAELYAVKVLGASGSGSVSSIAQGLEWAGNNGMHVANLSMGSPSPSATLEQAVNSATSRGVLVVAASGNSGAGSISYPARYQNAMAVGATDQNNNRASFSQYGAGLDIVAPGVNVQSTYPGSTYASLNGTSMASPHVAGAAALVKQKNPSWSNVQIRNHLKNTATSLGSTNLYGSGLVNAEAATR

SEQ ID NO: 54507 - protein, 269 aa, Unidentified
AQSVPWGISRVQAPAAHNRKLTGFGVKVAVLDTGISTHPDLNIRGGASFVPGEPSTQDGNGHGTHVAGTIAALNNNIGVLGVAPSAELYAVKVLGASGSGSVSSIAQGLEWAGNNGMHVANLSLGSPSPSATLEQAVNSATSRGVLVVAASGNSGAGSISYPARYANAMAVGATDQNNNRASFSQYGAGLDIVAPGVNVQSTYPGSTYASENGTSMATPHVAGAAALVKQKNPSWSNVQIRNHLKNTATSLGSTNLYGSGLVNAEAATR

SEQ ID NO: 54508 - protein, 269 aa, Synthetic construct
AQSVPWGISRVQAPAAHNRGLTGSGVKVAVLDTGISTHPDLNIRGGASFVPGEPSTQDGNGHGTHVAGTIAALDNSIGVLGVAPSAELYAVKVLGASGRGAISSIAQGLEWAGNNGMHVANLSLGSPSPSATLEQAVNSATSRGVLVVAASGNSGAGSISYPARYANAMAVGATDQNNNRASFSQYGAGLDIVAPGVNVQSTYPGSTYASLNGTSMATPHVAGAAALVKQKNPSWSNVQIRNHLKNTATSLGSTNLYGSGLVNAEAATR

SEQ ID NO: 54509 - protein, 269 aa, Unidentified
AQSVPWGISRVQAPAAHNRGLTGRGVKVAVLDTGISTHPDLNIRRGASFVPGEPSTQDGNGHGTHVAGTIAALNNSIGVLGVAPSAELFAVKVLGASGSGSVSSIAQGLEWAGNNGMHFANLSLGSPSPSATLEQAVNSATSRGVLVVAASGNSGAGSISYPARYANAMAVGATDQNNNRASFSQYGAGLDIVAPGVNVQSTYPGSTYASLNGTSMATPHVAGAAALVKQKNPSWSNVQIRNHLKNTATSLGSTNLYGSGLVNAEAATR

SEQ ID NO: 54510 - protein, 269 aa, Unidentified
AQSVPWGISRVQAPAAHNRGLTGSGVKVAVLDSGISTHPDLNIRGGASFVPGEPSTQDGNGHGTHVAGTIAALNNSIGVLGVAPSAELYAVKVLGASGSGSVSSIAQGLEWAGNNRMHVANLSLGSPSPSATLEQAVNSATSRGVLVVAASGNSGADSISYPARYANAMAVGATDQNNNRASFSQYGAGLDIVAPGVNVQSTAPGSTYASLNGTSMATPHVAGAAALVKQKNPSWSNVQIRNHLKNTATSLGSTNLYGSGLVNAEAATR

SEQ ID NO: 54511 - protein, 269 aa, Unidentified
AQSVPWGISRVQAPAAHNRGLTGSGVKVAVLDTGISTHPDLNIRGGASFVPGEPSTQDGNGHGTHVAGTIAALNNGIGVLGVAPSAELYAVKVLGASGSGSVSSIAQGLEWAGNNSMHVANLSLGSPSPSATLEQAVNSATSRGVLVVAASGNSGAGSISYPARYANAMAVGATDQNNNRASFSQYGAGLDIVAPGVNVQSTYPGSTYASLNGTSMATPHVAGAAALVKQKNPSWSNVRIRNRLKNTATSLGSTNLYGSGLVNAEAATR

SEQ ID NO: 54512 - protein, 269 aa, Unidentified
AQSVPWGISRVQAPAAHNRKLTGSGVKVAVLDTGISTHPDLNIRGGASFVPGEPSTQDGNGHGTHVAGTIAALNNSIGVLGVAPSAELYAVKVLGASSSGSVSSIAQGLEWAGNNGMHVANLSLGSPSPSATLEQAVNSATSRGVLVVAASGNSGAGSISYPARYANAMAVGATDQNNNRASFSQYGAGLDIVAPGVNVQSTYPGSTYASENGTSMATPHVAGAAALVKQKNPRWSNVQIRNHLKNTATSLGSTNLYGSGLVNAEAATR

SEQ ID NO: 54513 - protein, 269 aa, Unidentified
AQSVPWGISRVQAPAAHNRRLTGSGVKVAVLDTGISTHPDLNIRGGASFVPGEPSTQDGNGHGTHVAGTIAALNNSIGVLGVAPSAELYAVKVLGASGSGSVSSIAQGLEWAGNNGMHVANLSLGSPSPSATLEQAVNSATSRGVLVVAASGNSGADSISYPARYANAMAVGATDQNNNRASFSQYGAGLDIVAPGVNVQSTYPGSTYASLNGTSMATPHVAGAAALVKQKNPSWSNVRIRDHLKNTATSLGSTNLYGSGLVNAEAATR

SEQ ID NO: 54514 - protein, 269 aa, Unidentified
AQSVPWGISRVQAPAAHNRGLTGRGVKVAVLDTGISTHPDLNIRGGASFVPGEPSTQDGNGHGTHVAGTIAALNNDIGVLGVAPSAELYAVKVLGASGSGSVSSIAQGLEWAGNNSMHVANLSLGSESPSATLEQAVNSATSRGVLVVAASGNSGAGSISYPARYANAMAVGATDQNNNRASFSQYGAGLDIVAPGVNVQSTYPGSTYASLNGTSMATPHVAGAAALVKQKNPSWSNVQIRNHLKNTATSLGSTNLYGSGLVNAEAATR

SEQ ID NO: 54515 - protein, 269 aa, Unidentified
AQSVPWGISRVQAPAAHRRGLTGSGVKVAVLDTGISTHPDLNIRGGASFVPGEPSTQDGNGHGTHVAGTIAALDNSIGVLGVAPSAELYAVKVLGASGSGAVSSIAQGLEWAGNNGMHVANLSLGSPSPSATLEQAVNSATSRGVLVVAASGNSGAGSISYPARYANAMAVGATDQNNNRASFSQYGAGLDIVAPGVNVQSTYPGSTYASLNGTSMATPHVAGAAVLVKQKNPSWSNVQIRNHLKNTATSLGSTNLYGSGLVNAEAATR

SEQ ID NO: 54516 - protein, 269 aa, Unidentified
AQSVPWGISRVQAPAAHNRRLRGSGVKVAVLDTGISTHPDRNIRGGASFVPGEPSTQDGNGHGTHVAGTIAALNNSIGVLGVAPSAELYAVKVLGASGSGSVSSIAQGLEWAGNNGMHVANLSLGSPSPSATLEQAVNSATSRGVLVVAASGNSGAGSISYPARYANAMAVGATDQNNNRASFSQYGAGLDIVAPGVNVQSTYPGFTYASLNGTSMATPHVAGAAALVKQKNPSWSNVQIRNHLKNTATSLGSTNLYGSGLVNAEAATR

SEQ ID NO: 54517 - protein, 269 aa, Unidentified
AQSVPWGISRVQAPAAHNRGLWGRGVKVAVLDTGISTHPDLNITGGASFVPGEPSTQDGNGHGTHVAGTIAALNNSIGVLGVAPSAELYAVKVLGASGAGSVSSIAQGLEWAGNNGMHVANLSLGSPSPSATLEQAVNSATSRGVLVVAASGNSGAGSISYPARYANAMAVGATDQNNNRASFSQYGAGLDIVAPGVNVQSTYPGSTYASLNGTSMATPHVAGAAALVKQKNPSWSNVQIRNHLKNTATSLGSTNLYGSGLVNAEAATR

SEQ ID NO: 54518 - protein, 269 aa, Unidentified
AQSVPWGISRVQAPAAHNRGLTGSGVKVAVLDTGISTHPDLNIRGGASFVPGEPSTQDGNGHGTHVAGTIAALNNGIGVLGVAPSAELYAVKVLGASGSGSVSSIAQGLEWAGNNSMHVANLSLGSESPSATLEQAVNSATSRGVLVVAASGNSGAGSISYPARYANAMAVGATDQNNNRADFSQYGAGLDIVAPGVNVQSTYPGSTYASLNGTSMATPHVAGAAALVKQKNPSWSNVQIRNHLKNTATSLGSTNLYGSGLVNAEAATR

SEQ ID NO: 54519 - protein, 269 aa, Unidentified
AQSVPWGISRVQAPAAHNRGLTGRGVKVAVLDTGISTHPDLNIRGGASFVPGEPSTQDGNGHGTHVAGTIAALNNSIGVLGVAPSAELYAVKVLGASGSGSVSSIAQGLEWAGNNRMHVANLSLGSPSPSATLEQAVNSATSRGVLVVAASGNSGAGSISYPARYANAMAVGATDQNNNRADFSQYGAGLDIVAPGVNVQSTYPGSTYASLNGTSMATPHVAGAAALVKQKNPSWSNVQIRDHLKNTATSLGSTNLYGSGLVNAEAATR

SEQ ID NO: 54520 - protein, 269 aa, Unidentified
AQSVPWGISRVQAPAAHNRKLTGSGVKVAVLDTGISTHPDLNIRGGASFVPGEPSTQDGNGHGTHVAGTIAALNNNIGVLGVAPSAELYAVKVLGASGDGSVSSIAQGLEWAGNNGMHVANLSLGSPSPSATLEQAVNSATSRGVLVVAASGNSGAGSISYPARYANAMAVGATDQNNNRASFSQYGAGLDIVAPGVNVQSTYPGSTYASLNGTSMATPHVAGAAALVKQKNPRWSNVQIRNHLKNTATSLGSTNLYGSGLVNAEAATR

SEQ ID NO: 54521 - protein, 269 aa, Unidentified
AQSVPWGISRVQAPAAHNRGLTGFGVKVAVLDTGISTHPDLNIRGGASFVPGEPSTQDGEGHGTHVAGTIAALNNSIGVLGVAPSAELYAVKVLGASGSGSVSSIAQGLEWAGNNGMHVANLSLGSPSPSATLEQAVNSATSRGVLVVAASGNSGAGSISYPARYANAMAVGATDQNNNRADFSQYGAGLDIVAPGVNVQSTYPGSTYASLNGTSMATPHVAGAAALVKQKNGSWSNVQIRNHLKNTATSLGSTNLYGSGLVNAEAATR

SEQ ID NO: 54522 - protein, 269 aa, Unidentified
AQSVPWGISRVQAPAAHNRGLTGFGVKVAVLDTGISTHPDLNIRGGASFVPGEPSTQDGNGHGTHVAGTIAALNNNIGVLGVAPSAELYAVKVLGASGSGSVSSIAQGLEWAGNNRMHVANLSLGSPSPSATLEQAVNSATSRGVLVVAASGNSGAGSISYPARYANAMAVGATDQNNNRASFSQYGAGLDIVAPGVNVQSTYPGSTYASENGTSMATPHVAGAAALVKQKNPSWSNVQIRNHLKNTATSLGSTNLYGSGLVNAEAATR

SEQ ID NO: 54523 - protein, 269 aa, Unidentified
AQSVPWGISRVQAPAAHNRGLTGRGVKVAVLDTGISTHPDLKITGGASFVPGEPSTQDGNGHGTHVAGTIAALNNSIGVLGVAPSAELYAVKVLGASGAGSVSSIAQGLEWAGNNGMHVANLSLGSPSPSATLEQAVNSATSRGVLVVAASGNSGAGSISYPARYANAMAVGATDQNNNRASFSQYGAGLDIVAPGVNVQSTYPGSTYASLNGTSMATPHVAGAAALVKQKNPSWSNVQIRNHLKNTATSLGSTNLYGSGLVNAEAATR

SEQ ID NO: 54524 - protein, 269 aa, Unidentified
AQSVPWGISRVQAPAAHNRGLTGSGVKVAVLDTGISTHPDLNIRGGASFVPGEPSTQDGNGHGTHVAGTIAALNNSIGVLGVAPSAELYAVKVLPQGGGGSVSSIAQGLEWAGNNGMHVANLSLGSPSPSATLEQAVNSATSRGVLVVAASGNSGAGSISYPARYANAMAVGATDQNNNRASFSQYGAGLDIVAPGVNVQSTYPGSTYASLNGTSMATPHVAGAAALVKQKNPSWSNVQIRNHLKNTATSLGSTNLYGSGLVNAEAATR

SEQ ID NO: 54525 - protein, 269 aa, Unidentified
AQSVPWGISRVQAPAAHNRGLTGSGVKVAVLDTGISTHPDLNIRGGASFVPGEPSTQDGNGHGTHVAGTIAALNNSIGVLGVAPSAELYAVKVLSASGNGSVSSIANGLEWAGNNGMHVANLSLGSPSPSATLEQAVNSATSRGVLVVAASGNSGAGSISYPARYANAMAVGATDQNNNRADFSQYGAGLDIVAPGVNVQSTYPGSTYASLNGTSMATPHVAGAAALVKQKNPSWSNVQIRNHLKNTATSLGSTNLYGSGLVNAEAATR

SEQ ID NO: 54526 - protein, 269 aa, Unidentified
AQSVPWGISRVQAPAAHNRGLTGSGVKVAVLDTGISTHPDLNIRGGASFVPGEPSTQDGNGHGTHVAGTIAALNNSIGVLGVAPSAELYAVKVLPATGAGAVSSIAQGLEWAGNNGMHVANLSLGSPSPSATLEQAVNSATSRGVLVVAASGNSGAGSISYPARYANAMAVGATDQNNNRASFSQYGAGLDIVAPGVNVQSTYPGSTYASLNGTSMATPHVAGAAALVKQKNPSWSNVQIRNHLKNTATSLGSTNLYGSGLVNAEAATR

SEQ ID NO: 54527 - protein, 269 aa, Unidentified
AQSVPWGISRVQAPAAHNRKLTGSGVKVAVLDTGISTHPDLNIRGGASFVPGEPSTQDGEGHGTHVAGTIAALNNSIGVLGVAPSAELYAVKVLGASGSGSVSSIAQGLEWAGLNGMHVANLSLGQPSPSATLEQAVNSATSRGVLVVAASGNSGAGSISYPARYANAMAVGATDQNNNRASFSQYGAGLDIVAPGVNVQSTYPGSAYASLNGTSSATPHVAGAAALVKQKNPSWSNVQIRNHLKNTATSLGSTNLYGSGLVNAEAATR

SEQ ID NO: 54528 - protein, 269 aa, Unidentified
AQSVPWGISRVQAPAAHNRGLTGRGVKVAVLDTGISTHPDLNIRGGASFVPGEPSTQDGNGHGTHVAGTIAALNNSIGVLGVAPSAELYAVKVLGASGSGSVSSIAQGLEWAGNNRMHVANLSLGSPSPSATLEQAVNSATSRGVLVVAASGNSGAGSISYPARYANAMAVGATDQNNNRASFSQYGAGLDIVAPGVNVQSTYPGSTYASLNGTSMATPHVAGAAALVKQKNPSWSFVQIRNHLKNTATSLGSTNLYGSGLVHAEAATR

SEQ ID NO: 54529 - protein, 269 aa, Unidentified
AQSVPWGISRVQAPAAHNRRLTGSGVKVAVLDTGISTHPDLNIRGGASFVPGEPSTQDGNGHGTHVAGTIAALNNSIGVLGVAPSAELYAVKVLGASGSGSVSSIAQGLEWAGNNGMHVANLSLGSPSPSATLEQAVNSATSRGVLVVAASGNSGADSISYPARYANAMAVGATDQNNNRASFSQYGAGLDIVAPGVNVQSTYPGSTYASLNGTSMATPHVAGAAALVKQKNPSWSNVQIRDRLKNTATSLGSTNLYGSGLVNAEAATR

SEQ ID NO: 54530 - protein, 269 aa, Unidentified
AQSVPWGISRVQAPAAHNRGLAGSGVKVAVLDTGISTHPDLNIRGGASFVPGEPSTQDGNGHGTHVAGTIAALNNSIGVLGVAPSAELYAVKVLGASGSGSVSSIAQGLEWAGLNRMHVANLSLGSPSPSATLEQAVNSATSRGVLVVAASGNSGEGSISYPARYANAMAVGATDQNNNRASFSQYGAGLDIVAPGVNVQSTYPGSTYASLNGTSMATPHVAGAAALVKQKNPSWSNVQIRNHLKNTATSLGSTNLYGSGLVNAEAATR

SEQ ID NO: 54531 - protein, 269 aa, Unidentified
AQSVPWGISRVQAPAAHNRGLTGRGVKVAVLDTGISTHPDLNIRGGASFVPGEPSTQDGNGHGTHVAGTIAALDNSIGVLGVAPSAELYAVKVLGASGSGSVSSIAQGLEWAGNNGMHVANLSLGSPSPSATLEQAVNSATSRGVLVVAASGNSGAGSISYPARYANAMAVGATDQNNNRASFSQYGAGLDIVAPGVNVQSTYPGSTYASLNGTSMATPHVAGAAVLVKQKNPSWSNVQIRNRLKNTATSLGSTNLYGSGLVNAEAATR

SEQ ID NO: 54532 - protein, 269 aa, Unidentified
AQSVPWGISRVQAPAAHNRGLAGSGVKVAVLDTGISTHPDLNIRGGASFVPGEPSTQDGEGHGTHVAGTIAALNNSIGVLGVAPSAELYAVKVLGASGSGSVSSIAQGLEWAGNNRMHVANLSLGSPSPSATLEQAVNSATSRGVLVVAASGNSGAGSISYPARYANAMAVGATDQNNNRADFSQYGAGLDIVAPGVNVQSTYPGSTYASLNGTSMATPHVAGAAALVKQKNPSWSNVQIRNHLKNTATSLGSTNLYGSGLVNAEAATR

SEQ ID NO: 54533 - protein, 269 aa, Unidentified
AQSVPWGISRVQAPAAHNRRLTGSGVKVAVLDTGISTHPDLNIRGGASFVPGEPSTQDGNGHGTHVAGTIAALNNSIGVLGVAPSAELYAVKVLGASGSGSISSIAQGLEWAGNNGMHVANLSLGSPSPSATLEQAVNSATSRGVLVVAASGNSGAGSISYPARYANAMAVGATDQNNNRASFSQYGAGLDIVAPGVNVQSTYPGSTYASLNGTSMATPHVAGAAVLVKQKNPSWRNVQIRNHLKNTATSLGSTNLYGSGLVNAEAATR

SEQ ID NO: 54534 - protein, 269 aa, Unidentified
AQSVPWGISRVQAPAAHNRGLTGSGVKVAVLDTGISTHPDLNIRGGASFVPGEPSTQDGNGHGTHVAGTIAALNNSIGVLGVAPSAELYAVKVLGASGGGSISSIAQGVEWAGNNGMHVANLSLGNPSPSATLEQAVNSATSRGVLVVAASGNSGAGSISYPARYANAMAVGATDQNNNRASFSQYGAGLDIVAPGVNVQSTYPGSTYASLNGTSMATPHVAGAAALVKQKNPSWSNVQIRNHLKNTATSLGSTNLYGSGLVNAEAATR

SEQ ID NO: 54535 - protein, 269 aa, Unidentified
AQSVPWGISRVQAPAAHNRGLTGRGVKVAVLDTGISTHPDLNIRGGASFVPGEPSTQDGNGHGTHVAGTIAALNNSIGVLGVAPSAELYAVKVLGASGSGSVSSIAQGLEWAGANGMHVANLSLGSPSPSATLEQAVNSATSRGVLVVAASGNSGAGSISYPARYANAMAVGATDQNNNRASFSQYGAGLDIVAPGVNVQSTYPGSAYASLNGTSMATPHVAGAAALVKQKNPSWSNVQIRNHLKNTATSLGSTNLYGSGLVRAEAATR

SEQ ID NO: 54536 - protein, 269 aa, Unidentified
AQSVPWGISRVQAPAAHNRGLAGSGVKVAVLDTGISTHPDLNIRGGASFVPGEPSTQDGEGHGTHVAGTIAALNNSIGVLGVAPSAELYAVKVLGASGSGSVSSIAQGLEWAGLNRMHVANLSLGSPSPSATLEQAVNSATSRGVLVVAASGNSGAGSISYPARYANAMAVGATDQNNNRASFSQYGAGLDIVAPGVNVQSTYPGSTYASLNGTSMATPHVAGAAALVKQKNPSWSNVQIRNHLKNTATSLGSTNLYGSGLVNAEAATR

SEQ ID NO: 54537 - protein, 269 aa, Unidentified
AQSVPWGISRVQAPAAHNRRLTGRGVKVAVLDTGISTHPDLDIRGGASFVPGEPSTQDGNGHGTHVAGTIAALNNSIGVLGVAPSAELYAVKVLGASGSGSVSSIAQGLEWAGNNGMHVANLSLGSPSPSATLEQAVNSATSRGVLVVAASGNSGAGSISYPARYANAMAVGATDQNNNRASFSQYGAGLDIVAPGVNVQSTYPGSTYASLNGTSMATPHVAGAAALVKQKNPSWSNVQIRNRLKNTATSLGSTNLYGSGLVNAEAATR

SEQ ID NO: 54538 - protein, 269 aa, Unidentified
AQSVPWGISRVQAPASHNRGLTGSGVKVAVLDTGISTHPDLNIRGGASFVPGEPSTQDGNGHGTHVAGTIAALNNSIGVLGVAPSAELYAVKVLGASGSGSVSSIAQGLEWAGNNGMHVANLSLGNPSPSATLEQAVNSATSRGVLVVAASGNSGAGSISYPARYANAMAVGATDQNNNHASFSQYGAGLDIVAPGVNVQSTYPGSTYASLNGTSMATPHVAGAAALVKQKNPSWSNVQIRNHLKNTATSLGSTNLYGSGLVNAFAATR

SEQ ID NO: 54539 - protein, 269 aa, Unidentified
AQSVPWGISRVQAPAAHNRGLTGRGVKVAVLDTGISTHPDLNIRGGASFVPGEPSTQDGNGHGTHVAGTIAALNNSIGVLGVAPSAELYAVKVLGASGGGAISSIAQGLEWAGNNGMHVANLSLGSPSPSATLEQAVNSATSRGVLVVAASGNSGAGSISYPARYANAMAVGATDQNNNRASFSQYGAGLDIVAPGVNVQSTYPGSTYASLNGTSMATPHVAGAAALVKQKNPSWSNVQIRNHLKNTATSLGSTNLYGSGLVNAEAATR

SEQ ID NO: 54540 - protein, 269 aa, Unidentified
AQSVPWGISRVQAPAAHNRGLTGRGVKVAVLDTGISTHPDLNIRGGASFVPGEPSTQDGNGHGTHVAGTIAALNNSIGVLGVAPSAELYAVKVLGASGSGAISSIAQGLEWAGNNGMHVANLSLGSPSPSATLEQAVNSATSRGVLVVAASGNSGAGSISYPARYANAMAVGATDQNNNRASFSQYGAGLDIVAPGVNVQSTYPGSTYASLNGTSMATPHVAGAAALVKQKNPSWSNVQIRNRLKNTATSLGSTNLYGSGLVNAEAATR

SEQ ID NO: 54541 - protein, 269 aa, Unidentified
AQSVPWGISRVQAPAAHNRGLTGSGVKVAVLDTGISTHPDLNIRGGASFVPGEPSTQDGNGHGTHVAGTIAALNNSIGVLGVAPSAELYAVKVLGQTSAGSVSSIAQGLEWAGNNGMHVANLSLGSPSPSATLEQAVNSATSRGVLVVAASGNSGAGSISYPARYANAMAVGATDQNNNRASFSQYGAGLDIVAPGVNVQSTYPGSTYASLNGTSMATPHVAGAAALVKQKNPSWSNVQIRNHLKNTATSLGSTNLYGSGLVNAEAATR

SEQ ID NO: 54542 - protein, 269 aa, Unidentified
AQSVPWGISRVQAPAAHNRGLTGSGVKVAVLDTGISTHPDLNIRGGASFVPGEPSTQDGNGHGTHVAGTIAALNNNIGVLGVAPSAELYAVKVLAASGQGSVSSIANGLEWAGNNGMHVANLSLGSPSPSATLEQAVNSATSRGVLVVAASGNSGAGSISYPARYANAMAVGATDQNNNRASFSQYGAGLDIVAPGVNVQSTYPGSTYASLNGTSMATPHVAGAAALVKQKNPSWSNVQIRNHLKNTATSLGSTNLYGSGLVNAEAATR

SEQ ID NO: 54543 - protein, 269 aa, Unidentified
AQSVPWGISRVQAPAAHNRGLTGSGVKVAVLDTGISTHPDLNIRGGASFVPGEPSTQDGNGHGTHVAGTIAALNNSIGVLGVAPSAELYAVKVLGASGSGNVSSIAQGLEWAGNNGMHVANLSLGSPSPSATLEQAVNSATSRGVLVVAASGNSGAGDISYPARYANAMAVGATDQNNNRASFSQYGAGLDIVAPGVNVQSTYPGSTYASLNGTSMATPHVAGAAALVKQKNPSWSNVQIRNHIKNTATNLGSTNLYGSGLVNAEAATR

SEQ ID NO: 54544 - protein, 269 aa, Unidentified
AQSVPWGISRVQAPAAHNRGLTGRGVKVAVLDTGISTHPDLNIRGGASFVPGEPSTQDGNGHGTHVAGTIAALNNSIGVLGVAPSAELYAVKVLGASGGGSISSIAQGLEWAGNNGMHVANLSLGSPSPSATLEQAVNSATSRGVLVVAASGNSGAGSISYPARYANAMAVGATDQNNNRASFSQYGAGLDIVAPGVNVQSTYPGSTYASLNGTSMATPHVAGAAALVKQKNPSWSNVQIRNRLKNTATSLGSTNLYGSGLVNAEAATR

SEQ ID NO: 54545 - protein, 269 aa, Unidentified
AQSVPWGISRVQAPAAHNRGLAGSGVKVAVLDSGISTHPDLNIRGGASFVPGEPSTQDGNGHGTHVAGTIAALNNSIGVLGVAPSAELYAVKVLGASGSGSVSSIAQGLEWAGLNGMHVANLSLGSPSPSATLEQAVNSATSRGVLVVAASGNSGAGSIDYPARYANAMAVGATDQNNNRASFSQYGAGLDIVAPGVNVQSTYPGSTYASLNGTSMATPHVAGAAALVKQKNPSWSNVQIRNHLKNTATSLGSTNLYGSGLVNAEAATR

SEQ ID NO: 54546 - protein, 269 aa, Unidentified
AQSVPWGISRVQAPAAHNRGLAGSGVKVAVLDTGISTHPDLNIRGGASFVPGEPSTQDGNGHGTHVAGTIAALNNSIGVLGVAPSAELYAVKVLGASGSGSISSIAQGLEWAGNNGMHVANLSLGNPSPSATLEQAVNSATSRGVIVVAASGNSGAGSISYPARYANAMAVGATDQNNNRASFSQYGAGLDIVAPGVNVQSTYPGSTYASLNGTSMATPHVAGAAALVKQKNPSWSNVQIRNHLKNTATSLGSTNLYGSGLVNAEAATR

SEQ ID NO: 54547 - protein, 269 aa, Unidentified
AQSVPWGISRVQAPAAHRRGLTGSGVKVAVLDTGISTHPDLNIRGGASFVPGEPSTQDGNGHGTHVAGTIAALNNSIGVLGVAPDAELYAVKVLGASGSGSVSSIAQGLEWAGNNGMHVANLSLGSPSPSATLEQAVNSATSRGVLVVAASGNSGAGSISYPARYANAMAVGATDQNNNRASFSQYGAGLDIVAPGVNVQSTWPGSTYASLNGTSQATPHVAGAAALVKQKNPSWSNVQIRNRLKNTATSLGSTNLYGSGLVNAEAATR

SEQ ID NO: 54548 - protein, 269 aa, Unidentified
AQSVPWGISRVQAPAAHNRGLTGSGVKVAVLDTGISTHEDLNIRGGASFVPGEPSTQDGNGHGTHVAGTIAALNNSIGVLGVAPSAELYAVKVLGASGRGSVSSIAQGLEWAGNNGMHVANLSLGSPAPSATLEQAVNSATSRGVLVVAASGNSGAGSISYPARYANAMAVGATDQNNNRASFSQYGAGLDIVAPGVNVQSTYPGSTYASLNGTSMATPHVAGAAALVKQKNPSWSNVQIRDHLKNTATSLGSTNLYGSGLVNAEAATR

SEQ ID NO: 54549 - protein, 269 aa, Unidentified
AQSVPWGISRVQAPAAHNCGLTGSGVKVAVLDTGISTHPDLNIRGGASFVPGEPSTQDGNGHGTHVAGTIAALDNSIGVLGVAPSAELYAVKVLGASGSGAISSIAQGLEWAGNNGMHVANLSLGSPSPSATLEQAVNSATSRGVLVVAASGNSGAGSISYPARYANAMAVGATDQNNNRASFSQYGAGLDIVAPGVNVQSTYPGSTYASLNGTSMATPHVAGAAALVKQKNPSWSNVQIRNHLKNTATSLGSTNLYGSGLVNAEAATR

SEQ ID NO: 54550 - protein, 269 aa, Unidentified
AQSVPWGISRVQAPAAHNRGLTGSGVKVAVLDTGISTHPDLNIRGGASFVPGEPSTQDGNGHGTHVAGTIAALNNSIGVLGVAPSAELYAVKVLGASGSGSLSSIAQGLEWAGNNVMHVANLSLGVMSPSATLEQAVNSATSRGVLVVAASGNSGAGSISYPARYANAMAVGATDQNNNRASFSQYGAGLDIVAPGVNVQSTYPGSTYASLNGTSMATPHVAGAAALVKQKNPSWSNVQIRNHLKNTATSLGSTNLYGSGLVNAEAATR

SEQ ID NO: 54551 - protein, 269 aa, Unidentified
AQSVPWGISRVQAPAAHNRKLTGSGVKVAVLDTGISTHPDLNIRGGASFVPGEPSTQDGEGHGTHVAGTIAALNNSIGVLGVAPSAELYAVKVLGASGSGSVSSIAQGLEWAGLNGMHVANLSLGQPSPSATLEQAVNSATSRGVLVVAASGNSGAGSISYPARYANAMAVGATDQNNNRASFSQYGAGLDIVAPGVNVQSTYPGSTYASLNGTSMATPHVAGAAALVKQKNPSWSNVQIRNHLKNTATSLGSTNLYGSGLVNAEAATR

SEQ ID NO: 54552 - protein, 269 aa, Unidentified
AQSVPWGISRVQAPAAHNRGLTGSGVKVAVLDTGISTHPDLNIRGGASFVPGEPSTQDGNGHGTHVAGTIAALNNSIGVLGVAPSAELYAVKVLGASGSGSVSSIAQGLEWAGNNRMHVANLSLGDPSPSATLEQAVNSATSRGVLVVAASGNSGAGSIDYPARYANAMAVGATDQNNNRASFSQYGAGLDIVAPGVNVQSTYPGSTYASENGTSMATPHVAGAAALVKQKNPSWSNVQIRNHLKNTATSLGSTNLYGSGLVNAEAATR

SEQ ID NO: 54553 - protein, 269 aa, Unidentified
AQSVPWGISRVQAPAAHNRRLTGRGVKVAVLDTGISTHPDLNITGGASFVPGEPSTQDGNGHGTHVAGTIAALNNSIGVLGVAPSAELYAVKVLGASGSGSVSSIAQGLEWAGNNGMHVANLSLGSPSPSATLEQAVNSATSRGVLVVAASGNSGAGSISYPARYANAMAVGATDQNNNRASFSQYGAGLDIVAPGVNVQSTYPGSTYASLNGTSMATPHVAGAAALVKQKNPSWSNVQIRNHLKNTATSLGSTNLYGSGLVRAEAATR

SEQ ID NO: 54554 - protein, 269 aa, Unidentified
AQSVPWGISRVQAPAAHNRGLTGSGVKVAVLDTGISTHPDLNIRGGASFVPGEPSTQDGNGHGTHVAGTIAALNNNIGVLGVAPSAELYAVKVLGASGGGSVSSIAQGLEWAGNNGMHVANLSLGAPSPSATLEQAVNSATSRGVLVVAASGNSGAGSISYPARYANAMAVGATDQNNNRADFSQYGAGLDIVAPGVNVQSTYPGSTYASQNGTSSATPHVAGAAALVKQKNPSWSNVQIRNHLKNTATSLGSTNLYGSGLVNAEAATR

SEQ ID NO: 54555 - protein, 269 aa, Unidentified
AQSVPWGISRVQAPAAHRRGLTGSGVKVAVLDTGISTHPDLNIRGGASFVPGEPSTQDGNGHGTHVAGTIAALNNSIGVLGVAPSAELYAVKVLGASGSGAISSIAQGLEWAGNNGMHVANLSLGSPSPSATLEQAVNSATSRGVLVVAASGNSGAGSISYPARYANAMAVGATDQNNNRASFSQYGAGLDIVAPGVNVQSTYPGSTYASLNGTSMATPHVAGAAALVKQKNPSWSNVQIRNRLKNTATSLGSTNLYGSGLVNAEAATR

SEQ ID NO: 54556 - protein, 269 aa, Unidentified
AQSVPWGISRVQAPAAHNRGLTGSGVKVAVLDTGISTHPDLNIRGGASFVPGEPSTQDGNGHGTHVAGTIAALNNSIGVLGVAPSAELYAVKVLGASGSGSVSSIAQGLEWAGNNVMHVANLSLGNSAPSATLEQAVNSATSRGVLVVAASGNSGAGSISYPARYANAMAVGATDQNNNRASFSQYGAGLDIVAPGVNVQSTYPGSTYASLNGTSQATPHVAGAAALVKQKNPSWSNVQIRNHLKNTATSLGSTNLYGSGLVNAEAATR

SEQ ID NO: 54557 - protein, 269 aa, Unidentified
AQSVPWGISRVQAPAAHNRGLAGSGVKVAVLDTGISTHPDLNIRGGASFVPGEPSTQDGNGHGTHVAGTIAALNNSIGVLGVAPSAELYAVKVLGASGSGGVSSIAQGLEWAGNNGMHVANLSLGNPSPSATLEQAVNSATSRGVIVVAASGNSGAGSISYPARYANAMAVGATDQNNNRASFSQYGAGLDIVAPGVNVQSTYPGSTYASLNGTSMATPHVAGAAALVKQKNPSWSNVQIRNHLKNTATSLGSTNLYGSGLVNAEAATR

SEQ ID NO: 54558 - protein, 269 aa, Unidentified
AQSVPWGISRVQAPAAHNRGLTGRGVKVAVLDTGISTHPDLNIRGGASFVPGEPSTQDGNGHGTHVAGTIAALNNSIGVLGVAPSAELYAVKVLGASGSGSVSSIAQGLEWAGNNGMHVANLSLGSPSPSATLEQAVNSATSRGVLVVAASGNSGADSISYPARYANAMAVGATDQNNNRADFSQYGAGLDIVAPGVNVQSTYPGSTYASLNGTSMATPHVAGAAALVKQKNPSWSNVRIRNHLKNTATSLGSTNLYGSGLVNAEAATR

SEQ ID NO: 54559 - protein, 269 aa, Unidentified
AQSVPWGISRVQAPAAHNRGLTGSGVKVAVLDTGISTHPDLNIRGGASFVPGEPSTQDGNGHGTHVAGTIAALNNSIGVLGVAPSAELYAVKVLGASGSGSVSSIAQGLEWAGNNGMHVANLSLGSPSPSATLEQAVNSATSRGVLVVAASGNSGEGSISYPARYANAMAVGATDQNNNHASFSQYGAGLDIVAPGVNVQSTYPGSTYASLNGTSMATPHVAGAAALVKQKNPSWSNVQIRNRLKNTATSLGSTNLYGSGLVNAFAATR

SEQ ID NO: 54560 - protein, 269 aa, Unidentified
AQSVPWGISRVQAPAAHNRGLTGSGVKVAVLDTGISTHPDLNIRGGASFVPGEPSTQDGNGHGTHVAGTIAALNNSIGVLGVAPSAELYAVKVLGASGSGSVSSIAQGLEWAGNNVMHVANLSLGVMSPSATLEQAVNSATSRGVLVVAASGNSGAGSISYPARYANAMAVGATDQNNNRASFSQYGAGLDIVAPGVNVQSTGPGSTYASLNGTSMATPHVAGAAALVKQKNPSWSNVQIRNHLKNTATSLGSTNLYGSGLVNAEAATR

SEQ ID NO: 54561 - protein, 269 aa, Unidentified
AQSVPWGISRVQAPAAHNRGLTGSGVKVAVLDTGISTHPDLNIRGGASFVPGEPSTQDGNGHGTHVAGTIAALNNSIGVLGVAPSAELYAVKVLGASGAGGLSSIAQGLEWAGNNGMHVANLSLGNPSPSATLEQAVNSATSRGVLVVAASGNSGAGSISYPARYANAMAVGATDQNNNRASFSQYGAGLDIVAPGVNVQSTYPGSTYASLNGTSMATPHVAGAAALVKQKNPSWSNVQIRNHLKNTATSLGSTNLYGSGLVNAEAATR

SEQ ID NO: 54562 - protein, 269 aa, Unidentified
AQSVPWGISRVQAPAAHNRGLTGFGVKVAVLDTGISTHPDLNIRGGASFVPGEPSTQDGNGHGTHVAGTIAALNNSIGVLGVAPSAELYAVKVLGASGSGSVSSIAQGLEWAGNNRMHVANLSLGDPSPSATLEQAVNSATSRGVLVVAASGNSGAGSIDYPARYANAMAVGATDQNNNRASFSQYGAGLDIVAPGVNVQSTYPGSTYASLNGTSMATPHVAGAAALVKQKNPSWSNVQIRNHLKNTATSLGSTNLYGSGLVNAEAATR

SEQ ID NO: 54563 - protein, 269 aa, Unidentified
AQSVPWGISRVQAPAAHNRRLRGRGVKVAVLDTGISTHPDLNIRGGASFVPGEPSTQDGNGHGTHVAGTIAALNNSIGVLGVAPSAELYAVKVLGASGSGSVSSIAQGLEWAGNNGMHVANLSLGSPSPSATLEQAVNSATSRGVLVVAASGNSGAGSISYPARYANAMAVGATDQNNNRASFSQYGAGLDIVAPGVNVQSTYPGSTYASLNGTSMATPHVAGAAALVKQKNPSWRNVQIRNHLKNTATSLGSTNLYGSGLVNAEAATR

SEQ ID NO: 54564 - protein, 269 aa, Unidentified
AQSVPWGISRVQAPAAHNRGLTGRGVKVAVLDTGISTHPDLDIRGGASFVPGEPSTQDGNGHGTHVAGTIAALNNSIGVLGVAPSAELYAVKVLGASGSGSVSSIAQGLEWAGNNGMHVANLSLGSPSPSATLEQAVNSATSRGVLVVAASGNSGAGSISYPARYANAMAVGATDQNNNRASFSQYGAGLDIVAPGVNVQSTYPGSTYASLNGTSMATPHVAGAAALVKQKNPSWRNVQIRNRLKNTATSLGSTNLYGSGLVNAEAATR

SEQ ID NO: 54565 - protein, 269 aa, Unidentified
AQSVPWGISRVQAPAAHNRGLTGSGVKVAVLDTGISTHPDLNIRGGASFVPGEPSTQDGNGHGTHVAGTIAALNNSIGVLGVAPSAELYAVKVLAASGGGSVSSIANGLEWAGNNGMHVANLSLGSPSPSATLEQAVNSATSRGVLVVAASGNSGAGSISYPARYANAMAVGATDQNNNRASFSQYGAGLDIVAPGVNVQSTYPGSTYASQNGTSMATPHVAGAAALVKQKNPSWSNVQIRNHLKNTATSLGSTNLYGSGLVNAEAATR

SEQ ID NO: 54566 - protein, 269 aa, Unidentified
AQSVPWGISRVQAPAAHNRRLTGRGVKVAVLDTGISTHPDLNIRGGASFVPGEPSTQDGNGHGTHVAGTIAALNNSIGVLGVAPSAELYAVKVLGASGNGSVSSIAGGLEWAGLNGMHVANLSLGSPSPSATLEQAVNSATSRGVLVVAASGNSGAGSISYPARYANAMAVGATDQNNNRASFSQYGAGLDIVAPGVNVQSTYPGSTYASLNGTSSATPHVAGAAALVKQKNPSWSNVQIRNHLKNTATSLGSTNLYGSGLVNAEAATR

SEQ ID NO: 54567 - protein, 269 aa, Unidentified
AQSVPWGISRVQAPAAHNRGLTGSGVKVAVLDTGISTHPDLNIRGGASFVPGEPSTQDGNGHGTHVAGTIAALNNSIGVLGVAPSAELYAVKVLGQSGAGALSSIAQGLEWAGNNGMHVANLSLGSPSPSATLEQAVNSATSRGVLVVAASGNSGAGSISYPARYANAMAVGATDQNNNRASFSQYGAGLDIVAPGVNVQSTYPGSTYASLNGTSMATPHVAGAAALVKQKNPSWSNVQIRNHLKNTATSLGSTNLYGSGLVNAEAATR

SEQ ID NO: 54568 - protein, 269 aa, Bacillus lentus
AQSVPWGISRVQAPAAHNRGLTGSGVKVAVLDTGISTHPDLNIRGGASFVPGEPSTQDGNGHGTHVAGTIAALNNSIGVLGVAPDAELYAVKVLGASGSGSVSSIARGLEWAGNNGMHVANLSLGSPSPSATLEQAVNSATSRGVLVVAASGNSGAGSISYPARYANAMAVGATDQNNNRARFSQYGAGLDIVAPGVNVQSTYPGSTYASLNGTSMATPHVAGAAALVKQKNPSWSNVQIRDHLKNTATSLGSTNLYGSGLVNAEAATR

SEQ ID NO: 54569 - protein, 269 aa, Unidentified
AQSVPWGISRVQAPAAHNRRLTGRGVKVAVLDTGISTHPDRNIRGGASFVPGEPSTQDGNGHGTHVAGTIAALNNSIGVLGVAPSAELYAVKVLGASGSGSVSSIAQGLEWARNNGMHVANLSLGSPSPSATLEQAVNSATSRGVLVVAASGNSGAGSISYPARYANAMAVGATDQNNNRASFSQYGAGLDIVAPGVNVQSTYPGSTYASLNGTSMATPHVAGAAALVKQKNPSWSNVQIRNHLKNTATSLGSTNLYGSGLVNAEAATR

SEQ ID NO: 54570 - protein, 269 aa, Unidentified
AQSVPWGISRVQAPAAHNRKLTASGVKVAVLDTGISTHPDLNIRGGASFVPGEPSTQDGEGHGTHVAGTIAALNNSIGVLGVAPSAELYAVKVLGASGSGSVSSIAQGLEWAGNNGMHVANLSLGSPSPSATLEQAVNSATSRGVLVVAASGNSGAGSISYPARYANAMAVGATDQNNNRADFSQYGAGLDIVAPGVNVQSTYPGSTYASLNGTSMATPHVAGAAALVKQKNPSWSNVQIRNHLKNTATSLGSTNLYGSGLVNAEAATR

SEQ ID NO: 54571 - protein, 269 aa, Unidentified
AQSVPWGISHVQAPAAHNRGLLGFGVKVAVLDTGISTHPDLNIRGGASFVPGEPSTQDGNGHGTHVAGTIAALNNSIGVLGVAPSAELYAVKVLGASGSGSVSSIAQGLEWAGNNGMHVANLSLGSPSPSATLEQAVNSATSRGVLVVAASGNSGAGSISYPARYANAMAVGATDQNNNRASFSQYGAGLDIVAPGVNVQSTYPGSTYASENGTSMATPHVAGAAALVKQKNPSWSNVQIRNHLKNTATSLGSTNLYGSGLVNAEAATR

SEQ ID NO: 54572 - protein, 269 aa, Bacillus lentus
AQSVPWGISRVQAPAAHNRGLTGSGVKVAVLDTGISTHPDLNIRGGASFVPGEPSTQDGNGHGTHVAGTIAALNNSIGVLGVAPDAELYAVKVLGASGSGSVSSIADGLEWAGNNGMHVANLSLGSPSPSATLEQAVNSATSRGVLVVAASGNSGAGSISYPARYANAMAVGATDQNNNRARFSQYGAGLDIVAPGVNVQSTYPGSTYASLNGTSMATPHVAGAAALVKQKNPSWSNVQIRRHLKNTATSLGSTNLYGSGLVNAEAATR

SEQ ID NO: 54573 - protein, 269 aa, Unidentified
AQSVPWGISRVQAPAAHNRGLTGSGVKVAVLDTGISTHPDLNIRGGASFVPGEPSTQDGNGHGTHVAGTIAALNNSIGVLGVAPSAELYAVKVLGASGSGSVSSIAQGLEWAGLNGMHVANLSLGIPSPSATLEQAVNSATSRGVLVVAASGNSGEGSISYPARYANAMAVGATDQNNNRADFSQYGAGLDIVAPGVNVQSTYPGSTYASLNGTSMATPHVAGAAALVKQKNPSWSNVQIRNHLKNTATSLGSTNLYGSGLVNAEAATR

SEQ ID NO: 54574 - protein, 269 aa, Unidentified
AQSVPWGISRVQAPAAHNRGLTGSGVKVAVLDTGISTHPDLRIRGGASFVPGEPSTQDGNGHGTHVAGTIAALNNSIGVLGVAPSAELYAVKVLGASGSGSVSSIAQGLEWAGNNGMHVANLSLGSPSPSATLEQAVNSATSRGVLVVAASGNSGAGSISYPARYANAMAVGATDQNNNRASFSQYGAGLDIVAPGVNVQSTYPGSAYFSLNGTSMATPHVAGAAALVKQKNPSWSNVQIRNHLKNTATSLGSTNLYGSGLVRAEAATR

SEQ ID NO: 54575 - protein, 269 aa, Unidentified
AQSVPWGISRVQAPAAHNRGLTGRGVKVAVLDTGISTHPDLNIRGGASFVPGEPSTQDGNGHGTHVAGTIAALNNSIGVLGVAPSAELYAVKVLGASGSGSVSSIAQGLEWAGNNGMHVANLSLGIPSPSATLEQAVNSATSRGVLVVAASGNSGEGSIDYPARYANAMAVGATDQNNNRASFSQYGAGLDIVAPGVNVQSTYPGSTYASLNGTSMATPHVAGAAALVKQKNPSWSNVQIRNHLKNTATSLGSTNLYGSGLVNAEAATR

SEQ ID NO: 54576 - protein, 269 aa, Synthetic construct
AQSVPWGISRVQAPAAHNRGLTGSGVKVAVLDTGISTHPDLNIRGGASFVPGEPSTQDGNGHGTHVAGTIAALNNSIGVLGVAPSAELYAVKCMPQSGSGSVSSIAQGLEWAGNNGMHVANLSLGSPSPSATLEQAVNSATSRGVLVVAASGNSGAGSISYPARYANAMAVGATDQNNNRASFSQYGAGLDIVAPGVNVQSTYPGSTYASLNGTSMATPHVAGAAALVKQKNPSWSNVQIRNHLKNTATSLGSTNLYGSGLVNAEAATR

SEQ ID NO: 54577 - protein, 269 aa, Unidentified
AQSVPWGISRVQAPASHNRGLAGSGVKVAVLDTGISTHPDLNIRGGASFVPGEPSTQDGNGHGTHVAGTIAALNNSIGVLGVAPSAELYAVKVLGASGSGSISSIAQGLEWAGNNGMHVANLSLGNPSPSATLEQAVNSATSRGVLVVAASGNSGAGSISYPARYANAMAVGATDQNNNRASFSQYGAGLDIVAPGVNVQSTYPGSTYASLNGTSMATPHVAGAAALVKQKNPSWSNVQIRNHLKNTATSLGSTNLYGSGLVNAEAATR

SEQ ID NO: 54578 - protein, 269 aa, Unidentified
AQSVPWGISRVQAPAAHRRGLTGSGVKVAVLDTGISTHPDLRIRGGASFVPGEPSTQDGNGHGTHVAGTIAALNNSIGVLGVAPSAELYAVKVLGASGSGSVSSIAQGLEWAGNNGMHVANLSLGSPSPSATLEQAVNSATSRGVLVVAASGNSGAGSISYPARYANAMAVGATDQNNNRASFSQYGAGLDIVAPGVNVQSTYPGSTYASLNGTSMATPHVAGAAALVKQKNPSWRNVQIRNRLKNTATSLGSTNLYGSGLVNAEAATR

SEQ ID NO: 54579 - protein, 269 aa, Unidentified
AQSVPWGISRVQAPAAHNRGLTGSGVKVAVLDTGISTHPDLNIRGGASFVPGEPSTQDGNGHGTHVAGTIAALNNSIGVLGVAPSAELYAVKVLGASGSGSVSSIAQGLEWAGNNRMHVANLSLGSPSPSATLEQAVNSATSRGVLVVAASGNSGAGSISYPARYANAMAVGATDQNNNRADFSQYGAGLDIVAPGVNVQSTYPGSTYASLNGTSMATPHVAGAAALVKQKNPSWSNVQIRDRLKNTATSLGSTNLYGSGLVNAEAATR

SEQ ID NO: 54580 - protein, 269 aa, Unidentified
AQSVPWGISRVQAPAAHNRGLTGSGVKVAVLDTGISTHPDLNIRGGASFVPGEPSTQDGNGHGTHVAGTIAALNNSIGVLGVAPSAELYAVKVLGQSSAGSISSIAQGLEWAGNNGMHVANLSLGSPSPSATLEQAVNSATSRGVLVVAASGNSGAGSISYPARYANAMAVGATDQNNNRASFSQYGAGLDIVAPGVNVQSTYPGSTYASLNGTSMATPHVAGAAALVKQKNPSWSNVQIRNHLKNTATSLGSTNLYGSGLVNAEAATR

SEQ ID NO: 54581 - protein, 269 aa, Unidentified
AQSVPWGISRVQAPAAHNRGLAGSGVKVAVLDTGISTHPDLNIRGGASFVPGEPSTQDGNGHGTHVAGTIAALNNSIGVLGVAPSAELYAVKVLGASGSGSVSSIAQGLEWAGNNGMHVANLSLGNPSPSATLEQAVNSATSRGVLVVAASGNSGEGSISYPARYANAMAVGATDQNNNRASFSQYGAGLDIVAPGVNVQSTYPGSTYASLNGTSMATPHVAGAAALVKQKNPSWSNVQIRNRLKNTATSLGSTNLYGSGLVNAEAATR

SEQ ID NO: 54582 - protein, 269 aa, Unidentified
AQSVPWGISRVQAPAAHNRKLTGFGVKVAVLDTGISTHPDLNIRGGASFVPGEPSTQDGNGHGTHVAGTIAALNNSIGVLGVAPSAELYAVKVLGASGSGSVSSIAQGLEWAGNNGMHVANLSLGDPSPSATLEQAVNSATSRGVLVVAASGNSGAGSISYPARYANAMAVGATDQNNNRASFSQYGAGLDIVAPGVNVQSTYPGSTYASENGTSMATPHVAGAAALVKQKNPSWSNVQIRNHLKNTATSLGSTNLYGSGLVNAEAATR

SEQ ID NO: 54583 - protein, 269 aa, Unidentified
AQSVPWGISRVQAPAAHNRGLAGSGVKVAVLDTGISTHPDLNIRGGASFVPGEPSTQDGNGHGTHVAGTIAALNNSIGVLGVAPSAELYAVKVLGASGSGSVSSIAQGLEWAGNNGMHVANLSLGNPSPSATLEQAVNSATSRGVLVVAASGNSGEGSISYPARYANAMAVGATDQNNNHASFSQYGAGLDIVAPGVNVQSTYPGSTYASLNGTSMATPHVAGAAALVKQKNPSWSNVQIRNHLKNTATSLGSTNLYGSGLVNAEAATR

SEQ ID NO: 54584 - protein, 269 aa, Unidentified
AQSVPWGISRVQAPAAHNRGLTGSGVKVAVLDTGISTHPDLNIRGGASFVPGEPSTQDGNGHGTHVAGTIAALNNSIGVLGVAPNAELYAVKVLGASGSGSNSSIAQGLEWAGNNGMHVANLSLGSPSPSATLEQAVNSATSRGVLVVAASGNSGAGSISYPARYANAMAVGATDQNNNRASFSQYGAGLDIVAPGTGVQSTYPGSTYASLNGTSMATPHVAGAAALVKQKNPSWSNVQIRNHLKNTATSLGSTNLYGSGLVNAEAATR

SEQ ID NO: 54585 - protein, 269 aa, Unidentified
AQSVPWGISRVQAPAAHNRGLAGSGVKVAVLDTGISTHPDLNIRGGASFVPGEPSTQDGEGHGTHVAGTIAALNNSIGVLGVAPSAELYAVKVLGASGSGSVSSIAQGLEWAGLNGMHVANLSLGSPSPSATLEQAVNSATSRGVLVVAASGNSGEGSISYPARYANAMAVGATDQNNNRASFSQYGAGLDIVAPGVNVQSTYPGSTYASLNGTSMATPHVAGAAALVKQKNPSWSNVQIRNHLKNTATSLGSTNLYGSGLVNAEAATR

SEQ ID NO: 54586 - protein, 269 aa, Unidentified
AQSVPWGISRVQAPAAHNRGLTGRGVKVAVLDTGISTHPDLNIRGGASFVPGEPSTQDGNGHGTHVAGTIAALNNSIGVLGVAPSAELYAVKVLGASGSGSVSSIAQGLEWAGNNRMHVANLSLGIPSPSATLEQAVNSATSRGVLVVAASGNSGAGSIDYPARYANAMAVGATDQNNNRASFSQYGAGLDIVAPGVNVQSTYPGSTYASLNGTSMATPHVAGAAALVKQKNPSWSNVQIRNHLKNTATSLGSTNLYGSGLVNAEAATR

SEQ ID NO: 54587 - protein, 269 aa, Unidentified
AQSVPWGISRVQAPAAHNRGLTGSGVKVAVLDTGISTHPDLNIRGGASFVPGEPSTQDGNGHGTHVAGTIAALNNSIGVLGVAPSAELYAVKVLPAAGSASISSIAQGLEWAGNNGMHVANLSLGSPSPSATLEQAVNSATSRGVLVVAASGNSGAGSISYPARYANAMAVGATDQNNNRASFSQYGAGLDIVAPGVNVQSTYPGSTYASLNGTSMATPHVAGAAALVKQKNPSWSNVQIRNHLKNTATSLGSTNLYGSGLVNAEAATR

SEQ ID NO: 54588 - protein, 269 aa, Unidentified
AQSVPWGISRVQAPAAHNRGLTGSGVKVAVLDTGISTHPDLNIRGGASFVPGEPSTQDGNGHGTHVAGTIAALNNSIGVLGVAPSAELYAVKVLPQGGSGAVSSIAQGLEWAGNNGMHVANLSLGSPSPSATLEQAVNSATSRGVLVVAASGNSGAGSISYPARYANAMAVGATDQNNNRASFSQYGAGLDIVAPGVNVQSTYPGSTYASLNGTSMATPHVAGAAALVKQKNPSWSNVQIRNHLKNTATSLGSTNLYGSGLVNAEAATR

SEQ ID NO: 54589 - protein, 269 aa, Bacillus subtilis
AQSVPWGISRVQAPAAHNRGLTGSGVKVAVLDTGISTHPDLNIRGGASFVPGEPSTQDGNGHGTHVAGTIAALNNSIGVLGVAPSAELYAVKVLGASGSGSVSSIAQGLEWAGNNGMHVANLSLGSPSPSATLEQAVNSATSRGVLVVAASGNSGAGSISYPARYANAMAVGATDQNNNRASFSQYGAGLDIVAPGVNVQSTYPGSTYASLNGTSMATPHVAGAAALVRQRNPSWSNVQIRNHLENTATSLGSTNLFGSGLVNAEAATR

SEQ ID NO: 54590 - protein, 269 aa, Unidentified
AQSVPWGISRVQAPAAHNRGLTGSGVKVAVLDTGISTHPDLNIRGGASFVPGEPSTQDGNGHGTHVAGTIAALDNSIGVLGVAPSAELYAVKVLGASGSGAISSIAQGLEWAGNNGMHVANLSLGSPSPSATLEQAVNSATSRGVLVVAASGNSGAGSISYPARYANAMAVGATDQNNNRASFSQYGAGLDIVAPGVNVQSTYPGSTYASLNGTSMATPHVAGAAALVKQKNPSWSNVQIRNHLKNTATSLGSPNLYGSGLVNAEAATR

SEQ ID NO: 54591 - protein, 269 aa, Unidentified
AQSVPWGISRVQAPAAHNRGLTGSGVKVAVLDTGISTHPDLNIRGGASFVPGEPSTQDGNGHGTHVAGTIAALNNDINVLGVAPSAELYAVKVLGASGSGSVSSIAQGLEWAGNNGMHVANLSMGSPSPSATLEQAVNSATSRGVLVVAASGNSGAGSISYPARYANAMAVGATDQNNNRASFSQYGAGLDIVAPGVNVQSTYPGSTYASLNGTSMLTPHVAGAAALVKQKNPSWSNVQIRNHLKNTATSLGSTNLYGSGLVNAEAATR

SEQ ID NO: 54592 - protein, 269 aa, Unidentified
AQSVPWGISRVQAPAAHNRGLAGSGVKVAVLDTGISTHPDLNIRGGASFVPGEPSTQDGNGHGTHVAGTIAALNNSIGVLGVAPSAELYAVKVLGASGSGSVSSIAQGLEWAGNNRMHVANLSLGIPSPSATLEQAVNSATSRGVLVVAASGNSGAGSIDYPARYANAMAVGATDQNNNRASFSQYGAGLDIVAPGVNVQSTYPGSTYASLNGTSMATPHVAGAAALVKQKNPSWSNVQIRNHLKNTATSLGSTNLYGSGLVNAEAATR

SEQ ID NO: 54593 - protein, 269 aa, Unidentified
AQSVPWGISRVQAPAAHNRGLTGSGVKVAVLDTGISTHPDLNIRGGASFVPGEPSTQDGNGHGTHVAGTIAALNNSIGVLGVAPSAELYAVKVLGASGGGGISSIAQGLEWAGNNGMHVANLSLGNPSPSATLEQAVNSATSRGVLVVAASGNSGAGSISYPARYANAMAVGATDQNNNRASFSQYGAGLDIVAPGVNVQSTYPGSTYASLNGTSMATPHVAGAAALVKQKNPSWSNVQIRNHLKNTATSLGSTNLYGSGLVNAEAATR

SEQ ID NO: 54594 - protein, 269 aa, Unidentified
AQSVPWGISRVQAPAAHNRGLTGRGVKVAVLDSGISTHPDLNIRGGASFVPGEPSTQDGNGHGTHVAGTIAALNNSIGVLGVAPSAELYAVKVLGASGSGSVSSIAQGLEWAGNNGMHVANLSLGSPSPSATLEQAVNSATSRGVLVVAASGNSGAGSISYPARYANAMAVGATDQNNNRASFSQYGAGLDIVAPGVNVQSTAPGSTYASLNGTSMATPHVAGAAALVKQKNPSWSFVQIRNHLKNTATSLGSTNLYGSGLVNAEAATR

SEQ ID NO: 54595 - protein, 269 aa, Unidentified
AQSVPWGISRVQAPAAHNRGLTGSGFKVAVLDTGISTHPDLNIRGGASFVPGEPSTQDGNGHGTHVAGTIAALNNSIGVLGVAPSAELYAVKVLGASGSGSVSSIAQGLEWAGNNGMHVANLSLGSPSPSATLEQAVNSATSRGVLVVAASGNSGAGSISYPARYANAMAVGATDQNNNRASFSQYGEGLDIVAPGVNVQSTYPGSAYASLNGTSMATPHVAGAAALVKQKNPSWSNVQIRNHLKNTATNLGSTNLYGSGLVNAEAATR

SEQ ID NO: 54596 - protein, 269 aa, Unidentified
AQSVPWGISRVQAPAAHNRGLTGRGVKVAVLDTGISTHPDLRIRGGASFVPGEPSTQDGNGHGTHVAGTIAALNNSIGVLGVAPSAELYAVKVLGASGSGSVSSIAQGLEWAGANGMHVANLSLGSPSPSATLEQAVNSATSRGVLVVAASGNSGAGSISYPARYANAMAVGATDQNNNRASFSQYGAGLDIVAPGVNVQSTYPGSTYASLNGTSMATPHVAGAAALVKQKNPSWSNVQIRNHLKNTATSLGSTNLYGSGLVRAEAATR

SEQ ID NO: 54597 - protein, 269 aa, Unidentified
AQSVPWGISRVQAPAAHNRGLTGSGVKVAVLDTGISTHPDLNIRGGASFVPGEPSTQDGNGHGTHVAGTIAALNNSIGVLGVAPSAELYAVKVLGQSGAAAVSSIAQGLEWAGNNGMHVANLSLGSPSPSATLEQAVNSATSRGVLVVAASGNSGAGSISYPARYANAMAVGATDQNNNRASFSQYGAGLDIVAPGVNVQSTYPGSTYASLNGTSMATPHVAGAAALVKQKNPSWSNVQIRNHLKNTATSLGSTNLYGSGLVNAEAATR

SEQ ID NO: 54598 - protein, 269 aa, Unidentified
AQSVPWGISRVQAPASHNRGLAGSGVKVAVLDTGISTHPDLNIRGGASFVPGEPSTQDGNGHGTHVAGTIAALNNSIGVLGVAPSAELYAVKVLGASGSGSISSIAQGVEWAGNNGMHVANLSLGSPSPSATLEQAVNSATSRGVLVVAASGNSGAGSISYPARYANAMAVGATDQNNNRASFSQYGAGLDIVAPGVNVQSTYPGSTYASLNGTSMATPHVAGAAALVKQKNPSWSNVQIRNHLKNTATSLGSTNLYGSGLVNAEAATR

SEQ ID NO: 54599 - protein, 269 aa, Unidentified
AQSVPWGISRVQAPAAHNRRLTGSGVKVAVLDTGISTHPDLNIRGGASFVPGEPSTQDGNGHGTHVAGTIAALNNSIGVLGVAPSAELYAVKVLGASGAGSVSSIAQGLEWAGNNGMHVANLSLGSPSPSATLEQAVNSATSRGVLVVAASGNSGAGSISYPARYANAMAVGATDQNNNRASFSQYGAGLDIVAPGVNVQSTYIGSAYASLNGTSMATPHVAGAAALVKQKNPSWSNVQIRNHLKNTATSLGSTNLYGSGLVNAEAATR

SEQ ID NO: 54600 - protein, 269 aa, Unidentified
AQSVPWGISRVQAPAAHNRGLTGRGVKVAVLDTGISTHPDLNIRGGASFVPGEPSTQDGNGHGTHVAGTIAALNNSIGVLGVAPSAELYAVKVLGASGAGSVSSIAQGLEWAGNNGMHVANLSLGSPSPSATLEQAVNSATSRGVLVVAASGNSGAGSISYPARYANAMAVGATDQNNNRASFSQYGAGLDIVAPGVNVQSTYIQSTYASLNGTSMATPHVAGAAALVKQKNPSWSNVQIRNHLKNTATSLGSTNLYGSGLVNAEAATR

SEQ ID NO: 54601 - protein, 269 aa, Unidentified
AQSVPWGISRVQAPAAHNRRLTGSGVKVAVLDTGISTHPDLNIRGGASFVPGEPSTQDGNGHGTHVAGTIAALNNSIGVLGVAPSAELYAVKVLGASGSGSVSSIAQGLEWAGNNRMHVANLSLGSPSPSATLEQAVNSATSRGVLVVAASGNSGADSISYPARYANAMAVGATDQNNNRASFSQYGAGLDIVAPGVNVQSTYPGSTYASLNGTSMATPHVAGAAALVKQKNPSWSNVRIRNHLKNTATSLGSTNLYGSGLVNAEAATR

SEQ ID NO: 54602 - protein, 269 aa, Unidentified
AQSVPWGISRVQAPAAHNRGLTGRGVKVAVLDSGISTHPDLNIRGGASFVPGEPSTQDGNGHGTHVAGTIAALNNRIGVLGVAPSAELYAVKVLGASGSGSVSSIAQGLEWAGNNGMHVANLSLGSPSPSATLEQAVNSATSRGVLVVAASGNSGAGSISYPARYANAMAVGATDQNNNRASFSQYGAGLDIVAPGVNVQSTAPGSTYASLNGTSMATPHVAGAAALVKQKNPSWSNVQIRNHLKNTATSLGSTNLYGSGLVNAEAATR

SEQ ID NO: 54603 - protein, 269 aa, Unidentified
AQSVPWGIARVQAPAAHNRRLTGSGVKVAVLDTGISTHPDLRIRGGASFVPGEPSTQDGNGHGTHVAGTIAALNNRIGVLGVAPSAELYAVKVLGASGSGSVSSIAQGLEWAGNNGMHVANLSLGSPSPSATLEQAVNSATSRGVLVVAASGNSGAGSISYPARYANAMAVGATDQNNNRASFSQYGAGLDIVAPGVNVQSTYPGSTYASLNGTSMATPHVAGAAALVKQKNPSWSNVQIRNHLKNTATSLGSTNLYGSGLVNAEAATR

SEQ ID NO: 54604 - protein, 269 aa, Unidentified
AQSVPWGISRVQAPAAHNRKLLGSGVKVAVLDTGISTHPDLNIRGGASFVPGEPSTQDGNGHGTHVAGTIAALNNSIGVLGVAPSAELYAVKVLGASGSGSVSSIAQGLEWAGNNGMHVANLSLGSPSPSATLEQAVNSATSRGVLVVAASGNSGAGSIDYPARYANAMAVGATDQNNNRASFSQYGAGLDIVAPGVNVQSTYPGSAYASLNGTSMATPHVAGAAALVKQKNPSWSNVQIRNHLKNTATSLGSTNLYGSGLVNAEAATR

SEQ ID NO: 54605 - protein, 269 aa, Unidentified
AQSVPWGISRVQAPAAHNRGLTGSGVKVAVLDSGISTHPDLNIRGGASFVPGEPSTQDGNGHGTHVAGTIAALNNSIGVLGVAWSAELYAVKVLGASGSGSVSSIAQGLEWAGNNGMHVANLSLGSPSPSATLEQAVNSATSRGVLVVAASGNLGAGSISYPARYANAMAVGATDQNNNRASFSQYGAGLDIVAPGVNVQSTAPGSTYASLNGTSMATPHVAGAAALVKQKNPSWSNVQIRNHLKNTATSLGSTNLYGSGLVNAEAATR

SEQ ID NO: 54606 - protein, 269 aa, Unidentified
AQSVPWGISRVQAPAAHNRGLTGSGVKVAVLDTGISTHPDLNIRGGASFVPGEPSTQDGNGHGTHVAGTIAALNNDIGVLGVAPSAELYAVKVLGASGSGSVSSIAQGLEWAGNNSMHVANLSLGSPSPSATLEQAVNSATSRGVLVVAASGNSGAGSISYPARYANAMAVGATDQNNNRASFSQYGAGLDIVAPGVNVQSTYPGSTYASLNGTSMATPHVAGAAALVKQKNPSWSNVRIRDHLKNTATSLGSTNLYGSGLVNAEAATR

SEQ ID NO: 54607 - protein, 269 aa, Unidentified
AQSVPWGISRVQAPAAHNRGLTGSGVKVAVLDTGISTHPDLNIRGGASFVPGEPSTQDGNGHGTHVAGTIAALNNSIGVLGVAPSAELYAVKVLGASGSGSVSSIAQGLEWAGNNGMHFANLSLGSPSPSATLEQAVNSATSRGVLVVAASGNSGAGSISYPARYANAMAVGATDQNNERASFSQYGAGLDIVAPGVNVQSTYPGSTYASLNGTSMAAPHVAGAAALVKQKNGSWSNVQIRNHLKNTATSLGSTNLYGSGLVNAEAATR

SEQ ID NO: 54608 - protein, 269 aa, Unidentified
AQSVPWGISRVQAPAAHNRRLTGSGVKVAVLDTGISTHPDLNIRGGASFVPGEPSTQDGNGHGTHVAGTIAALDNSIGVLGVAPSAELYAVKVLGASGSGSVSSIAQGLEWAGNNGMHVANLSLGSPSPSATLEQAVNSATSRGVLVVAASGNSGAGSISYPARYANAMAVGATDQNNNRASFSQYGAGLDIVAPGVNVQSTYPGSTYASLNGTSMATPHVAGEAALVKQKNPSWRNVQIRNHLKNTATSLGSTNLYGSGLVNAEAATR

SEQ ID NO: 54609 - protein, 269 aa, Unidentified
AQSVPWGISRVQAPASHNRGLAGSGVKVAVLDTGISTHPDLNIRGGASFVPGEPSTQDGNGHGTHVAGTIAALNNSIGVLGVAPSAELYAVKVLGASGSGAVSSIAQGVEWAGNNGMHVANLSLGSPSPSATLEQAVNSATSRGVLVVAASGNSGAGSISYPARYANAMAVGATDQNNNRASFSQYGAGLDIVAPGVNVQSTYPGSTYASLNGTSMATPHVAGAAALVKQKNPSWSNVQIRNHLKNTATSLGSTNLYGSGLVNAEAATR

SEQ ID NO: 54610 - protein, 269 aa, Unidentified
AQSVPWGISRVQAPAAHNRGLTGSGVKVAVLDSGISTHPDLNIRGGASFVPGEPSTQDGNGHGTHVAGTIAALNNSIGVLGVAPSAELYAVKVLGASGSGSVSSIAQGLEWAGNNGMHVANLSLGSPSPSATLEQAVNSATSRGVLVVAASGNSGEGSISYPARYANAMAVGATDQNNNRADFSQYGAGLDIVAPGVNVQSTYPGSTYASLNGTSMATPHVAGAAALVKQKNPSWSNVQIRNHLKNTATSLGSTNLYGSGLVNAEDATR

SEQ ID NO: 54611 - protein, 269 aa, Unidentified
AQSVPWGISRVQAPAAHNRGLTGSGVKVAVLDTGISTHPDLNIRGGASFVPGEPSTQDGNGHGTHVAGTIAALNNSIGVLGVAPSAELYAVKVLGATGGAAVSSIAQGLEWAGNNGMHVANLSLGSPSPSATLEQAVNSATSRGVLVVAASGNSGAGSISYPARYANAMAVGATDQNNNRASFSQYGAGLDIVAPGVNVQSTYPGSTYASLNGTSMATPHVAGAAALVKQKNPSWSNVQIRNHLKNTATSLGSTNLYGSGLVNAEAATR

SEQ ID NO: 54612 - protein, 269 aa, Unidentified
AQTVPWGISRVQAPAAHNRGLTGSGVKVAVLDTGISTHPDLNIRGGASFVPGEPSTQDGNGHGTHVAGTIAALNNDIGVLGVAPSAELYAVKVLGASGSGSVSSIAQGLEWAGNNGMHVANLSLGSPSPSATLEQAVNSATSRGVLVVAASGNSGAGSISYPARYANAMAVGATDQNNNRASFSQYGAGLDIVAPGVNVQSTYPGSTYASLNGTSMLTPHVAGAAALVKQKNPSWSNVQIRNHLKNTDTSLGSTNLYGSGLVNAEAATR

SEQ ID NO: 54613 - protein, 269 aa, Unidentified
AQSVPWGIARVQAPAAHNRGLTGSGVKVAVLDTGISTHPDRNIRGGASFVPGEPSTQDGNGHGTHVAGTIAALNNRIGVLGVAPSAELYAVKVLGASGSGSVSSIAQGLEWAGNNGMHVANLSLGSPSPSATLEQAVNSATSRGVLVVAASGNSGAGSISYPARYANAMAVGATDQNNNRASFSQYGAGLDIVAPGVNVQSTYPGSTYASLNGTSMATPHVAGAAALVKQKNPSWRNVQIRNHLKNTATSLGSTNLYGSGLVNAEAATR

SEQ ID NO: 54614 - protein, 269 aa, Bacillus sp.
AQSVPWGISRVQAPAAHNRGLTGSGVKVAVLDTGISTHPDLNIRGGASFVPGEPSTQDGNGHGTHVAGTIAALNNSIGVLGVAPNAELYAVKVLGASGSGSVSSIAQGLEWAGNNVMHVANLSLGVMSPSATLEQAVNSATSRGVLVVAASGNSGAGSISYPARYANAMAVGATDQNNNRASFSQYGAGLDIVAPGVNVQSTYPGSTYASLNGTSMATPHVAGAAALVKQKNPSWSNVQIRNHLKNTATSLGSTNLYGSGLVNAEAATR

SEQ ID NO: 54615 - protein, 269 aa, Unidentified
AQSVPWGISRVQAPAAHNRGLTGRGVKVAVLDTGISTHPDLNIRGGASFVPGEPSTQDGNGHGTHVAGTIAALDNSIGVLGVAPSAELYAVKVLGASGSGSISSIAQGLEWAGNNGMHVANLSLGSPSPSATLEQAVNSATSRGVLVVAASGNSGAGSISYPARYANAMAVGATDQNNNRASFSQYGAGLDIVAPGVNVQSTYPGSTYASLNGTSMATPHVAGAAALVKQKNPSWSNVRIRNHLKNTATSLGSTNLYGSGLVNAEAATR

SEQ ID NO: 54616 - protein, 269 aa, Unidentified
AQSVPWGISRVQAPAAHNRGLAGSGVKVAVLDTGISTHPDLNIRGGASFVPGEPSTQDGNGHGTHVAGTIAALNNSIGVLGVAPSAELYAVKVLGASGGGAVSSIAQGLEWAGNNGMHVANLSLGNPSPSATLEQAVNSATSRGVLVVAASGNSGAGSISYPARYANAMAVGATDQNNNRASFSQYGAGLDIVAPGVNVQSTYPGSTYASLNGTSMATPHVAGAAALVKQKNPSWSNVQIRNHLKNTATSLGSTNLYGSGLVNAEAATR

SEQ ID NO: 54617 - protein, 269 aa, Unidentified
AQSVPWGISRVQAPAAHNRGLTGSGVKVAVLDTGISTHPDLNIRGGASFVPGEPSTQDGNGHGTHVAGTIAALNNSIGVLGVAPSAELYAVKVLPASGAAAVSSIAQGLEWAGNNGMHVANLSLGSPSPSATLEQAVNSATSRGVLVVAASGNSGAGSISYPARYANAMAVGATDQNNNRASFSQYGAGLDIVAPGVNVQSTYPGSTYASLNGTSMATPHVAGAAALVKQKNPSWSNVQIRNHLKNTATSLGSTNLYGSGLVNAEAATR

SEQ ID NO: 54618 - protein, 269 aa, Bacillus lentus
AQSVPWGISRVQAPAAHNRGLTGSGVKVAVLDTGISTHPDLNIRGGASFVPGEPSTQDGNGHGTHVAGTIAALNNSIGVLGVAPSAELYAVKVLGASGSGSVSSIAQGLEWAGNNGMHVANLSLGSPSPSATLEQAVNSAKSRGVLVVAASGNSGAGSISAPASYANAMAVGATDQNNNRASFSQYGPGLDIVAPGVNVQSTYPGSTYASLNGTSMATPHVAGAAALVKQKNPSWSNVQIRNHLKNTATSLGSTNLYGSGLVNAEAATR

SEQ ID NO: 54619 - protein, 269 aa, Unidentified
AQTIPWGISRVQAPAAHNRGLTGSGVKVAVLDTGISTHPDLNIRGGASFVPGEPSTQDGNGHGTHVAGTIAALNNSIGVLGVAPSAELYAVKVLGASGSGSVSSIAQGLEWAGNNGMHVANLSLGSPSPSATLEQAVNSATSRGVLVVAASGNSGAGSISYPARYANAMAVGATDQNNNRASFSQYGPGLDIVAPGVNIQSTYPGSTYASLNGTSMATPHVAGAAALVKQKNPSWSNVQIRNHLKNTATSLGSTNLYGSGLVNAEAATR

SEQ ID NO: 54620 - protein, 269 aa, Unidentified
AQSVPWGISRVQAPAAHNRRLTGSGVKVAVLDTGISTHPDLRIRGGASFVPGEPSTQDGNGHGTHVAGTIAALNNSIGVLGVAPSAELYAVKVLGASGSGSVSSIAQGLEWAGNNGMHVANLSLGSPSPSATLEQAVNSATSRGVLVVAASGNSGAGSISYPARYANAMAVGATDQNNNRASFSQYGAGLDIVAPGVNVQSTYPGSTYASLNGTSMATPHVAGEAALVKQKNPSWRNVQIRNHLKNTATSLGSTNLYGSGLVNAEAATR

SEQ ID NO: 54621 - protein, 269 aa, Unidentified
AQSVPWGISRVQAPAAHNRGLTGSGVKVAVLDTGISTHPDLNIRGGASFVPGEPSTQDGNGHGTHVAGTIAALNNDIGVLGVAPSAELYAVKVLGASGSGSVSSIAQGLEWAGNNSMHVANLSLGSPSPSATLEQAVNSATSRGVLVVAASGNSGADSISYPARYANAMAVGATDQNNNRASFSQYGAGLDIVAPGVNVQSTYPGSTYASLNGTSMATPHVAGAAALVKQKNPSWSNVRIRNHLKNTATSLGSTNLYGSGLVNAEAATR

SEQ ID NO: 54622 - protein, 269 aa, Unidentified
AQSVPWGISRVQAPAAHNRGLTGSGVKVAVLDTGISTHPDLNIRGGASFVPGEPSTQDGNGHGTHVAGTIAALNNSIGVLGVAPSAELYAVKVLGASGGGAISSIAQGLEWAGNNGMHVANLSLGSPSPSATLEQAVNSATSRGVLVVAASGNSGAGSISYPARYANAMAVGATDQNNNRASFSQYGAGLDIVAPGVNVQSTYPGSTYASLNGTSMATPHVAGAAALVKQKNPSWSNVRIRNHLKNTATSLGSTNLYGSGLVNAEAATR

SEQ ID NO: 54623 - protein, 269 aa, Unidentified
AQSVPWGISRVQAPAAHNRRLTGSRVKVAVLDTGISTHPDLNIRGGASFVPGEPSTQDGNGHGTHVAGTIAALNNSIGVLGVAPSAELYAVKVLGASGSGSVSSIAQGLEWAGANGMHVANLSLGSPSPSATLEQAVNSATSRGVLVVAASGNSGAGSISWPARYANAMAVGATDQNNNRASFSQYGAGLDIVAPGVNVQSTYPGSTYASLNGTSMATPHVAGAAALVKQKNPSWSNVQIRNHLKNTATSLGSTNLYGSGLVNAEAATR

SEQ ID NO: 54624 - protein, 269 aa, Unidentified
AQSVPWGISRVQAPAAHNRGLTGSGVKVAVLDTGISTHPDLNIRGGASFVPGEPSTQDGNGHGTHVAGTIAALNNSIGVLGVAPSAELYAVKVLGAASSGAISSIAQGLEWAGNNGMHVANLSLGSPSPSATLEQAVNSATSRGVLVVAASGNSGAGSISYPARYANAMAVGATDQNNNRASFSQYGAGLDIVAPGVNVQSTYPGSTYASLNGTSMATPHVAGAAALVKQKNPSWSNVQIRNHLKNTATSLGSTNLYGSGLVNAEAATR

SEQ ID NO: 54625 - protein, 269 aa, Unidentified
AQSVPWGISRVQAPAAHNRGLTGSGVKVAVLDTGISTHPDLNIRGGASFVPGEPSTQDGNGHGTHVAGTIAALDNSIGVLGVAPSAELYAVKVLGASGSGSISSIAQGLEWAGNNGMHVANLSLGSPSPSATLEQAVNSATSRGVLVVAASGNSGAGSISYPARYANAMAVGATDQNNNRASFSQYGAGLDIVAPGVNVQSTYPGSTYASLNGTSMATPHVAGAAVLVKQKNPSWSNVRIRNHLKNTATSLGSTNLYGSGLVNAEAATR

SEQ ID NO: 54626 - protein, 269 aa, Bacillus lentus
AQSVPWGISRVQAPAAHNRGLTGSGVKVAVLDTGISTHPDLNIRGGASFVPGEPSTQDGDGHGTHVAGTIAALNNSIGVLGVAPSAELYAVKVLGASGSGSVSSIAQGLEWAGNNGMHVANLSLGSPSPSATLEQAVNSATSRGVLVVAASGNSGAGSISYPARYANAMAVGATDQNNNRASFSQYGAGLDIVAPGVNVQSTYPGSTYASLNGTSMATPHVAGAACLVKLKNPSWSNVNIRNHLKNTATSLGSTNLYGSGLVNAEAATR

SEQ ID NO: 54627 - protein, 269 aa, Unidentified
AQSVPWGISRVQAPAAHNRGLTGRGVKVAVLDTGISTHPDLNIRGGASFVPGEPSTQDGNGHGTHVAGTIAALNNDIGVLGVAPSAELYAVKVLGASGSGSVSSIAQGLEWAGNNSMHVANLSLGSPSPSATLEQAVNSATSRGVLVVAASGNSGAGSISYPARYANAMAVGATDQNNNRADFSQYGAGLDIVAPGVNVQSTYPGSTYASLNGTSMATPHVAGAAALVKQKNPSWSNVQIRNHLKNTATSLGSTNLYGSGLVNAEAATR

SEQ ID NO: 54628 - protein, 269 aa, Unidentified
AQSVPWGISRVQAPAAHNRGLTGRGVKVAVLDTGISTHPDLNIRGGASFVPGEPSTQDGNGHGTHVAGTIAALNNSIGVLGVAPSAELYAVKVLGASGSGSVSSIAQGLEWAGLNGMHVANLSLGSPSPSATLEQAVNSATSRGVLVVAASGNSGEGSISYPARYANAMAVGATDQNNNRADFSQYGAGLDIVAPGVNVQSTYPGSTYASLNGTSMATPHVAGAAALVKQKNPSWSNVQIRNHLKNTATSLGSTNLYGSGLVNAEAATR

SEQ ID NO: 54629 - protein, 269 aa, Unidentified
AQSVPWGISRVQAPAAHNRKLTGSGVKVAVLDTGISTHPDLNIRGGASFVPGEPSTQDGEGHGTHVAGTIAALNNSIGVLGVAPSAELYAVKVLGASGSGSVSSIAQGLEWAGNNGMHVANLSLGIPSPSATLEQAVNSATSRGVLVVAASGNSGAGSISYPARYANAMAVGATDQNNNRASFSQYGAGLDIVAPGVNVQSTYPGSTYASNNGTSMATPHVAGAAALVKQKNPSWSNVQIRNHLKNTATSLGSTNLYGSGLVNAEAATR

SEQ ID NO: 54630 - protein, 269 aa, Unidentified
AQSVPWGISRVQAPAAHNRGLTGSGVKVAVLDTGISTHPDLNIRGGASFVPGEPSTQDGNGHGTHVAGTIAALNNSIGVLGVAPSAELYAVKVLGASGAGGLSSIAQGLEWAGNNGMHVANLSLGSPSPSATLEQAVNSATSRGVLVVAASGNSGAGSISYPARYANAMAVGATDQNNNRASFSQYGAGLDIVAPGVNVQSTEPGSTYASLNGTSMATPHVAGAAALVKQKNPSWSNVQIRNHLKNTATSLGSTNLYGSGLVNAEAATR

SEQ ID NO: 54631 - protein, 269 aa, Unidentified
AQSVPWGISRVQAPAAHNRRLTGSGVKVAVLDTGISTHPDLNIRGGASFVPGEPSTQDGNGHGTHVAGTIAALNNSIGVLGVAPSAELYAVKVLGASGSGSLSSIAQGLEWAGNNGMHVANLSLGSPSPSATLEQAVNSATSRGVLVVAASGNSGAGSISYPARYANAMAVGATDQNNNRASFSQYGAGLDIVAPGVNVQSTYPGSTYASLNGTSMATPHVAGAAVLVKQKNPSWSNVRIRNHLKNTATSLGSTNLYGSGLVNAEAATR

SEQ ID NO: 54632 - protein, 269 aa, Unidentified
AQSVPWGISRVQAPAAHNRRLTGRGVKVAVLDTGISTHPDLNIRGGASFVPGEPSTQDGNGHGTHVAGTIAALNNSIGVLGVAPSAELYAVKVLGASGAGSVSSIAQGLEWAGANGMHVANLSLGSPSPSATLEQAVNSATSRGVLVVAASGNSGAGSISYPARYANAMAVGATDQNNNRASFSQYGAGLDIVAPGVNVQSTYPGSTYASLNGTSMATPHVAGAAALVKQKNPSWSNVQIRNHLKNTATSLGSTNLYGSGLVNAEAATR

SEQ ID NO: 54633 - protein, 269 aa, Unidentified
AQSVPWGISRVQAPAAHNRRLTGRGVKVAVLDTGISTHPDLDITGGASFVPGEPSTQDGNGHGTHVAGTIAALNNSIGVLGVAPSAELYAVKVLGASGSGSVSSIAQGLEWAGNNGMHVANLSLGSPSPSATLEQAVNSATSRGVLVVAASGNSGAGSISYPARYANAMAVGATDQNNNRASFSQYGAGLDIVAPGVNVQSTYPGSTYASLNGTSMATPHVAGAAALVKQKNPSWSNVQIRNHLKNTATSLGSTNLYGSGLVNAEAATR

SEQ ID NO: 54634 - protein, 269 aa, Unidentified
AQSVPWGISRVQAPAAHNRGLTGSGVKVAVLDTGISTHPDLNIRGGASFVPGEPSTQDGNGHGTHVAGTIAALNNNIGVLGVAPSAELYAVKVLGASGSGSVSSIAQGLEWAGNNGMHVANLSLGLPSPSATLEQAVNSATSRGVLVVAASGNSGAGSISYPARYANAMAVGATDQNNNRASFSQYGAGLDIVAPGVNVQSTYPGSTYASENGTSMATPHVAGAAALVKQKNPSWSNVQIRNHLKNTATSLGSTNLYGSGLVNALAATR

SEQ ID NO: 54635 - protein, 269 aa, Bacillus sp.
AQSVPWGISRVQAPAAHNRGLTGSGVKVAVLDTGISTHPDLNIRGGASFVPGEPSTQDGNGHGTHVAGTIAALNNSIGVLGVAPNAELYAVKVLGASGSGSVSSIAQGLEWAGNNVMHVANLSLGQDSPSATLEQAVNSATSRGVLVVAASGNSGAGSISYPARYANAMAVGATDQNNNRASFSQYGAGLDIVAPGVNVQSTYPGSTYASLNGTSMATPHVAGAAALVKQKNPSWSNVQIRNHLKNTATSLGSTNLYGSGLVNAEAATR

SEQ ID NO: 54636 - protein, 269 aa, Unidentified
AQSVPWGISRVQAPAAHNRGLTGSGVKVAVLDTGISTHPDLNIRGGASFVPGEPSTQDGNGHGTHVAGTIAALNNSIGVLGVAPSAELYAVKVLPQTGSASVSSIAQGLEWAGNNGMHVANLSLGSPSPSATLEQAVNSATSRGVLVVAASGNSGAGSISYPARYANAMAVGATDQNNNRASFSQYGAGLDIVAPGVNVQSTYPGSTYASLNGTSMATPHVAGAAALVKQKNPSWSNVQIRNHLKNTATSLGSTNLYGSGLVNAEAATR

SEQ ID NO: 54637 - protein, 269 aa, Unidentified
AQSVPWGISRVQAPAAHNRGLTGSGVKVAVLDSGISTHPDLNIRGGASFVPGEPSTQDGEGHGTHVAGTIAALNNSIGVLGVAPSAELYAVKVLGASGSGSVSSIAQGLEWAGNNRMHVANLSLGSPSPSATLEQAVNSATSRGVLVVAASGNSGEGSISYPARYANAMAVGATDQNNNRASFSQYGAGLDIVAPGVNVQSTYPGSTYASLNGTSMATPHVAGAAALVKQKNPSWSNVQIRNHLKNTATSLGSTNLYGSGLVNAEAATR

SEQ ID NO: 54638 - protein, 269 aa, Unidentified
AQVVPWGISRVQAPAAHNRGLTGSGVKVAVLDTGISTHPDLNIRGGASFVPGEPSTQDGNGHGTHVAGTIAALNNDIGVLGVAPSAELYAVKVLGASGSGSVSSIAQGLEWAGNNGMHVANLSLGSPSPSATLEQAVNSATSRGVLVVAASGNSGAGSISYPARYQNAMAVGATDQNNNRASFSQYGAGLDIVAPGVNVQSTYPGSTYASLNGTSMATPHVAGAAALVKQKNPSWSNVQIRNHLKNTATSLGSTNLYGPGLVNAEAATR

SEQ ID NO: 54639 - protein, 269 aa, Unidentified
AQSVPWGIARVQAPAAHNRRLTGSGVKVAVLDTGISTHPDRNIRGGASFVPGEPSTQDGNGHGTHVAGTIAALNNRIGVLGVAPSAELYAVKVLGASGSGSVSSIAQGLEWAGNNGMHVANLSLGSPSPSATLEQAVNSATSRGVLVVAASGNSGAGSISYPARYANAMAVGATDQNNNRASFSQYGAGLDIVAPGVNVQSTYPGSTYASLNGTSMATPHVAGAAALVKQKNPSWSNVQIRNHLKNTATSLGSTNLYGSGLVNAEAATR

SEQ ID NO: 54640 - protein, 269 aa, Unidentified
AQSVPWGISRVQAPAAHNRGLTGGGVKVAVLDTGISTHPDLNIRGGASFVPGEPSTQDGNGHGTHVAGTIAALNNSIGVLGVAPSAELYAVKVLAASGQGSVSSIAGGLEWAGNNGMHVANLSLGSPSPSATLEQAVNSATSRGVLVVAASGNSGAGSISYPARYANAMAVGATDQNNNRASFSQYGAGLDIVAPGVNVQSTYPGSTYASLNGTSMATPHVAGAAALVKQKNPSWSNVQIRNHLKNTATSLGSTNLYGSGLVNAEAATR

SEQ ID NO: 54641 - protein, 269 aa, Bacillus lentus
AQSVPWGISRVQAPAAHNRGLTGSGVKVAVLDTGISTHPDLNIRGGASFVPGEPSTQDGNGHGTHVAGTIAALNNSIGVLGVAPDAELYAVKVLGASGSGSVSSIARGLEWAGNNGMHVANLSLGSPSPSATLEQAVNSATSRGVLVVAASGNSGAGSISYPARYANAMAVGATDQNNNRADFSQYGAGLDIVAPGVNVQSTYPGSTYASLNGTSMATPHVAGAAALVKQKNPSWSNVQIRRHLKNTATSLGSTNLYGSGLVNAEAATR

SEQ ID NO: 54642 - protein, 269 aa, Unidentified
AQSVPWGISRVQAPAAHNRGLTGSGVKVAVLDSGISTHPDLNIRGGASFVPGEPSTQDGNGHGTHVAGTIAALNNSIGVLGVAPSAELYAVKVLGASGSGSVSSIAQGLEWAGLNRMHVANLSLGIPSPSATLEQAVNSATSRGVLVVAASGNSGAGSISYPARYANAMAVGATDQNNNRASFSQYGAGLDIVAPGVNVQSTYPGSTYASLNGTSMATPHVAGAAALVKQKNPSWSNVQIRNHLKNTATSLGSTNLYGSGLVNAEAATR

SEQ ID NO: 54643 - protein, 269 aa, Unidentified
AQSRPWGISRVQAPAAHNRRLTGRGVKVAVLDTGISTHPDLRIRGGASFVPGEPSTQDGNGHGTHVAGTIAALNNSIGVLGVAPSAELYAVKVLGASGSGSVSSIAQGLEWAGNNGMHVANLSLGSPSPSATLEQAVNSATSRGVLVVAASGNSGAGSISYPARYANAMAVGATDQNNNRASFSQYGAGLDIVAPGVNVQSTYPGSTYASLNGTSMATPHVAGAAALVKQKNPSWSNVQIRNHLKNTATSLGSTNLYGSGLVNAEAATR

SEQ ID NO: 54644 - protein, 269 aa, Synthetic construct
AQSVPWGISRVQAPAAHNRGLTGSGVKVAVLDTGISTHPDLNIRGGASFVPGEPSTQDGNGHGTHVAGTIAALDNSIGVLGVAPSAELYAVKVLGADGSGAISSIAQGLEWAGNNGMHVANLSLGSPSPSATLEQAVNSATSRGVLVVAASGNSGAGSISYPARYANAMAVGATDQNNNRASFSQYGAGLDIVAPGVNVQSTYPGSTYASLNGTSMATPHVAGAAALVKQKNPSWSNVQIRNHLKNTATSLGSTNLYGSGLVNAEAATR

SEQ ID NO: 54645 - protein, 269 aa, Unidentified
AQSVPWGISRVQAPAAHNRGLTGSGVKVAVLDTGISTHPDLNIRGGASFVPGEPSTQDGNGHGTHVAGTIAALDNSIGVLGVASSAELYAVKVLGASGSGAISSIAQGLEWAGNNGMHVANLSLGSPSPSATLEQAVNSATSRGVLVVAASGNSGAGSISYPARYANAMAVGATDQNNNRASFSQYGAGLDIVAPGVNVQSTYPGSTYASLNGTSMATPHVAGAAALVKQKNPSWSNVQIRNHLKNTATSLGSTNLYGSGLVNAEAATR

SEQ ID NO: 54646 - protein, 269 aa, Unidentified
AQSVPWGISRVQAPAAHNRGLTGSGVKVAVLDTGISTHPDLNIRGGASFVPGEPSTQDGNGHGTHVAGTIAALNNNIGVLGVAPSAELYAVKVLGASGGGSVSSIANGLEWAGNNGMHVANLSLGSPSPSATLEQAVNSATSRGVLVVAASGNSGAGSISYPARYANAMAVGATDQNNNRASFSQYGAGLDIVAPGVNVQSTYPGSTYASQNGTSMATPHVAGAAALVKQKNPSWSNVQIRNHLKNTATSLGSTNLYGSGLVNAEAATR

SEQ ID NO: 54647 - protein, 269 aa, Unidentified
AQSVPWGISRVQAPAAHNRGLTGSGVKVAVLDTGISTHPDLNIRGGASFVPGEPSTQDGNGHGTHVAGTIAALNNSIGVLGVAPSAELYAVKVLGASGSGSVSSIAQGLEWAGLNGMHVANLSLGSPSPSATLEQAVNSATSRGVLVVAASGNSGAGSISYPARYANAMAVGATDQNNNRASFSQYGAGLDIVAPGVNVQSTYPGSAYASLNGTSMATPHVAGAAVLVKQKNPSWSNVQIRNHLKNTATSLGSTNLYGSGLVNAFAATR

SEQ ID NO: 54648 - protein, 269 aa, Unidentified
AQSVPWGISRVQAPAAHNRGLTGSGVKVAVLDTGISTHPDLNIRGGASFVPGEPSTQDGEGHGTHVAGTIAALNNSIGVLGVAPSAELYAVKVLGASGSGSVSSIAQGLEWAGNNGMHVANLSLGSPSPSATLEQAVNSATSRGVLVVAASGNSGEESISYPARYANAMAVGATDQNNNRASFSQYGAGLDIVAPGVNVQSTYPGSTYASLNGTSMATPHVAGAAALVKQKNPSWSNVQIRNRLKNTATSLGSTNLYGSGLVNAEAATR

SEQ ID NO: 54649 - protein, 269 aa, Unidentified
AQSVPWGISRVQAPAAHNRKLTGSGVKVAVLDTGISTHPDLNIRGGASFVPGEPSTQDGEGHGTHVAGTIAALNNSIGVLGVAPSAELYAVKVLGASGSGSVSSIAQGLEWAGNNGMHVANLSLGSPSPSATLEQAVNSATSRGVLVVAASGNSGAGSISYPARYANAMAVGATDQNNNRASFSQYGAGLDIVAPGVNVQSTYPGSTYASENGTSMATPHVAGAAALVKQKNPSWSNVQIRNHLKNTATSLGSTNLYGSGLVNALAATR

SEQ ID NO: 54650 - protein, 269 aa, Unidentified
AQSVPWGISRVQAPAAHNRGLTGRGVKVAVLDTGISTHPDLNIRGGASFVPGEPSTQDGNGHGTHVAGTIAALNNSIGVLGVAPSAELYAVKVLGASGSGSVSSIAQGLEWAGLNRMHVANLSLGIPSPSATLEQAVNSATSRGVLVVAASGNSGAGSISYPARYANAMAVGATDQNNNRASFSQYGAGLDIVAPGVNVQSTYPGSTYASLNGTSMATPHVAGAAALVKQKNPSWSNVQIRNHLKNTATSLGSTNLYGSGLVNAEAATR

SEQ ID NO: 54651 - protein, 269 aa, Unidentified
AQSVPWGISRVQAPAAHNRKLTGSGVKVAVLDTGISTHPDLRIRGGASFVPGEPSTQDGNGHGTHVAGTIAALNNSIGVLGVAPSAELYAVKVLGASGDGSVSSIAQGLEWAGNNGMHVANLSLGLPSPSATLEQAVNSATSRGVLVVAASGNSGAGSISYPARYANAMAVGATDQNNNRASFSQYGAGLDIVAPGVNVQSTYPGSTYASLNGTSMATPHVAGAAALVKQKNPSWSNVQIRNHLKNTATSLGSTNLYGSGLVNAEAATR

SEQ ID NO: 54652 - protein, 269 aa, Unidentified
AQSVPWGISRVQAPAAHNRKLTGSGVKVAVLDTGISTHPDLNIRGGASFVPGEPSTQDGEGHGTHVAGTIAALNNSIGVLGVAPSAELYAVKVLGASGQGSVSSIAGGLEWAGLNGMHVANLSLGSPSPSATLEQAVNSATSRGVLVVAASGNSGAGSISYPARYANAMAVGATDQNNNRASFSQYGAGLDIVAPGVNVQSTYPGSTYASLNGTSSATPHVAGAAALVKQKNPSWSNVQIRNHLKNTATSLGSTNLYGSGLVNAEAATR

SEQ ID NO: 54653 - protein, 269 aa, Unidentified
AQSVPWGISRVQAPAAHNRGLTGSGFKVAVLDTGISTHPDLNIRGGASFVPGEPSTQDGNGHGTHVAGTIAALNNSIGVLGVAPSAELYAVKVLGASGSGSLSSIAQGLEWAGNNGMHVANLSLGSPSPSATLEQAVNSATSRGVLVVAASGNSGAGSISYPARYANAMAVGATDQNNNRASFSQYGAGLDIVAPGVNVQSTYPGSTYASLNGTSMATPHVAGAAALVKQKNPSWSNVQIRNHLKNTATNLGSTNLYGSGLVNAEFATR

SEQ ID NO: 54654 - protein, 269 aa, Unidentified
AQSVPWGISRVQAPAAHNRGLTGSGVKVAVLDSGISTHPDLNIRGGASFVPGEPSTQDGNGHGTHVAGTIAALNNSIGVLGVAPSAELYAVKVLGASGSGSVSSIAQGLEWAGLNRMHVANLSLGSPSPSATLEQAVNSATSRGVLVVAASGNSGEGSISYPARYANAMAVGATDQNNNRASFSQYGAGLDIVAPGVNVQSTYPGSTYASLNGTSMATPHVAGAAALVKQKNPSWSNVQIRNHLKNTATSLGSTNLYGSGLVNAEAATR

SEQ ID NO: 54655 - protein, 269 aa, Unidentified
AQSVPWGISRVQAPAAHNRGLTGSGVKVAVLDSGISTHPDLNIRGGASFVPGEPSTQDGNGHGTHVAGTIAALNNSIGVLGVAPSAELYAVKVLGASGSGSVSSIAQGLEWAGLNRMHVANLSLGSPSPSATLEQAVNSATSRGVLVVAASGNSGAGSISYPARYANAMAVGATDQNNNRADFSQYGAGLDIVAPGVNVQSTYPGSTYASLNGTSMATPHVAGAAALVKQKNPSWSNVQIRNHLKNTATSLGSTNLYGSGLVNAEAATR

SEQ ID NO: 54656 - protein, 269 aa, Unidentified
AQSVPWGISRVQAPAAHNRGLTGRGVKVAVLDTGISTHPDLRITGGASFVPGEPSTQDGNGHGTHVAGTIAALNNSIGVLGVAPSAELYAVKVLGASGSGSVSSIAQGLEWAGNNGMHVANLSLGSPSPSATLEQAVNSATSRGVLVVAASGNSGAGSISYPARYANAMAVGATDQNNNRASFSQYGAGLDIVAPGVNVQSTYPGSTYASLNGTSMATPHVAGAAALVKQKNPSWRNVQIRNHLKNTATSLGSTNLYGSGLVNAEAATR

SEQ ID NO: 54657 - protein, 269 aa, Unidentified
AQSVPWGISRVQAPAAHNRGLTGSGVKVAVLDTGISTHPDLNIRGGASFVPGEPSTQDGEGHGTHVAGTIAALNNSIGVLGVAPSAELYAVKVLGASGAGSVSSIAQGLEWAGNNGMHVANLSLGSPSPSATLEQAVNSATSRGVLVVAASGNSGAGSISYPARYANAMAVGATDQNNNRADFSQYGAGLDIVAPGVNVQSTYPGSTYASLNGTSMATPHVAGAAALVKQKNPSWSNVQIRNRLKNTATSLGSTNLYGSGLVNAEAATR

SEQ ID NO: 54658 - protein, 269 aa, Bacillus lentus
AQSVPWGISRVQAPAAHNRGLTGSGVKVAVLDTGISTHPDLNIRGGASFVPGEPSTQDGNGHGTHVAGTIAALNNSIGVLGVAPRAELYAVKVLGASGSGSVSSIADGLEWAGNNGMHVANLSLGSPSPSATLEQAVNSATSRGVLVVAASGNSGAGSISYPARYANAMAVGATDQNNNRADFSQYGAGLDIVAPGVNVQSTYPGSTYASLNGTSMATPHVAGAAALVKQKNPSWSNVQIRRHLKNTATSLGSTNLYGSGLVNAEAATR

SEQ ID NO: 54659 - protein, 269 aa, Unidentified
AQSVPWGISRVQAPAAHNRGLTGSGVKVAVLDTGISTHPDLNIRGGASFVPGEPSTQDGEGHGTHVAGTIAALNNSIGVLGVAPSAELYAVKVLGASGSGSVSSIAQGLEWAGNNGMHVANLSLGSPSPSATLEQAVNSATSRGVLVVAASGNSGEGSISYPARYANAMAVGATDQNNNRASFSQYGAGLDIVAPGVNVQSTYPGSTYASLNGTSMATPHVAGAAALVKQKNPSWSNVQIRNHLKRTATSLGSTNLYGSGLVNAFAATR

SEQ ID NO: 54660 - protein, 269 aa, Unidentified
AQSVPWGISRVQAPASHNRGLTGSGVKVAVLDTGISTHPDLNIRGGASFVPGEPSTQDGNGHGTHVAGTIAALNNSIGVLGVAPSAELYAVKVLGASGGGSVSSIAQGLEWAGNNGMHVANLSLGNPSPSATLEQAVNSATSRGVIVVAASGNSGAGSISYPARYANAMAVGATDQNNNRASFSQYGAGLDIVAPGVNVQSTYPGSTYASLNGTSMATPHVAGAAALVKQKNPSWSNVQIRNHLKNTATSLGSTNLYGSGLVNAEAATR

SEQ ID NO: 54661 - protein, 269 aa, Unidentified
AQSVPWGISRVQAPAAHNRGLTGSGVKVAVLDTGISTHPDLNIRGGASFVPGEPSTQDGNGHGTHVAGTIAALNNSIGVLGVAPSAELYAVKVLGQTGGGAVSSIAQGLEWAGNNGMHVANLSLGSPSPSATLEQAVNSATSRGVLVVAASGNSGAGSISYPARYANAMAVGATDQNNNRASFSQYGAGLDIVAPGVNVQSTYPGSTYASLNGTSMATPHVAGAAALVKQKNPSWSNVQIRNHLKNTATSLGSTNLYGSGLVNAEAATR

SEQ ID NO: 54662 - protein, 269 aa, Unidentified
AQSVPWGISRVQAPAAHNRGLAGSGVKVAVLDSGISTHPDLNIRGGASFVPGEPSTQDGEGHGTHVAGTIAALNNSIGVLGVAPSAELYAVKVLGASGSGSVSSIAQGLEWAGLNGMHVANLSLGSPSPSATLEQAVNSATSRGVLVVAASGNSGAGSISYPARYANAMAVGATDQNNNRASFSQYGAGLDIVAPGVNVQSTYPGSTYASLNGTSMATPHVAGAAALVKQKNPSWSNVQIRNHLKNTATSLGSTNLYGSGLVNAEAATR

SEQ ID NO: 54663 - protein, 269 aa, Unidentified
AQSVPWGISRVQAPAAHNRGLTGSGVKVAVLDTGISTHPDLRIRGGASFVPGEPSTQDGNGHGTHVAGTIAALNNSIGVLGVAPSAELYAVKVLAASGDGSVSSIAQGLEWAGNNGMHVANLSLGLPSPSATLEQAVNSATSRGVLVVAASGNSGAGSISYPARYANAMAVGATDQNNNRASFSQYGAGLDIVAPGVNVQSTYPGSTYASLNGTSMATPHVAGAAALVKQKNPSWSNVQIRNHLKNTATSLGSTNLYGSGLVNAEAATR

SEQ ID NO: 54664 - protein, 269 aa, Unidentified
AQSVPWGISRVQAPAAHNRGLAGRGVKVAVLDTGISTHPDLNIRGGASFVPGEPSTQDGNGHGTHVAGTIAALNNSIGVLGVAPSAELYAVKVLGASGSGSVSSIAQGLEWAGNNGMHVANLSLGSPSPSATLEQAVNSATSRGVLVVAASGNSGAGSIDYPARYANAMAVGATDQNNNRADFSQYGAGLDIVAPGVNVQSTYPGSTYASLNGTSMATPHVAGAAALVKQKNPSWSNVQIRNHLKNTATSLGSTNLYGSGLVNAEAATR

SEQ ID NO: 54665 - protein, 269 aa, Unidentified
AQSVPWGISRVQAPAAHNRGLTGSGVKVAVLDTGISTHPDLNIRGGASFVPGEPSTQDGNGHGTHVAGTIAALDNSIGVLGVAPSAELYAVKVLGASGSGAISSIAQGLEWAGNNGMHVANLSLGSPSPSATLEQAVNSATSRGVLVVAASGNSGAGSISYPARYANAMAVGATDQNDNRASFSQYGAGLDIVAPGVNVQSTYPGSTYASLNGTSMATPHVAGAAALVKQKNPSWSNVQIRNHLKNTATSLGSTNLYGSGLVNAEAATR

SEQ ID NO: 54666 - protein, 269 aa, Synthetic construct
AQSVPWGISRVQAPAAHNRGLTGSGVKVAVLDTGISTHPDLNIRGGASFVPGEPSTQDGNGHGTHVAGTIAALDNSIGVLGVAPSAELYAVKVLGADGRGSISSIAQGLEWAGNNGMHVANLSLGSPSPSATLEQAVNSATSRGVLVVAASGNSGAGSISYPARYANAMAVGATDQNNNRASFSQYGAGLDIVAPGVNVQSTYPGSTYASLNGTSMATPHVAGAAALVKQKNPSWSNVQIRNHLKNTATSLGSTNLYGSGLVNAEAATR

SEQ ID NO: 54667 - protein, 269 aa, Unidentified
AQSVPWGISRVQAPAAHRRGLTGSGVKVAVLDTGISTHPDLDIRGGASFVPGEPSTQDGNGHGTHVAGTIAALNNSIGVLGVAPSAELYAVKVLGASGSGSVSSIAQGLEWAGNNGMHVANLSLGSPSPSATLEQAVNSATSRGVLVVAASGNSGAGSISYPARYANAMAVGATDQNNNRASFSQYGAGLDIVAPGVNVQSTYPGSTYASLNGTSMATPHVAGEAALVKQKNPSWSNVQIRNRLKNTATSLGSTNLYGSGLVNAEAATR

SEQ ID NO: 54668 - protein, 269 aa, Unidentified
AQSVPWGISRVQAPAAHNRGLAGSGVKVAVLDSGISTHPDLNIRGGASFVPGEPSTQDGNGHGTHVAGTIAALNNSIGVLGVAPSAELYAVKVLGASGSGSVSSIAQGLEWAGNNGMHVANLSLGSESPSATLEQAVNSATSRGVLVVAASGNSGAGSIDYPARYANAMAVGATDQNNNRASFSQYGAGLDIVAPGVNVQSTYPGSTYASLNGTSMATPHVAGAAALVKQKNPSWSNVQIRNHLKNTATSLGSTNLYGSGLVNAEAATR

SEQ ID NO: 54669 - protein, 269 aa, Unidentified
AQSVPWGISRVQAPAAHNRRLTGSGVKVAVLDTGISTHPDLNIRGGASFVPGEPSTQDGNGHGTHVAGTIAALNNSIGVLGVAPSAELYAVKVLGASGAGSVSSIAQGLEWAGNNGMHVANLSLGSPSPSATLEQAVNSATSRGVLVVAASGNSGAGSISYPARYANAMAVGATDQNNNRASFSQYGAGLDIVAPGVNVQSTYPGSTYASLNGTSMATPHVAGAAVLVKQKNPSWSNVRIRNHLKNTATSLGSTNLYGSGLVNAEAATR

SEQ ID NO: 54670 - protein, 269 aa, Synthetic construct
AQSVPWGISRVQAPAAHNRGLTGSGVRVAVLDTGISTHPDLNIRGGASFVPGEPSTQDGNGHGTHVAGTIAALDNSIGVLGVAPSAELYAVKVLGASGSGSYSSIAQGLEWAGNNGMHVASLSLGSPSPSATLEQAVNSATSRGVLVVAASGNSGAGSISYPARYANAMAVGATDQNNNRASFSQYGAGLDIVAPGVNVQSTYPGSTYASLNGTSMATPHVAGAAALVKQKNPSWSNVQIRNHLKNTATSLGSTNLYGSGLVNAEAATR

SEQ ID NO: 54671 - protein, 269 aa, Unidentified
AQSVPWGISRVQAPAAHNRGLTGSGVKVAVLDTGISTHPDLNIRGGASFVPGEPSTQDGNGHGTHVAGTIAALNNDIGVLGVAPSAELYAVKVLGASGSGSVSSIAQGLEWAGNNDMHVANLSLGSPSPSATLEQAVNSATSRGVLVVAASGNSGAGSISYPARYANAMAVGATDQNNNRADFSQYGAGLDIVAPGVNVQSTYPGSTYASLNGTSMATPHVAGAAALVKQKNPSWSNVRIRNHLKNTATSLGSTNLYGSGLVNAEAATR

SEQ ID NO: 54672 - protein, 269 aa, Unidentified
AQSVPWGISRVQAPAAHRRGLTGSGVKVAVLDTGISTHPDLNIRGGASFVPGEPSTQDGNGHGTHVAGTIAALNNSIGVLGVAPSAELYAVKVLGASGGGSISSIAQGLEWAGNNGMHVANLSLGSPSPSATLEQAVNSATSRGVLVVAASGNSGAGSISYPARYANAMAVGATDQNNNRASFSQYGAGLDIVAPGVNVQSTYPGSTYASLNGTSMATPHVAGAAALVKQKNPSWSNVQIRNRLKNTATSLGSTNLYGSGLVNAEAATR

SEQ ID NO: 54673 - protein, 269 aa, Unidentified
AQSVPWGISRVQAPAAHNRGLTGRGVKVAVLDTGISTHPDLNIRGGASFVPGEPSTQDGNGHGTHVAGTIAALNNSIGVLGVAPSAELYAVKVLGASGSGSVSSIAQGLEWAGNNGMHVANLSLGSPSPSATLEQAVNSATSRGVLVVAASGNSGAGSISYPARYANAMAVGATDQNNNRADFSQYGAGLDIVAPGVNVQSTYPGSTYASLNGTSMATPHVAGAAALVKQKNPSWSNVRIRDHLKNTATSLGSTNLYGSGLVNAEAATR

SEQ ID NO: 54674 - protein, 269 aa, Unidentified
AQSVPWGISRVQAPAAHNRGLTGSGVKVAVLDTGISTHPDLNIRGGASFVPGEPSTQDGNGHGTHVAGTIAALDDSIGVLGVAPSAELYAVKVLGASGSGAISSIAQGLEWAGNNGMHVANLSLGSPSPSATLEQAVNSATSRGVLVVAASGNSGAGSISYPARYANAMAVGATDQNNNRASFSQYGAGLDIVAPGVNVQSTYPGSTYASLNGTSMATPHVAGAAALVKQKNPSWSNVQIRNHLKNTATSLGSTNLYGSGLVNAEAATR

SEQ ID NO: 54675 - protein, 269 aa, Unidentified
AQSVPWGISRVQAPAAHNRGLTGSGVKVAVLDTGISTHPDLNIRGGASFVPGEPSTQDGNGHGTHVAGTIAALNNNIGVLGVAPSAELYAVKVLGASGSGSVSSIAQGLEWAGNNRMHVANLSLGDPSPSATLEQAVNSATSRGVLVVAASGNSGAGSIDYPARYANAMAVGATDQNNNRASFSQYGAGLDIVAPGVNVQSTYPGSTYASLNGTSMATPHVAGAAALVKQKNPSWSNVQIRNHLKNTATSLGSTNLYGSGLVNAEAATR

SEQ ID NO: 54676 - protein, 269 aa, Unidentified
AQSVPWGISRVQAPAAHNRRLTGRGVKVAVLDTGISTHPDLRIRGGASFVPGEPSTQDGNGHGTHVAGTIAALDNSIGVLGVAPSAELYAVKVLGASGSGSVSSIAQGLEWAGNNGMHVANLSLGSPSPSATLEQAVNSATSRGVLVVAASGNSGAGSISYPARYANAMAVGATDQNNNRASFSQYGAGLDIVAPGVNVQSTYPGSTYASLNGTSMATPHVAGAAALVKQKNPSWSNVQIRNHLKNTATSLGSTNLYGSGLVNAEAATR

SEQ ID NO: 54677 - protein, 269 aa, Unidentified
AQSVPWGISRVQAPAAHNRGLTGSGVKVAVLDTGISTHPDLNIRGGASFVPGEPSTQDGEGHGTHVAGTIAALNNSIGVLGVAPSAELYAVKVLGASGSGSVSSIAQGLEWAGNNGMHVANLSLGSPSPSATLEQAVNSATSRGVLVVAASGNSGEGSISYPARYANAMAVGATDQNNNRADFSQYGAGLDIVAPGVNVQSTYPGSTYASLNGTSMATPHVAGAAALVKQKNPSWSNVQIRNRLKNTATSLGSTNLYGSGLVNAEAATR

SEQ ID NO: 54678 - protein, 269 aa, Unidentified
AQSVPWGISRVQAPAAHNRGLAGSGVKVAVLDSGISTHPDLNIRGGASFVPGEPSTQDGNGHGTHVAGTIAALNNSIGVLGVAPSAELYAVKVLGASGSGSVSSIAQGLEWAGNNGMHVANLSLGIPSPSATLEQAVNSATSRGVLVVAASGNSGEGSISYPARYANAMAVGATDQNNNRASFSQYGAGLDIVAPGVNVQSTYPGSTYASLNGTSMATPHVAGAAALVKQKNPSWSNVQIRNHLKNTATSLGSTNLYGSGLVNAEAATR

SEQ ID NO: 54679 - protein, 269 aa, Unidentified
AQSVPWGISRVQAPAAHNRGLTGSGVKVAVLDTGISTHPDLNIRGGASFVPGEPSTQDGNGHGTHVAGTIAALNNSIGVLGVAPSAELYAVKVLGASGAGSVSSIAQGLEWAGNNGMHVANLSLGNPSPSATLEQAVNSATSRGVLVVAASGNSGEGSISYPARYANAMAVGATDQNNNRASFSQYGAGLDIVAPGVNVQSTYPGSTYASLNGTSMATPHVAGAAALVKQKNPSWSNVQIRNRLKNTATSLGSTNLYGSGLVNAEAATR

SEQ ID NO: 54680 - protein, 269 aa, Unidentified
AQSVPWGISRVQAPAAHNRGLTGSGVKVAVLDTGISTHPDLNIRGGASFVPGEPSTQDGNGHGTHVAGTIAALNNGIGVLGVAPSAELYAVKVLGASGSGSVSSIAQGLEWAGNNSMHVANLSLGSPSPSATLEQAVNSATSRGVLVVAASGNSGAGSISYPARYANAMAVGATDQNNNRADFSQYGAGLDIVAPGVNVQSTYPGSTYASLNGTSMATPHVAGAAALVKQKNPSWSNVQIRDHLKNTATSLGSTNLYGSGLVNAEAATR

SEQ ID NO: 54681 - protein, 269 aa, Unidentified
AQSVPWGISRVQAPAAHNRGLTGSGVKVAVLDTGISTHPDLNITGGASFVPGEPSTQDGNGHGTHVAGTIAALNNSIGVLGVAPSAELYAVKVLGASGAGSVSSIAQGLEWAGNNGMHVANLSLGSPSPSATLEQAVNSATSRGVLVVAASGNSGAGSISYPARYANAMAVGATDQNNNRASFSQYGAGLDIVAPGVNVQSTYIQSTYASLNGTSMATPHVAGAAALVKQKNPSWSNVQIRNHLKNTATSLGSTNLYGSGLVNAEAATR

SEQ ID NO: 54682 - protein, 269 aa, Unidentified
AQSVPWGISRVQAPAAHNRGLTGRGVKVAVLDTGISTHPDLNIRGGASFVPGEPSTQDGNGHGTHVAGTIAALNNSIGVLGVAPSAELYAVKVLGASGSGSVSSIAQGLEWAGLNGMHVANLSLGIPSPSATLEQAVNSATSRGVLVVAASGNSGEGSISYPARYANAMAVGATDQNNNRASFSQYGAGLDIVAPGVNVQSTYPGSTYASLNGTSMATPHVAGAAALVKQKNPSWSNVQIRNHLKNTATSLGSTNLYGSGLVNAEAATR

SEQ ID NO: 54683 - protein, 270 aa, unidentified
AQSVPWGISRVQAPAAHNRGLTGSGVKVAVLDTGIDSTHPDLNIRGGASFVPGEPSTQDGNGHGTHVAGTIAALNNSIGVLGVAPSAELYAVKVLGASGSGSVSSIAQGLEWAGNNGMDVANLSLGSPSPSATLEQAVNSATSRGVLVVAASGNSGAGSISYPAYYANAMAVGATDQNNNRASFSQYGAELDIVAPGVNVQSTYPGSTYASLNGTSMATPHVAGAAALVLQKNPSWSNVQIRNHLKNTATSLGSTNLYGSGLVNAEAATR

SEQ ID NO: 54684 - protein, 269 aa, Bacillus subtilis
AQSVPWGISRVQAPAAHNRGLTGSGVKVAVLDTGISTHPDLNIRGGASFVPGEPSTQDGNGHGTHVAGDIAALNNSIGVLGVAPSAELYAVKVLGASGSGSVSSIAQGLEWAGNNGMHVANLSLGSPSPSATLEQAVNSATSRGVLVVAASGNSGAGSISYPAYYANAMAVGATDQNNNRASFSQYGAELDIVAPGVNVQSTYPGSTYASLNGTSMATPHVAGAAALVKQKNPSWSNVQIRNHLENTATSLGSTNLYGSGLVNAEAATR

SEQ ID NO: 54685 - protein, 269 aa, Unidentified
AQSVPWGISRVQAPAAHNRGLTGRGVKVAVLDSGISTHPDLNIRGGASFVPGEPSTQDGNGHGTHVAGTIAALNNRIGVLGVAPSAELYAVKVLGASGSGSVSSIAQGLEWAGNNRMHVANLSLGSPSPSATLEQAVNSATSRGVLVVAASGNSGAGSISYPARYANAMAVGATDQNNNRASFSQYGAGLDIVAPGVNVQSTYPGSTYASLNGTSMATPHVAGAAALVKQKNPSWSNVQIRNHLKNTATSLGSTNLYGSGLVNAEAATR

SEQ ID NO: 54686 - protein, 269 aa, Unidentified
AQSVPWGISRVQAPAAHNRRLTGSGVKVAVLDTGISTHPDLNIRGGASFVPGEPSTQDGNGHGTHVAGTIAALNNSIGVLGVAPSAELYAVKVLGASGSGGVSSIAQGLEWAGNNGMHVANLSLGSPSPSATLEQAVNSATSRGVLVVAASGNSGAGSISYPARYANAMAVGATDQNNNRASFSQYGAGLDIVAPGVNVQSTYPGSTYASLNGTSMATPHVAGAAVLVKQKNPSWRNVQIRNHLKNTATSLGSTNLYGSGLVNAEAATR

SEQ ID NO: 54687 - protein, 269 aa, Unidentified
AQSVPWGISRVQAPAAHNRGLLGSGVKVAVLDTGISTHPDLNIRGGASFVPGEPSTQDGNGHGTHVAGTIAALNNNIGVLGVAPSAELYAVKVLGASGSGSVSSIAQGLEWAGNNGMHVANLSLGSPSPSATLEQAVNSATSRGVLVVAASGNSGAGSISYPARYANAMAVGATDQNNNRASFSQYGAGLDIVAPGVNVQSTYPGSAYASENGTSMATPHVAGAAALVKQKNPSWSNVQIRNHLKNTATSLGSTNLYGSGLVNAEAATR

SEQ ID NO: 54688 - protein, 269 aa, Unidentified
AQSVPWGISRVQAPAAHNRGLTGSGVKVAVLDTGISTHPDLNIRGGASFVPGEPSTQDGNGHGTHVAGTIAALNNSIGVLGVAPSAELYAVKVLGQTGAASVSSIAQGLEWAGNNGMHVANLSLGSPSPSATLEQAVNSATSRGVLVVAASGNSGAGSISYPARYANAMAVGATDQNNNRASFSQYGAGLDIVAPGVNVQSTYPGSTYASLNGTSMATPHVAGAAALVKQKNPSWSNVQIRNHLKNTATSLGSTNLYGSGLVNAEAATR

SEQ ID NO: 54689 - protein, 269 aa, Unidentified
AQSVPWGISRVQAPAAHNRGLTGRGVKVAVLDSGISTHPDLNIRGGASFVPGEPSTQDGNGHGTHVAGTIAALNNSIGVLGVAPSAELYAVKVLGASGSGSVSSIAQGLEWAGNNRMHVANLSLGSPSPSATLEQAVNSATSRGVLVVAASGNSGAGSISYPARYANAMAVGATDQNNNRASFSQYGAGLDIVAPGVNVQSTAPGSTYASLNGTSMATPHVAGAAALVKQKNPSWSNVQIRNHLKNTATSLGSTNLYGSGLVNAEAATR

SEQ ID NO: 54690 - protein, 269 aa, Unidentified
AQSVPWGISRVQAPAAHNRGLAGSGVKVAVLDTGISTHPDLNIRGGASFVPGEPSTQDGNGHGTHVAGTIAALNNSIGVLGVAPSAELYAVKVLGASGSGSVSSIAQGLEWAGLNGMHVANLSLGIPSPSATLEQAVNSATSRGVLVVAASGNSGEGSISYPARYANAMAVGATDQNNNRASFSQYGAGLDIVAPGVNVQSTYPGSTYASLNGTSMATPHVAGAAALVKQKNPSWSNVQIRNHLKNTATSLGSTNLYGSGLVNAEAATR

SEQ ID NO: 54691 - protein, 269 aa, Alkalihalobacillus clausii
AQSVPWGISRIQAPAAHNRGLTGSGVKVAVLDTGISTHPDLNIRGGASFVPGEPSTQDGNGHGTHVAGTIAALNNSIGVLGVAPSAELYAVKVLVASGSGSVSSIAQGLEWAGNNGMHVANLSLGSPSPSATLEQAVNSATSRGLLVVAASGNSGAGSISYPARYANAMAVGATDQNNNRASFSQYGAGLDIVAPGVNVQSTYPGSTYASLTGTSMATPHVAGAAALVKQKNPSWSNVQIRNHLKNTATSLGSTNLYGSGLVNAEAATR

SEQ ID NO: 54692 - protein, 269 aa, Unidentified
AQSVPWGISRVQAPAAHNRGLTGSGVKVAVLDTGISTHPDLNIRGGASFVPGEPSTQDGNGHGTHVAGTIAALNNSIGVLGVAPSAELYAVKVLGASGGGAISSIAQGLEWAGNNGMHVANLSLGSPSPSATLEQAVNSATSRGVLVVAASGNSGADSISYPARYANAMAVGATDQNNNRASFSQYGAGLDIVAPGVNVQSTYPGSTYASLNGTSMATPHVAGAAALVKQKNPSWSNVQIRNHLKNTATSLGSTNLYGSGLVNAEAATR

SEQ ID NO: 54693 - protein, 269 aa, Unidentified
AQSVPWGISRVQAPAAHNRGLTGSGVKVAVLDTGISTHPDLNIRGGASFVPGEPSTQDGNGHGTHVAGTIAALDNSIGVLGVAPSAELYAVKVLGASGSGATSSIAQGLEWAGNNGMHVANLSLGSPTPSATLEQAVNSATSRGVLVVAASGNSGAGSISYPARYANAMAVGATDQNNNRASFSQYGAGLDIVAPGVNVQSTYPGSTYASLNGTSSATPHVAGAAALVKQKNPSWSNVRIRNHLKNTATSLGSTNLYGSGLVNAEAATR

SEQ ID NO: 54694 - protein, 269 aa, Unidentified
AQSVPWGISRVQAPAAHNRGLAGSGVKVAVLDTGISTHPDLNIRGVASFVPGEPSTQDGNGHGTHVAGTIAALNNSIGVLGVAPSAELYAVKVLGASGSGAVSSIAQGLEWAGNNGMHVANLSLGSPSPSATLEQAVNSATSRGVIVVAASGNSGAGSISYPARYANAMAVGATDQNNNRASFSQYGAGLDIVAPGVNVQSTYPGSTYASLNGTSMATPHVAGAAALVKQKNPSWSNVQIRNHLKNTATSLGSTNLYGSGLVNAEAATR

SEQ ID NO: 54695 - protein, 269 aa, Unidentified
AQSVPWGISRVQAPAAHNRGLTGSGVKVAVLDTGISTHPDLRIRGGASFVPGEPSTQDGNGHGTHVAGTIAALNNSIGVLGVAPSAELYAVKVLGASGAGSVSSIAQGLEWAGANGMHVANLSLGSPSPSATLEQAVNSATSRGVLVVAASGNSGAGSISYPARYANAMAVGATDQNNNRASFSQYGAGLDIVAPGVNVQSTYPGSTYASLNGTSMATPHVAGAAALVKQKNPSWSNVQIRNHLKNTATSLGSTNLYGSGLVRAEAATR

SEQ ID NO: 54696 - protein, 269 aa, Alkalihalobacillus clausii
AQSVPWGISRLQAPAAHNRGLTGSGVKVAVLDTGISTHPDLNIRGGASFVPGEPSTQDGNGHGTHVAGTIAALNNSIGVLGVAPSAELYAVKVLVASGSGSVSSIAQGLEWAGNNGMHVANLSLGSPSPSATLEQAVNSATSRGLLVVAASGNSGAGSISYPARYANAMAVGATDQNNNRASFSQYGAGLDIVAPGVNVQSTYPGSTYASLSGTSMATPHVAGAAALVKQKNPSWSNVQIRNHLKNTATSLGSTNLYGSGLVNAEAATR

SEQ ID NO: 54697 - protein, 269 aa, Unidentified
AQSVPWGISRVQAPAAHNRRLTGSGVKVAVLDTGISTHPDLNIRGGASFVPGEPSTQDGNGHGTHVAGTIAALNNSIGVLGVAPSAELYAVKVLGASGSGSISSIAQGLEWAGNNGMHVANLSLGSPSPSATLEQAVNSATSRGVLVVAASGNSGAGSISYPARYANAMAVGATDQNNNRASFSQYGAGLDIVAPGVNVQSTYPGSTYASLNGTSMATPHVAGAAVLVKQKNPSWSNVRIRNHLKNTATSLGSTNLYGSGLVNAEAATR

SEQ ID NO: 54698 - protein, 269 aa, Unidentified
AQSVPWGISRVQAPAAHNRRLTGRGVKVAVLDTGISTHPDLNIRGGASFVPGEPSTQDGNGHGTHVAGTIAALNNSIGVLGVAPSAELYAVKVLGASGSGSVSSIAQGLEWAGNNGMHVANLSLGSPSPSATLEQAVNSATSRGVLVVAASGNSGAGSISYPARYANAMAVGATDQNNNRASFSQYGAGLDIVAPGVNVQSTYPGSTYASLNGTSMATPHVAGAAALVKQKNPSWRNVQIRNRLKNTATSLGSTNLYGSGLVNAEAATR

SEQ ID NO: 54699 - protein, 269 aa, Unidentified
AQSVPWGISRVQAPAAHNRRLTGSGVKVAVLDTGISTHPDLNIRGGASFVPGEPSTQDGNGHGTHVAGTIAALNNSIGVLGVAPSAELYAVKVLGASGSGSVSSIAQGLEWAGNNGMHVANLSLGSESPSATLEQAVNSATSRGVLVVAASGNSGAGSISYPARYANAMAVGATDQNNNRASFSQYGAGLDIVAPGVNVQSTYPGSTYASLNGTSMATPHVAGAAALVKQKNPSWSNVRIRDHLKNTATSLGSTNLYGSGLVNAEAATR

SEQ ID NO: 54700 - protein, 269 aa, Unidentified
AQSVPWGISRVQAPAAHNRGLTGRGVKVAVLDTGISTHPDLRIRGGASFVPGEPSTQDGNGHGTHVAGTIAALDNSIGVLGVAPSAELYAVKVLGASGSGSVSSIAQGLEWAGNNGMHVANLSLGSPSPSATLEQAVNSATSRGVLVVAASGNSGAGSISYPARYANAMAVGATDQNNNRASFSQYGAGLDIVAPGVNVQSTYPGSTYASLNGTSMATPHVAGAAALVKQKNPSWSNVQIRNRLKNTATSLGSTNLYGSGLVNAEAATR

SEQ ID NO: 54701 - protein, 269 aa, Alkalihalobacillus clausii
AQSVPWGISRLQAPAAHNRGLTGSGVKVAVLDTGISTHPDLNIRGGASFVPGEPSTQDGNGHGTHVAGTIAALNNSIGVLGVAPSAELYAVKVLVASGSGSVSSIAQGLEWAGNNGMHVANLSLGSPSPSATLEQAVNSATSRGILVVAASGNSGAGSISYPARYANAMAVGATDQNNNRASFSQYGAGLDIVAPGVNVQSTYPGSTYASLTGTSMATPHVAGAAALVKQKNPSWSNVQIRNHLKNTATSLGSTNLYGSGLVNAEAATR

SEQ ID NO: 54702 - protein, 269 aa, Unidentified
AQSVPWGISRVQAPAAHNRRLTGSGVKVAVLDTGISTHPDLNIRGGASFVPGEPSTQDGNGHGTHVAGTIAALNNGIGVLGVAPSAELYAVKVLGASGSGSVSSIAQGLEWAGNNSMHVANLSLGSPSPSATLEQAVNSATSRGVLVVAASGNSGAGSISYPARYANAMAVGATDQNNNRASFSQYGAGLDIVAPGVNVQSTYPGSTYASLNGTSMATPHVAGAAALVKQKNPSWSNVQIRDHLKNTATSLGSTNLYGSGLVNAEAATR

SEQ ID NO: 54703 - protein, 269 aa, Unidentified
AQSVPWGISRVQAPAAHNRRLTGRGVKVAVLDTGISTHPDLNIRGGASFVPGEPSTQDGNGHGTHVAGTIAALNNSIGVLGVAPSAELYAVKVLGASGAGSVSSIAQGLEWAGNNGMHVANLSLGSPSPSATLEQAVNSATSRGVLVVAASGNSGAGSISYPARYANAMAVGATDQNNNRASFSQYGAGLDIVAPGVNVQSTYPGSAYASLNGTSMATPHVAGAAALVKQKNPSWSNVQIRNHLKNTATSLGSTNLYGSGLVNAEAATR

SEQ ID NO: 54704 - protein, 269 aa, Unidentified
AQSVSWGISRVQAPAAHNRGLTGSGVKVAVLDTGISTHPDLNIRGGASFVPGEPSTQDGNGHGTHVAGTIAALNNRIGVLGVAPSAELYAVKVLGASGSGSVSSIAQGLEWAGNNRMHVANLSLGSPSPSATLEQAVNSATSRGVLVVAASGNSGAGSISYPARYANAMAVGATDQNNNRASFSQYGAGLDIVAPGVNVQSTYPGSTYASLNGTSMATPHVAGAAALVKQKNPSRSNVQIRNHLKNTATSLGSTNLYGSGLVNAEAATR

SEQ ID NO: 54705 - protein, 269 aa, Unidentified
AQSVPWGISRVQAPAAHNRRLTGSGVKVAVLDTGISTHPDLNIRGGASFVPGEPSTQDGNGHGTHVAGTIAALNNSIGVLGVAPSAELYAVKVLGASGSGSVSSIAQGLEWAGNNGMHVANLSLGSESPSATLEQAVNSATSRGVLVVAASGNSGAGSISYPARYANAMAVGATDQNNNRADFSQYGAGLDIVAPGVNVQSTYPGSTYASLNGTSMATPHVAGAAALVKQKNPSWSNVRIRNHLKNTATSLGSTNLYGSGLVNAEAATR

SEQ ID NO: 54706 - protein, 269 aa, Unidentified
AQSVPWGISRVQAPAAHNRGLLGSGVKVAVLDTGISTHPDLNIRGGASFVPGEPSTQDGNGHGTHVAGTIAALNNNIGVLGVAPSAELYAVKVLGASGSGSVSSIAQGLEWAGNNGMHVANLSLGDPSPSATLEQAVNSATSRGVLVVAASGNSGAGSISYPARYANAMAVGATDQNNNRASFSQYGAGLDIVAPGVNVQSTYPGSAYASLNGTSMATPHVAGAAALVKQKNPSWSNVQIRNHLKNTATSLGSTNLYGSGLVNAEAATR

SEQ ID NO: 54707 - protein, 269 aa, Unidentified
AQSVPWGISRVQAPAAHNRGLTGRGVKVAVLDTGISTHPDLNIRGGASFVPGEPSTQDGEGHGTHVAGTIAALNNSIGVLGVAPSAELYAVKVLGASGSGSVSSIAQGLEWAGNNRMHVANLSLGSPSPSATLEQAVNSATSRGVLVVAASGNSGEGSISYPARYANAMAVGATDQNNNRASFSQYGAGLDIVAPGVNVQSTYPGSTYASLNGTSMATPHVAGAAALVKQKNPSWSNVQIRNHLKNTATSLGSTNLYGSGLVNAEAATR

SEQ ID NO: 54708 - protein, 269 aa, Unidentified
AQSVPWGISRVQAPAAHNRGLTGRGVKVAVLDTGISTHPDLNIRGGASFVPGEPSTQDGEGHGTHVAGTIAALNNGIGVLGVAPSAELYAVKVLGASGSGSVSSIAQGLEWAGNNSMHVANLSLGSPSPSATLEQAVNSATSRGVLVVAASGNSGAGSISYPARYANAMAVGATDQNNNRASFSQYGAGLDIVAPGVNVQSTYPGSTYASLNGTSMATPHVAGAAALVKQKNPSWSNVQIRNHLKNTATSLGSTNLYGSGLVNAEAATR

SEQ ID NO: 54709 - protein, 269 aa, Unidentified
AQSVPWGISRVQAPAAHNRRLTGSGVKVAVLDTGISTHPDLNIRGGASFVPGEPSTQDGNGHGTHVAGTIAALNNDIGVLGVAPSAELYAVKVLGASGSGSVSSIAQGLEWAGNNSMHVANLSLGSPSPSATLEQAVNSATSRGVLVVAASGNSGAGSISYPARYANAMAVGATDQNNNRADFSQYGAGLDIVAPGVNVQSTYPGSTYASLNGTSMATPHVAGAAALVKQKNPSWSNVQIRNHLKNTATSLGSTNLYGSGLVNAEAATR

SEQ ID NO: 54710 - protein, 269 aa, Unidentified
AQSVPWGISRVQAPAAHNRGLTGSGVKVAVLDTGISTHPDLRIRGGASFVPGEPSTQDGNGHGTHVAGTIAALDNSIGVLGVAPSAELYAVKVLGASGSGSVSSIAQGLEWAGNNGMHVANLSLGSPSPSATLEQAVNSATSRGVLVVAAAGNSGAGSISYPARYANAMAVGATDQNNNRASFSQYGAGLDIVAPGVNVQSTYPGSTYASLNGTSMATPHVAGAAALVKQKNPSWSNVQIRNRLKNTATSLGSTNLYGSGLVNAEAATR

SEQ ID NO: 54711 - protein, 269 aa, Unidentified
AQSVPWGISRVQAPAAHNRGLTGSGVKVAVLDSGISTHPDLNIRGGASFVPGEPSTQDGNGHGTHVAGTIAALNNSIGVLGVAPSAELYAVKVLGASGSGSVTSIAQGLEWAGNNGMHVANLSLGSPSPSATLEQAVNSATSRGVLVVAASGNSGAGSISYPARYANAMAVGATDQNNNRADFSQYGAGLDIVAPGVNVQSTYPGSTYAFLNGTSMATPHVAGAAALVKQKNPSWSNVQIRNHLKNTATSLGSTNLYGSGLVNAEAATR

SEQ ID NO: 54712 - protein, 269 aa, Unidentified
AQSVPWGISRVQAPAAHNRGLAGSGVKVAVLDTGISTHPDLNIRGGASFVPGEPSTQDGNGHGTHVAGTIAALNNSIGVLGVAPSAELYAVKVLGASGSGSVSSIAQGLEWAGNNRMHVANLSLGSPSPSATLEQAVNSATSRGVLVVAASGNSGEGSISYPARYANAMAVGATDQNNNRADFSQYGAGLDIVAPGVNVQSTYPGSTYASLNGTSMATPHVAGAAALVKQKNPSWSNVQIRNHLKNTATSLGSTNLYGSGLVNAEAATR

SEQ ID NO: 54713 - protein, 269 aa, Unidentified
AQSVPWGISRVQAPAAHNRGLTGSGVKVAVLDTGISTHPDLNIRGGASFVPGEPSTQDGNGHGTHVAGTIAALNNSIGVLGVAPSAELYAVKVLGASGSGSVSSIAQGLEWAGNNGMHVANLSLGNPSPSATLEQAVNSATSRGVLVVAASGNSGEESISYPARYANAMAVGATDQNNNRASFSQYGAGLDIVAPGVNVQSTYPGSTYASLNGTSMATPHVAGAAALVKQKNPSWSNVQIRNHLKNTATSLGSTNLYGSGLVNAFAATR

SEQ ID NO: 54714 - protein, 269 aa, Unidentified
AQSVPWGISRVQAPAAHNRGLTGRGVKVAVLDTGISTHPDLNIRGGASFVPGEPSTQDGNGHGTHVAGTIAALNNSIGVLGVAPSAELYAVKVLGASGSGAVSSIAQGLEWAGNNGMHVANLSLGSPSPSATLEQAVNSATSRGVLVVAASGNSGAGSISYPARYANAMAVGATDQNNNRASFSQYGAGLDIVAPGVNVQSTYPGSTYASLNGTSMATPHVAGAAALVKQKNPSWSNVRIRNRLKNTATSLGSTNLYGSGLVNAEAATR

SEQ ID NO: 54715 - protein, 269 aa, Unidentified
AQSVPWGISRVQAPAAHNRKLTGFGVKVAVLDTGISTHPDLNIRGGASFVPGEPSTQDGNGHGTHVAGTIAALNNSIGVLGVAPSAELYAVKVLGASGSGSVSSIAQGLEWAGNNGMHVANLSLGSPSPSATLEQAVNSATSRGVLVVAASGNSGAGSIDYPARYANAMAVGATDQNNNRASFSQYGAGLDIVAPGVNVQSTYPGSTYASENGTSMATPHVAGAAALVKQKNPSWSNVQIRNHLKNTATSLGSTNLYGSGLVNAEAATR

SEQ ID NO: 54716 - protein, 269 aa, Unidentified
AQSVPWGISRVQAPAAHNRGLTGFGVKVAVLDTGISTHPDLNIRGGASFVPGEPSTQDGEGHGTHVAGTIAALNNSIGVLGVAPSAELYAVKVLGASGSGSVSSIAQGLEWAGLNGMHVANLSLGSPSPSATLEQAVNSATSRGVLVVAASGNSGAGSISYPARYANAMAVGATDQNNNRASFSQYGAGLDIVAPGVNVQSTYPGSTYASLNGTSMATPHVAGAAALVKQKNGSWSNVQIRNHLKNTATSLGSTNLYGSGLVNAEAATR

SEQ ID NO: 54717 - protein, 269 aa, Unidentified
AQSVPWGISRVQAPAAHRRGLTGSGVKVAVLDTGISTHPDLNIRGGASFVPGEPSTQDGNGHGTHVAGTIAALDNSIGVLGVAPSAELYAVKVLGASGGGSISSIAQGLEWAGNNGMHVANLSLGSPSPSATLEQAVNSATSRGVLVVAASGNSGAGSISYPARYANAMAVGATDQNNNRASFSQYGAGLDIVAPGVNVQSTYPGSTYASLNGTSMATPHVAGAAALVKQKNPSWSNVQIRNHLKNTATSLGSTNLYGSGLVNAEAATR

SEQ ID NO: 54718 - protein, 269 aa, Unidentified
AQSVPWGISRVQAPAAHNRKLTGSGVKVAVLDTGISTHPDLNIRGGASFVPGEPSTQDGNGHGTHVAGTIAALNNSIGVLGVAPSAELYAVKVLGASGSGSVSSIAQGLEWAGNNRMHVANLSLGDPSPSATLEQAVNSATSRGVLVVAASGNSGAGSISYPARYANAMAVGATDQNNNRASFSQYGAGLDIVAPGVNVQSTYPGSTYASENGTSMATPHVAGAAALVKQKNPSWSNVQIRNHLKNTATSLGSTNLYGSGLVNAEAATR

SEQ ID NO: 54719 - protein, 269 aa, Unidentified
AQSVPWGISRVQAPAAHNRGLTGSGVKVAVLDSGISTHPDLNIRGGASFVPGEPSTQDGEGHGTHVAGTIAALNNSIGVLGVAPSAELYAVKVLGASGSGSVSSIAQGLEWAGNNRMHVANLSLGIPSPSATLEQAVNSATSRGVLVVAASGNSGAGSISYPARYANAMAVGATDQNNNRASFSQYGAGLDIVAPGVNVQSTYPGSTYASLNGTSMATPHVAGAAALVKQKNPSWSNVQIRNHLKNTATSLGSTNLYGSGLVNAEAATR

SEQ ID NO: 54720 - protein, 269 aa, Unidentified
AQSVPWGISRVQAPAAHNRRLTGSGVKVAVLDTGISTHPDLRITGGASFVPGEPSTQDGNGHGTHVAGTIAALNNSIGVLGVAPSAELYAVKVLGASGSGSVSSIAQGLEWAGNNGMHVANLSLGSPSPSATLEQAVNSATSRGVLVVAASGNSGAGSISYPARYANAMAVGATDQNNNRASFSQYGAGLDIVAPGVNVQSTYPGSTYASLNGTSMATPHVAGAAALVKQKNPSWRNVQIRNHLKNTATSLGSTNLYGSGLVNAEAATR

SEQ ID NO: 54721 - protein, 269 aa, Unidentified
AQSVPWGISRVQAPAAHNRGLTGSGVKVAVLDTGISTHPDLNIRGGASFVPGEPSTQDGEGHGTHVAGTIAALNNSIGVLGVAPSAELYAVKVLGASGAGSVSSIAQGLEWAGNNGMHVANLSLGSPSPSATLEQAVNSATSRGVLVVAASGNSGEGSISYPARYANAMAVGATDQNNNRASFSQYGAGLDIVAPGVNVQSTYPGSTYASLNGTSMATPHVAGAAALVKQKNPSWSNVQIRNRLKNTATSLGSTNLYGSGLVNAEAATR

SEQ ID NO: 54722 - protein, 269 aa, Unidentified
AQSVPWGISRVQAPAAHNRGLAGSGVKVAVLDTGISTHPDLNIRGGASFVPGEPSTQDGNGHGTHVAGTIAALNNSIGVLGVAPSAELYAVKVLGASGSGSLSSIAQGLEWAGNNGMHVANLSLGSPSPSATLEQAVNSATSRGVLVVAASGNSGEGSISYPARYANAMAVGATDQNNNRASFSQYGAGLDIVAPGVNVQSTYPGSTYASLNGTSMATPHVAGAAALVKQKNPSWSNVQIRNRLKNTATSLGSTNLYGSGLVNAEAATR

SEQ ID NO: 54723 - protein, 269 aa, Unidentified
AQSVPWGISRVQAPAAHNRGLTGSGVKVAVLDTGISTHPDLNIRGGASFVPGEPSTQDGNGHGTHVAGTIAALNNSIGVLGVAPSAELYAVKVLGASGSGSISSIAQGLEWAGNNVMHVANLSLGVMSPSATLEQAVNSATSRGVLVVAASGNSGAGSISYPARYANAMAVGATDQNNNRASFSQYGAGLDIVAPGVNVQSTYPGSTYASLNGTSMATPHVAGAAALVKQKNPSWSNVQIRNHLKNTATSLGSTNLYGSGLVNAEAATR

SEQ ID NO: 54724 - protein, 269 aa, Unidentified
AQSVPWGISRVQAPAAHNRGLTGSGVKVAVLDTGISTHPDLNIRGGASFVPGEPSTQDGNGHGTHVAGTIAALDNSIGVLGVAPSAELYAVKVLGASGSGAISSIAQGLEWAGNNGMHVANLSLGSPSPSATLEQAVNSATSRGVLVVAASGNSGAGSISYPARYANAMAVGATDQNNNRASFSQYGAGLDIVAPGVNVQSTYPGSTYASLNGTSMATPHVAGAAALVKQKNPSWSNVRIRNHLKNTATSLGSTNLYGSGLVNAEAATR

SEQ ID NO: 54725 - protein, 270 aa, Synthetic construct
AQSVPWGISRVQAPAAHNRGLTGSGVKVAVLDTGIDSTHPDLNIRGGASFVPGEPSTQDGNGHGTHVAGTIAALNNSIGVLGVAPSAELYAVKVLNASGSGSVSSIAQGLEWAGNNGMDVANLSLGSPSPSATLEQAVNSATSRGVLVVAASGNSGAGSISYPARYANAMAVGATDQNNNRASFSQYGPELDIVAPGVNVQSTYPGSTYASLNGTSMATPHVAGAAALVKQKNPSWSNVQIRNHLKNTATSLGSTNLYGSGLVNAEAATR

SEQ ID NO: 54726 - protein, 269 aa, Unidentified
AQSVPWGISRVQAPAAHNRGLTGSGVKVAVLDTGISTHPDLNIRGGASFVPGEPSTQDGNGHGTHVAGTIAALNNSIGVLGVAPSAELYAVKVLPQTGSGGVSSIAQGLEWAGNNGMHVANLSLGSPSPSATLEQAVNSATSRGVLVVAASGNSGAGSISYPARYANAMAVGATDQNNNRASFSQYGAGLDIVAPGVNVQSTYPGSTYASLNGTSMATPHVAGAAALVKQKNPSWSNVQIRNHLKNTATSLGSTNLYGSGLVNAEAATR

SEQ ID NO: 54727 - protein, 269 aa, Unidentified
AQSRPWGIARVQAPAAHNRRLTGSGVKVAVLDTGISTHPDLRIRGGASFVPGEPSTQDGNGHGTHVAGTIAALNNSIGVLGVAPSAELYAVKVLGASGSGSVSSIAQGLEWAGNNGMHVANLSLGSPSPSATLEQAVNSATSRGVLVVAASGNSGAGSISYPARYANAMAVGATDQNNNRASFSQYGAGLDIVAPGVNVQSTYPGSTYASLNGTSMATPHVAGAAALVKQKNPSWSNVQIRNHLKNTATSLGSTNLYGSGLVNAEAATR

SEQ ID NO: 54728 - protein, 269 aa, Unidentified
AQSVPWGISRVQAPAAHNRGLTGSGVKVAVLDTGISTHPDLNIRGGASFVPGEPSTQDGNGHGTHVAGTIAALNNDIGVLGVAPSAELYAVKVLGASGSGSVSSIAQGLEWAGNNDMHVANLSLGSPSPSATLEQAVNSATSRGVLVVAASGNSGADSISYPARYANAMAVGATDQNNNRASFSQYGAGLDIVAPGVNVQSTYPGSTYASLNGTSMATPHVAGAAALVKQKNPSWSNVQIRNRLKNTATSLGSTNLYGSGLVNAEAATR

SEQ ID NO: 54729 - protein, 269 aa, Unidentified
AQSVPWGISRVQAPAAHNRGLTGSGVKVAVLDTGISTHPDLNIRGGASFVPGEPSTQDGNGHGTHVAGTIAALNNSIGVLGVAPSAELYAVKVLGQSGSAAISSIAQGLEWAGNNGMHVANLSLGSPSPSATLEQAVNSATSRGVLVVAASGNSGAGSISYPARYANAMAVGATDQNNNRASFSQYGAGLDIVAPGVNVQSTYPGSTYASLNGTSMATPHVAGAAALVKQKNPSWSNVQIRNHLKNTATSLGSTNLYGSGLVNAEAATR

SEQ ID NO: 54730 - protein, 269 aa, Unidentified
AQSVPWGISRVQAPAAHRRGLTGSGVKVAVLDTGISTHPDLNIRGGASFVPGEPSTQDGNGHGTHVAGTIAALNNSIGVLGVAPSAELYAVKVLGASGGGAISSIAQGLEWAGNNGMHVANLSLGSPSPSATLEQAVNSATSRGVLVVAASGNSGAGSISYPARYANAMAVGATDQNNNRASFSQYGAGLDIVAPGVNVQSTYPGSTYASLNGTSMATPHVAGAAALVKQKNPSWSNVQIRNHLKNTATSLGSTNLYGSGLVNAEAATR

SEQ ID NO: 54731 - protein, 269 aa, Unidentified
AQSVPWGISRVQAPAAHNRKLTGSGVKVAVLDTGISTHPDLNIRGGASFVPGEPSTQDGNGHGTHVAGTIAALNNSIGVLGVAPSAELYAVKVLGASGSGSVSSIAQGLEWAGLNGMHVANLSLGSPSPSATLEQAVNSATSRGVLVVAASGNSGAGSISYPARYANAMAVGATDQNNNRADFSQYGAGLDIVAPGVNVQSTYPGSTYASLNGTSMATPHVAGAAALVKQKNGSWSNVQIRNHLKNTATSLGSTNLYGSGLVNAEAATR

SEQ ID NO: 54732 - protein, 269 aa, Synthetic construct
AQSVPWGISRVQAPAAHNRGLTGSGVKVAVLDTGISTHPDLNIRGGASFVPGEPSTQDGNGHGTHVAGTIAALNNSIGVLGVAPSAELYAVKVLGASGSGSVSSIAQGLEWAGNNGMHVANLSLQESSPSSTLEQAVNSATSRGVLVVAASGNSGAGSISYPARYANAMAVGATDQNNNRASFSQYGAGLDIVAPGVNVQSTYPGSTYASLNGTSMATPHVAGAAALVKQKNPSWSNVQIRNHLKNTATSLGSTNLYGSGLVNAEAATR

SEQ ID NO: 54733 - protein, 269 aa, Unidentified
AQSVPWGISRVQAPAAHNRGLTGSGVKVAVLDTGISTHPDLNIRGGASFVPGEPSTQDGNGHGTHVAGTIAALDNNIGVLGVAPSAELYAVKVLGASGSGSVSSIAQGLEWAGNNRMHVANLSLGSPSPSATLEQAVNSATSRGVLVVAASGNSGAGSISYPARYANAMAVGATDQNNNRASFSQYGAGLDIVAPGVNVLSTYPGSTYASLNGTSMATPHVAGAAALVKQKNPSWSNVQIRNHLKNTATSLGSTNLYGSGLVNAEAATR

SEQ ID NO: 54734 - protein, 269 aa, Unidentified
AQSVPWGISRVQAPAAHNRGLAGSGVKVAVLDTGISTHPDLNIRGGASFVPGEPSTQDGNGHGTHVAGTIAALNNSIGVLGVAPSAELYAVKVLGASGSGSVSSIAQGLEWAGNNGMHVANLSLGNPSPSATLEQAVNSATSRGVLVVAASGNSGAGSISYPARYANAMAVGATDQNNNHADFSQYGAGLDIVAPGVNVQSTYPGSTYASLNGTSMATPHVAGAAALVKQKNPSWSNVQIRNHLKNTATSLGSTNLYGSGLVNAEAATR

SEQ ID NO: 54735 - protein, 269 aa, Unidentified
AQSVPWGISRVQAPAAHNRGLTGSGVKVAVLDTGISTHPDLNIRGGASFVPGEPSTQDGNGHGTHVAGTIAALNNSIGVLGVAPSAELYAVKVLPQAGSGSISSIAQGLEWAGNNGMHVANLSLGSPSPSATLEQAVNSATSRGVLVVAASGNSGAGSISYPARYANAMAVGATDQNNNRASFSQYGAGLDIVAPGVNVQSTYPGSTYASLNGTSMATPHVAGAAALVKQKNPSWSNVQIRNHLKNTATSLGSTNLYGSGLVNAEAATR

SEQ ID NO: 54736 - protein, 269 aa, Unidentified
AQSVPWGISRVQAPAAHNRGLTGSGVKVAVLDTGISTHPDLNIRGGASFVPGEPSTQDGNGHGTHVAGTIAALNNNIGVLGVAPSAELYAVKVLGASGSGSVSSIAQGLEWAGNNGMHVANLSLGLPSPSATLEQAVNSATSRGVLVVAASGNSGAGSISYPARYANAMAVGATDQNNNRASFSQYGAGLDIVAPGVNVQSTYPGSTYASENGTSMATPHVAGAAALVKQKNPRWSNVQIRNHLKNTATSLGSTNLYGSGLVNAEAATR

SEQ ID NO: 54737 - protein, 269 aa, Unidentified
AQSVPWGISRVQAPAAHNRGLTGSGVKVAVLDTGISTHPDLNIRGGASFVPGEPSTQDGNGHGTHVAGTIAALNNSIGVLGVAPSAELYAVKVLGFTGGASVSSIAQGLEWAGNNGMHVANLSLGSPSPSATLEQAVNSATSRGVLVVAASGNSGAGSISYPARYANAMAVGATDQNNNRASFSQYGAGLDIVAPGVNVQSTYPGSTYASLNGTSMATPHVAGAAALVKQKNPSWSNVQIRNHLKNTATSLGSTNLYGSGLVNAEAATR

SEQ ID NO: 54738 - protein, 269 aa, Unidentified
AQSVPWGISRVQAPAAHRRRLTGSGVKVAVLDTGISTHPDLDIRGGASFVPGEPSTQDGNGHGTHVAGTIAALNNSIGVLGVAPSAELYAVKVLGASGSGSVSSIAQGLEWAGNNGMHVANLSLGSPSPSATLEQAVNSATSRGVLVVAASGNSGAGSISYPARYANAMAVGATDQNNNRASFSQYGAGLDIVAPGVNVQSTYPGSTYASLNGTSMATPHVAGAAALVKQKNPSWSNVQIRNRLKNTATSLGSTNLYGSGLVNAEAATR

SEQ ID NO: 54739 - protein, 269 aa, Unidentified
AQSVPWGISRVQAPAAHNRGLLGFGVKVAVLDTGISTHPDLNIRGGASFVPGEPSTQDGNGHGTHVAGTIAALNNNIGVLGVAPSAELYAVKVLGASGSGSVSSIAQGLEWAGNNGMHVANLSLGSPSPSATLEQAVNSATSRGVLVVAASGNSGAGSISYPARYANAMAVGATDQNNNRASFSQYGAGLDIVAPGVNVQSTYPGSTYASENGTSMATPHVAGAAALVKQKNPSWSNVQIRNHLKNTATSLGSTNLYGSGLVNAEAATR

SEQ ID NO: 54740 - protein, 269 aa, Unidentified
AQVVPWGISRVQAPAAHNRGLTGSGVKVAVLDTGISTHPDLNIRGGASFVPGEPSTQDGNGHGTHVAGTIAALNNDINVLGVAPSAELYAVKVLGASGSGSVSSIAQGLEWAGNNGMHVANLSLGSPSPSATLEQAVNSATSRGVLVVAASGNSGAGSISYPARYANAMAVGATDQNNNRASFSQYGAGLDIVAPGVNVQSTYPGSTYASPNGTSMATPHVAGAAALVKQKNPSWSNVQIRNHLKNTATSLGSTNLYGSGLVNAEAATR

SEQ ID NO: 54741 - protein, 269 aa, Unidentified
AQSVPWGISRVQAPAAHNRGLTGFGVKVAVLDTGISTHPDLNIRGGASFVPGEPSTQDGNGHGTHVAGTIAALNNSIGVLGVAPSAELYAVKVLGASGSGSVSSIAQGLEWAGNNRMHVANLSLGSPSPSATLEQAVNSATSRGVLVVAASGNSGAGSIDYPARYANAMAVGATDQNNNRASFSQYGAGLDIVAPGVNVQSTYPGSAYASLNGTSMATPHVAGAAALVKQKNPSWSNVQIRNHLKNTATSLGSTNLYGSGLVNAEAATR

SEQ ID NO: 54742 - protein, 269 aa, Bacillus subtilis
AQSVPWGISRVQAPAAHNRGLTGSGVKVAVLDTGISTHPDLNIRGGASFVPGEPSTQDGNGHGTHVAGTIAALNNSIGVLGVAPSAELYAVKVLGASGSGSVSSIAQGLEWAGNNGMHVANLSLGSPSPSATLEQAVNSATSRGVLVVAASGNSGAGSISYPARYANAMAVGATDQNNNRASFSQYGAGLDIVAPGVNVQSTYPGSTYASLNGTSMATPHVAGAAALVLQRNPSWSNVQIRNHLENTATSLGSTNLFGSGLVNAEAATR

SEQ ID NO: 54743 - protein, 269 aa, Unidentified
AQSVPWGISRVQAPAAHNRGLTGSGVKVAVLDTGISTHPDLRIRGGASFVPGEPSTQDGNGHGTHVAGTIAALDNSIGVLGVAPSAELYAVKVLGASGSGSVSSIAQGLEWAGNNGMHVANLSLGSPSPSATLEQAVNSATSRGVLVVAASGNSGAGSISYPARYANAMAVGATDQNNNRASFSQYGAGLDIVAPGVNVQSTYPGSTYASLNGTSMATPHVAGAAALVKQKNPSWRNVQIRNRLKNTATSLGSTNLYGSGLVNAEAATR

SEQ ID NO: 54744 - protein, 269 aa, Unidentified
AQSVPWGISRVQAPAAHNRGLTGRGVKVAVLDTGISTHPDLNIRGGASFVPGEPSTQDGNGHGTHVAGTIAALNNSIGVLGVAPSAELYAVKVLGASGGGAVSSIAQGLEWAGNNGMHVANLSLGSPSPSATLEQAVNSATSRGVLVVAASGNSGAGSISYPARYANAMAVGATDQNNNRASFSQYGAGLDIVAPGVNVQSTYPGSTYASLNGTSMATPHVAGAAVLVKQKNPSWSNVQIRNHLKNTATSLGSTNLYGSGLVNAEAATR

SEQ ID NO: 54745 - protein, 269 aa, Unidentified
AQSVPWGISRVQAPAAHNRGLTGRGVKVAVLDTGISTHPDLNIRGGASFVPGEPSTQDGNGHGTHVAGTIAALNNSIGVLGVAPSAELYAVKVLGASGSGSVSSIAQGLEWAGNNGMHVANLSLGSESPSATLEQAVNSATSRGVLVVAASGNSGADSISYPARYANAMAVGATDQNNNRASFSQYGAGLDIVAPGVNVQSTYPGSTYASLNGTSMATPHVAGAAALVKQKNPSWSNVQIRDHLKNTATSLGSTNLYGSGLVNAEAATR

SEQ ID NO: 54746 - protein, 269 aa, Unidentified
AQSVPWGISRVQAPAAHNRGLTASGVKVAVLDTGISTHPDLNIRGGASFVPGEPSTQDGEGHGTHVAGTIAALNNSIGVLGVAPSAELYAVKVLGASGSGSVSSIAQGLEWAGLNGMHVANLSLGSPSPSATLEQAVNSATSRGVLVVAASGNSGAGSISYPARYANAMAVGATDQNNNRADFSQYGAGLDIVAPGVNVQSTYPGSTYASLNGTSMATPHVAGAAALVKQKNPSWSNVQIRNHLKNTATSLGSTNLYGSGLVNAEAATR

SEQ ID NO: 54747 - protein, 269 aa, Unidentified
AQSVPWGISRVQAPAAHRRGLTGRGVKVAVLDTGISTHPDLNIRGGASFVPGEPSTQDGNGHGTHVAGTIAALNNSIGVLGVAPSAELYAVKVLGASGGGSISSIAQGLEWAGNNGMHVANLSLGSPSPSATLEQAVNSATSRGVLVVAASGNSGAGSISYPARYANAMAVGATDQNNNRASFSQYGAGLDIVAPGVNVQSTYPGSTYASLNGTSMATPHVAGAAALVKQKNPSWSNVQIRNHLKNTATSLGSTNLYGSGLVNAEAATR

SEQ ID NO: 54748 - protein, 269 aa, Unidentified
AQSVPWGISRVQAPAAHNRGLTGRGVKVAVLDTGISTHPDLNIRGGASFVPGEPSTQDGNGHGTHVAGTIAALNNGIGVLGVAPSAELYAVKVLGASGSGSVSSIAQGLEWAGNNDMHVANLSLGSPSPSATLEQAVNSATSRGVLVVAASGNSGAGSISYPARYANAMAVGATDQNNNRADFSQYGAGLDIVAPGVNVQSTYPGSTYASLNGTSMATPHVAGAAALVKQKNPSWSNVQIRNHLKNTATSLGSTNLYGSGLVNAEAATR

SEQ ID NO: 54749 - protein, 269 aa, Unidentified
AQSVPWGISRVQAPAAHNRGLTGSGVKVAVLDSGISTHPDLNIRGGASFVPGEPSTQDGEGHGTHVAGTIAALNNSIGVLGVAPSAELYAVKVLGASGSGSVSSIAQGLEWAGLNGMHVANLSLGSPSPSATLEQAVNSATSRGVLVVAASGNSGAGSISYPARYANAMAVGATDQNNNRADFSQYGAGLDIVAPGVNVQSTYPGSTYASLNGTSMATPHVAGAAALVKQKNPSWSNVQIRNHLKNTATSLGSTNLYGSGLVNAEAATR

SEQ ID NO: 54750 - protein, 269 aa, Unidentified
AQSVPWGISRVQAPAAHNRGLTGSGVKVAVLDTGISTHPDLNIRGGASFVPGEPSTQDGNGHGTHVAGTIAALNNSIGVLGVAPSAELYAVKVLGAFGSGSVSSIAQGLEWAGNNGMHVANLSLGSPSPSATLEQAVNSATRRGVLVVAASGNSGAGSISWPARYANAMAVGATDQNNNRASFSQYGAGLDIVAPGVNVQSTYPGSTYASLNGTSMATPHVAGAAALVKQKNPSWSNVQIRNHLKRTATSLGSTNLYGSGLVNAEAATR

SEQ ID NO: 54751 - protein, 269 aa, Unidentified
AQSVPWGISRVQAPAAHNRGLTGSGVKVAVLDTGISTHPDLNIRGGASFVPGEPSTQDGNGHGTHVAGTIAALNNSIGVLGVAPSAELYAVKVLGASGSGSVSSIAQGLEWAGNNGMHVANLSLGSESPSATLEQAVNSATSRGVLVVAASGNSGAGSISYPARYANAMAVGATDQNNNRADFSQYGAGLDIVAPGVNVQSTYPGSTYASLNGTSMATPHVAGAAALVKQKNPSWSNVRIRNRLKNTATSLGSTNLYGSGLVNAEAATR

SEQ ID NO: 54752 - protein, 269 aa, Unidentified
AQSVPWGISRVQAPAAHNRGLAGSGVKVAVLDTGISTHPDLNIRGGASFVPGEPSTQDGNGHGTHVAGTIAALNNSIGVLGVAPSAELYAVKVLGASGAGAISSIAQGLEWAGNNGMHVANLSLGSPSPSATLEQAVNSATSRGVLVVAASGNSGAGSISYPARYANAMAVGATDQNNNRASFSQYGAGLDIVAPGVNVQSTYPGSTYASLNGTSMATPHVAGAAALVKQKNPSWSNVQIRNHLKNTATSLGSTNLYGSGLVNAEAATR

SEQ ID NO: 54753 - protein, 269 aa, Unidentified
AQSVPWGISRVQAPAAHNRGLTGGGVKVAVLDTGISTHPDLNIRGGASFVPGEPSTQDGNGHGTHVAGTIAALNNSIGVLGVAPSAELYAVKVLSASGGGSVSSIANGLEWAGNNGMHVANLSLGSPSPSATLEQAVNSATSRGVLVVAASGNSGAGSISYPARYANAMAVGATDQNNNRASFSQYGAGLDIVAPGVNVQSTYPGSTYASLNGTSMATPHVAGAAALVKQKNPSWSNVQIRNHLKNTATSLGSTNLYGSGLVNAEAATR

SEQ ID NO: 54754 - protein, 269 aa, Unidentified
AQSVPWGISRVQAPAAHNRGLTGRGVKVAVLDSGISTHPDLNIRGGASFVPGEPSTQDGNGHGTHVAGTIAALNNSIGVLGVAPSAELYAVKVLGASGSGSVSSIAQGLEWAGNNGMHVANLSLGIPSPSATLEQAVNSATSRGVLVVAASGNSGEGSISYPARYANAMAVGATDQNNNRASFSQYGAGLDIVAPGVNVQSTYPGSTYASLNGTSMATPHVAGAAALVKQKNPSWSNVQIRNHLKNTATSLGSTNLYGSGLVNAEAATR

SEQ ID NO: 54755 - protein, 269 aa, Unidentified
AQSVPWGISRVQAPAAHRRGLTGSGVKVAVLDTGISTHPDLNIRGGASFVPGEPSTQDGNGHGTHVAGTIAALNNSIGVLGVAPSAELYAVKVLGASGSGSISSIAQGLEWAGNNGMHVANLSLGSPSPSATLEQAVNSATSRGVLVVAASGNSGAGSISYPARYANAMAVGATDQNNNRASFSQYGAGLDIVAPGVNVQSTYPGSTYASLNGTSMATPHVAGAAVLVKQKNPSWSNVQIRNRLKNTATSLGSTNLYGSGLVNAEAATR

SEQ ID NO: 54756 - protein, 269 aa, Unidentified
AQSVPWGISRVQAPAAHNRGLTGSGVKVAVLDTGISTHPDLNIRGGASFVPGEPSTQDGNGHGTHVAGTIAALNNSIGVLGVAPSAELYAVKVLPQTGGGSVSSIAQGLEWAGNNGMHVANLSLGSPSPSATLEQAVNSATSRGVLVVAASGNSGAGSISYPARYANAMAVGATDQNNNRASFSQYGAGLDIVAPGVNVQSTYPGSTYASLNGTSMATPHVAGAAALVKQKNPSWSNVQIRNHLKNTATSLGSTNLYGSGLVNAEAATR

SEQ ID NO: 54757 - protein, 269 aa, Unidentified
AQVVPWGISRVQAPAAHNRGLTGSGVKVAVLDTGISTHPDLNIRGGASFVPGEPSTQDGNGHGTHVAGTIAALNNNIGVLGVAPSAELYAVKVLGASGSGSVSSIAQGLEWAGNNGMHVANLSLGSPSPSATLEQAVNSATSRGVLVVAASGNSGAGSISYPARYANAMAVGATDQNNQRASFSQYGAGLDIVAPGVNVQSTYPGSTYASLNGTSMATPHVAGAAALVKQKNPSWSNVQIRNHLKNTATSLGPTNLYGSGLVNAEAATR

SEQ ID NO: 54758 - protein, 269 aa, Unidentified
AQSVPWGISRVQAPAAHNRGLTGSGVKVAVLDTGISTHEDLNIRGGASFVPGEPSTQDGNGHGTHVAGTIAALNNSIGVLGVAPSADLYAVKVLGASGRGSVSSIAQGLEWAGNNGMHVANLSLGSPAPSATLEQAVNSATSRGVLVVAASGNSGAGSISYPARYANAMAVGATDQNNNRASFSQYGAGLDIVAPGVNVQSTYPGSTYASLNGTSMATPHVAGAAALVKQKNPSWSNVQIRNHLKNTATSLGSTNLYGSGLVNAEAATR

SEQ ID NO: 54759 - protein, 269 aa, Unidentified
AQSVPWGISRVQAPASHNRGLTGSGVKVAVLDTGISTHPDLNIRGGASFVPGEPSTQDGEGHGTHVAGTIAALNNSIGVLGVAPSAELYAVKVLGASGSGSVSSIAQGLEWAGNNGMHVANLSLGSPSPSATLEQAVNSATSRGVLVVAASGNSGEGSISYPARYANAMAVGATDQNNNRASFSQYGAGLDIVAPGVNVQSTYPGSTYASLNGTSMATPHVAGAAALVKQKNPSWSNVQIRNRLKNTATSLGSTNLYGSGLVNAEAATR

SEQ ID NO: 54760 - protein, 269 aa, Unidentified
AQSVPWGISRVQAPAAHNRGLTGSGVKVAVLDTGISTHPDLNIRGGASFVPGEPSTQDGNGHGTHVAGTIAALNNGIGVLGVAPSAELYAVKVLGASGSGSVSSIAQGLEWAGNNSMHVANLSLGSESPSATLEQAVNSATSRGVLVVAASGNSGAGSISYPARYANAMAVGATDQNNNRASFSQYGAGLDIVAPGVNVQSTYPGSTYASLNGTSMATPHVAGAAALVKQKNPSWSNVQIRNRLKNTATSLGSTNLYGSGLVNAEAATR

SEQ ID NO: 54761 - protein, 269 aa, Unidentified
AQSVPWGISRVQAPAAHNRGLAGSGVKVAVLDTGISTHPDLNIRGGASFVPGEPSTQDGNGHGTHVAGTIAALNNSIGVLGVAPSAELYAVKVLGASGGGALSSIAQGLEWAGNNGMHVANLSLGSPSPSATLEQAVNSATSRGVLVVAASGNSGAGSISYPARYANAMAVGATDQNNNRASFSQYGAGLDIVAPGVNVQSTYPGSTYASLNGTSMATPHVAGAAALVKQKNPSWSNVQIRNHLKNTATSLGSTNLYGSGLVNAEAATR

SEQ ID NO: 54762 - protein, 269 aa, Unidentified
AQSVPWGISRVQAPAAHNRGLTGRGVKVAVLDTGISTHPDLNIRGGASFVPGEPSTQDGNGHGTHVAGTIAALNNGIGVLGVAPSAELYAVKVLGASGSGSVSSIAQGLEWAGNNSMHVANLSLGSPSPSATLEQAVNSATSRGVLVVAASGNSGAGSISYPARYANAMAVGATDQNNNRASFSQYGAGLDIVAPGVNVQSTYPGSTYASLNGTSMATPHVAGAAALVKQKNPSWSNVRIRNHLKNTATSLGSTNLYGSGLVNAEAATR

SEQ ID NO: 54763 - protein, 269 aa, Unidentified
AQSVPWGISRVQAPAAHNRGLAGRGVKVAVLDSGISTHPDLNIRGGASFVPGEPSTQDGNGHGTHVAGTIAALNNSIGVLGVAPSAELYAVKVLGASGSGSVSSIAQGLEWAGNNGMHVANLSLGSPSPSATLEQAVNSATSRGVLVVAASGNSGAGSISYPARYANAMAVGATDQNNNRADFSQYGAGLDIVAPGVNVQSTYPGSTYASLNGTSMATPHVAGAAALVKQKNPSWSNVQIRNHLKNTATSLGSTNLYGSGLVNAEAATR

SEQ ID NO: 54764 - protein, 269 aa, Unidentified
AQSVPWGISRVQAPAAHNRRLTGSGVKVAVLDTGISTHPDLNIRGGASFVPGEPSTQDGNGHGTHVAGTIAALNNSIGVLGVAPSAELYAVKVLGASGAGSVSSIAQGLEWAGANGMHVANLSLGSPSPSATLEQAVNSATSRGVLVVAASGNSGAGSISYPARYANAMAVGATDQNNNRASFSQYGAGLDIVAPGVNVQSTYPGSTYASLNGTSMATPHVAGAAALVKQKNPSWSNVQIRNHLKNTATSLGSTNLYGSGLVRAEAATR

SEQ ID NO: 54765 - protein, 269 aa, Synthetic construct
AQSVPWGISRVQAPAAHNRGLTGSGVKVAVLDTGISTHPDLNIRGGASFVPGEPSTQDGNGHGTHVAGTIAALDNSIGVLGVAPSAELYAVKVLGASGSGAISSIAQGLEWAGNNGMHVANLSLGSPSPSATAEQAVNSATSRGVLVVAASGNSGAGSISYPARYANAMAVGATDQNNNRASFSQYGAGLDIVAPGVNVQSTYPGSTYASLNGTSMATPHVAGAAALVKQKNPSWSNVQIRNHLKNTATSLGSTNLYGSGLVNAEAATR

SEQ ID NO: 54766 - protein, 269 aa, Unidentified
AQSVPWGISRVQAPAAHNRGLAGSGVKVAVLDTGISTHPDLNIRGGASFVPGEPSTQDGNGHGTHVAGTIAALNNSIGVLGVAPSAELYAVKVLGASGSGSVSSIAQGLEWAGLNGMHVANLSLGIPSPSATLEQAVNSATSRGVLVVAASGNSGAGSISYPARYANAMAVGATDQNNNRADFSQYGAGLDIVAPGVNVQSTYPGSTYASLNGTSMATPHVAGAAALVKQKNPSWSNVQIRNHLKNTATSLGSTNLYGSGLVNAEAATR

SEQ ID NO: 54767 - protein, 269 aa, Unidentified
AQSVPWGISRVQAPAAHNRKLTGFGVKVAVLDTGISTHPDLNIRGGASFVPGEPSTQDGNGHGTHVAGTIAALNNNIGVLGVAPSAELYAVKVLGASGSGSVSSIAQGLEWAGNNGMHVANLSLGSPSPSATLEQAVNSATSRGVLVVAASGNSGAGSISYPARYANAMAVGATDQNNNRASFSQYGAGLDIVAPGVNVQSTYPGSAYASLNGTSMATPHVAGAAALVKQKNPSWSNVQIRNHLKNTATSLGSTNLYGSGLVNAEAATR

SEQ ID NO: 54768 - protein, 269 aa, Unidentified
AQSVPWGISRVQAPAAHNRGLTGSGVKVAVLDTGISTHPDLNIRGGASFVPGEPSTQDGNGHGTHVAGTIAALNNSIGVLGVAPSAELYAVKVLGASGSGSVSSIAQGLEWAGNNVMHVANLSLGNSAPSATLEQAVNSATSRGVLVVAASGNSGAGSISYPARYANAMAVGATDQNNNRASFSQYGAGLDIVAPGVNVQSTYPGSTYASLNGTSMATPHVAGAAALVKQKNPSWSNVQIRNHLKNTATSLGSTNLYGSGLVNAEAATR

SEQ ID NO: 54769 - protein, 269 aa, Unidentified
AQSVPWGISRVQAPAAHNRGLLGFGVKVAVLDTGISTHPDLNIRGGASFVPGEPSTQDGNGHGTHVAGTIAALNNSIGVLGVAPSAELYAVKVLGASGSGSVSSIAQGLEWAGNNGMHVANLSLGDPSPSATLEQAVNSATSRGVLVVAASGNSGAGSISYPARYANAMAVGATDQNNNRASFSQYGAGLDIVAPGVNVQSTYPGSTYASENGTSMATPHVAGAAALVKQKNPSWSNVQIRNHLKNTATSLGSTNLYGSGLVNAEAATR

SEQ ID NO: 54770 - protein, 269 aa, Synthetic construct
AQSVPWGISRVQAPAAHNRGLTGSGVKVAVLDTGISTHPDLNIRGGASFVPGEPSTQDGNGHGTHVAGTIAALDNSIGVLGVAPSAELYAVKVLGASGSGATSSLAQGLEWAGNNGMHVANLSLGSPSPSATLEQAVNSATSRGVLVVAASGNSGAGSISYPARYANAMAVGATDQNNNRASFSQYGAGLDIVAPGVNVQSTYPGSTYASLNGTSMATPHVAGAAALVKQKNPSWSNVQIRNHLKNTATSLGSTNLYGSGLVNAEAATR

SEQ ID NO: 54771 - protein, 269 aa, Synthetic construct
AQSVPWGISRVQAPAAHNRGLTGSGVKVAVLDTGISTHPDLNIRGGASFVPGEPSTQDGNGHGTHVAGTIAALDNSIGVLGVAPSAELYAVKVLGASGSGAISSIAQGLEWAGNNGMHVANLSLGSPSPSATLEQAVNSATSRGVLVVAASGNSGAGSISYPARYANAMAVGATDQNNNRASFSQYGAGLDIVAPGVGVQSTYPGSTYASLNGTSMATPHVAGAAALVKQKNPSWSNVQIRNHLKNTATSLGSTNLYGSGLVNAEAATR

SEQ ID NO: 54772 - protein, 269 aa, Unidentified
AQSVPWGISRVQAPAAHNRGLTGSGVKVAVLDTGISTHPDLNIRGGASFVPGEPSTQDGNGHGTHVAGTIAALNNSIGVLGVAPSAELYAVKVLGASGQGSVSSIAGGLEWAGNNGMHVANLSLGAPSPSATLEQAVNSATSRGVLVVAASGNSGAGSISYPARYANAMAVGATDQNNNRADFSQYGAGLDIVAPGVNVQSTYPGSTYASLNGTSMATPHVAGAAALVKQKNPSWSNVQIRNHLKNTATSLGSTNLYGSGLVNAEAATR

SEQ ID NO: 54773 - protein, 269 aa, Unidentified
AQSVPWGISRVQAPAAHNRRLTGRGVKVAVLDTGISTHPDLNIRGGASFVPGEPSTQDGNGHGTHVAGTIAALNNSIGVLGVAPSAELYAVKVLGASGQGSVSSIAQGLEWAGNNGMHVANLSLGAPSPSATLEQAVNSATSRGVLVVAASGNSGAGSISYPARYANAMAVGATDQNNNRASFSQYGAGLDIVAPGVNVQSTYPGSTYASLNGTSMATPHVAGAAALVKQKNPSWSNVQIRNHLKNTATSLGSTNLYGSGLVNAEAATR

SEQ ID NO: 54774 - protein, 269 aa, Bacillus lentus
AQSVPWGIRRVQAPTAHNRGLAGSGVKVAVLDTGISTHPDLNIRGGASFVPGEPSTQDGNGHGTHVAGTIAALNNSIGVLGVAPSAELYAVKVLGASGSGSVSSIAQGLEWAGNNGMHVANLSLGSPSPSATLEQALNSATSRGVLVVAASGNSGAGSISYPARYANAMAVGATDQNNNRASFSQYGAGLDIVAPGVNVQSTYPGSTYASLNGTSMATPHVAGAAALVKQKNPSWSNVQIRNHLKNTATSLGSTNLYGSGLVNAEAATR

SEQ ID NO: 54775 - protein, 269 aa, Unidentified
AQSVPWGISRVQAPAAHNRGLTGRGVKVAVLDTGISTHPDLNIRGGASFVPGEPSTQDGNGHGTHVAGTIAALNNGIGVLGVAPSAELYAVKVLGASGSGSVSSIAQGLEWAGNNDMHVANLSLGSPSPSATLEQAVNSATSRGVLVVAASGNSGAGSISYPARYANAMAVGATDQNNNRASFSQYGAGLDIVAPGVNVQSTYPGSTYASLNGTSMATPHVAGAAALVKQKNPSWSNVQIRNRLKNTATSLGSTNLYGSGLVNAEAATR

SEQ ID NO: 54776 - protein, 269 aa, Unidentified
AQSVPWGISRVQAPAAHNRRLTGSGVKVAVLDTGISTHPDLNIRGGASFVPGEPSTQDGNGHGTHVAGTIAALNNDIGVLGVAPSAELYAVKVLGASGSGSVSSIAQGLEWAGNNDMHVANLSLGSESPSATLEQAVNSATSRGVLVVAASGNSGAGSISYPARYANAMAVGATDQNNNRASFSQYGAGLDIVAPGVNVQSTYPGSTYASLNGTSMATPHVAGAAALVKQKNPSWSNVQIRNHLKNTATSLGSTNLYGSGLVNAEAATR

SEQ ID NO: 54777 - protein, 269 aa, Bacillus lentus
AQSVPWGISRVQAPAAHNRGLTGSGVKVAVLDTGISTHPDLNIRGGASFVPGEPSTQDGNGHGTHVAGTIAALNNSIGVLGVAPDAELYAVKVLGASGSGSVSSIADGLEWAGNNGMHVANLSLGSPSPSATLEQAVNSATSRGVLVVAASGNSGAGSISYPARYANAMAVGATDQNNNRADFSQYGAGLDIVAPGVNVQSTYPGSTYASLNGTSMATPHVAGAAALVKQKNPSWSNVQIRDHLKNTATSLGSTNLYGSGLVNAEAATR

SEQ ID NO: 54778 - protein, 269 aa, Unidentified
AQSVPWGISRVQAPAAHNRGLTGSGVKVAVLDTGISTHPDLNIRGGASFVPGEPSTQDGEGHGTHVAGTIAALNNSIGVLGVAPSAELYAVKVLGASGSGSVSSIAQGLEWAGLNRMHVANLSLGSPSPSATLEQAVNSATSRGVLVVAASGNSGAGSISYPARYANAMAVGATDQNNNRADFSQYGAGLDIVAPGVNVQSTYPGSTYASLNGTSMATPHVAGAAALVKQKNPSWSNVQIRNHLKNTATSLGSTNLYGSGLVNAEAATR

SEQ ID NO: 54779 - protein, 269 aa, Synthetic construct
AQSVPWGISRVQAPAAHNRGLTGSGVKVAVLDTGISTHPDLNIRGGASFVPGEPSTQDGNGHGTHVAGTIAALDNSIGVLGVAPSAELYAVKVLGASGSGAISSIAQGLEWAGNNGMHVANLSLGSPSPSATLEQAVNSATSRGVLVVAASGNSGAGSISYPARYANAMAVGATDQNNNRASFSQYGAGLDIVAPGVAVQSTYPGSTYASLNGTSMATPHVAGAAALVKQKNPSWSNVQIRNHLKNTATSLGSTNLYGSGLVNAEAATR

SEQ ID NO: 54780 - protein, 269 aa, Unidentified
AQVVPWGISRVQAPAAHNRGLTGSGVKVAVLDTGISTHPDLNIRGGASFVPGEPSTQDGNGHGTHVAGTIAALNNDIGVLGVAPSAELYAVKVLGASGSGSVSSIAQGLEWAGNNGMHVANLSLGSPSPSATLEQAVNSATSRGVLVVAASGNSGAGSISYPARYQNAMAVGATDQNNNRASFSQYGAGLDIVAPGVNVQSTYPGSTYASLNGTSMASPHVAGAAALVKQKNPSWSNVQIRNHLKNTATSLGSTNLYGSGLVNAEAATR

SEQ ID NO: 54781 - protein, 269 aa, Unidentified
AQSVPWGISRVQAPAAHNRRLTGSGVKVAVLDTGISTHPDLRIRGGASFVPGEPSTQDGNGHGTHVAGTIAALNNSIGVLGVAPSAELYAVKVLGASGSGSVSSIAQGLEWAGNNGMHVANLSLGSPSPSATLEQAVNSATSRGVLVVAASGNSGAGSISYPARYANAMAVGATDQNNNRASFSQYGAGLDIVAPGVNVQSTYPGSTYASLNGTSMATPHVAGAAALVKQKNPSWSNVQIRNRLKNTATSLGSTNLYGSGLVNALAATR

SEQ ID NO: 54782 - protein, 269 aa, Unidentified
AQSVPWGISRVQAPAAHNRKLTGSGVKVAVLDTGISTHPDLNIRGGASFVPGEPSTQDGNGHGTHVAGTIAALNNNIGVLGVAPSAELYAVKVLGASGSGSVSSIAQGLEWAGNNGMHVANLSLGSPSPSATLEQAVNSATSRGVLVVAASGNSGAGSIDYPARYANAMAVGATDQNNNRASFSQYGAGLDIVAPGVNVQSTYPGSTYASENGTSMATPHVAGAAALVKQKNPSWSNVQIRNHLKNTATSLGSTNLYGSGLVNAEAATR

SEQ ID NO: 54783 - protein, 269 aa, Unidentified
AQSVPWGISRVQAPASHNRGLTGSGVKVAVLDTGISTHPDLNIRGGASFVPGEPSTQDGNGHGTHVAGTIAALNNSIGVLGVAPSAELYAVKVLGASGAGAVSSIAQGLEWAGNNGMHVANLSLGNPSPSATLEQAVNSATSRGVLVVAASGNSGAGSISYPARYANAMAVGATDQNNNRASFSQYGAGLDIVAPGVNVQSTYPGSTYASLNGTSMATPHVAGAAALVKQKNPSWSNVQIRNHLKNTATSLGSTNLYGSGLVNAEAATR

SEQ ID NO: 54784 - protein, 269 aa, Unidentified
AQSVPWGISRVQAPAAHNRGLTGSGVKVAVLDSGISTHPDLNIRGGASFVPGEPSTQDGNGHGTHVAGTIAALNNSIGVLGVAPSAELYAVKVLGASGSGSVSSIAQGLEWAGNNDMHVANLSLGSPSPSATLEQVVNSATSRGVLVVAASGNSGAGSISYPARYANAMAVGATDQNNNRASFSQYGAGLDIVAPGVNVQSTAPGSTYASLNGTSMATPHVAGAAALVKQKNPSWSNVQIRNHLKNTATSLGSTNLYGSGLVNAEAATR

SEQ ID NO: 54785 - protein, 269 aa, Unidentified
AQSVPWGISRVQAPAAHNRGLTGSGVKVAVLDTGISTHPDLNIRGGASFVPGEPSTQDGNGHGTHVAGTIAALNNSIGVLGVAPSAELYAVKVLGATGSAAISSIAQGLEWAGNNGMHVANLSLGSPSPSATLEQAVNSATSRGVLVVAASGNSGAGSISYPARYANAMAVGATDQNNNRASFSQYGAGLDIVAPGVNVQSTYPGSTYASLNGTSMATPHVAGAAALVKQKNPSWSNVQIRNHLKNTATSLGSTNLYGSGLVNAEAATR

SEQ ID NO: 54786 - protein, 269 aa, Unidentified
AQSVPWGISRVQAPAAHNRGLTGSGVKVAVLDTGISTHPDLNIRGGASFVPGEPSTQDGNGHGTHVAGTIAALNNDINVLGVAPSAELYAVKVLGASGSGSVSSIAQGLEWAGNNGMHVANLSLGSPSPSATLEQAVNSATSRGVLVVAASGNSGAGSISYPARYQNAMAVGATDQNNNRASFSQYGAGLDIVAPGVNVQSTYPGSTYASLNGTSMASPHVAGAAALVKQKNPSWSNVQIRNHLKNTATSLGSTNLYGSGLVNAEAATR

SEQ ID NO: 54787 - protein, 269 aa, Unidentified
AQSVPWGISRVQAPAAHNRGLTGGGVKVAVLDTGISTHPDLNIRGGASFVPGEPSTQDGNGHGTHVAGTIAALNNSIGVLGVAPSAELYAVKVLGASGNGSVSSIANGLEWAGNNGMHVANLSLGAPSPSATLEQAVNSATSRGVLVVAASGNSGAGSISYPARYANAMAVGATDQNNNRASFSQYGAGLDIVAPGVNVQSTYPGSTYASLNGTSMATPHVAGAAALVKQKNPSWSNVQIRNHLKNTATSLGSTNLYGSGLVNAEAATR

SEQ ID NO: 54788 - protein, 269 aa, Unidentified
AQSVPWGISRVQAPAAHNRKLTGSGVKVAVLDTGISTHPDLNIRGGASFVPGEPSTQDGNGHGTHVAGTIAALNNSIGVLGVAPSAELYAVKVLGASGDGSVSSIAQGLEWAGNNGMHVANLSLGSPSPSATLEQAVNSATSRGVLVVAASGNSGAGSISYPARYANAMAVGATDQNNNRASFSQYGAGLDIVAPGVNVQSTYPGSTYASENGTSMATPHVAGAAALVKQKNPSWSNVQIRNHLKNTATSLGSTNLYGSGLVNALAATR

SEQ ID NO: 54789 - protein, 269 aa, Synthetic construct
AQSVPWGISRVQAPAAHNRGLTGSGVKVAVLDTGISTHPDLNIRGGASFVPGEPSTQDGNGHGTHVAGTIAALDNSIGVLGVAPSAELYAVKVLGASGSGAISSIAQGLEWAGNNGMHVANLSFGSPSPSATLEQAVNSATSRGVLVVAASGNSGAGSISYPARYANAMAVGATDQNNNRASFSQYGAGLDIVAPGVNVQSTYPGSTYASLNGTSMATPHVAGAAALVKQKNPSWSNVQIRNHLKNTATSLGSTNLYGSGLVNAEAATR

SEQ ID NO: 54790 - protein, 269 aa, Unidentified
AQSVPWGISRVQAPAAHNRGLTGRGVKVAVLDSGISTHPDLNIRGGASFVPGEPSTQDGNGHGTHVAGTIAALNNSIGVLGVAPSAELYAVKVLGASGSGSVSSIAQGLEWAGNNGMHVANLSLGSPSPSATLEQAVNSATSRGVLVVAASGNSGAGSISYPARYANVMAVGATDQNNNRASFSQYGAGLDIVAPGVNVQSTYPGSTYASLNGTSMATPHVAGAAALVFQKNPSWSNVQIRNHLKNTATSLGSTNLYGSGLVNAEAATR

SEQ ID NO: 54791 - protein, 269 aa, Unidentified
AQSVPWGISRVQAPAAHNRRLTGRGVKVAVLDTGISTHPDLNIRGGASFVPGEPSTQDGNGHGTHVAGTIAALNNSIGVLGVAPSAELYAVKVLGASGSGSVSSIAQGLEWAGNNGMHVANLSLGSESPSATLEQAVNSATSRGVLVVAASGNSGAGSISYPARYANAMAVGATDQNNNRASFSQYGAGLDIVAPGVNVQSTYPGSTYASLNGTSMATPHVAGAAALVKQKNPSWSNVQIRNRLKNTATSLGSTNLYGSGLVNAEAATR

SEQ ID NO: 54792 - protein, 269 aa, Unidentified
AQSVPWGISRVQAPAAHNRGLTGSGVKVAVLDTGISTHPDLWIRGGASFVPGEPSTQDGEGHGTHVAGTIAALNNSIGVLGVAPSAELYAVKVLGASGSGSVSSIAQGLEWAGLNGMHVANLSLGSPSPSATLEQAVNSATSRGVLVVAASGNSGAGSISYPARYANAMAVGATDQNNNRADFSQYGAGLDIVAPGVNVQSTYPGSTYASLNGTSMATPHVAGAAALVKQKNPSWSNVQIRNHLKNTATSLGSTNLYGSGLVNAEAATR

SEQ ID NO: 54793 - protein, 269 aa, Unidentified
AQSVPWGISRVQAPAAHNRKLTGSGVKVAVLDTGISTHPDLNIRGGASFVPGEPSTQDGNGHGTHVAGTIAALNNNIGVLGVAPSAELYAVKVLGASGSGSVSSIAQGLEWAGNNGMHVANLSLGSPSPSATLEQAVNSATSRGVLVVAASGNSGAGSIDYPARYANAMAVGATDQNNNRASFSQYGAGLDIVAPGVNVQSTYPGSAYASLNGTSMATPHVAGAAALVKQKNPSWSNVQIRNHLKNTATSLGSTNLYGSGLVNAEAATR

SEQ ID NO: 54794 - protein, 269 aa, Unidentified
AQSVPWGISRVQAPAAHNRGLTGSGVKVAVLDTGISTHPDLNIRGGASFVPGEPSTQDGNGHGTHVAGTIAALDNSIGVLGVAPSAELYAVKVLGASGSGAISSIAQGLEWAGNNGMHVANLSLGSPSPSATLEQAVNSATSRGVLVVAASGNSGAGSISYPARYANAMAVGATDQNNNRASFSQYGAGLDIVAPGVNVQSTYPGSTYASLNGTSMATPHVAGAAALVKQKNPSWSNVQIRNHLKNTATSLRSTNLYGSGLVNAEAATR

SEQ ID NO: 54795 - protein, 269 aa, Unidentified
AQSVPWGISRVQAPAAHNRGLTGSGVKVAVLDTGISTHPDLNIRGGASFVPGEPSTQDGNGHGTHVAGTIAALNNSIGVLGVAPRAELYAVKVLGASGSGSVSSIADGLEWAGNNGMHVANLSLGSPSPSATLEQAVNSATSRGVLVVAASGNSGAGSISYPARYANAMAVGATDQNNNRARFSQYGAGLDIVAPGVNVQSTYPGSTYASLNGTSMATPHVAGAAALVKQKNPSWSNVQIRDHLKNTATSLGSTNLYGSGLVNAEAATR

SEQ ID NO: 54796 - protein, 269 aa, Unidentified
AQSVPWGISRVQAPAAHNRGLTGRGVKVAVLDTGISTHPDLNITGGASFVPGEPSTQDGNGHGTHVAGTIAALNNSIGVLGVAPSAELYAVKVLGASGSGSVSSIAQGLEWAGNNGMHVANLSLGSPSPSATLEQAVNSATSRGVLVVAASGNSGAGSISYPARYANAMAVGATDQNNNRASFSQYGAGLDIVAPGVNVQSTYPGSTYASLNGTSMATPHVAGAAALVKQKNPSWRNVQIRNHLKNTATSLGSTNLYGSGLVNAEAVTR

SEQ ID NO: 54797 - protein, 269 aa, Unidentified
AQSVPWGISRVQAPAAHNRGLTGRGVKVAVLDTGISTHPDLNIRGGASFVPGEPSTQDGNGHGTHVAGTIAALDNNIGVLGVAPSAELYAVKVLGASGSGSVSSIAQGLEWAGNNGMHVANLSLGSPSPSATLEQAVNSATSRGVLVVAASGNSGAGSISYPARYANAMAVGATDQNNNRASFSQYGAGLDIVAPGVNVLSTYPGSTYASLNGTSQATPHVAGAAALVKQKNPSWSNVQIRNHLKNTATSLGSTNLYGSGLVNAEAATR

SEQ ID NO: 54798 - protein, 269 aa, Unidentified
AQSVPWGISRVQAPAAHNRGLTGGGVKVAVLDTGISTHPDLNIRGGASFVPGEPSTQDGNGHGTHVAGTIAALNNSIGVLGVAPSAELYAVKVLGASGNGSVSSIAGGLEWAGNNGMHVANLSLGAPSPSATLEQAVNSATSRGVLVVAASGNSGAGSISYPARYANAMAVGATDQNNNRADFSQYGAGLDIVAPGVNVQSTYPGSTYASLNGTSSATPHVAGAAALVKQKNPSWSNVQIRNHLKNTATSLGSTNLYGSGLVNAEAATR

SEQ ID NO: 54799 - protein, 269 aa, Unidentified
AQSVPWGISRVQAPAAHNRGLTGSGVKVAVLDTGISTHPDLNIRGGASFVPGEPSTQDGNGHGTHVAGTIAALNNSIGVLGVAPSAELYAVKVLGASGAGGLSSIAQGLEWAGNNGMHVANLSLGSPSPSATLEQAVNSATSRGVLVVAASGNSGAESISYPARYANAMAVGATDQNNNRASFSQYGAGLDIVAPGVNVQSTYPGSTYASLNGTSMATPHVAGAAALVKQKNPSWSNVQIRNHLKNTATSLGSTNLYGSGLVNAEAATR

SEQ ID NO: 54800 - protein, 269 aa, Unidentified
AQVVPWGISRVQAPAAHNRGLTGSGVKVAVLDTGISTHPDLNIRGGASFVPGEPSTQDGNGHGTHVAGTIAALNNDIGVLGVAPSAELYAVKVLGASGSGSVSSIAQGLEWAGNNGMHVANLSLGSPSPSATLEQAVNSATSRGVLVVAASGNSGAGSISYPARYANAMAVGATDQNNNRAEFSQYGAGLDIVAPGVNVQSTYPGSTYASLNGTSMASPHVAGAAALVKQKNPSWSNVQIRNHLKNTATSLGSTNLYGSGLVNAEAATR

SEQ ID NO: 54801 - protein, 269 aa, Unidentified
AQSVPWGISRVQAPAAHNRRLTGRGVKVAVLDTGISTHPDLRIRGGASFVPGEPSTQDGNGHGTHVAGTIAALNNSIGVLGVAPSAELYAVKVLGASGSGSVSSIAQGLEWAGNNGMHVANLSLGSPSPSATLEQAVNSATSRGVLVVAASGNSGAGSISYPARYANAMAVGATDQNNNRASFSQYGAGLDIVAPGVNVQSTYPGSTYASLNGTSMATPHVAGAAALVKQKNPSWRNVQIRNHLKNTATSLGSTNLYGSGLVNAEAATR

SEQ ID NO: 54802 - protein, 269 aa, Unidentified
AQSVPWGISRVQAPAAHNRGLTGGGVKVAVLDTGISTHPDLNIRGGASFVPGEPSTQDGNGHGTHVAGTIAALNNNIGVLGVAPSAELYAVKVLAASGGGSVSSIAQGLEWAGNNGMHVANLSLGSPSPSATLEQAVNSATSRGVLVVAASGNSGAGSISYPARYANAMAVGATDQNNNRASFSQYGAGLDIVAPGVNVQSTYPGSTYASENGTSSATPHVAGAAALVKQKNPSWSNVQIRNHLKNTATSLGSTNLYGSGLVNAEAATR

SEQ ID NO: 54803 - protein, 269 aa, Unidentified
AQSVPWGISRVQAPAAHRRGLTGSGVKVAVLDTGISTHPDLNIRGGASFVPGEPSTQDGNGHGTHVAGTIAALDNSIGVLGVAPSAELYAVKVLGASGSGSVSSIAQGLEWAGNNGMHVANLSLGSPSPSATLEQAVNSATSRGVLVVAASGNSGAGSISYPARYANAMAVGATDQNNNRASFSQYGAGLDIVAPGVNVQSTYPGSTYASLNGTSMATPHVAGAAVLVKQKNPSWSNVQIRNRLKNTATSLGSTNLYGSGLVNAEAATR

SEQ ID NO: 54804 - protein, 269 aa, Unidentified
AQSVPWGISRVQAPAAHRRGLTGSGVKVAVLDTGISTHPDLRITGGASFVPGEPSTQDGNGHGTHVAGTIAALNNSIGVLGVAPSAELYAVKVLGASGSGSVSSIAQGLEWAGNNGMHVANLSLGSPSPSATLEQAVNSATSRGVLVVAASGNSGAGSISYPARYANAMAVGATDQNNNRASFSQYGAGLDIVAPGVNVQSTYPGSTYASLNGTSMATPHVAGAAALVKQKNPSWRNVQIRNHLKNTATSLGSTNLYGSGLVNAEAATR

SEQ ID NO: 54805 - protein, 269 aa, Unidentified
AQSVPWGISRVQAPAAHNRGLTGSGVKVAVLDTGISTHPDLNIRGGASFVPGEPSTQDGEGHGTHVAGTIAALNNRIGVLGVAPSAELYAVKVLGASGSGSVSSIAQGLEWAGNNGMHVANLSLGSPSPSATLEQAVNSATSRGVLVVAASGNSGADSISYPARYANAMAVGATDQNNNRASFSQYGAGLDIVAPGVNVQSTYPGSTYASLNGTSMATPHVAGAAALVKQKNPSWSNVQIRDHLKNTATSLGSTNLYGSGLVNAEAATR

SEQ ID NO: 54806 - protein, 269 aa, Unidentified
AQSVPWGISRVQAPAAHNRGLTGFGVKVAVLDTGISTHPDLNIRGGASFVPGEPSTQDGNGHGTHVAGTIAALNNSIGVLGVAPSAELYAVKVLGASGSGSVSSIAQGLEWAGNNRMHVANLSLGSPSPSATLEQAVNSATSRGVLVVAASGNSGAGSISYPARYANAMAVGATDQNNNRASFSQYGAGLDIVAPGVNVQSTYPGSAYASENGTSMATPHVAGAAALVKQKNPSWSNVQIRNHLKNTATSLGSTNLYGSGLVNAEAATR

SEQ ID NO: 54807 - protein, 269 aa, Unidentified
AQSVPWGISRVQAPAAHNRGLTGSGVKVAVLDTGISTHPDLNIRGGASFVPGEPSTQDGEGHGTHVAGTIAALNNSIGVLGVAPSAELYAVKVLGASGSGSVSSIAQGLEWAGLNGMHVANLSLGIPSPSATLEQAVNSATSRGVLVVAASGNSGEGSISYPARYANAMAVGATDQNNNRASFSQYGAGLDIVAPGVNVQSTYPGSTYASLNGTSMATPHVAGAAALVKQKNPSWSNVQIRNHLKNTATSLGSTNLYGSGLVNAEAATR

SEQ ID NO: 54808 - protein, 269 aa, Unidentified
AQSVPWGISRVQAPAAHNRGLTGSGVKVAVLDTGISTHPDLNIRGGASFVPGEPSTQDGEGHGTHVAGTIAALNNSIGVLGVAPSAELYAVKVLGASGAGSVSSIAQGLEWAGNNGMHVANLSLGSPSPSATLEQAVNSATSRGVLVVAASGNSGAGSISYPARYANAMAVGATDQNNNHASFSQYGAGLDIVAPGVNVQSTYPGSTYASLNGTSMATPHVAGAAALVKQKNPSWSNVQIRNHLKNTATSLGSTNLYGSGLVNAFAATR

SEQ ID NO: 54809 - protein, 269 aa, Unidentified
AQSVPWGISRVQAPAAHNRGLTGRGVKVAVLDTGISTHPDLNIRGGASFVPGEPSTQDGNGHGTHVAGTIAALDNSIGVLGVAPSAELYAVKVLGASGSGAVSSIAQGLEWAGNNGMHVANLSLGSPSPSATLEQAVNSATSRGVLVVAASGNSGAGSISYPARYANAMAVGATDQNNNRASFSQYGAGLDIVAPGVNVQSTYPGSTYASLNGTSMATPHVAGAAALVKQKNPSWSNVQIRNRLKNTATSLGSTNLYGSGLVNAEAATR

SEQ ID NO: 54810 - protein, 269 aa, Unidentified
AQSVPWGISRVQAPAAHNRRLTGRGVKVAVLDTGISTHPDLNIRGGASFVPGEPSTQDGNGHGTHVAGTIAALNNSIGVLGVAPSAELYAVKVLGASGAGSVSSIAQGLEWAGNNGMHVANLSLGSPSPSATLEQAVNSATSRGVLVVAASGNSGAGSISYPARYANAMAVGATDQNNNRASFSQYGAGLDIVAPGVNVQSTYPGSTYFSLNGTSMATPHVAGAAALVKQKNPSWSNVQIRNHLKNTATSLGSTNLYGSGLVNAEAATR

SEQ ID NO: 54811 - protein, 269 aa, Unidentified
AQSVPWGISRVQAPAAHNRGLTGSGVKVAVLDTGISTHPDLNIRGGASFVPGEPSTQDGEGHGTHVAGTIAALNNRIGVLGVAPSAELYAVKVLGASGSGSVSSIAQGLEWAGNNGMHVANLSLGSESPSATLEQAVNSATSRGVLVVAASGNSGADSISYPARYANAMAVGATDQNNNRASFSQYGAGLDIVAPGVNVQSTYPGSTYASLNGTSMATPHVAGAAALVKQKNPSWSNVQIRNHLKNTATSLGSTNLYGSGLVNAEAATR

SEQ ID NO: 54812 - protein, 269 aa, Bacillus lentus
AQSVPWGISRVQAPAAHNRGLTGSGVKVAVLDTGISTHPDLNIRGGASFVPGEPSTQDGNGHGTHVAGTIAALNNSIGVLGVAPDAELYAVKVLGASGSGSVSSIARGLEWAGNNGMHVANLSLGSPSPSATLEQAVNSATSRGVLVVAASGNSGAGSISYPARYANAMAVGATDQNNNRADFSQYGAGLDIVAPGVNVQSTYPGSTYASLNGTSMATPHVAGAAALVKQKNPSWSNVQIRDHLKNTATSLGSTNLYGSGLVNAEAATR

SEQ ID NO: 54813 - protein, 269 aa, Unidentified
AQSVPWGISRVQAPAAHNRGLTGRGVKVAVLDSGISTHPDLNIRGGASFVPGEPSTQDGNGHGTHVAGTIAALNNSIGVLGVAPSAELYAVKVLGASGSGSVSSIAQGLEWAGNNGMHVANLSLGSPSPSATLEQAVNSATSRGVLVVAASGNSGAGSISYPARYANAMAVGATDQNNNRASFSQYGAGLDIVAPGVNVQSTYPGSTYASLNGTSMATPHVAGAAALVFQKNPSRSNVQIRNHLKNTATSLGSTNLYGSGLVNAEAATR

SEQ ID NO: 54814 - protein, 269 aa, Unidentified
AQSVPWGISRVQAPAAHNRGLTGSGVKVAVLDTGISTHPDLNIRGGASFVPGEPSTQDGNGHGTHVAGTIAALNNNIGVLGVAPSAELYAVKVLGASGSGSVSSIAQGLEWAGNNGMHVANLSLGSPSPSATLEQAVNSATSRGVLVVAASGNSGAGSIDYPARYANAMAVGATDQNNNRASFSQYGAGLDIVAPGVNVQSTYPGSAYASENGTSMATPHVAGAAALVKQKNPSWSNVQIRNHLKNTATSLGSTNLYGSGLVNAEAATR

SEQ ID NO: 54815 - protein, 269 aa, Unidentified
AQSVPWGISRVQAPAAHRRGLTGSGVKVAVLDTGISTHPDLNIRGGASFVPGEPSTQDGNGHGTHVAGTIAALNNSIGVLGVAPSAELYAVKVLGASGSGAISSIAQGLEWAGNNGMHVANLSLGSPSPSATLEQAVNSATSRGVLVVAASGNSGAGSISYPARYANAMAVGATDQNNNRASFSQYGAGLDIVAPGVNVQSTYPGSTYASLNGTSMATPHVAGAAVLVKQKNPSWSNVQIRNHLKNTATSLGSTNLYGSGLVNAEAATR

SEQ ID NO: 54816 - protein, 269 aa, Unidentified
AQSVPWGISRVQAPAAHNRGLTGSGVKVAVLDTGISTHPDLNIRGGASFVPGEPSTQDGNGHGTHVAGTIAALDNSIGVLGVAPSAELYAVKVLGASGSGAISSIAQGLEWAGNNGMHVANLSLGSPSPSATLEQAVNSATSRGVLVVAASGNSGAGSISYPARYANAMAVGATDQNNNRASFSQYGAGLDIVAPGVNVQSTYPGSTYASLNGTSMATPHVVGAAALVKQKNPSWSNVQIRNHLKNTATSLGSTNLYGSGLVNAEAATR

SEQ ID NO: 54817 - protein, 269 aa, Unidentified
AQSVPWGISRVQAPAAHNRGLTGGGVKVAVLDTGISTHPDLNIRGGASFVPGEPSTQDGNGHGTHVAGTIAALNNSIGVLGVAPSAELYAVKVLSASGNGSVSSIANGLEWAGNNGMHVANLSLGAPSPSATLEQAVNSATSRGVLVVAASGNSGAGSISYPARYANAMAVGATDQNNNRASFSQYGAGLDIVAPGVNVQSTYPGSTYASLNGTSSATPHVAGAAALVKQKNPSWSNVQIRNHLKNTATSLGSTNLYGSGLVNAEAATR

SEQ ID NO: 54818 - protein, 269 aa, Unidentified
AQSVPWGISRVQAPAAHNRGLTGSGVKVAVLDTGISTHPDLNIRGGASFVPGEPSTQDGNGHGTHVAGTIAALNNSIGVLGVAPSAELYAVKVLGQASSGSLSSIAQGLEWAGNNGMHVANLSLGSPSPSATLEQAVNSATSRGVLVVAASGNSGAGSISYPARYANAMAVGATDQNNNRASFSQYGAGLDIVAPGVNVQSTYPGSTYASLNGTSMATPHVAGAAALVKQKNPSWSNVQIRNHLKNTATSLGSTNLYGSGLVNAEAATR

SEQ ID NO: 54819 - protein, 269 aa, Unidentified
AQSVPWGISRVQAPAAHNRKLLGFGVKVAVLDTGISTHPDLNIRGGASFVPGEPSTQDGNGHGTHVAGTIAALNNNIGVLGVAPSAELYAVKVLGASGSGSVSSIAQGLEWAGNNGMHVANLSLGSPSPSATLEQAVNSATSRGVLVVAASGNSGAGSISYPARYANAMAVGATDQNNNRASFSQYGAGLDIVAPGVNVQSTYPGSTYASLNGTSMATPHVAGAAALVKQKNPSWSNVQIRNHLKNTATSLGSTNLYGSGLVNAEAATR

SEQ ID NO: 54820 - protein, 269 aa, Unidentified
AQSVPWGISRVQAPAAHNRGLTGRGVKVAVLDTGISTHPDLRITGGASFVPGEPSTQDGNGHGTHVAGTIAALNNSIGVLGVAPSAELYAVKVLGASGSGSVSSIAQGLEWAGNNGMHVANLSLGSPSPSATLEQAVNSATSRGVLVVAASGNSGAGSISYPARYANAMAVGATDQNNNRASFSQYGAGLDIVAPGVNVQSTYPGSTYASLNGTSMATPHVAGAAALVKQKNPSWSNVQIRNHLKNTATSLGSTNLYGSGLVRAEAATR

SEQ ID NO: 54821 - protein, 269 aa, Unidentified
AQSVPWGISRVQAPAAHNRKLLGSGVKVAVLDTGISTHPDLNIRGGASFVPGEPSTQDGNGHGTHVAGTIAALNNNIGVLGVAPSAELYAVKVLGASGSGSVSSIAQGLEWAGNNGMHVANLSLGSPSPSATLEQAVNSATSRGVLVVAASGNSGAGSISYPARYANAMAVGATDQNNNRASFSQYGAGLDIVAPGVNVQSTYPGSAYASLNGTSMATPHVAGAAALVKQKNPSWSNVQIRNHLKNTATSLGSTNLYGSGLVNAEAATR

SEQ ID NO: 54822 - protein, 269 aa, Unidentified
AQSVPWGISRVQAPAAHNRGLTGSGVKVAVLDTGISTHPDLNIRGGASFVPGEPSTQDGNGHGTHVAGTIAALNNSIGVLGVAPSAELYAVKVLGFAGGGSISSIAQGLEWAGNNGMHVANLSLGSPSPSATLEQAVNSATSRGVLVVAASGNSGAGSISYPARYANAMAVGATDQNNNRASFSQYGAGLDIVAPGVNVQSTYPGSTYASLNGTSMATPHVAGAAALVKQKNPSWSNVQIRNHLKNTATSLGSTNLYGSGLVNAEAATR

SEQ ID NO: 54823 - protein, 269 aa, Unidentified
AQSVPWGISRVQAPAAHNRGLTGSGVKVAVLDTGISTHPDLNIRGGASFVPGEPSTQDGNGHGTHVAGTIAALNNSIGVLGVAPSAELYAVKVLGASGSGSVSSIAQGLEWAGNNVMHVANLSLGVMSPSATLEQAVNSATSRGVLVVAASGNSGAGSISYPARYANAMAVGATDQNNNRASFSQYGAGLDIVAPGVNVQSTWPGSTYASLNGTSMATPHVAGAAALVKQKNPSWSNVQIRNHLKNTATSLGSTNLYGSGLVNAEAATR

SEQ ID NO: 54824 - protein, 269 aa, Unidentified
AQSVPWGISRVQAPAAHNRGLTGSGVKVAVLDTGISTHPDLNIRGGASFVPGEPSTQDGNGHGTHVAGTIAALNNSIGVLGVAPSAELYAVKVLGQTGAGSLSSIAQGLEWAGNNGMHVANLSLGSPSPSATLEQAVNSATSRGVLVVAASGNSGAGSISYPARYANAMAVGATDQNNNRASFSQYGAGLDIVAPGVNVQSTYPGSTYASLNGTSMATPHVAGAAALVKQKNPSWSNVQIRNHLKNTATSLGSTNLYGSGLVNAEAATR

SEQ ID NO: 54825 - protein, 269 aa, Unidentified
AQSVPWGISRVQAPAAHNRGLTGSGVKVAVLDTGISTHPDLNIRGGASFVPGEPSTQDGNGHGTHVAGTIAALDNSIGVLGVAPSAELYAVKVLGASGSGAISSIAQGLEWAGNNGMHVANLSLGSPSPSATLEQAVNSATSRGVLVVAASGNSGAGSISYPARYANAMAVGATDQNNNRASFSQYGAGLDIVAPGVNVQSTYPGSTYASLNGTSMATPHVAGAAALVKQKNPSWSNVQIRNHLKNTATSLGCTNLYGSGLVNAEAATR

SEQ ID NO: 54826 - protein, 269 aa, Unidentified
AQSVPWGISRVQAPAAHNRGLTGSGVKVAVLDTGISTHPDLNIRGGASFVPGEPSTQDGNGHGTHVAGTIAALNNSIGVLGVAPSAELYAVKVLGASGAGSISSIAQGVEWAGNNGMHVANLSLGNPSPSATLEQAVNSATSRGVLVVAASGNSGAGSISYPARYANAMAVGATDQNNNRASFSQYGAGLDIVAPGVNVQSTYPGSTYASLNGTSMATPHVAGAAALVKQKNPSWSNVQIRNHLKNTATSLGSTNLYGSGLVNAEAATR

SEQ ID NO: 54827 - protein, 269 aa, Unidentified
AQSVPWGISRVQAPAAHNRGLTGRGVKVAVLDTGISTHPDLNIRGGASFVPGEPSTQDGNGHGTHVAGTIAALNNRIGVLGVAWSAELYAVKVLGASGSGSVSSIAQGLEWAGNNGMHVANLSLGSPSPSATLEQAVNSATSRGVLVVAASGNSGAGSISYPARYANAMAVGATDQNNNRASFSQYGAGLDIVAPGVNVQSTYPGSTYASLNGTSMATPHVAGAAALVKQKNPSWSFVQIRNHLKNTATSLGSTNLYGSGLVNAEAATR

SEQ ID NO: 54828 - protein, 269 aa, Unidentified
AQSVPWGISRVQAPAAHNLGLTGSGVKVAVLDTGISTHPDLNIRGGASFVPGEPSTQDGNGHGTHVAGTIAALDNSIGVLGVAPSAELYAVKVLGASGSGAISSIAQGLEWAGNNGMHVANLSLGSPSPSATLEQAVNSATSRGVLVVAASGNSGAGSISYPARYANAMAVGATDQNNNRASFSQYGAGLDIVAPGVNVQSTYPGSTYASLNGTSMATPHVAGAAALVKQKNPSWSNVQIRNHLKNTATSLGSTNLYGSGLVNAEAATR

SEQ ID NO: 54829 - protein, 269 aa, Bacillus lentus
AQSVPWGISRVQAPAAHNRGLTGSGVKVAVLDTGISTHPDLNIRGGASFVPGEPSTQDGDGHGTHVAGTIAALNNSIGVLGVAPSAELYAVKVLGASGSGSVSSIAQGLEWAGNNGMHVANLSLGSPSPSATLEQAVNSATSRGVLVVGASGNSGAGSISYPARYANAMAVGATDQNNNRASFSQYGAGLDIVAPGVNVQSTYPGSTYASLNGTSMATPHVAGAAALVKQRNPSWSNVRIRNHLKNTATSLGSTNLYGSGLVNAEAATR

SEQ ID NO: 54830 - protein, 269 aa, Alkalihalobacillus clausii
AQSVPWGISRLQAPAAHNRGLTGSGVKVAVLDTGISTHPDLNIRGGASFVPGEPSTQDGNGHGTHVAGTIAALNNSIGVLGVAPSAELYAVKVLVASGSGSVSSIAQGLEWAGNNGMHVANLSLGSPSPSATLEQAVNSATSRGLLVVAASGNSGAGSISYPARYANAMAVGATDQNNNRASFSQYGAGLDIVAPGVNVQSTYPGSTYASLTGTSMATPHVAGAAALVKQKNPSWSNVQIRNHLKNTATSLGSTNLYGSGLVNAEAATR

SEQ ID NO: 54831 - protein, 269 aa, Unidentified
AQSVPWGISRVQAPAAHNRGLTGSGVKVAVLDTGISTHPDLNIRGGASFVPGEPSTQDGNGHGTHVAGTIAALNNSIGVLGVAPSAELYAVKVLPAASSGSISSIAQGLEWAGNNGMHVANLSLGSPSPSATLEQAVNSATSRGVLVVAASGNSGAGSISYPARYANAMAVGATDQNNNRASFSQYGAGLDIVAPGVNVQSTYPGSTYASLNGTSMATPHVAGAAALVKQKNPSWSNVQIRNHLKNTATSLGSTNLYGSGLVNAEAATR

SEQ ID NO: 54832 - protein, 269 aa, Unidentified
AQSVPWGISRVQAPAAHNRKLTGSGVKVAVLDTGISTHPDLNIRGGASFVPGEPSTQDGNGHGTHVAGTIAALNNSIGVLGVAPSAELYAVKVLGASGSGSVSSIAQGLEWAGNNGMHVANLSLGDPSPSATLEQAVNSATSRGVLVVAASGNSGAGSISYPARYANAMAVGATDQNNNRASFSQYGAGLDIVAPGVNVQSTYPGSAYASENGTSMATPHVAGAAALVKQKNPSWSNVQIRNHLKNTATSLGSTNLYGSGLVNAEAATR

SEQ ID NO: 54833 - protein, 269 aa, Unidentified
AQSVPWGISRVQAPAAHNRGLTGSGVKVAVLDTGISTHPDLNIRGGASFVPGEPSYQDGNGHGTHVAGTIAALNNSIGVLGVAPSAELYAVKVLGASGRGSVSSIAQGLEWAGQNGMHVANLSLGTPSPSATLEQAVNSATSRGVLVVAASGNSGAGSISYPARYANAMAVGATDQNNNRASFSQYGAGLDIVAPGVNVQSTYPGSTYASLNGTSMATPHVAGAAALVKQKNPSWSNVQIRNHLKNTATSLGSTNLYGSGLVNAEAATR

SEQ ID NO: 54834 - protein, 269 aa, Synthetic construct
AQSVPWGISRVQAPAAHNRGLTGSGVKVAVLDTGISTHPDLNIRGGASFVPGEPSTQDGNGHGTHVAGTIAALDNSIGVLGVAPSAELYAVKVLGASGSGAISSTAQGLEWAGNNGMHVANLSLGSPSPSATLEQAVNSATSRGVLVVAASGNSGAGSISYPARYANAMAVGATDQNNNRASFSQYGAGLDIVAPGVNVQSTYPGSTYASLNGTSMATPHVAGAAALVKQKNPSWSNVQIRNHLKNTATSLGSTNLYGSGLVNAEAATR

SEQ ID NO: 54835 - protein, 269 aa, Unidentified
AQSVSWGISRVQAPAAHNRGLTGRGVKVAVLDSGISTHPDLNIRGGASFVPGEPSTQDGNGHGTHVAGTIAALNNSIGVLGVAPSAELYAVKVLGASGSGSVSSIAQGLEWAGNNGMHVANLSLGSPSPSATLEQAVNSATSRGVLVVAASGNSGAGSISYPARYANAMAVGATDQNNNRASFSQYGAGLDIVAPGVNVQSTYPGSTYASLNGTSMATPHVAGAAALVKQKNPSWSFVQIRNHLKNTATSLGSTNLYGSGLVNAEAATR

SEQ ID NO: 54836 - protein, 269 aa, Unidentified
AQSVPWGISRVQAPAAHNRKLTGSGVKVAVLDTGISTHPDLNIRGGASFVPGEPSTQDGEGHGTHVAGTIAALNNNIGVLGVAPSAELYAVKVLGASGSGSVSSIAQGLEWAGLNGMHVANLSLGSPSPSATLEQAVNSATSRGVLVVAASGNSGAGSISYPARYANAMAVGATDQNNNRASFSQYGAGLDIVAPGVNVQSTYPGSTYASLNGTSMATPHVAGAAALVKQKNPSWSNVQIRNHLKNTATSLGSTNLYGSGLVNAEAATR

SEQ ID NO: 54837 - protein, 269 aa, Unidentified
AQSVPWGISRVQAPAAHNRGLTGRGVKVAVLDSGISTHPDLNIRGGASFVPGEPSTQDGNGHGTHVAGTIAALNNRIGVLGVAPSAELYAVKVLGASGSGSVSSIAQGLEWAGNNGMHVANLSLGSPSPSATLEQAVNSATSRGVLVVAASGNSGAGSISYPARYANAMAVGATDQNNNRASFSQYGAGLDIVAPGVNVQSTYPGSTYASLNGTSMATPHVAGAAALVKQKNPSWSFVQIRNHLKNTATSLGSTNLYGSGLVNAEAATR

SEQ ID NO: 54838 - protein, 269 aa, Unidentified
AQSVPWGISRVQAPAAHNRGLTGSGVKVAVLDTGISTHPDLRIRGGASFVPGEPSTQDGNGHGTHVAGTIAALNNSIGVLGVAPSAELYAVKVLGASGAGSVSSIAQGLEWAGNNGMHVANLSLGSPSPSATLEQAVNSATSRGVLVVAASGNSGAGSISYPARYANAMAVGATDQNNNRASFSQYGAGLDIVAPGVNVQSTYPQSAYASLNGTSMATPHVAGAAALVKQKNPSWSNVQIRNHLKNTATSLGSTNLYGSGLVNAEAATR

SEQ ID NO: 54839 - protein, 270 aa, Alkalihalobacillus clausii
AQSVPWGISRVQAPAAHNRGLTGSGVKVAVLDTGIDSTHPDLNIRGGASFVPGEPSTQDGNGHGTHVAGTIAALDNSIGVLGVAPSAELYAVKVLGASGSGSVSSIAQGLEWAGNNGMDVANLSLGSPSPSATLEQAVNSATSRGVLVVAASGNSGAGSISYPARYANAMAVGATDQNNNRASFSQYGAELDIVAPGVNVQSTYPGSTYASLNGTSMATPHVAGAAALVLQKNPSWSNVQIRNHLKNTATSLGSTNLYGSGLVNAEAATR

SEQ ID NO: 54840 - protein, 269 aa, Unidentified
AQSVPWGISRVQAPAAHNRRLTGSGVKVAVLDTGISTHPDLRIRGGASFVPGEPSTQDGNGHGTHVAGTIAALNNSIGVLGVAPSAELYAVKVLGASGSGSVSSIAQGLEWAGNNGMHVANLSLGSPSPSATLEQAVNSATSRGVLVVAASGNSGAGSISYPARYANAMAVGATDQNNNRASFSQYGAGLDIVAPGVNVQSTYPGFTYASLNGTSMATPHVAGAAALVKQKNPSRSNVQIRNHLKNTATSLGSTNLYGSGLVNAEAATR

SEQ ID NO: 54841 - protein, 269 aa, Unidentified
AQSVPWGISRVQAPASHNRGLTGSGVKVAVLDTGISTHPDLNIRGGASFVPGEPSTQDGNGHGTHVAGTIAALNNSIGVLGVAPSAELYAVKVLGASGSGSVSSIAQGLEWAGNNGMHVANLSLGSPSPSATLEQAVNSATSRGVLVVAASGNSGEGSISYPARYANAMAVGATDQNNNRASFSQYGAGLDIVAPGVNVQSTYPGSTYASLNGTSMATPHVAGAAALVKQKNPSWSNVQIRNRLKNTATSLGSTNLYGSGLVNAFAATR

SEQ ID NO: 54842 - protein, 269 aa, Unidentified
AQSVPWGISRVQAPAAHNRGLTGSGVKVAVLDTGISTHPDLNIRGGASFVPGEPSTQDGEGHGTHVAGTIAALNNSIGVLGVAPSAELYAVKVLGASGSGSLSSIAQGLEWAGNNGMHVANLSLGSPSPSATLEQAVNSATSRGVLVVAASGNSGAESISYPARYANAMAVGATDQNNNRASFSQYGAGLDIVAPGVNVQSTYPGSTYASLNGTSMATPHVAGAAALVKQKNPSWSNVQIRNRLKNTATSLGSTNLYGSGLVNAEAATR

SEQ ID NO: 54843 - protein, 269 aa, Unidentified
AQSVPWGISRVQAPAAHNRGLAGRGVKVAVLDTGISTHPDLNIRGGASFVPGEPSTQDGNGHGTHVAGTIAALNNSIGVLGVAPSAELYAVKVLGASGSGSVSSIAQGLEWAGNNGMHVANLSLGSPSPSATLEQAVNSATSRGVLVVAASGNSGEGSISYPARYANAMAVGATDQNNNRADFSQYGAGLDIVAPGVNVQSTYPGSTYASLNGTSMATPHVAGAAALVKQKNPSWSNVQIRNHLKNTATSLGSTNLYGSGLVNAEAATR

SEQ ID NO: 54844 - protein, 269 aa, Bacillus lentus
AQSVPWGISRVQAPAAHNRGLTGSGVKVAVLDTGISTHPDLNIRGGASFVPGEPSTQDGNGHGTHVAGTIAALNNSIGVLGVAPRAELYAVKVLGASGSGSVSSIADGLEWAGNNGMHVANLSLGSPSPSATLEQAVNSATSRGVLVVAASGNSGAGSISYPARYANAMAVGATDQNNNRADFSQYGAGLDIVAPGVNVQSTYPGSTYASLNGTSMATPHVAGAAALVKQKNPSWSNVQIRDHLKNTATSLGSTNLYGSGLVNAEAATR

SEQ ID NO: 54845 - protein, 269 aa, Unidentified
AQSVPWGISRVQAPASHNRGLTGSGVKVAVLDTGISTHPDLNIRGGASFVPGEPSTQDGNGHGTHVAGTIAALNNSIGVLGVAPSAELYAVKVLGASGSGSLSSIAQGLEWAGNNGMHVANLSLGNPSPSATLEQAVNSATSRGVIVVAASGNSGAGSISYPARYANAMAVGATDQNNNRASFSQYGAGLDIVAPGVNVQSTYPGSTYASLNGTSMATPHVAGAAALVKQKNPSWSNVQIRNHLKNTATSLGSTNLYGSGLVNAEAATR

SEQ ID NO: 54846 - protein, 269 aa, Unidentified
AQSVPWGISRVQAPAAHNRGLTGSGVKVAVLDTGISTHPDLNIRGGASFVPGEPSTQDGNGHGTHVAGTIAALNNSIGVLGVAPSAELYAVKVLGASGAGGLSSIAQGLEWAGNNGMHVANLSLGSPSPSATLEQAVNSATSRGVLVVAASGNSGAGSISYPARYANAMAVGATDQNNNRADFSQYGAGLDIVAPGVNVQSTYPGSTYASLNGTSMATPHVAGAAALVKQKNPSWSNVQIRNHLKNTATSLGSTNLYGSGLVNAEAATR

SEQ ID NO: 54847 - protein, 269 aa, Unidentified
AQSVPWGISRVQAPASHNRGLAGSGVKVAVLDTGISTHPDLNIRGGASFVPGEPSTQDGNGHGTHVAGTIAALNNSIGVLGVAPSAELYAVKVLGASGAGSISSIAQGLEWAGNNGMHVANLSLGSPSPSATLEQAVNSATSRGVLVVAASGNSGAGSISYPARYANAMAVGATDQNNNRASFSQYGAGLDIVAPGVNVQSTYPGSTYASLNGTSMATPHVAGAAALVKQKNPSWSNVQIRNHLKNTATSLGSTNLYGSGLVNAEAATR

SEQ ID NO: 54848 - protein, 269 aa, Unidentified
AQSVPWGISRVQAPAAHNRGLTGSGVKVAVLDTGISTHPDLNIRGGASFVPGEPSTQDGEGHGTHVAGTIAALNNSIGVLGVAPSAELYAVKVLGASGSGSVSSIAQGLEWAGLNRMHVANLSLGIPSPSATLEQAVNSATSRGVLVVAASGNSGAGSISYPARYANAMAVGATDQNNNRASFSQYGAGLDIVAPGVNVQSTYPGSTYASLNGTSMATPHVAGAAALVKQKNPSWSNVQIRNHLKNTATSLGSTNLYGSGLVNAEAATR

SEQ ID NO: 54849 - protein, 269 aa, Unidentified
AQSVPWGISRVQAPAAHNRKLTGSGVKVAVLDTGISTHPDLNIRGGASFVPGEPSTQDGNGHGTHVAGTIAALNNSIGVLGVAPSAELYAVKVLGASGSGSVSSIAQGLEWAGNNRMHVANLSLGDPSPSATLEQAVNSATSRGVLVVAASGNSGAGSIDYPARYANAMAVGATDQNNNRASFSQYGAGLDIVAPGVNVQSTYPGSTYASLNGTSMATPHVAGAAALVKQKNPSWSNVQIRNHLKNTATSLGSTNLYGSGLVNAEAATR

SEQ ID NO: 54850 - protein, 269 aa, Bacillus lentus
AQSVPWGISRVQAPAAHNRGLTGSGVKVAVLDTGISTHPDLNIRGGASFVPGEPSTQDGNGHGTHVAGTIAALNNSIGVLGVAPSAELYAVKVLGASGSGSVSSIAQGLEWAGNNGMHVANLSLGSPSPSATLEQAVNEATSRGVLVVAASGNSGAGSISAPASYANAMAVGATDQNNNRASFSQYGPGLDIVAPGVNVQSTYPGSTYASLNGTSMATPHVAGAAALVKQKNPSWSNVQIRNHLKNTATSLGSTNLYGSGLVNAEAATR

SEQ ID NO: 54851 - protein, 269 aa, Unidentified
AQSVPWGISRVQAPAAHNRGLTGRGVKVAVLDTGISTHPDLNIRGGASFVPGEPSTQDGNGHGTHVAGTIAALNNSIGVLGVAPSAELYAVKVLGASGSGSVSSIAQGLEWAGLNGMHVANLSLGSPSPSATLEQAVNSATSRGVLVVAASGNSGEGSIDYPARYANAMAVGATDQNNNRASFSQYGAGLDIVAPGVNVQSTYPGSTYASLNGTSMATPHVAGAAALVKQKNPSWSNVQIRNHLKNTATSLGSTNLYGSGLVNAEAATR

SEQ ID NO: 54852 - protein, 269 aa, Unidentified
AQSVPWGISRVQAPAAHNRGLTGSGVKVAVLDTGISTHPDLNIRGGASFVPGEPSTQDGQGHGTHVAGTIAALNNSIGVLGVAPSAELYAVKVLGASGSGNVSSIAQGLEWAGNFGMHVANLSLGSPSPSATLEQAVNSATSRGVLVVAASGNSGAGSISYPARYANAMAVGATDQNNNRASFSQYGFGLDIVAPGVNVQSTYPGSTYASLNGTSMATPHVAGAAALVKQKNPSWSNVQIRNHLKNTATSLGSTNLYGSGLVNAEAATR

SEQ ID NO: 54853 - protein, 269 aa, Unidentified
AQSVPWGISRVQAPAAHNRRLTGRGVKVAVLDTGISTHPDLNIRGGASFVPGEPSTQDGNGHGTHVAGTIAALNNSIGVLGVAPSAELYAVKVLGASGSGSVSSIAQGLEWAGNNGMHVANLSLGSPSPSATLEQAVNSATSRGVLVVAASGNSGAGSISYPARYANAMAVGATDQNNNRASFSQYGAGLDIVAPGVNVQSTYPGSAYFSLNGTSMATPHVAGAAALVKQKNPSWSNVQIRNHLKNTATSLGSTNLYGSGLVNAEAATR

SEQ ID NO: 54854 - protein, 269 aa, Unidentified
AQSVPWGISRVQAPAAHNRRLRGSGVKVAVLDTGISTHPDLNIRGGASFVPGEPSTQDGNGHGTHVAGTIAALNNRIGVLGVAPSAELYAVKVLGASGSGSVSSIAQGLEWAGNNGMHVANLSLGSPSPSATLEQAVNSATSRGVLVVAASGNSGAGSISYPARYANAMAVGATDQNNNRASFSQYGAGLDIVAPGVNVQSTYPGSTYASLNGTSMATPHVAGAAALVKQKNPSRSNVQIRNHLKNTATSLGSTNLYGSGLVNAEAATR

SEQ ID NO: 54855 - protein, 269 aa, Unidentified
AQSVPWGISRVQAPAAHNRRLRGSGVKVAVLDTGISTHPDLRIRGGASFVPGEPSTQDGNGHGTHVAGTIAALNNSIGVLGVAPSAELYAVKVLGASGSGSVSSIAQGLEWAGNNGMHVANLSLGSPSPSATLEQAVNSATSRGVLVVAASGNSGAGSISYPARYANAMAVGATDQNNNRASFSQYGAGLDIVAPGVNVQSTYPGFTYASLNGTSMATPHVAGAAALVKQKNPSWSNVQIRNHLKNTATSLGSTNLYGSGLVNAEAATR

SEQ ID NO: 54856 - protein, 269 aa, Unidentified
AQSVPWGISRVQAPAAHNRGLTGSGVKVAVLDTGISTHPDLNIRGGASFVPGEPSTQDGEGHGTHVAGTIAALNNSIGVLGVAPSAELYAVKVLGASGSGSVSSIAQGLEWAGNNGMHVANLSLGSPSPSATLEQAVNSATSRGVLVVAASGNSGADSISYPARYANAMAVGATDQNNNRADFSQYGAGLDIVAPGVNVQSTYPGSTYASLNGTSMATPHVAGAAALVKQKNPSWSNVQIRNRLKNTATSLGSTNLYGSGLVNAEAATR

SEQ ID NO: 54857 - protein, 269 aa, Unidentified
AQSVPWGISRVQAPAAHNRGLTGSGVKVAVLDTGISTHPDLNIRGGASFVPGEPSTQDGNGHGTHVAGTIAALNNSIGVLGVAPSAELYAVKVLPQTGSGAVSSIAQGLEWAGNNGMHVANLSLGSPSPSATLEQAVNSATSRGVLVVAASGNSGAGSISYPARYANAMAVGATDQNNNRASFSQYGAGLDIVAPGVNVQSTYPGSTYASLNGTSMATPHVAGAAALVKQKNPSWSNVQIRNHLKNTATSLGSTNLYGSGLVNAEAATR

SEQ ID NO: 54858 - protein, 269 aa, Unidentified
AQSVPWGISRVQAPAAHNRGLTGSGVKVAVLDTGISTHPDLNIRGGASFVPGEPSTQDGNGHGTHVAGTIAALNNSIGVLGVAPSAELYAVKVLPQTGSGSMSSIAQGLEWAGNNGMHVANLSLGSPSPSATLEQAVNSATSRGVLVVAASGNSGAGSISYPARYANAMAVGATDQNNNRASFSQYGAGLDIVAPGVNVQSTYPGSTYASLNGTSMATPHVAGAAALVKQKNPSWSNVQIRNHLKNTATSLGSTNLYGSGLVNAEAATR

SEQ ID NO: 54859 - protein, 269 aa, Unidentified
AQSVPWGISRVQAPAAHNRGLTGSGVKVAVLDTGISTHPDLNIRGGASFVPGEPSTQDGNGHGTHVAGTIAALNNSIGVLGVAPSAELYAVKVLGASGGGAISSIAQGLEWAGNNGMHVANLSLGSPSPSATLEQAVNSATSRGVLVVAASGNSGAGSISYPARYANAMAVGATDQNNNRASFSQYGAGLDIVAPGVNVQSTYPGSTYASLNGTSSATPHVAGAAVLVKQKNPSWSNVRIRNHLKNTATSLGSTNLYGSGLVNAEAATR

SEQ ID NO: 54860 - protein, 269 aa, Unidentified
AQSVPWGISRVQAPAAHNRRLTGSGVKVAVLDTGISTHPDLNIRGGASFVPGEPSTQDGNGHGTHVAGTIAALNNDIGVLGVAPSAELYAVKVLGASGSGSVSSIAQGLEWAGNNSMHVANLSLGSPSPSATLEQAVNSATSRGVLVVAASGNSGAGSISYPARYANAMAVGATDQNNNRASFSQYGAGLDIVAPGVNVQSTYPGSTYASLNGTSMATPHVAGAAALVKQKNPSWSNVRIRNHLKNTATSLGSTNLYGSGLVNAEAATR

SEQ ID NO: 54861 - protein, 269 aa, Unidentified
AQSVPWGISRVQAPAAHNRGLTGSGVKVAVLDTGISTHPDLNIRGGASFVPGEPSTQDGEGHGTHVAGTIAALNNGIGVLGVAPSAELYAVKVLGASGSGSVSSIAQGLEWAGNNDMHVANLSLGSPSPSATLEQAVNSATSRGVLVVAASGNSGAGSISYPARYANAMAVGATDQNNNRASFSQYGAGLDIVAPGVNVQSTYPGSTYASLNGTSMATPHVAGAAALVKQKNPSWSNVRIRNHLKNTATSLGSTNLYGSGLVNAEAATR

SEQ ID NO: 54862 - protein, 269 aa, Synthetic construct
AQSVPWGISRVQAPAAHNRGLTGSGVKVAVLDTGISTHPDLNIRGGASFVPGEPSTQDGNGHGTHVAGTIAALDNSIGVLGVAPSAELYAVKVLGASGSGAISSIAQGLEWAGNNGMHVANLSLGSPSPSATLEQAVNSATSRGVLVVAASGNSGAGSISYPARYANAMAVGATDQNNNRASFSQYGAGLDIVAPGVCVQSTYPGSTYASLNGTSMATPHVAGAAALVKQKNPSWSNVQIRNHLKNTATSLGSTNLYGSGLVNAEAATR

SEQ ID NO: 54863 - protein, 269 aa, Unidentified
AQSVPWGISRVQAPAAHNRKLTGSGVKVAVLDTGISTHPDLNIRGGASFVPGEPSTQDGEGHGTHVAGTIAALNNSIGVLGVAPSAELYAVKVLGASGNGSVSSIANGLEWAGLNGMHVANLSLGSPSPSATLEQAVNSATSRGVLVVAASGNSGAGSISYPARYANAMAVGATDQNNNRASFSQYGAGLDIVAPGVNVQSTYPGSTYASLNGTSSATPHVAGAAALVKQKNPSWSNVQIRNHLKNTATSLGSTNLYGSGLVNAEAATR

SEQ ID NO: 54864 - protein, 269 aa, Unidentified
AQSVPWGISRVQAPAAHNRKLTGSGVKVAVLDTGISTHPDLNIRGGASFVPGEPSTQDGNGHGTHVAGTIAALNNSIGVLGVAPSAELYAVKVLGASGDGSVSSIAQGLEWAGLNGMHVANLSLGSPSPSATLEQAVNSATSRGVLVVAASGNSGAGSISYPARYANAMAVGATDQNNNRASFSQYGAGLDIVAPGVNVQSTYPGSAYASLNGTSMATPHVAGAAALVKQKNPSWSNVQIRNHLKNTATSLGSTNLYGSGLVNAEAATR

SEQ ID NO: 54865 - protein, 269 aa, Unidentified
AQSRPWGIARVQAPAAHNRGLTGSGVKVAVLDTGISTHPDLRIRGGASFVPGEPSTQDGNGHGTHVAGTIAALNNSIGVLGVAPSAELYAVKVLGASGSGSVSSIAQGLEWAGNNGMHVANLSLGSPSPSATLEQAVNSATSRGVLVVAASGNSGAGSISYPARYANAMAVGATDQNNNRASFSQYGAGLDIVAPGVNVQSTYPGSTYASLNGTSMATPHVAGAAALVKQKNPSRSNVQIRNHLKNTATSLGSTNLYGSGLVNAEAATR

SEQ ID NO: 54866 - protein, 269 aa, Synthetic construct
AQSVPWGISRVQAPAAHNRGLTGSGVKVAVLDTGISTHPDLNIRGGASFVPGEPSTQDGNGHGTHVAGTIAALDNSIGVLGVAPSAELYAVKVLGASGSGAISSIAQGLEWAGNNGMHVANLSLGSPSPSATLEQAVNSATSRGVLVVAASGNEGAGSISYPARYANAMAVGATDQNNNRASFSQYGAGLDIVAPGVNVQSTYPGSTYASLNGTSMATPHVAGAAALVKQKNPSWSNVQIRNHLKNTATSLGSTNLYGSGLVNAEAATR

SEQ ID NO: 54867 - protein, 269 aa, Unidentified
AQSVPWGISRVQAPASHNRGLAGSGVKVAVLDTGISTHPDLNIRGGASFVPGEPSTQDGNGHGTHVAGTIAALNNSIGVLGVAPSAELYAVKVLGASGSGAVSSIAQGLEWAGNNGMHVANLSLGSPSPSATLEQAVNSATSRGVIVVAASGNSGAGSISYPARYANAMAVGATDQNNNRASFSQYGAGLDIVAPGVNVQSTYPGSTYASLNGTSMATPHVAGAAALVKQKNPSWSNVQIRNHLKNTATSLGSTNLYGSGLVNAEAATR

SEQ ID NO: 54868 - protein, 269 aa, Unidentified
AQSVPWGISRVQAPAAHNRGLAGRGVKVAVLDTGISTHPDLNIRGGASFVPGEPSTQDGNGHGTHVAGTIAALNNSIGVLGVAPSAELYAVKVLGASGSGSVSSIAQGLEWAGNNRMHVANLSLGIPSPSATLEQAVNSATSRGVLVVAASGNSGAGSISYPARYANAMAVGATDQNNNRASFSQYGAGLDIVAPGVNVQSTYPGSTYASLNGTSMATPHVAGAAALVKQKNPSWSNVQIRNHLKNTATSLGSTNLYGSGLVNAEAATR

SEQ ID NO: 54869 - protein, 269 aa, Unidentified
AQSVPWGISRVQAPAAHNRGLLGFGVKVAVLDTGISTHPDLNIRGGASFVPGEPSTQDGNGHGTHVAGTIAALNNSIGVLGVAPSAELYAVKVLGASGSGSVSSIAQGLEWAGNNGMHVANLSLGSPSPSATLEQAVNSATSRGVLVVAASGNSGAGSIDYPARYANAMAVGATDQNNNRASFSQYGAGLDIVAPGVNVQSTYPGSTYASENGTSMATPHVAGAAALVKQKNPSWSNVQIRNHLKNTATSLGSTNLYGSGLVNAEAATR

SEQ ID NO: 54870 - protein, 269 aa, Unidentified
AQSVPWGISRVQAPAAHNRGLTGSGVKVAVLDTGISTHPDLNIRGGASFVPGEPSTQDGEGHGTHVAGTIAALNNGIGVLGVAPSAELYAVKVLGASGSGSVSSIAQGLEWAGNNSMHVANLSLGSPSPSATLEQAVNSATSRGVLVVAASGNSGADSISYPARYANAMAVGATDQNNNRASFSQYGAGLDIVAPGVNVQSTYPGSTYASLNGTSMATPHVAGAAALVKQKNPSWSNVQIRNHLKNTATSLGSTNLYGSGLVNAEAATR

SEQ ID NO: 54871 - protein, 269 aa, Unidentified
AQSVPWGISRVQAPAAHNRGLTGFGVKVAVLDTGISTHPDLNIRGGASFVPGEPSTQDGEGHGTHVAGTIAALNNSIGVLGVAPSAELYAVKVLGASGSGSVSSIAQGLEWAGNNGMHVANLSLGSPSPSATLEQAVNSATSRGVLVVAASGNSGAGSISYPARYANAMAVGATDQNNNRADFSQYGAGLDIVAPGVNVQSTYPGSAYASLNGTSMATPHVAGAAALVKQKNPSWSNVQIRNHLKNTATSLGSTNLYGSGLVNAEAATR

SEQ ID NO: 54872 - protein, 269 aa, Unidentified
AQSVPWGISRVQAPAAHNRGLAGSGVKVAVLDTGISTHPDLNIRGGASFVPGEPSTQDGNGHGTHVAGTIAALNNSIGVLGVAPSAELYAVKVLGASGGGGISSIAQGLEWAGNNGMHVANLSLGSPSPSATLEQAVNSATSRGVLVVAASGNSGAGSISYPARYANAMAVGATDQNNNRASFSQYGAGLDIVAPGVNVQSTYPGSTYASLNGTSMATPHVAGAAALVKQKNPSWSNVQIRNHLKNTATSLGSTNLYGSGLVNAEAATR

SEQ ID NO: 54873 - protein, 269 aa, Unidentified
AQSVPWGISRVQAPASHNRGLTGSGVKVAVLDTGISTHPDLNIRGGASFVPGEPSTQDGNGHGTHVAGTIAALNNSIGVLGVAPSAELYAVKVLGASGSGSVSSIAQGLEWAGNNGMHVANLSLGSPSPSATLEQAVNSATSRGVLVVAASGNSGEGSISYPARYANAMAVGATDQNNNHASFSQYGAGLDIVAPGVNVQSTYPGSTYASLNGTSMATPHVAGAAALVKQKNPSWSNVQIRNRLKNTATSLGSTNLYGSGLVNAEAATR

SEQ ID NO: 54874 - protein, 269 aa, Unidentified
AQSVPWGISRVQAPAAHNRGLTGSGVKVAVLDTGISTHPDLWIRGGASFVPGEPSTQDGNGHGTHVAGTIAALNNSIGVLGVAPSAELYAVKVLGASGDGSVSSIAQGLEWAGNNGMHVANLSLGSPSPSATLEQAVNSATSRGVLVVAASGNSGAGSISYPARYANAMAVGATDQNNNRASFSQYGAGLDIVAPGVNVQSTYPGMTYASLNGTSMATPHVAGAAALVKQKNPSWSFVQIRNHLKNTATSLGSTNLYGSGLVNAEAATR

SEQ ID NO: 54875 - protein, 269 aa, Unidentified
AQSVPWGISRVQAPAAHNRGLTGSGVKVAVLDTGISTHPDLNIRGGASFVPGEPSTQDGNGHGTHVAGTIAALNNSIGVLGVAPSAELYAVKVLGASGDGSVSSIAQGLEWAGNNGMHVANLSLGSPSPSATLEQAVNSATSRGVLVVAASGNSGAGSISYPARYANAMAVGATDQNNNRASFSQYGAGLDIVAPGVNVQSTYPGSTYASENGTSMATPHVAGAAALVKQKNPRWSNVQIRNHLKNTATSLGSTNLYGSGLVNALAATR

SEQ ID NO: 54876 - protein, 269 aa, Unidentified
AQSVPWGISRVQAPAAHNRGLTGRGVKVAVLDSGISTHPDLNIRGGASFVPGEPSTQDGNGHGTHVAGTIAALNNRIGVLGVAWSAELYAVKVLGASGSGSVSSIAQGLEWAGNNGMHVANLSLGSPSPSATLEQAVNSATSRGVLVVAASGNSGAGSISYPARYANAMAVGATDQNNNRASFSQYGAGLDIVAPGVNVQSTYPGSTYASLNGTSMATPHVAGAAALVKQKNPSWSNVQIRNHLKNTATSLGSTNLYGSGLVNAEAATR

SEQ ID NO: 54877 - protein, 269 aa, Unidentified
AQSVPWGISRVQAPAAHNRGLTGSGVKVAVLDTGISTHPDLNIRGGASFVPGEPSTQDGNGHGTHVAGTIAALNNDIGVLGVAPSAELYAVKVLGASGSGSVSSIAQGLEWAGNNDMHVANLSLGSESPSATLEQAVNSATSRGVLVVAASGNSGAGSISYPARYANAMAVGATDQNNNRASFSQYGAGLDIVAPGVNVQSTYPGSTYASLNGTSMATPHVAGAAALVKQKNPSWSNVQIRNRLKNTATSLGSTNLYGSGLVNAEAATR

SEQ ID NO: 54878 - protein, 269 aa, Unidentified
AQSVPWGISRVQAPAAHNRGLTGSGVKVAVLDTGISTHPDLRIRGGASFVPGEPSTQDGNGHGTHVAGTIAALNNSIGVLGVAPSAELYAVKVLGASGSGSVSSIAQGLEWAGNNGMHVANLSLGLPSPSATLEQAVNSATSRGVLVVAASGNSGAGSISYPARYANAMAVGATDQNNNRASFSQYGAGLDIVAPGVNVQSTYPGSTYASENGTSMATPHVAGAAALVKQKNPRWSNVQIRNHLKNTATSLGSTNLYGSGLVNAEAATR

SEQ ID NO: 54879 - protein, 269 aa, Unidentified
AQSVPWGISRVQAPAAHNRGLTGSGVKVAVLDTGISTHPDLNIRGGASFVPGEPSTQDGNGHGTHVAGTIAALNNSIGVLGVAPSAELYAVKVLGASGSGSVSSIAQGLEWAGNNGMHVANLSLGSESPSATLEQAVNSATSRGVLVVAASGNSGADSISYPARYANAMAVGATDQNNNRADFSQYGAGLDIVAPGVNVQSTYPGSTYASLNGTSMATPHVAGAAALVKQKNPSWSNVQIRNRLKNTATSLGSTNLYGSGLVNAEAATR

SEQ ID NO: 54880 - protein, 269 aa, Unidentified
AQSVPWGISRVQAPAAHNRGLTGSGVKVAVLDTGISTHPDLNIRGGASFVPGEPSTQDGNGHGTHVAGTIAALNNSIGVLGVAPSAELYAVKVLGFTGGGSLSSIAQGLEWAGNNGMHVANLSLGSPSPSATLEQAVNSATSRGVLVVAASGNSGAGSISYPARYANAMAVGATDQNNNRASFSQYGAGLDIVAPGVNVQSTYPGSTYASLNGTSMATPHVAGAAALVKQKNPSWSNVQIRNHLKNTATSLGSTNLYGSGLVNAEAATR

SEQ ID NO: 54881 - protein, 269 aa, Unidentified
AQSVPWGISRVQAPAAHNRGLTGSGVKVAVLDTGISTHPDLNIRGGASFVPGEPSTQDGNGHGTHVAGTIAALNNNIGVLGVAPSAELYAVKVLGASGDGSVSSIAQGLEWAGNNGMHVANLSLGLPSPSATLEQAVNSATSRGVLVVAASGNSGAGSISYPARYANAMAVGATDQNNNRASFSQYGAGLDIVAPGVNVQSTYPGSTYASLNGTSMATPHVAGAAALVKQKNPSWSNVQIRNHLKNTATSLGSTNLYGSGLVNALAATR

SEQ ID NO: 54882 - protein, 269 aa, Unidentified
AQSVPWGISRVQAPAAHNRGLTGSGVKVAVLDTGISTHPDLNIRGGASFVPGEPSTQDGNGHGTHVAGTIAALNNSIGVLGVAPSAELYAVKVLAASGGGSVSSIAGGLEWAGNNGMHVANLSLGSPSPSATLEQAVNSATSRGVLVVAASGNSGAGSISYPARYANAMAVGATDQNNNRADFSQYGAGLDIVAPGVNVQSTYPGSTYASQNGTSSATPHVAGAAALVKQKNPSWSNVQIRNHLKNTATSLGSTNLYGSGLVNAEAATR

SEQ ID NO: 54883 - protein, 269 aa, Unidentified
AQSVPWGISRVQAPAAHRRGLTGSGVKVAVLDTGISTHPDLNIRGGASFVPGEPSTQDGNGHGTHVAGTIAALNNSIGVLGVAPSAELYAVKVLGASGGGAVSSIAQGLEWAGNNGMHVANLSLGSPSPSATLEQAVNSATSRGVLVVAASGNSGAGSISYPARYANAMAVGATDQNNNRASFSQYGAGLDIVAPGVNVQSTYPGSTYASLNGTSMATPHVAGAAALVKQKNPSWSNVQIRNRLKNTATSLGSTNLYGSGLVNAEAATR

SEQ ID NO: 54884 - protein, 269 aa, Unidentified
AQSRPWGIARVQAPAAHNRGLTGSGVKVAVLDTGISTHPDLNIRGGASFVPGEPSTQDGNGHGTHVAGTIAALNNRIGVLGVAPSAELYAVKVLGASGSGSVSSIAQGLEWAGNNGMHVANLSLGSPSPSATLEQAVNSATSRGVLVVAASGNSGAGSISYPARYANAMAVGATDQNNNRASFSQYGAGLDIVAPGVNVQSTYPGSTYASLNGTSMATPHVAGAAALVKQKNPSRSNVQIRNHLKNTATSLGSTNLYGSGLVNAEAATR

SEQ ID NO: 54885 - protein, 269 aa, Unidentified
AQSVPWGISRVQAPAAHNRGLTGRGVKVAVLDTGISTHPDLNIRGGASFVPGEPSTQDGNGHGTHVAGTIAALNNSIGVLGVAWSAELYAVKVLGASGSGSVSSIAQGLEWAGNNRMHVANLSLGSPSPSATLEQAVNSATSRGVLVVAASGNSGAGSISYPARYANAMAVGATDQNNNRASFSQYGAGLDIVAPGINVQSTYPGSTYASLNGTSMATPHVAGAAALVKQKNPSWSNVQIRNHLKNTATSLGSTNLYGSGLVNAEAATR

SEQ ID NO: 54886 - protein, 269 aa, Unidentified
AQSVPWGISRVQAPAAHNRGLTGSGVKVAVLDTGISTHPDLNIRGGASFVPGEPSTQDGNGHGTHVAGTIAALNNSIGVLGVAPSAELYAVKVLGASGQGSVSSIAGGLEWAGNNGMHVANLSLGSPSPSATLEQAVNSATSRGVLVVAASGNSGAGSISYPARYANAMAVGATDQNNNRADFSQYGAGLDIVAPGVNVQSTYPGSTYASQNGTSMATPHVAGAAALVKQKNPSWSNVQIRNHLKNTATSLGSTNLYGSGLVNAEAATR

SEQ ID NO: 54887 - protein, 269 aa, Unidentified
AQSVPWGISRVQAPAAHNRGLLGFGVKVAVLDTGISTHPDLNIRGGASFVPGEPSTQDGNGHGTHVAGTIAALNNSIGVLGVAPSAELYAVKVLGASGSGSVSSIAQGLEWAGNNGMHVANLSLGSPSPSATLEQAVNSATSRGVLVVAASGNSGAGSIDYPARYANAMAVGATDQNNNRASFSQYGAGLDIVAPGVNVQSTYPGSAYASLNGTSMATPHVAGAAALVKQKNPSWSNVQIRNHLKNTATSLGSTNLYGSGLVNAEAATR

SEQ ID NO: 54888 - protein, 269 aa, Unidentified
AQSVPWGISRVQAPAAHNRGLTGSGVKVAVLDTGISTHPDLNIRGGASFVPGEPSTQDGNGHGTHVAGTIAALNNSIGVLGVAPSAELYAVKVLGASGGGAISSIAQGLEWAGNNGMHVANLSLGSPSPSATLEQAVNSATSRGVLVVAASGNSGAGSISYPARYANAMAVGATDQNNNRASFSQYGAGLDIVAPGVNVQSTYPGSTYASLNGTSMATPHVAGAAVLVKQKNPSWSNVQIRNHLKNTATSLGSTNLYGSGLVNAEAATR

SEQ ID NO: 54889 - protein, 269 aa, Unidentified
AQSVPWGISRVQAPAAHNRRLTGRGVKVAVLDTGISTHPDLNIRGGASFVPGEPSTQDGNGHGTHVAGTIAALNNSIGVLGVAPSAELYAVKVLGASGNGSVSSIAQGLEWAGNNGMHVANLSLGAPSPSATLEQAVNSATSRGVLVVAASGNSGAGSISYPARYANAMAVGATDQNNNRASFSQYGAGLDIVAPGVNVQSTYPGSTYASLNGTSMATPHVAGAAALVKQKNPSWSNVQIRNHLKNTATSLGSTNLYGSGLVNAEAATR

SEQ ID NO: 54890 - protein, 269 aa, Unidentified
AQSVPWGISRVQAPAAHNRGLTGSGVKVAVLDTGISTHPDLNIRGGASFVPGEPSTQDGNGHGTHVAGTIAALNNSIGVLGVAPSAELYAVKVLGASGSGSLSSIAQGLEWAGNNGMHVANLSLGNPSPSATLEQAVNSATSRGVLVVAASGNSGEGSISYPARYANAMAVGATDQNNNRASFSQYGAGLDIVAPGVNVQSTYPGSTYASLNGTSMATPHVAGAAALVKQKNPSWSNVQIRNRLKNTATSLGSTNLYGSGLVNAEAATR

SEQ ID NO: 54891 - protein, 269 aa, Unidentified
AQSVPWGISRVQAPAAHNRKLTGSGVKVAVLDTGISTHPDLNIRGGASFVPGEPSTQDGEGHGTHVAGTIAALNNSIGVLGVAPSAELYAVKVLGASGSGSVSSIAQGLEWAGLNGMHVANLSLGSPSPSATLEQAVNSATSRGVLVVAASGNSGAGSISYPARYANAMAVGATDQNNNRASFSQYGAGLDIVAPGVNVQSTYPGSTYASNNGTSMATPHVAGAAALVKQKNPSWSNVQIRNHLKNTATSLGSTNLYGSGLVNAEAATR

SEQ ID NO: 54892 - protein, 269 aa, Unidentified
AQSVPWGISRVRAPAAHNRGLTGSGVKVAVLDTGISTHPDLNIRGGASFVPGEPSTQDGNGHGTHVAGTIAALDNSIGVLGVAPSAELYAVKVLGASGSGAISSIAQGLEWAGNNGMHVANLSLGSPSPSATLEQAVNSATSRGVLVVAASGNSGAGSISYPARYANAMAVGATDQNNNRASFSQYGAGLDIVAPGVNVQSTYPGSTYASLNGTSSATPHVAGAAALVKQKNPSWSNVQIRNRLKNTATSLGSTNLYGSGLVNAEAATR

SEQ ID NO: 54893 - protein, 269 aa, Unidentified
AQSVPWGISRVQAPAAHNRGLTGSGVKVAVLDTGISTHPDLNIRGGASFVPGEPSTQDGNGHGTHVAGTIAALNNSINVLGVAPSAELYAVKVLGASGSGSVSSIAQGLEWAGNNGMHVANLSMGSPSPSATLEQAVNSATSRGVLVVAASGNSGAGSISYPARYQNAMAVGATDQNNNRASFSQYGAGLDIVAPGVNVQSTYPGSTYASLNGTSMASPHVAGAAALVKQKNPSWSNVQIRNHLKNTATSLGSTNLYGSGLVNAEAATR

SEQ ID NO: 54894 - protein, 269 aa, Unidentified
AQSVPWGISRVQAPAAHNRGLTGRGVKVAVLDTGISTHPDLNIRGGASFVPGEPSTQDGNGHGTHVAGTIAALNNSIGVLGVAPSAELYAVKVLGASGSGSVSSIAQGLEWAGNNGMHVANLSLGSPSPSATLEQAVNSATSRGVLVVAASGNSGAGSINYPARYANAMAVGATDQNNNRASFSQYGAGLDIVAPGVNVQSTWPGSAYASLNGTSMATPHVAGAAALVKQKNPSWSNVQIRNHLKNTATSLGSTNLYGSGLVNAEAATR

SEQ ID NO: 54895 - protein, 269 aa, Unidentified
AQTIPWGISRVQAPAAHNRGLTGSGVKVAVLDTGISTHPDLNIRGGASFVPGEPSTQDGNGHGTHVAGTIAALNNSIGVLGVAPSAELYAVKVLGASGSGSVSSIAQGLEWAGNNGMHVANLSLGSPSPSATLEQAVNSATSRGVLVVAASGNSGAGSISYPARYANAMAVGATDQNNNRASFSQYGAGLDIMAPGVNIQSTYPGSTYASLNGTSMATPHVAGAAALVKQKNPSWSNVQIRNHLKNTATSLGSTNLYGSGLVNAEAATR

SEQ ID NO: 54896 - protein, 269 aa, Synthetic construct
AQSVPWGISRVQAPAAHNRGLTGSGVKVAVLDTGISTHPDLNIRGGASFVPGEPSTQDGNGHGTHVAGTIAALDNSIGVLGVAPSAELYAVKVLGASGGGAISSIAQGLEWAGNNGMHVANLSLGSPSPSATLEQAVNSATSRGVLVVAASGNSGAGSISYPARYANAMAVGATDQNNNRASFSQYGAGLDIVAPGVNVQSTYPGSTYASLNGTSMATPHVAGAAALVKQKNPSWSNVQIRNHLKNTATSLGSTNLYGSGLVNAEAATR

SEQ ID NO: 54897 - protein, 269 aa, Unidentified
AQSVPWGISRVQAPAAHNRKLTGFGVKVAVLDTGISTHPDLNIRGGASFVPGEPSTQDGEGHGTHVAGTIAALNNSIGVLGVAPSAELYAVKVLGASGSGSVSSIAQGLEWAGNNGMHVANLSLGSPSPSATLEQAVNSATSRGVLVVAASGNSGAGSISYPARYANAMAVGATDQNNNRASFSQYGAGLDIVAPGVNVQSTYPGSTYASLNGTSMATPHVAGAAALVKQKNGSWSNVQIRNHLKNTATSLGSTNLYGSGLVNAEAATR

SEQ ID NO: 54898 - protein, 269 aa, Unidentified
AQSVPWGISRVQAPAAHNRRLTGRGVKVAVLDTGISTHPDLNIRGGASFVPGEPSTQDGNGHGTHVAGTIAALNNSIGVLGVAPSAELYAVKVLGASGSGSVSSIAQGLEWAGANGMHVANLSLGSPSPSATLEQAVNSATSRGVLVVAASGNSGAGSISYPARYANAMAVGATDQNNNRASFSQYGAGLDIVAPGVNVQSTYPGSAYASLNGTSMATPHVAGAAALVKQKNPSWSNVQIRNHLKNTATSLGSTNLYGSGLVNAEAATR

SEQ ID NO: 54899 - protein, 269 aa, Unidentified
AQSVPWGISRVQAPAAHNRKLTGSGVKVAVLDTGISTHPDLRIRGGASFVPGEPSTQDGNGHGTHVAGTIAALNNNIGVLGVAPSAELYAVKVLGASGDGSVSSIAQGLEWAGNNGMHVANLSLGSPSPSATLEQAVNSATSRGVLVVAASGNSGAGSISYPARYANAMAVGATDQNNNRASFSQYGAGLDIVAPGVNVQSTYPGSTYASLNGTSMATPHVAGAAALVKQKNPSWSNVQIRNHLKNTATSLGSTNLYGSGLVNAEAATR

SEQ ID NO: 54900 - protein, 269 aa, Unidentified
AQSVPWGISRVQAPAAHNRGLAGRGVKVAVLDTGISTHPDLNIRGGASFVPGEPSTQDGNGHGTHVAGTIAALNNSIGVLGVAPSAELYAVKVLGASGSGSVSSIAQGLEWAGLNGMHVANLSLGSPSPSATLEQAVNSATSRGVLVVAASGNSGEGSISYPARYANAMAVGATDQNNNRASFSQYGAGLDIVAPGVNVQSTYPGSTYASLNGTSMATPHVAGAAALVKQKNPSWSNVQIRNHLKNTATSLGSTNLYGSGLVNAEAATR

SEQ ID NO: 54901 - protein, 269 aa, Unidentified
AQSVPWGISRVQAPAAHNRGLTGSGVKVAVLDTGISTHPDLNIRGGASFVPGEPSTQDGNGHGTHVAGTIAALNNGIGVLGVAPSAELYAVKVLGASGSGSVSSIAQGLEWAGNNDMHVANLSLGSESPSATLEQAVNSATSRGVLVVAASGNSGAGSISYPARYANAMAVGATDQNNNRASFSQYGAGLDIVAPGVNVQSTYPGSTYASLNGTSMATPHVAGAAALVKQKNPSWSNVQIRDHLKNTATSLGSTNLYGSGLVNAEAATR

SEQ ID NO: 54902 - protein, 269 aa, Unidentified
AQSVPWGISRVQAPAAHNRGLTGRGVKVAVLDTGISTHPDLRIRGGASFVPGEPSTQDGNGHGTHVAGTIAALNNSIGVLGVAPSAELYAVKVLGASGSGSVSSIAQGLEWAGNNGMHVANLSLGSPSPSATLEQAVNSATSRGVLVVAASGNSGAGSISYPARYANAMAVGATDQNNNRASFSQYGAGLDIVAPGVNVQSTYPGSTYASLNGTSMATPHVAGEAALVKQKNPSWRNVQIRNHLKNTATSLGSTNLYGSGLVNAEAATR

SEQ ID NO: 54903 - protein, 269 aa, Unidentified
AQSVPWGISRVQAPAAHNRGLTGSGVKVAVLDTGISTHPDLNIRGGASFVPGEPSTQDGNGHGTHVAGTIAALNNSIGVLGVAPSAELYAVKVLGFTGSAAVSSIAQGLEWAGNNGMHVANLSLGSPSPSATLEQAVNSATSRGVLVVAASGNSGAGSISYPARYANAMAVGATDQNNNRASFSQYGAGLDIVAPGVNVQSTYPGSTYASLNGTSMATPHVAGAAALVKQKNPSWSNVQIRNHLKNTATSLGSTNLYGSGLVNAEAATR

SEQ ID NO: 54904 - protein, 269 aa, Unidentified
AQSVPWGISRVQAPAAHNRGLTGGGVKVAVLDTGISTHPDLNIRGGASFVPGEPSTQDGNGHGTHVAGTIAALNNNIGVLGVAPSAELYAVKVLAASGNGSVSSIAQGLEWAGNNGMHVANLSLGSPSPSATLEQAVNSATSRGVLVVAASGNSGAGSISYPARYANAMAVGATDQNNNRASFSQYGAGLDIVAPGVNVQSTYPGSTYASLNGTSMATPHVAGAAALVKQKNPSWSNVQIRNHLKNTATSLGSTNLYGSGLVNAEAATR

SEQ ID NO: 54905 - protein, 269 aa, Unidentified
AQSVPWGISRVQAPAAHNRGLTGSGVKVAVLDTGISTHPDLNIRGGASFVPGEPSTQDGNGHGTHVAGTIAALNNSIGVLGVAPSAELYAVKVLGADGSGAISSIAQGLEWAGNNGMHVANLSLGSPSPSATLEQAVNSATSRGVLVVAASGNSGASSISYPARYANAMAVGATDQNNNRASFSQYGAGLDIVAPGVNVQSTYPGSTYASLNGTSMATPHVAGAAALVKQKNPSWSNVQIRNHLKNTATSLGSTNLYGSGLVNAEAATR

SEQ ID NO: 54906 - protein, 269 aa, Unidentified
AQSVPWGISRVQAPAAHNRGLTGSGVKVAVLDTGISTHPDLNIRGGASFVPGEPSTQDGEGHGTHVAGTIAALNNSIGVLGVAPSAELYAVKVLGASGSGSVSSIAQGLEWAGLNGMHVANLSLGSPSPSATLEQAVNSATSRGVLVVAASGNSGEGSISYPARYANAMAVGATDQNNNRADFSQYGAGLDIVAPGVNVQSTYPGSTYASLNGTSMATPHVAGAAALVKQKNPSWSNVQIRNHLKNTATSLGSTNLYGSGLVNAEAATR

SEQ ID NO: 54907 - protein, 269 aa, Unidentified
AQSVPWGISRVQAPAAHNRGLTGSGVKVAVLDTGISTHPDLNIRGGASFVPGEPSTQDGEGHGTHVAGTIAALNNSIGVLGVAPSAELYAVKVLGASGSGSVSSIAQGLEWAGLNGMHVANLSLGSPSPSATLEQAVNSATSRGVLVVAASGNSGAGSISYPARYANAMAVGATDQNNNRADFSQYGAGLDIVAPGVNVQSTYPGSAYASLNGTSMATPHVAGAAALVKQKNPSWSNVQIRNHLKNTATSLGSTNLYGSGLVNAEAATR

SEQ ID NO: 54908 - protein, 269 aa, Unidentified
AQSVPWGISRVQAPAAHNRGLTGRGVKVAVLDTGISTHPDLNIRGGASFVPGEPSTQDGEGHGTHVAGTIAALNNSIGVLGVAPSAELYAVKVLGASGSGSVSSIAQGLEWAGNNGMHVANLSLGSPSPSATLEQAVNSATSRGVLVVAASGNSGAGSISYPARYANAMAVGATDQNNNRADFSQYGAGLDIVAPGVNVQSTYPGSTYASLNGTSMATPHVAGAAALVKQKNPSWSNVQIRDHLKNTATSLGSTNLYGSGLVNAEAATR

SEQ ID NO: 54909 - protein, 269 aa, Unidentified
AQSVPWGISRVQAPAAHNRGLTGSGVKVAVLDTGISTHPDLNIRGGASFVPGEPSTQDGNGHGTHVAGTIAALNNSIGVLGVAPRAELYAVKVLGASGSGSVSSIARGLEWAGNNGMHVANLSLGSPSPSATLEQAVNSATSRGVLVVAASGNSGAGSISYPARYANAMAVGATDQNNNRADFSQYGAGLDIVAPGVNVQSTYPGSTYASLNGTSMATPHVAGAAALVKQKNPSWSNVQIRRHLKNTATSLGSTNLYGSGLVNAEAATR

SEQ ID NO: 54910 - protein, 269 aa, Unidentified
AQSVPWGISRVQAPAAHNRGLTGGGVKVAVLDTGISTHPDLNIRGGASFVPGEPSTQDGNGHGTHVAGTIAALNNNIGVLGVAPSAELYAVKVLSASGQGSVSSIAQGLEWAGNNGMHVANLSLGSPSPSATLEQAVNSATSRGVLVVAASGNSGAGSISYPARYANAMAVGATDQNNNRASFSQYGAGLDIVAPGVNVQSTYPGSTYASLNGTSMATPHVAGAAALVKQKNPSWSNVQIRNHLKNTATSLGSTNLYGSGLVNAEAATR

SEQ ID NO: 54911 - protein, 269 aa, Unidentified
AQSVPWGISRVQAPAAHNRGLTGSGVKVAVLDTGISTHPDLNIRGGASFVPGEPSTQDGNGHGTHVAGTIAALDNSIGVLGVAPSAELYAVKVLGASGGGSISSIAQGLEWAGNNGMHVANLSLGSPSPSATLEQAVNSATSRGVLVVAASGNSGAGSISYPARYANAMAVGATDQNNNRASFSQYGAGLDIVAPGVNVQSTYPGSTYASLNGTSMATPHVAGAAALVKQKNPSWSNVQIRNRLKNTATSLGSTNLYGSGLVNAEAATR

SEQ ID NO: 54912 - protein, 269 aa, Unidentified
AQSVPWGISRVQAPAAHNRGLTGRGVKVAVLDTGISTHPDLRIRGGASFVPGEPSTQDGNGHGTHVAGTIAALNNSIGVLGVAPSAELYAVKVLGASGAGSVSSIAQGLEWAGANGMHVANLSLGSPSPSATLEQAVNSATSRGVLVVAASGNSGAGSISYPARYANAMAVGATDQNNNRASFSQYGAGLDIVAPGVNVQSTYPGSTYASLNGTSMATPHVAGAAALVKQKNPSWSNVQIRNHLKNTATSLGSTNLYGSGLVNAEAATR

SEQ ID NO: 54913 - protein, 269 aa, Unidentified
AQSVPWGISRVQAPAAHNRGLAGSGVKVAVLDTGISTHPDLNIRGGASFVPGEPSTQDGEGHGTHVAGTIAALNNSIGVLGVAPSAELYAVKVLGASGSGSVSSIAQGLEWAGLNGMHVANLSLGIPSPSATLEQAVNSATSRGVLVVAASGNSGAGSISYPARYANAMAVGATDQNNNRASFSQYGAGLDIVAPGVNVQSTYPGSTYASLNGTSMATPHVAGAAALVKQKNPSWSNVQIRNHLKNTATSLGSTNLYGSGLVNAEAATR

SEQ ID NO: 54914 - protein, 269 aa, Unidentified
AQSVPWGISRVQAPAAHNRRLTGSGVKVAVLDTGISTHPDLNIRGGASFVPGEPSTQDGEGHGTHVAGTIAALNNDIGVLGVAPSAELYAVKVLGASGSGSVSSIAQGLEWAGNNDMHVANLSLGSPSPSATLEQAVNSATSRGVLVVAASGNSGAGSISYPARYANAMAVGATDQNNNRASFSQYGAGLDIVAPGVNVQSTYPGSTYASLNGTSMATPHVAGAAALVKQKNPSWSNVQIRNHLKNTATSLGSTNLYGSGLVNAEAATR

SEQ ID NO: 54915 - protein, 269 aa, Unidentified
AQSVPWGIARVQAPAAHNRRLTGSGVKVAVLDTGISTHPDLRIRGGASFVPGEPSTQDGNGHGTHVAGTIAALNNSIGVLGVAPSAELYAVKVLGASGSGSVSSIAQGLEWAGNNGMHVANLSLGSPSPSATLEQAVNSATSRGVLVVAASGNSGAGSISYPARYANAMAVGATDQNNNRASFSQYGAGLDIVAPGVNVQSTYPGFTYASLNGTSMATPHVAGAAALVKQKNPSWSNVQIRNHLKNTATSLGSTNLYGSGLVNAEAATR

SEQ ID NO: 54916 - protein, 269 aa, Unidentified
AQSVPWGISRVQAPAAHNRGLTGSGVKVAVLDTGISTHPDLNIRGGASFVPGEPSTQDGNGHGTHVAGTIAALNNSIGVLGVAPSAELYAVKVLGASGSGSVSSIAQGLEWAGNNGMHVANLSLGNPSPSATLEQAVNSATSRGVLVVAASGNSGEGSISYPARYANAMAVGATDQNNNRADFSQYGAGLDIVAPGVNVQSTYPGSTYASLNGTSMATPHVAGAAALVKQKNPSWSNVQIRNRLKNTATSLGSTNLYGSGLVNAEAATR

SEQ ID NO: 54917 - protein, 269 aa, Unidentified
AQSVPWGISRVQAPAAHNRKLTGSGVKVAVLDTGISTHPDLNIRGGASFVPGEPSTQDGEGHGTHVAGTIAALNNSIGVLGVAPSAELYAVKVLGASGSGSVSSIAQGLEWAGLNGMHVANLSLGSPSPSATLEQAVNSATSRGVLVVAASGNSGAGSISYPARYANAMAVGATDQNNNRASFSQYGAGLDIVAPGVNVQSTYPGSAYASLNGTSMATPHVAGAAALVKQKNPSWSNVQIRNHLKNTATSLGSTNLYGSGLVNAEAATR

SEQ ID NO: 54918 - protein, 269 aa, Unidentified
AQSVPWGISRVQAPAAHNRGLTGSGVKVAVLDTGISTHPDLNIRGGASFVPGEPSTQDGEGHGTHVAGTIAALNNSIGVLGVAPSAELYAVKVLGASGSGSVSSIAQGLEWAGNNGMHVANLSLGSPSPSATLEQAVNSATSRGVLVVAASGNSGAESISYPARYANAMAVGATDQNNNHASFSQYGAGLDIVAPGVNVQSTYPGSTYASLNGTSMATPHVAGAAALVKQKNPSWSNVQIRNRLKNTATSLGSTNLYGSGLVNAEAATR

SEQ ID NO: 54919 - protein, 269 aa, Unidentified
AQSVPWGISRVQAPAAHNRGLTGSGVKVAVLDTGISTHPDLRIRGGASFVPGEPSTQDGNGHGTHVAGTIAALNNSIGVLGVAPSAELYAVKVLGASGDASVSSIAQGLEWAGNNGMHVANLSLGSPSPSATLEQAVNSATSRGVLVVAASGNSGAGSISYPARYANAMAVGATDQNNNRASFSQYGAGLDIVAPGVNVQSTYPGSTYASLNGTSMATPHVAGAAALVKQKNPRWSNVQIRNHLKNTATSLGSTNLYGSGLVNAEAATR

SEQ ID NO: 54920 - protein, 269 aa, Unidentified
AQSVPWGISRVQAPAAHNRGLTGSGVKVAVLDTGISTHPDLNIRGGASFVPGEPSTQDGNGHGTHVAGTIAALNNSIGVLGVAPSAELYAVKVLPQSGSGALSSIAQGLEWAGNNGMHVANLSLGSPSPSATLEQAVNSATSRGVLVVAASGNSGAGSISYPARYANAMAVGATDQNNNRASFSQYGAGLDIVAPGVNVQSTYPGSTYASLNGTSMATPHVAGAAALVKQKNPSWSNVQIRNHLKNTATSLGSTNLYGSGLVNAEAATR

SEQ ID NO: 54921 - protein, 269 aa, Unidentified
AQSVPWGISRVQAPAAHNRGLTGRGVKVAVLDTGISTHPDLNIRGGASFVPGEPSTQDGNGHGTHVAGTIAALNNSIGVLGVAPSAELYAVKVLGASGAGSVSSIAQGLEWAGNNGMHVANLSLGSPSPSATLEQAVNSATSRGVLVVAASGNSGAGSISYPARYANAMAVGATDQNNNRASFSQYGAGLDIVAPGVNVQSTYPQSAYASLNGTSMATPHVAGAAALVKQKNPSWSNVQIRNHLKNTATSLGSTNLYGSGLVNAEAATR

SEQ ID NO: 54922 - protein, 269 aa, Unidentified
AQSVPWGISRVQAPAAHNRKLTGSGVKVAVLDTGISTHPDLNIRGGASFVPGEPSTQDGEGHGTHVAGTIAALNNSIGVLGVAPSAELYAVKVLGASGSGSVSSIAQGLEWAGNNGMHVANLSLGSPSPSATLEQAVNSATSRGVLVVAASGNSGAGSISYPARYANAMAVGATDQNNNRASFSQYGAGLDIVAPGVNVQSTYPGSAYASNNGTSMATPHVAGAAALVKQKNPSWSNVQIRNHLKNTATSLGSTNLYGSGLVNAEAATR

SEQ ID NO: 54923 - protein, 269 aa, Unidentified
AQSVPWGISRVQAPAAHNRKLTGSGVKVAVLDTGISTHPDLNIRGGASFVPGEPSTQDGNGHGTHVAGTIAALNNNIGVLGVAPSAELYAVKVLGASGDGSVSSIAQGLEWAGNNGMHVANLSLGSPSPSATLEQAVNSATSRGVLVVAASGNSGAGSISYPARYANAMAVGATDQNNNRASFSQYGAGLDIVAPGVNVQSTYPGSTYASENGTSMATPHVAGAAALVKQKNPSWSNVQIRNHLKNTATSLGSTNLYGSGLVNAEAATR

SEQ ID NO: 54924 - protein, 271 aa, Unidentified
AQSVPWGISRVQAPAAHNRGLTGSGVKVAVLDTGISTHPDLNIRGGASFVPGEPSTQDGNGHGTHVAGTIAALNNSIGVLGVAPSAELYAVKVLGGIXHSAGSVSSIAQGLEWAGNNGMHVANLSLGSPSPSATLEQAVNSATSRGVLVVAASGNSGAGSISYPARYANAMAVGATDQNNNRASFSQYGAGLDIVAPGVNVQSTYPGSTYASLNGTSMATPHVAGAAALVKQKNPSWSNVQIRNHLKNTATSLGSTNLYGSGLVNAEAATR

SEQ ID NO: 54925 - protein, 269 aa, Unidentified
AQSVPWGISRVQAPAAHNRGLTGSGVKVAVLDTGISTHPDLNIRGGASFVPGEPSTQDGEGHGTHVAGTIAALNNSIGVLGVAPSAELYAVKVLGASGSGSVSSIAQGLEWAGNNRMHVANLSLGSPSPSATLEQAVNSATSRGVLVVAASGNSGEGSIDYPARYANAMAVGATDQNNNRASFSQYGAGLDIVAPGVNVQSTYPGSTYASLNGTSMATPHVAGAAALVKQKNPSWSNVQIRNHLKNTATSLGSTNLYGSGLVNAEAATR

SEQ ID NO: 54926 - protein, 269 aa, Unidentified
AQSVPWGISRVQAPAAHNRGLAGSGVKVAVLDTGISTHPDLNIRGGASFVPGEPSTQDGNGHGTHVAGTIAALNNSIGVLGVAPSAELYAVKVLGASGAGSISSIAQGLEWAGNNGMHVANLSLGSPSPSATLEQAVNSATSRGVIVVAASGNSGAGSISYPARYANAMAVGATDQNNNRASFSQYGAGLDIVAPGVNVQSTYPGSTYASLNGTSMATPHVAGAAALVKQKNPSWSNVQIRNHLKNTATSLGSTNLYGSGLVNAEAATR

SEQ ID NO: 54927 - protein, 269 aa, Unidentified
AQSVPWGISRVQAPAAHNRGLTGSGVKVAVLDTGISTHPDLNIRGGASFVPGEPSTQDGNGHGTHVAGTIAALNNGIGVLGVAPSAELYAVKVLGASGSGSVSSIAQGLEWAGNNSMHVANLSLGSESPSATLEQAVNSATSRGVLVVAASGNSGAGSISYPARYANAMAVGATDQNNNRASFSQYGAGLDIVAPGVNVQSTYPGSTYASLNGTSMATPHVAGAAALVKQKNPSWSNVQIRDHLKNTATSLGSTNLYGSGLVNAEAATR

SEQ ID NO: 54928 - protein, 269 aa, Unidentified
AQSVPWGISRVQAPAAHNRGLTGSGVKVAVLDTGISTHPDLNIRGGASFVPGEPSTQDGNGHGTHVAGTIAALNNSIGVLGVAPSAELYAVKVLPQGGAGSVSSIAQGLEWAGNNGMHVANLSLGSPSPSATLEQAVNSATSRGVLVVAASGNSGAGSISYPARYANAMAVGATDQNNNRASFSQYGAGLDIVAPGVNVQSTYPGSTYASLNGTSMATPHVAGAAALVKQKNPSWSNVQIRNHLKNTATSLGSTNLYGSGLVNAEAATR

SEQ ID NO: 54929 - protein, 269 aa, Unidentified
AQSVPWGISRVQAPAAHNRGLTGRGVKVAVLDTGISTHPDLNIRGGASFVPGEPSTQDGNGHGTHVAGTIAALNNGIGVLGVAPSAELYAVKVLGASGSGSVSSIAQGLEWAGNNDMHVANLSLGSPSPSATLEQAVNSATSRGVLVVAASGNSGAGSISYPARYANAMAVGATDQNNNRASFSQYGAGLDIVAPGVNVQSTYPGSTYASLNGTSMATPHVAGAAALVKQKNPSWSNVRIRNHLKNTATSLGSTNLYGSGLVNAEAATR

SEQ ID NO: 54930 - protein, 269 aa, Unidentified
AQSVPWGISRVQAPAAHNRGLTGSGVKVAVLDTGISTHPDLRIRGGASFVPGEPSTQDGNGHGTHVAGTIAALNNSIGVLGVAPSAELYAVKVLGASGAGSVSSIAQGLEWAGNNGMHVANLSLGSPSPSATLEQAVNSATSRGVLVVAASGNSGAGSISYPARYANAMAVGATDQNNNRASFSQYGAGLDIVAPGVNVQSTYPGSAYASLNGTSMATPHVAGAAALVKQKNPSWSNVQIRNHLKNTATSLGSTNLYGSGLVRAEAATR

SEQ ID NO: 54931 - protein, 269 aa, Unidentified
AQSVPWGISRVQAPAAHNRGLTGSGVKVAVLDSGISTHPDLNIRGGASFVPGEPSTQDGNGHGTHVAGTIAALNNSIGVLGVAPSAELYAVKVLGASGSGSVSSIAQGLEWAGNNGMHVANLSLGIPSPSATLEQAVNSATSRGVLVVAASGNSGEGSISYPARYANAMAVGATDQNNNRADFSQYGAGLDIVAPGVNVQSTYPGSTYASLNGTSMATPHVAGAAALVKQKNPSWSNVQIRNHLKNTATSLGSTNLYGSGLVNAEAATR

SEQ ID NO: 54932 - protein, 269 aa, Unidentified
AQSVPWGISRVQAPAAHNRGLTGRGVKVAVLDSGISTHPDLNIRGGASFVPGEPSTQDGNGHGTHVAGTIAALNNSIGVLGVAPSAELYAVKVLGASGSGSVSSIAQGLEWAGLNGMHVANLSLGSPSPSATLEQAVNSATSRGVLVVAASGNSGAGSISYPARYANAMAVGATDQNNNRADFSQYGAGLDIVAPGVNVQSTYPGSTYASLNGTSMATPHVAGAAALVKQKNPSWSNVQIRNHLKNTATSLGSTNLYGSGLVNAEAATR

SEQ ID NO: 54933 - protein, 269 aa, Bacillus subtilis
AQSVPWGISRVQAPAAHNRGLTGSGVKVAVLDTGISTHPDLNIRGGASFVPGEPSTQDGNGHGTHVAGTIAALNNSIGVLGVAPSAELYAVKVLGASGSGSVSSIAQGLEWAGNNGMDVANLSLGSPSPSATLEQAVNSATSRGVLVVAASGNSGAGSISYPARYANAMAVGATDQNNNRASFSQYGAELDIVAPGVNVQSTYPGSTYASLNGTSMATPHVAGAAALVLQKNPSWSNVQIRNHLENTATSLGSTNLYGSGLVNAEAATR

SEQ ID NO: 54934 - protein, 269 aa, Unidentified
AQSVPWGISRVQAPAAHNRRLRGSGVKVAVLDTGISTHPDLNIRGGASFVPGEPSTQDGNGHGTHVAGTIAALNNSIGVLGVAPSAELYAVKVLGASGSGSVSSIAQGLEWAGNNGMHVANLSLGSPSPSATLEQAVNSATSRGVLVVAASGNSGAGSISYPARYANAMAVGATDQNNNRASFSQYGAGLDIVAPGVNVQSTYPGFTYASLNGTSMATPHVAGAAALVKQKNPSRSNVQIRNHLKNTATSLGSTNLYGSGLVNAEAATR

SEQ ID NO: 54935 - protein, 269 aa, Unidentified
AQSVPWGISRVQAPAAHNRKLTGSGVKVAVLDTGISTHPDLRIRGGASFVPGEPSTQDGNGHGTHVAGTIAALNNSIGVLGVAPSAELYAVKVLGASGDGSVSSIAQGLEWAGNNGMHVANLSLGSPSPSATLEQAVNSATSRGVLVVAASGNSGAGSISYPARYANAMAVGATDQNNNRASFSQYGAGLDIVAPGVNVQSTYPGSTYASLNGTSMATPHVAGAAALVKQKNPRWSNVQIRNHLKNTATSLGSTNLYGSGLVNAEAATR

SEQ ID NO: 54936 - protein, 269 aa, Unidentified
AQSVPWGISRVQAPAAHNRGLTGSGVKVAVLDSGISTHPDLNIRGGASFVPGEPSTQDGNGHGTHVAGTIAALNNSIGVLGVAPSAELYAVKVLGASGSGSVSSIAQGLEWAGNNRMHVANLSLGIPSPSATLEQAVNSATSRGVLVVAASGNSGEGSISYPARYANAMAVGATDQNNNRASFSQYGAGLDIVAPGVNVQSTYPGSTYASLNGTSMATPHVAGAAALVKQKNPSWSNVQIRNHLKNTATSLGSTNLYGSGLVNAEAATR

SEQ ID NO: 54937 - protein, 269 aa, Unidentified
AQSVPWGIARVQAPAAHNRGLRGSGVKVAVLDTGISTHPDLNIRGGASFVPGEPSTQDGNGHGTHVAGTIAALNNRIGVLGVAPSAELYAVKVLGASGSGSVSSIAQGLEWAGNNGMHVANLSLGSPSPSATLEQAVNSATSRGVLVVAASGNSGAGSISYPARYANAMAVGATDQNNNRASFSQYGAGLDIVAPGVNVQSTYPGFTYASLNGTSMATPHVAGAAALVKQKNPSWSNVQIRNHLKNTATSLGSTNLYGSGLVNAEAATR

SEQ ID NO: 54938 - protein, 269 aa, Unidentified
AQSVPWGISRVQAPAAHNRGLTGRGVKVAVLDTGISTHPDLNIRGGASFVPGEPSTQDGNGHGTHVAGTIAALNNSIGVLGVAPSAELYAVKVLGASGSGSVSSIAQGLEWAGNNRMHVANLSLTSPSPSATLEQAVNSATSRGVLVVAASGNSGAGSISYPARYANAMAVGATDQNNNRASFSQYGAGLDIVAPGVNVQSTWPGSTYASLNGTSMATPHVAGAAALVKQKNPSWSNVQIRNHLKNTATSLGSTNLYGSGLVNAEAATR

SEQ ID NO: 54939 - protein, 269 aa, Unidentified
AQSVPWGISRVQAPAAHNRGLTGRGVKVAVLDSGISTHPDLNIRGGASFVPGEPSTQDGNGHGTHVAGTIAALNNSIGVLGVAPSAELYAVKVLGASGSGSVSSIAQGLEWAGNNGMHVANLSLGSPSPSATLEQAVNSATSRGVLVVAASGNSGAGSISYPARYANAMAVGATDQNNNRASFSQYGAGLDIVAPGVNVQSTAPGSTYASLNGTSMATPHVAGAAALVFQKNPSWSNVQIRNHLKNTATSLGSTNLYGSGLVNAEAATR

SEQ ID NO: 54940 - protein, 269 aa, Unidentified
AQSVPWGISRVQAPAAHNRGLTGSGVKVAVLDTGISTHPDLNIRGGASFVPGEPSTQDGNGHGTHVAGTIAALNNSIGVLGVAPSAELYAVKVLGASGSGSVSSIAQGLEWAGNNGMHVANLSLGIPSPSATLEQAVNSATSRGVLVVAASGNSGEGSIDYPARYANAMAVGATDQNNNRADFSQYGAGLDIVAPGVNVQSTYPGSTYASLNGTSMATPHVAGAAALVKQKNPSWSNVQIRNHLKNTATSLGSTNLYGSGLVNAEAATR

SEQ ID NO: 54941 - protein, 269 aa, Unidentified
AQSVPWGISRVQAPAAHNRRLTGSGVKVAVLDTGISTHPDLNIRGGASFVPGEPSTQDGNGHGTHVAGTIAALNNSIGVLGVAPSAELYAVKVLGASGAGSVSSIAQGLEWAGNNGMHVANLSLGSPSPSATLEQAVNSATSRGVLVVAASGNSGAGSISYPARYANAMAVGATDQNNNRASFSQYGAGLDIVAPGVNVQSTYIQSTYASLNGTSMATPHVAGAAALVKQKNPSWSNVQIRNHLKNTATSLGSTNLYGSGLVNAEAATR

SEQ ID NO: 54942 - protein, 269 aa, Unidentified
AQSVPWGISRVQAPAAHNRGLTGRGVKVAVLDTGISTHPDLNIRGGASFVPGEPSTQDGNGHGTHVAGTIAALNNDIGVLGVAPSAELYAVKVLGASGSGSVSSIAQGLEWAGNNDMHVANLSLGSPSPSATLEQAVNSATSRGVLVVAASGNSGADSISYPARYANAMAVGATDQNNNRASFSQYGAGLDIVAPGVNVQSTYPGSTYASLNGTSMATPHVAGAAALVKQKNPSWSNVQIRNHLKNTATSLGSTNLYGSGLVNAEAATR

SEQ ID NO: 54943 - protein, 269 aa, Unidentified
AQSVPWGISRVQAPAAHNRGLTGSGVKVAVLDTGISTHPDLNIRGGASFVPGEPSTQDGNGHGTHVAGTIAALNNSIGVLGVAPSAELYAVKVLGQTGSAGVSSIAQGLEWAGNNGMHVANLSLGSPSPSATLEQAVNSATSRGVLVVAASGNSGAGSISYPARYANAMAVGATDQNNNRASFSQYGAGLDIVAPGVNVQSTYPGSTYASLNGTSMATPHVAGAAALVKQKNPSWSNVQIRNHLKNTATSLGSTNLYGSGLVNAEAATR

SEQ ID NO: 54944 - protein, 269 aa, Unidentified
AQSVPWGISRVQAPAAHNRGLTGSGVKVAVLDSGISTHPDLNIRGGASFVPGEPSTQDGNGHGTHVAGTIAALNNSIGVLGVAPSAELYAVKVLGASGSGSVSSIAQGLEWAGLNGMHVANLSLGIPSPSATLEQAVNSATSRGVLVVAASGNSGAGSISYPARYANAMAVGATDQNNNRADFSQYGAGLDIVAPGVNVQSTYPGSTYASLNGTSMATPHVAGAAALVKQKNPSWSNVQIRNHLKNTATSLGSTNLYGSGLVNAEAATR

SEQ ID NO: 54945 - protein, 269 aa, Unidentified
AQSRPWGIARVQAPAAHNRRLTGSGVKVAVLDTGISTHPDLNIRGGASFVPGEPSTQDGNGHGTHVAGTIAALNNSIGVLGVAPSAELYAVKVLGASGSGSVSSIAQGLEWAGNNGMHVANLSLGSPSPSATLEQAVNSATSRGVLVVAASGNSGAGSISYPARYANAMAVGATDQNNNRASFSQYGAGLDIVAPGVNVQSTYPGSTYASLNGTSMATPHVAGAAALVKQKNPSWRNVQIRNHLKNTATSLGSTNLYGSGLVNAEAATR

SEQ ID NO: 54946 - protein, 269 aa, Unidentified
AQSVPWGISRVQAPAAHNRGLTGSGVKVAVLDTGISTHPDLNIRGGASFVPGEPSTQDGNGHGTHVAGTIAALNNSIGVLGVAPSAELYAVKVLPQAGAGSVSSIAQGLEWAGNNGMHVANLSLGSPSPSATLEQAVNSATSRGVLVVAASGNSGAGSISYPARYANAMAVGATDQNNNRASFSQYGAGLDIVAPGVNVQSTYPGSTYASLNGTSMATPHVAGAAALVKQKNPSWSNVQIRNHLKNTATSLGSTNLYGSGLVNAEAATR

SEQ ID NO: 54947 - protein, 269 aa, Unidentified
AQSVPWGISRVQAPAAHNRRLRGRGVKVAVLDTGISTHPDRNIRGGASFVPGEPSTQDGNGHGTHVAGTIAALNNSIGVLGVAPSAELYAVKVLGASGSGSVSSIAQGLEWAGNNGMHVANLSLGSPSPSATLEQAVNSATSRGVLVVAASGNSGAGSISYPARYANAMAVGATDQNNNRASFSQYGAGLDIVAPGVNVQSTYPGSTYASLNGTSMATPHVAGAAALVKQKNPSWSNVQIRNHLKNTATSLGSTNLYGSGLVNAEAATR

SEQ ID NO: 54948 - protein, 269 aa, Unidentified
AQSVPWGISRVQAPAAHNRGLTGRGVKVAVLDSGISTHPDLNIRGGASFVPGEPSTQDGNGHGTHVAGTIAALNNSIGVLGVAPSAELYAVKVLGASGSGSVSSIAQGLEWAGNNGMHVANLSLGSPSPSATLEQAVNSATSRGVLVVAASGNSGEGSISYPARYANAMAVGATDQNNNRADFSQYGAGLDIVAPGVNVQSTYPGSTYASLNGTSMATPHVAGAAALVKQKNPSWSNVQIRNHLKNTATSLGSTNLYGSGLVNAEAATR

SEQ ID NO: 54949 - protein, 269 aa, Unidentified
AQSVPWGISRVQAPAAHNRGLTGSGVKVAVLDTGISTHPDLNIRGGASFVPGEPSTQDGNGHGTHVAGTIAALNNGIGVLGVAPSAELYAVKVLGASGSGSVSSIAQGLEWAGNNDMNVANLSLGSPSPSATLEQAVNSATSRGVLVVAASGNSGAGSISYPARYANAMAVGATDQNNNRASFSQYGAGLDIVAPGVNVQSTYPGSTYASLNGTSMATPHVAGAAALVKQKNPSWSNVQIRNRLKNTATSLGSTNLYGSGLVNAEAATR

SEQ ID NO: 54950 - protein, 269 aa, Unidentified
AQSVPWGISRVQAPAAHNRGLTGSGVKVAVLDTGISTHPDLNIRGGASFVPGEPSTQDGNGHGTHVAGTIAALNNNIGVLGVAPSAELYAVKVLGASGSGSLSSIAQGLEWAGNNRMHVANLSLGDPSPSATLEQAVNSATSRGVLVVAASGNSGAGSISYPARYANAMAVGATDQNNNRASFSQYGAGLDIVAPGVNVQSTYPGSTYASLNGTSMATPHVAGAAALVKQKNPSWSNVQIRNHLKNTATSLGSTNLYGSGLVNAEAATR

SEQ ID NO: 54951 - protein, 269 aa, Unidentified
AQSVPWGISRVQAPASHNRGLTGSGVKVAVLDTGISTHPDLNIRGGASFVPGEPSTQDGNGHGTHVAGTIAALNNSIGVLGVAPSAELYAVKVLGASGGGAISSIAQGLEWAGNNGMHVANLSLGSPSPSATLEQAVNSATSRGVLVVAASGNSGAGSISYPARYANAMAVGATDQNNNRASFSQYGAGLDIVAPGVNVQSTYPGSTYASLNGTSMATPHVAGAAALVKQKNPSWSNVQIRNHLKNTATSLGSTNLYGSGLVNAEAATR

SEQ ID NO: 54952 - protein, 269 aa, Unidentified
AQSVPWGISRVQAPAAHNRGLTGSGVKVAVLDTGISTHPDLNIRGGASFVPGEPSTQDGNGHGTHVAGTIAALNNSIGVLGVAPSAELYAVKVLPAGSSGAVSSIAQGLEWAGNNGMHVANLSLGSPSPSATLEQAVNSATSRGVLVVAASGNSGAGSISYPARYANAMAVGATDQNNNRASFSQYGAGLDIVAPGVNVQSTYPGSTYASLNGTSMATPHVAGAAALVKQKNPSWSNVQIRNHLKNTATSLGSTNLYGSGLVNAEAATR

SEQ ID NO: 54953 - protein, 269 aa, Unidentified
AQSVPWGISRVQAPAAHNRGLAGSGVKVAVLDTGISTHPDLNIRGGASFVPGEPSTQDGNGHGTHVAGTIAALNNSIGVLGVAPSAELYAVKVLGASGSGSVSSIAQGLEWAGLNGMHVANLSLGSPSPSATLEQAVNSATSRGVLVVAASGNSGEGSISYPARYANAMAVGATDQNNNRADFSQYGAGLDIVAPGVNVQSTYPGSTYASLNGTSMATPHVAGAAALVKQKNPSWSNVQIRNHLKNTATSLGSTNLYGSGLVNAEAATR

SEQ ID NO: 54954 - protein, 269 aa, Synthetic construct
AQSVPWGISRVQAPAAHNRGLTGSGVKVAVLDTGISTHPDLNIRGGASFVPGEPSTQDGNGHGTHVAGTIAALDNSIGVLGVAPSAELYAVKVLGASGSGAISSIAQGLEWAGNNGMHVANLSAGSPSPSATLEQAVNSATSRGVLVVAASGNSGAGSISYPARYANAMAVGATDQNNNRASFSQYGAGLDIVAPGVNVQSTYPGSTYASLNGTSMATPHVAGAAALVKQKNPSWSNVQIRNHLKNTATSLGSTNLYGSGLVNAEAATR

SEQ ID NO: 54955 - protein, 270 aa, Unidentified
AQSVPWGISRVQAPAAHNRGLTGSGVRVAVLDTGISTHPDLNIRGGASFVPGEPSTQDGNGHGTHVAGTIAALNNSIGVLGVAPSAELYAVKVLGASGXSGSYSSIAQGLEWAGNNGMHVASLSLGSPSPSATLEQAVNSATSRGVLVVAASGNSGAGSISYPARYANAMAVGATDQNNNRASFSQYGAGLDIVAPGVNVQSTYPGSTYASLNGTSMATPHVAGAAALVKQKNPSWSNVQIRNHLKNTATSLGSTNLYGSGLVNAEAAAR

SEQ ID NO: 54956 - protein, 269 aa, Unidentified
AQSVPWGISRVQAPASHNRGLTGSGVKVAVLDTGISTHPDLNIRGGASFVPGEPSTQDGNGHGTHVAGTIAALNNSIGVLGVAPSAELYAVKVLGASGSGSVSSIAQGLEWAGNNGMHVANLSLGNPSPSATLEQAVNSATSRGVLVVAASGNSGEGSISYPARYANAMAVGATDQNNNHASFSQYGAGLDIVAPGVNVQSTYPGSTYASLNGTSMATPHVAGAAALVKQKNPSWSNVQIRNHLKNTATSLGSTNLYGSGLVNAEAATR

SEQ ID NO: 54957 - protein, 269 aa, Unidentified
AQSVPWGISRVQAPAAHNRGLTGSGVKVAVLDTGISTHPDLNIRGGASFVPGEPSTQDGNGHGTHVAGTIAALNNSIGVLGVAPSAELYAVKVLGASGSGSVSGIAQGLEWAGNNGMHVANLSLGSPSPSATLEQAVNSATSRGVLVVAASGNSGAGSISYPARYANAMAVGATDQNNIRASFSQYGAGLDIVAPGVNVQSTYPGSTYAFLNGTSMATPHVAGAAALVKNKNPSWSNVQIRNHLKNTATSLGSTNLYGSGLVNAEAATR

SEQ ID NO: 54958 - protein, 269 aa, Unidentified
AQSVPWGISRVQAPAAHNRGLTGSGVKVAVLDTGISTHPDLNIRGGASFVPGEPSTQDGNGHGTHVAGTIAALNNSIGVLGVAPSAPLYAVKVLGASGAGSVSSIAQGLEWAGNNGMHVANLSLGSESPSATLEQAVNSATSRGVLVVAASGNSGAGSISYPARYANAMAVGATDQNNNHASFSQYGAGLDIVAPGVNVQSTYPGSTYASLNGTSMATPHVAGAAALVKQKNPSWSNVQIRNHLKNTATSLGSTNLYGSGLVNAEAATR

SEQ ID NO: 54959 - protein, 269 aa, Unidentified
AQSVPWGISRVQAPAAHNRGLTGRGVKVAVLDTGISTHPDLNIRGGASFVPGEPSTQDGNGHGTHVAGTIAALNNGIGVLGVAPSAELYAVKVLGASGSGSVSSIAQGLEWAGNNSMHVANLSLGSPSPSATLEQAVNSATSRGVLVVAASGNSGADSISYPARYANAMAVGATDQNNNRASFSQYGAGLDIVAPGVNVQSTYPGSTYASLNGTSMATPHVAGAAALVKQKNPSWSNVQIRNHLKNTATSLGSTNLYGSGLVNAEAATR

SEQ ID NO: 54960 - protein, 269 aa, Unidentified
AQSVPWGISRVQAPAAHNRGLTGSGVKVAVLDTGISTHPDLNIRGGASFVPGEPSTQDGNGHGTHVAGTIAALNNDIGVLGVAPSAELYAVKVLGASGSGSVSSIAQGLEWAGNNDMHVANLSLGSPSPSATLEQAVNSATSRGVLVVAASGNSGADSISYPARYANAMAVGATDQNNNRASFSQYGAGLDIVAPGVNVQSTYPGSTYASLNGTSMATPHVAGAAALVKQKNPSWSNVRIRNHLKNTATSLGSTNLYGSGLVNAEAATR

SEQ ID NO: 54961 - protein, 269 aa, Unidentified
AQSVPWGISRVQAPAAHNRKLTGSGVKVAVLDTGISTHPDLNIRGGASFVPGEPSTQDGEGHGTHVAGTIAALNNNIGVLGVAPSAELYAVKVLGASGSGSVSSIAQGLEWAGNNGMHVANLSLGSPSPSATLEQAVNSATSRGVLVVAASGNSGAGSISYPARYANAMAVGATDQNNNRASFSQYGAGLDIVAPGVNVQSTYPGSTYASLNGTSMATPHVAGAAALVKQKNPSWSNVQIRNHLKNTATSLGSTNLYGSGLVNALAATR

SEQ ID NO: 54962 - protein, 269 aa, Unidentified
AQSVPWGISRVQAPAAHNRGLAGSGVKVAVLDTGISTHPDLNIRGGASFVPGEPSTQDGNGHGTHVAGTIAALNNSIGVLGVAPSAELYAVKVLGASGAGGLSSIAQGLEWAGNNGMHVANLSLGSPSPSATLEQAVNSATSRGVLVVAASGNSGAGSISYPARYANAMAVGATDQNNNRASFSQYGAGLDIVAPGVNVQSTYPGSTYASLNGTSMATPHVAGAAALVKQKNPSWSNVQIRNHLKNTATSLGSTNLYGSGLVNAEAATR

SEQ ID NO: 54963 - protein, 269 aa, Unidentified
AQSVPWGISRVQAPAAHNRGLAGSGVKVAVLDTGISTHPDLNIRGGASFVPGEPSTQDGNGHGTHVAGTIAALNNSIGVLGVAPSAELYAVKVLGASGSGSVSSIAQGLEWAGNNGMHVANLSLGNPSPSATLEQAVNSATSRGVLVVAASGNSGAGSISYPARYANAMAVGATDQNNNRASFSQYGAGLDIVAPGVNVQSTEPGSTYASLNGTSMATPHVAGAAALVKQKNPSWSNVQIRNHLKNTATSLGSTNLYGSGLVNAFAATR

SEQ ID NO: 54964 - protein, 269 aa, Unidentified
AQSVPWGISRVQAPAAHNRGLTGFGVKVAVLDTGISTHPDLNIRGGASFVPGEPSTQDGNGHGTHVAGTIAALNNNIGVLGVAPSAELYAVKVLGASGSGSVSSIAQGLEWAGNNGMHVANLSLGSPSPSATLEQAVNSATSRGVLVVAASGNSGAGSISYPARYANAMAVGATDQNNNRASFSQYGAGLDIVAPGVNVQSTYPGSAYASENGTSMATPHVAGAAALVKQKNPSWSNVQIRNHLKNTATSLGSTNLYGSGLVNAEAATR

SEQ ID NO: 54965 - protein, 269 aa, Unidentified
AQSVPWGISRVQAPAAHNRGLTGSGVKVAVLDTGISTHPDLNIRGGASFVPGEPSTQDGNGHGTHVAGTIAALNNSIGVLGVAPSAELYAVKVLPATGSGALSSIAQGLEWAGNNGMHVANLSLGSPSPSATLEQAVNSATSRGVLVVAASGNSGAGSISYPARYANAMAVGATDQNNNRASFSQYGAGLDIVAPGVNVQSTYPGSTYASLNGTSMATPHVAGAAALVKQKNPSWSNVQIRNHLKNTATSLGSTNLYGSGLVNAEAATR

SEQ ID NO: 54966 - protein, 269 aa, Unidentified
AQSVPWGISRVQAPAAHNRRLTGSGVKVAVLDTGISTHPDLNIRGGASFVPGEPSTQDGNGHGTHVAGTIAALNNSIGVLGVAPSAELYAVKVLGASGSGSVSSIAQGLEWAGNNGMHVANLSLGSPSPSATLEQAVNSATSRGVLVVAASGNSGADSISYPARYANAMAVGATDQNNNRADFSQYGAGLDIVAPGVNVQSTYPGSTYASLNGTSMATPHVAGAAALVKQKNPSWSNVRIRNHLKNTATSLGSTNLYGSGLVNAEAATR

SEQ ID NO: 54967 - protein, 269 aa, Unidentified
AQSVPWGISRVQAPAAHNRGLTGGGVKVAVLDTGISTHPDLNIRGGASFVPGEPSTQDGNGHGTHVAGTIAALNNSIGVLGVAPSAELYAVKVLAASGQGSVSSIAQGLEWAGNNGMHVANLSLGAPSPSATLEQAVNSATSRGVLVVAASGNSGAGSISYPARYANAMAVGATDQNNNRADFSQYGAGLDIVAPGVNVQSTYPGSTYASLNGTSSATPHVAGAAALVKQKNPSWSNVQIRNHLKNTATSLGSTNLYGSGLVNAEAATR

SEQ ID NO: 54968 - protein, 269 aa, Unidentified
AQSVPWGISRVQAPAAHNRGLTGSGVKVAVLDTGISTHPDLNIRGGASFVPGEPSTQDGNGHGTHVAGTIAALNNDIGVLGVAPSAELYAVKVLGASGSGSVSSIAQGLEWAGNNDMHVANLSLGSPSPSATLEQAVNSATSRGVLVVAASGNSGADSISYPARYANAMAVGATDQNNNRADFSQYGAGLDIVAPGVNVQSTYPGSTYASLNGTSMATPHVAGAAALVKQKNPSWSNVQIRNHLKNTATSLGSTNLYGSGLVNAEAATR

SEQ ID NO: 54969 - protein, 269 aa, Unidentified
AQSVPWGISRVQAPAAHNRRLTGSGVKVAVLDTGISTHPDLNIRGGASFVPGEPSTQDGNGHGTHVAGTIAALNNSIGVLGVAPSAELYAVKVLGASGSGSVSSIAQGLEWAGNNGMHVANLSLGSPSPSATLEQAVNSATSRGVLVVAASGNSGADSISYPARYANAMAVGATDQNNNRADFSQYGAGLDIVAPGVNVQSTYPGSTYASLNGTSMATPHVAGAAALVKQKNPSWSNVQIRNRLKNTATSLGSTNLYGSGLVNAEAATR

SEQ ID NO: 54970 - protein, 269 aa, Bacillus lentus
AQSVPWGISRVQAPAAHNRGLTGSGVKVAVLDTGISTHPDLNIRGGASFVPGEPSTQDGNGHGTHVAGTIAALNNSIGVLGVAPSAELYAVKVLGASGSGSVSSIAQGLEWAGNNGMHVANLSLGSPSPSATLEQAVNSATSRGVLVVAASGNSGAGSISAPAAYVNVMAVGATDQNNNRASFSQYGAGLDIVAPGVNVQSTYPGSTYASLNGTSMATPHVAGAAALVKQKNPSWSNVQIRNHLKNTATSLGSTNLYGSGLVNAEAATR

SEQ ID NO: 54971 - protein, 269 aa, Unidentified
AQSVPWGISRVQAPAAHNRGLTGSGVKVAVLDTGISTHPDLNIRGGASFVPGEPSTQDGNGHGTHVAGTIAALNNSIGVLGVAPSAELYAVKVLPQSGSAGVSSIAQGLEWAGNNGMHVANLSLGSPSPSATLEQAVNSATSRGVLVVAASGNSGAGSISYPARYANAMAVGATDQNNNRASFSQYGAGLDIVAPGVNVQSTYPGSTYASLNGTSMATPHVAGAAALVKQKNPSWSNVQIRNHLKNTATSLGSTNLYGSGLVNAEAATR

SEQ ID NO: 54972 - protein, 269 aa, Unidentified
AQSVPWGISRVQAPAAHNRGLTGSGVKVAVLDTGISTHPDLNIRGGASFVPGEPSTQDGNGHGTHVAGTIAALNNSIGVLGVAPSAELYAVKVLPATGSGGISSIAQGLEWAGNNGMHVANLSLGSPSPSATLEQAVNSATSRGVLVVAASGNSGAGSISYPARYANAMAVGATDQNNNRASFSQYGAGLDIVAPGVNVQSTYPGSTYASLNGTSMATPHVAGAAALVKQKNPSWSNVQIRNHLKNTATSLGSTNLYGSGLVNAEAATR

SEQ ID NO: 54973 - protein, 269 aa, Unidentified
AQSVPWGISRVQAPAAHNRGLTGSGVKVAVLDTGISTHPDLNIRGGASFVPGEPSTQDGNGHGTHVAGTIAALDNSIGVLGVAPSAELYAVKVLGASGSGAISSIARGLEWAGNNGMHVANLSLGSPSPSATLEQAVNSATSRGVLVVAASGNSGAGSISYPARYANAMAVGATDQNNNRASFSQYGAGLDIVAPGVNVQSTYPGSTYASLNGTSMATPHVAGAAALVKQKNPSWSNVQIRNHLKNTATSLGSTNLYGSGLVNAEAATR

SEQ ID NO: 54974 - protein, 269 aa, Unidentified
AQSVPWGISRVQAPAAHNRKLTGFGVKVAVLDTGISTHPDLNIRGGASFVPGEPSTQDGNGHGTHVAGTIAALNNNIGVLGVAPSAELYAVKVLGASGSGSVSSIAQGLEWAGNNGMHVANLSLGDPSPSATLEQAVNSATSRGVLVVAASGNSGAGSISYPARYANAMAVGATDQNNNRASFSQYGAGLDIVAPGVNVQSTYPGSTYASLNGTSMATPHVAGAAALVKQKNPSWSNVQIRNHLKNTATSLGSTNLYGSGLVNAEAATR

SEQ ID NO: 54975 - protein, 269 aa, Unidentified
AQSVPWGISRVQAPAAHNRGLAGSGVKVAVLDTGISTHPDLNIRGGASFVPGEPSTQDGNGHGTHVAGTIAALNNSIGVLGVAPSAELYAVKVLGASGSGSVSSIAQGLEWAGLNRMHVANLSLGIPSPSATLEQAVNSATSRGVLVVAASGNSGAGSISYPARYANAMAVGATDQNNNRASFSQYGAGLDIVAPGVNVQSTYPGSTYASLNGTSMATPHVAGAAALVKQKNPSWSNVQIRNHLKNTATSLGSTNLYGSGLVNAEAATR

SEQ ID NO: 54976 - protein, 269 aa, Unidentified
AQSVPWGISRVQAPAAHNRGLTGSGVKVAVLDTGISTHPDLNIRGGASFVPGEPSTQDGNGHGTHVAGTIAALNNSIGVLGVAPSAELYAVKVLGQAGAGSISSIAQGLEWAGNNGMHVANLSLGSPSPSATLEQAVNSATSRGVLVVAASGNSGAGSISYPARYANAMAVGATDQNNNRASFSQYGAGLDIVAPGVNVQSTYPGSTYASLNGTSMATPHVAGAAALVKQKNPSWSNVQIRNHLKNTATSLGSTNLYGSGLVNAEAATR

SEQ ID NO: 54977 - protein, 269 aa, Unidentified
AQSVPWGISRVQAPAAHNRRLTGSGVKVAVLDTGISTHPDLRIRGGASFVPGEPSTQDGNGHGTHVAGTIAALNNSIGVLGVAPSAELYAVKVLGASGSGSVSSIAQGLEWAGNNGMHVANLSLGSPSPSATLEQAVNSATSRGVLVVAASGNSGAGSISYPARYANAMAVGATDQNNNRASFSQYGAGLDIVAPGVNVQSTYPGSTYASLNGTSMATPHVAGAAALVKQKNPSWRNVQIRNRLKNTATSLGSTNLYGSGLVNAEAATR

SEQ ID NO: 54978 - protein, 269 aa, Unidentified
AQSVPWGISRVQAPAAHNRGLTGSGVKVAVLDTGISTHPDLNIRGGASFVPGEPSTQDGNGHGTHVAGTIAALNNSIGVLGVAPSAELYAVKVLPQGGSGSLSSIAQGLEWAGNNGMHVANLSLGSPSPSATLEQAVNSATSRGVLVVAASGNSGAGSISYPARYANAMAVGATDQNNNRASFSQYGAGLDIVAPGVNVQSTYPGSTYASLNGTSMATPHVAGAAALVKQKNPSWSNVQIRNHLKNTATSLGSTNLYGSGLVNAEAATR

SEQ ID NO: 54979 - protein, 269 aa, Unidentified
AQSVPWGISRVQAPAAHNRGLTGRGVKVAVLDTGISTHPDLNIRGGASFVPGEPSTQDGNGHGTHVAGTIAALDNSIGVLGVAPSAELYAVKVLGASGSGAVSSIAQGLEWAGNNGMHVANLSLGSPSPSATLEQAVNSATSRGVLVVAASGNSGAGSISYPARYANAMAVGATDQNNNRASFSQYGAGLDIVAPGVNVQSTYPGSTYASLNGTSMATPHVAGAAALVKQKNPSWSNVRIRNHLKNTATSLGSTNLYGSGLVNAEAATR

SEQ ID NO: 54980 - protein, 269 aa, Unidentified
AQSVPWGISRVQAPAAHNRGLTGSGVKVAVLDTGISTHPDLNIRGGASFVPGEPSTQDGNGHGTHVAGTIAALDNSIGVLGVAPSAELYAVKVLGASGSGAISSIAQGLEWAGNNGMHVANLSLGSPSPSATLEQAVNSATSRGVLVVAASGNSGAGSISYPARYANAMAVGATDQQNNRASFSQYGAGLDIVAPGVNVQSTYPGSTYASLNGTSMATPHVAGAAALVKQKNPSWSNVQIRNHLKNTATSLGSTNLYGSGLVNAEAATR

SEQ ID NO: 54981 - protein, 269 aa, Unidentified
AQSVPWGISRVQAPAAHNRGLTGSGVKVAVLDTGISTHPDLNIRGGASFVPGEPSTQDGNGHGTHVAGTIAALNNSIGVLGVAPSAELYAVKVLGQGGGGSLSSIAQGLEWAGNNGMHVANLSLGSPSPSATLEQAVNSATSRGVLVVAASGNSGAGSISYPARYANAMAVGATDQNNNRASFSQYGAGLDIVAPGVNVQSTYPGSTYASLNGTSMATPHVAGAAALVKQKNPSWSNVQIRNHLKNTATSLGSTNLYGSGLVNAEAATR

SEQ ID NO: 54982 - protein, 269 aa, Unidentified
AQSVPWGISRVQAPAAHNRKLTGSGVKVAVLDTGISTHPDLNIRGGASFVPGEPSTQDGEGHGTHVAGTIAALNNSIGVLGVAPSAELYAVKVLGASGNGSVSSIAQGLEWAGLNGMHVANLSLGSPSPSATLEQAVNSATSRGVLVVAASGNSGAGSISYPARYANAMAVGATDQNNNRASFSQYGAGLDIVAPGVNVQSTYPGSTYASLNGTSMATPHVAGAAALVKQKNPSWSNVQIRNHLKNTATSLGSTNLYGSGLVNAEAATR

SEQ ID NO: 54983 - protein, 269 aa, Unidentified
AQSVPWGISRVQAPAAHNRRLTGSGVKVAVLDTGISTHPDLNIRGGASFVPGEPSTQDGNGHGTHVAGTIAALNNSIGVLGVAPSAELYAVKVLGASGAGSVSSIAQGLEWAGNNGMHVANLSLGSPSPSATLEQAVNSATSRGVLVVAASGNSGAGSISYPARYANAMAVGATDQNNNRASFSQYGAGLDIVAPGVNVQSTYPQSAYASLNGTSMATPHVAGAAALVKQKNPSWSNVQIRNHLKNTATSLGSTNLYGSGLVNAEAATR

SEQ ID NO: 54984 - protein, 269 aa, Unidentified
AQSVPWGISRVQAPAAHNRGLTGSGVKVAVLDTGISTHPDLRIRGGASFVPGEPSTQDGNGHGTHVAGTIAALNNSIGVLGVAPSAELYAVKVLGASGAGSVSSIAQGLEWAGNNGMHVANLSLGSPSPSATLEQAVNSATSRGVLVVAASGNSGAGSISYPARYANAMAVGATDQNNNRASFSQYGAGLDIVAPGVNVQSTYIGSAYASLNGTSMATPHVAGAAALVKQKNPSWSNVQIRNHLKNTATSLGSTNLYGSGLVNAEAATR

SEQ ID NO: 54985 - protein, 269 aa, Unidentified
AQSVPWGISRVQAPAAHNRGLTGSGVKVAVLDTGISTHPDLNIRGGASFVPGEPSTQDGNGHGTHVAGTIAALNNNIGVLGVAPSAELYAVKVLSASGGGSVSSIAGGLEWAGNNGMHVANLSLGSPSPSATLEQAVNSATSRGVLVVAASGNSGAGSISYPARYANAMAVGATDQNNNRASFSQYGAGLDIVAPGVNVQSTYPGSTYASLNGTSMATPHVAGAAALVKQKNPSWSNVQIRNHLKNTATSLGSTNLYGSGLVNAEAATR

SEQ ID NO: 54986 - protein, 269 aa, Unidentified
AQSVPWGISRVQAPAAHNRGLTGSGVKVAVLDTGISTHPDLNIRGGASFVPGEPSTQDGNGHGTHVAGTIAALNNSIGVLGVAPSAELYAVKVLPASGAASISSIAQGLEWAGNNGMHVANLSLGSPSPSATLEQAVNSATSRGVLVVAASGNSGAGSISYPARYANAMAVGATDQNNNRASFSQYGAGLDIVAPGVNVQSTYPGSTYASLNGTSMATPHVAGAAALVKQKNPSWSNVQIRNHLKNTATSLGSTNLYGSGLVNAEAATR

SEQ ID NO: 54987 - protein, 269 aa, Unidentified
AQSVPWGISRVQAPAAHNRGLTGRGVKVAVLDTGISTHPDLNIRGGASFVPGEPSTQDGNGHGTHVAGTIAALNNDIGVLGVAPSAELYAVKVLGASGSGSVSSIAQGLEWAGNNDMHVANLSLGSESPSATLEQAVNSATSRGVLVVAASGNSGAGSISYPARYANAMAVGATDQNNNRASFSQYGAGLDIVAPGVNVQSTYPGSTYASLNGTSMATPHVAGAAALVKQKNPSWSNVQIRNHLKNTATSLGSTNLYGSGLVNAEAATR

SEQ ID NO: 54988 - protein, 269 aa, Unidentified
AQSVPWGISRVQAPAAHNRRLTGSGVKVAVLDTGISAHPDLRIRGGASFVPGEPSTQDGNGHGTHVAGTIAALNNSIGVLGVAPSAELYAVKVLGASGAGSVSSIAQGLEWAGNNGMHVANLSLGSPSPSATLEQAVNSATSRGVLVVAASGNSGAGSISYPARYANAMAVGATDQNNNRASFSQYGAGLDIVAPGVNVQSTYPGSTYASLNGTSMATPHVAGAAALVKQKNPSWSNVQIRNHLKNTATSLGSTNLYGSGLVNAEAATR

SEQ ID NO: 54989 - protein, 269 aa, Unidentified
AQSVPWGISRVQAPAAHNRRLTGSGVKVAVLDTGISTHPDLNIRGGASFVPGEPSTQDGNGHGTHVAGTIAALNNDIGVLGVAPSAELYAVKVLGASGSGSVSSIAQGLEWAGNNDMHVANLSLGSPSPSATLEQAVNSATSRGVLVVAASGNSGADSISYPARYANAMAVGATDQNNNRASFSQYGAGLDIVAPGVNVQSTYPGSTYASLNGTSMATPHVAGAAALVKQKNPSWSNVQIRNHLKNTATSLGSTNLYGSGLVNAEAATR

SEQ ID NO: 54990 - protein, 269 aa, Unidentified
AQSVPWGISRVQAPAAHNRGLTGRGVKVAVLDTGISTHPDLNIRGGASFVPGEPSTQDGEGHGTHVAGTIAALNNSIGVLGVAPSAELYAVKVLGASGSGSVSSIAQGLEWAGNNGMHVANLSLGIPSPSATLEQAVNSATSRGVLVVAASGNSGAGSISYPARYANAMAVGATDQNNNRADFSQYGAGLDIVAPGVNVQSTYPGSTYASLNGTSMATPHVAGAAALVKQKNPSWSNVQIRNHLKNTATSLGSTNLYGSGLVNAEAATR

SEQ ID NO: 54991 - protein, 269 aa, Unidentified
AQSVPWGISRVQAPAAHNRGLTGRGVKVAVLDSGISTHPDLNIRGGASFVPGEPSTQDGNGHGTHVAGTIAALNNSIGVLGVAPSAELYAVKVLGASGSGSVSSIAQGLEWAGLNGMHVANLSLGSPSPSATLEQAVNSATSRGVLVVAASGNSGEGSISYPARYANAMAVGATDQNNNRASFSQYGAGLDIVAPGVNVQSTYPGSTYASLNGTSMATPHVAGAAALVKQKNPSWSNVQIRNHLKNTATSLGSTNLYGSGLVNAEAATR

SEQ ID NO: 54992 - protein, 269 aa, Unidentified
AQSVPWGISRVQAPAAHNRGLTGSGVKVAVLDTGISTHPDLNIRGGASFVPGEPSTQDGNGHGTHVAGTIAALNNSIGVLGVAPSAELYAVKVLGASGSGSVSSIAQGLEWAGNNGMHVANLSLGNPSPSATLEQAVNSATSRGVLVVAASGNSGEGSISYPARYANAMAVGATDQNNNHASFSQYGAGLDIVAPGVNVQSTYPGSTYASLNGTSMATPHVAGAAALVKQKNPSWSNVQIRNRLKNTATSLGSTNLYGSGLVNAEAATR

SEQ ID NO: 54993 - protein, 269 aa, Unidentified
AQSVPWGISRVQAPAAHNRGLTGSGVKVAVLDTGISTHPDLNIRGGASFVPGEPSTQDGEGHGTHVAGTIAALNNSIGVLGVAPSAELYAVKVLGASGSGSVSSIAQGLEWAGNNGMHVANLSLGSPSPSATLEQAVNSATSRGVLVVAASGNSGAESISYPARYANAMAVGATDQNNNRASFSQYGAGLDIVAPGVNVQSTYPGSTYASLNGTSMATPHVAGAAALVKQKNPSWSNVQIRNRLKNTATSLGSTNLYGSGLVNAFAATR

SEQ ID NO: 54994 - protein, 269 aa, Unidentified
AQSVPWGISRVQAPAAHNRGLTGSGVKVAVLDTGISTHPDLNIRGGASFVPGEPSTQDGEGHGTHVAGTIAALNNSIGVLGVAPSAELYAVKVLGASGSGSVSSIAQGLEWAGNNRMHVANLSLGSPSPSATLEQAVNSATSRGVLVVAASGNSGAGSIDYPARYANAMAVGATDQNNNRADFSQYGAGLDIVAPGVNVQSTYPGSTYASLNGTSMATPHVAGAAALVKQKNPSWSNVQIRNHLKNTATSLGSTNLYGSGLVNAEAATR

SEQ ID NO: 54995 - protein, 269 aa, Unidentified
AQSVPWGISRVQAPAAHNRGLTGSGVKVAVLDTGISTHPDLNIRGGASFVPGEPSTQDGNGHGTHVAGTIAALNNSIGVLGVAPSAELYAVKVLGASGSGSVSSIAQGLEWAGNNGMHVANLSLGNPSPSATLEQAVNSATSRGVLVVAASGNSGEGSISYPARYANAMAVGATDQNNNRADFSQYGAGLDIVAPGVNVQSTYPGSTYASLNGTSMATPHVAGAAALVKQKNPSWSNVQIRNHLKNTATSLGSTNLYGSGLVNAFAATR

SEQ ID NO: 54996 - protein, 269 aa, Unidentified
AQSVPWGISRVQAPAAHNRGLTGSGVKVAVLDTGISTHPDLNIRGGASFVPGEPSTQDGEGHGTHVAGTIAALNNSIGVLGVAPSAELYAVKVLGASGSGSVSSIAQGLEWAGNNGMHVANLSLGSPSPSATLEQAVNSATSRGVLVVAASGNSGEGSISYPARYANAMAVGATDQNNNHASFSQYGAGLDIVAPGVNVQSTYPGSTYASLNGTSMATPHVAGAAALVKQKNPSWSNVQIRNHLKNTATSLGSTNLYGSGLVNAFAATR

SEQ ID NO: 54997 - protein, 269 aa, Unidentified
AQSVPWGISRVQAPAAHNRGLTGSGVKVAVLDTGISTHPDLNIRGGASFVPGEPSTQDGEGHGTHVAGTIAALNNSIGVLGVAPSAELYAVKVLGASGSGSVSSIAQGLEWAGNNGMHVANLSLGSPSPSATLEQAVNSATSRGVLVVAASGNSGEGSISYPARYANAMAVGATDQNNNHASFSQYGAGLDIVAPGVNVQSTYPGSTYASLNGTSMATPHVAGAAALVKQKNPSWSNVQIRNRLKNTATSLGSTNLYGSGLVNAEAATR

SEQ ID NO: 54998 - protein, 269 aa, Unidentified
AQSVPWGISRVQAPAAHNRGLTGSGVKVAVLDTGISTHPDLNIRGGASFVPGEPSTQDGNGHGTHVAGTIAALNNSIGVLGVAPSAELYAVKVLGASGSGSLSSIAQGLEWAGNNGMHVANLSLGNPSPSATLEQAVNSATSRGVLVVAASGNSGAESISYPARYANAMAVGATDQNNNRASFSQYGAGLDIVAPGVNVQSTYPGSTYASLNGTSMATPHVAGAAALVKQKNPSWSNVQIRNHLKNTATSLGSTNLYGSGLVNAFAATR

SEQ ID NO: 54999 - protein, 269 aa, Unidentified
AQSVPWGISRVQAPAAHNRGLTGSGVKVAVLDTGISTHPDLNIRGGASFVPGEPSTQDGEGHGTHVAGTIAALNNRIGVLGVAPSAELYAVKVLGASGSGSVSSIAQGLEWAGNNGMHVANLSLGSPSPSATLEQAVNSATSRGVLVVAASGNSGAGSISYPARYANAMAVGATDQNNNRASFSQYGAGLDIVAPGVNVQSTYPGSTYASLNGTSMATPHVAGAAALVKQKNPSWSNVRIRDHLKNTATSLGSTNLYGSGLVNAEAATR

SEQ ID NO: 55000 - protein, 269 aa, Unidentified
AQSVPWGISRVQAPAAHNRGLTGSGVKVAVLDTGISTHPDLNIRGGASFVPGEPSTQDGEGHGTHVAGTIAALNNSIGVLGVAPSAELYAVKVLGASGSGSVSSIAQGLEWAGNNGMHVANLSLGNPSPSATLEQAVNSATSRGVLVVAASGNSGAESISYPARYANAMAVGATDQNNNRASFSQYGAGLDIVAPGVNVQSTYPGSTYASLNGTSMATPHVAGAAALVKQKNPSWSNVQIRNRLKNTATSLGSTNLYGSGLVNAEAATR

SEQ ID NO: 55001 - protein, 269 aa, Unidentified
AQSVPWGISRVQAPAAHNRKLTGSGVKVAVLDTGISTHPDLNIRGGASFVPGEPSTQDGEGHGTHVAGTIAALNNSIGVLGVAPSAELYAVKVLGASGSGSVSSIAQGLEWAGNNGMHVANLSLGSPSPSATLEQAVNSATSRGVLVVAASGNSGAGSISYPARYANAMAVGATDQNNNRADFSQYGAGLDIVAPGVNVQSTYPGSAYASLNGTSMATPHVAGAAALVKQKNPSWSNVQIRNHLKNTATSLGSTNLYGSGLVNAEAATR

SEQ ID NO: 55002 - protein, 269 aa, Unidentified
AQSVPWGISRVQAPAAHNRGLAGSGVKVAVLDTGISTHPDLNIRGGASFVPGEPSTQDGNGHGTHVAGTIAALNNSIGVLGVAPSAELYAVKVLGASGSGAVSSIAQGLEWAGNNGMHVANLSLGNPSPSATLEQAVNSATSRGVIVVAASGNSGAGSISYPARYANAMAVGATDQNNNRASFSQYGAGLDIVAPGVNVQSTYPGSTYASLNGTSMATPHVAGAAALVKQKNPSWSNVQIRNHLKNTATSLGSTNLYGSGLVNAEAATR

SEQ ID NO: 55003 - protein, 269 aa, Unidentified
AQSVPWGISRVQAPAAHNRGLAGSGVKVAVLDSGISTHPDLNIRGGASFVPGEPSTQDGEGHGTHVAGTIAALNNSIGVLGVAPSAELYAVKVLGASGSGSVSSIAQGLEWAGNNGMHVANLSLGIPSPSATLEQAVNSATSRGVLVVAASGNSGAGSISYPARYANAMAVGATDQNNNRASFSQYGAGLDIVAPGVNVQSTYPGSTYASLNGTSMATPHVAGAAALVKQKNPSWSNVQIRNHLKNTATSLGSTNLYGSGLVNAEAATR

SEQ ID NO: 55004 - protein, 269 aa, Unidentified
AQSVPWGISRVQAPAAHNRGLAGSGVKVAVLDTGISTHPDLNIRGGASFVPGEPSTQDGNGHGTHVAGTIAALNNSIGVLGVAPSAELYAVKVLGASGSGSVSSIAQGLEWAGNNRMHVANLSLGSPSPSATLEQAVNSATSRGVLVVAASGNSGAGSIDYPARYANAMAVGATDQNNNRADFSQYGAGLDIVAPGVNVQSTYPGSTYASLNGTSMATPHVAGAAALVKQKNPSWSNVQIRNHLKNTATSLGSTNLYGSGLVNAEAATR

SEQ ID NO: 55005 - protein, 269 aa, Unidentified
AQSVPWGISRVQAPAAHNRGLTGSGVKVAVLDTGISTHPDLNIRGGASFVPGEPSTQDGNGHGTHVAGTIAALNNSIGVLGVAPSAELYAVKVLAASGNGSVSSIAGGLEWAGNNGMHVANLSLGAPSPSATLEQAVNSATSRGVLVVAASGNSGAGSISYPARYANAMAVGATDQNNNRASFSQYGAGLDIVAPGVNVQSTYPGSTYASLNGTSMATPHVAGAAALVKQKNPSWSNVQIRNHLKNTATSLGSTNLYGSGLVNAEAATR

SEQ ID NO: 55006 - protein, 269 aa, Unidentified
AQSVPWGISRVQAPAAHRRGLTGRGVKVAVLDTGISTHPDLDIRGGASFVPGEPSTQDGNGHGTHVAGTIAALNNSIGVLGVAPSAELYAVKVLGASGSGSVSSIAQGLEWAGNNGMHVANLSLGSPSPSATLEQAVNSATSRGVLVVAASGNSGAGSISYPARYANAMAVGATDQNNNRASFSQYGAGLDIVAPGVNVQSTYPGSTYASLNGTSMATPHVAGAAALVKQKNPSWSNVQIRNRLKNTATSLGSTNLYGSGLVNAEAATR

SEQ ID NO: 55007 - protein, 269 aa, Unidentified
AQSVPWGISRVQAPASHNRGLTGSGVKVAVLDTGISTHPDLNIRGGASFVPGEPSTQDGNGHGTHVAGTIAALNNSIGVLGVAPSAELYAVKVLGASGSGSISSIAQGLEWAGNNGMHVANLSLGNPSPSATLEQAVNSATSRGVIVVAASGNSGAGSISYPARYANAMAVGATDQNNNRASFSQYGAGLDIVAPGVNVQSTYPGSTYASLNGTSMATPHVAGAAALVKQKNPSWSNVQIRNHLKNTATSLGSTNLYGSGLVNAEAATR

SEQ ID NO: 55008 - protein, 269 aa, Unidentified
AQSVPWGISRVQAPAAHNRGLTGSGVKVAVLDTGISTHPDLNIRGGASFVPGEPSTQDGNGHGTHVAGTIAALNNSIGVLGVAPSAELYAVKVLPFSGSGAISSIAQGLEWAGNNGMHVANLSLGSPSPSATLEQAVNSATSRGVLVVAASGNSGAGSISYPARYANAMAVGATDQNNNRASFSQYGAGLDIVAPGVNVQSTYPGSTYASLNGTSMATPHVAGAAALVKQKNPSWSNVQIRNHLKNTATSLGSTNLYGSGLVNAEAATR

SEQ ID NO: 55009 - protein, 269 aa, Unidentified
AQSVPWGISRVQAPAAHNRGLTGFGVKVAVLDTGISTHPDLNIRGGASFVPGEPSTQDGEGHGTHVAGTIAALNNSIGVLGVAPSAELYAVKVLGASGSGSVSSIAQGLEWAGLNGMHVANLSLGSPSPSATLEQAVNSATSRGVLVVAASGNSGAGSISYPARYANAMAVGATDQNNNRADFSQYGAGLDIVAPGVNVQSTYPGSTYASLNGTSMATPHVAGAAALVKQKNPSWSNVQIRNHLKNTATSLGSTNLYGSGLVNAEAATR

SEQ ID NO: 55010 - protein, 269 aa, Unidentified
AQSVPWGISRVQAPAAHNRGLTGRGVKVAVLDTGISTHPDLRIRGGASFVPGEPSTQDGNGHGTHVAGTIAALNNSIGVLGVAPSAELYAVKVLGASGSGSVSSIAQGLEWAGANGMHVANLSLGSPSPSATLEQAVNSATSRGVLVVAASGNSGAGSISYPARYANAMAVGATDQNNNRASFSQYGAGLDIVAPGVNVQSTYPGSTYFSLNGTSMATPHVAGAAALVKQKNPSWSNVQIRNHLKNTATSLGSTNLYGSGLVNAEAATR

SEQ ID NO: 55011 - protein, 269 aa, Unidentified
AQSVPWGISRVQAPASHNRGLTGSGVKVAVLDTGISTHPDLNIRGGASFVPGEPSTQDGNGHGTHVAGTIAALNNSIGVLGVAPSAELYAVKVLGASGGGAVSSIAQGLEWAGNNGMHVANLSLGSPSPSATLEQAVNSATSRGVIVVAASGNSGAGSISYPARYANAMAVGATDQNNNRASFSQYGAGLDIVAPGVNVQSTYPGSTYASLNGTSMATPHVAGAAALVKQKNPSWSNVQIRNHLKNTATSLGSTNLYGSGLVNAEAATR

SEQ ID NO: 55012 - protein, 269 aa, Unidentified
AQSVPWGISRVQAPAAHNRGLTGSGVKVAVLDTGISTHEDLNIRGGASFVPGEPSTQDGNGHGTHVAGTIAALNNSIGVLGVAPSADLYAVKVLGASGRGSVSSIAQGLEWAGNNGMHVANLSLGTPSPSATLEQAVNSATSRGVLVVAASGNSGAGSISYPARYANAMAVGATDQNNNRASFSQYGAGLDIVAPGVNVQSTYPGSTYASLNGTSMATPHVAGAAALVKQKNPSWSNVQIRNHLKNTATSLGSTNLYGSGLVNAEAATR

SEQ ID NO: 55013 - protein, 269 aa, Unidentified
AQSVPWGISRVQAPAAHNRKLTGSGVKVAVLDTGISTHPDLNIRGGASFVPGEPSTQDGNGHGTHVAGTIAALNNNIGVLGVAPSAELYAVKVLGASGSGSVSSIAQGLEWAGNNRMHVANLSLGDPSPSATLEQAVNSATSRGVLVVAASGNSGAGSISYPARYANAMAVGATDQNNNRASFSQYGAGLDIVAPGVNVQSTYPGSTYASLNGTSMATPHVAGAAALVKQKNPSWSNVQIRNHLKNTATSLGSTNLYGSGLVNAEAATR

SEQ ID NO: 55014 - protein, 269 aa, Unidentified
AQSVPWGISRVQAPAAHNRRLTGRGVKVAVLDTGISTHPDLDIRGGASFVPGEPSTQDGNGHGTHVAGTIAALNNSIGVLGVAPSAELYAVKVLGASGSGSVSSIAQGLEWAGNNGMHVANLSLGSPSPSATLEQAVNSATSRGVLVVAASGNSGAGSISYPARYANAMAVGATDQNNNRASFSQYGAGLDIVAPGVNVQSTYPGSTYASLNGTSMATPHVAGAAALVKQKNPSWRNVQIRNHLKNTATSLGSTNLYGSGLVNAEAATR

SEQ ID NO: 55015 - protein, 269 aa, Unidentified
AQSVPWGISRVQAPAAHNRGLTGSGVKVAVLDTGISTHPDLNIRGGASFVPGEPSTQDGNGHGTHVAGTIAALNNNIGVLGVAPSAELYAVKVLGASGGGSVSSIAQGLEWAGNNGMHVANLSLGAPSPSATLEQAVNSATSRGVLVVAASGNSGAGSISYPARYANAMAVGATDQNNNRASFSQYGAGLDIVAPGVNVQSTYPGSTYASQNGTSMATPHVAGAAALVKQKNPSWSNVQIRNHLKNTATSLGSTNLYGSGLVNAEAATR

SEQ ID NO: 55016 - protein, 269 aa, Unidentified
AQSVPWGIARVQAPAAHNRGLTGRGVKVAVLDTGISTHPDRNIRGGASFVPGEPSTQDGNGHGTHVAGTIAALNNSIGVLGVAPSAELYAVKVLGASGSGSVSSIAQGLEWAGNNGMHVANLSLGSPSPSATLEQAVNSATSRGVLVVAASGNSGAGSISYPARYANAMAVGATDQNNNRASFSQYGAGLDIVAPGVNVQSTYPGSTYASLNGTSMATPHVAGAAALVKQKNPSWSNRQIRNHLKNTATSLGSTNLYGSGLVNAEAATR

SEQ ID NO: 55017 - protein, 269 aa, Unidentified
AQSVPWGISRVQAPAAHNRGLTGSGVKVAVLDSGISTHPDLNIRGGASFVPGEPSTQDGNGHGTHVAGTIAALNNSIGVLGVAPSAELYAVKVLGASGSGSVSSIAQGLEWAGNNRMHVANLSLGSPSPSATLEQAVNSATSRGVLVVAASGNSGAGSISYPARYANAMAVGATDQNNNRASFSQYGAGLDIVAPGVNVQSTAPGSTYASLNGTSMATPHVAGAAALVKQKNPSWSFVQIRNHLKNTATSLGSTNLYGSGLVNAEAATR

SEQ ID NO: 55018 - protein, 269 aa, Unidentified
AQSVPWGISRVQAPAAHNRGLTGSGVKVAVLDTGISTHPDLNIRGGASFVPGEPSTQDGEGHGTHVAGTIAALNNNIGVLGVAPSAELYAVKVLGASGSGSVSSIAQGLEWAGNNGMHVANLSLGLPSPSATLEQAVNSATSRGVLVVAASGNSGAGSISYPARYANAMAVGATDQNNNRASFSQYGAGLDIVAPGVNVQSTYPGSTYASLNGTSMATPHVAGAAALVKQKNPRWSNVQIRNHLKNTATSLGSTNLYGSGLVNAEAATR

SEQ ID NO: 55019 - protein, 269 aa, Unidentified
AQSVPWGISRVQAPAAHNRGLTGSGVKVAVLDTGISTHPDLNIRGGASFVPGEPSTQDGNGHGTHVAGTIAALNNNIGVLGVAPSAELYAVKVLGASGSGSVSSIAQGLEWAGNNRMHVANLSLGDPSPSATLEQAVNSATSRGVLVVAASGNSGAGSISYPARYANAMAVGATDQNNNRASFSQYGAGLDIVAPGVNVQSTYPGSAYASLNGTSMATPHVAGAAALVKQKNPSWSNVQIRNHLKNTATSLGSTNLYGSGLVNAEAATR

SEQ ID NO: 55020 - protein, 269 aa, Unidentified
AQSVPWGISRVQAPAAHNRRLTGRGVKVAVLDTGISTHPDLNIRGGASFVPGEPSTQDGNGHGTHVAGTIAALNNSIGVLGVAPSAELYAVKVLGASGGGSVSSIAQGLEWAGNNGMHVANLSLGAPSPSATLEQAVNSATSRGVLVVAASGNSGAGSISYPARYANAMAVGATDQNNNRASFSQYGAGLDIVAPGVNVQSTYPGSTYASLNGTSMATPHVAGAAALVKQKNPSWSNVQIRNHLKNTATSLGSTNLYGSGLVNAEAATR

SEQ ID NO: 55021 - protein, 269 aa, Unidentified
AQSVPWGISRVQAPAAHNRGLTGRGVKVAVLDTGISTHPDLNIRGGASFVPGEPSTQDGEGHGTHVAGTIAALNNSIGVLGVAPSAELYAVKVLGASGSGSVSSIAQGLEWAGLNGMHVANLSLGIPSPSATLEQAVNSATSRGVLVVAASGNSGAGSISYPARYANAMAVGATDQNNNRASFSQYGAGLDIVAPGVNVQSTYPGSTYASLNGTSMATPHVAGAAALVKQKNPSWSNVQIRNHLKNTATSLGSTNLYGSGLVNAEAATR

SEQ ID NO: 55022 - protein, 269 aa, Unidentified
AQSVPWGISRVQAPAAHNRRLTGRGVKVAVLDTGISTHPDLNIRGGASFVPGEPSTQDGNGHGTHVAGTIAALNNSIGVLGVAPSAELYAVKVLGASGSGSVSSIAQGLEWAGANGMHVANLSLGSPSPSATLEQAVNSATSRGVLVVAASGNSGAGSISYPARYANAMAVGATDQNNNRASFSQYGAGLDIVAPGVNVQSTYPGSTYFSLNGTSMATPHVAGAAALVKQKNPSWSNVQIRNHLKNTATSLGSTNLYGSGLVNAEAATR

SEQ ID NO: 55023 - protein, 269 aa, Unidentified
AQSVPWGISRVQAPAAHNRGLTGSGVKVAVLDTGISTHPDLNIRGGASFVPGEPSTQDGNGHGTHVAGTIAALNNNIGVLGVAPSAELYAVKVLGASGNGSVSSIANGLEWAGNNGMHVANLSLGSPSPSATLEQAVNSATSRGVLVVAASGNSGAGSISYPARYANAMAVGATDQNNNRADFSQYGAGLDIVAPGVNVQSTYPGSTYASQNGTSSATPHVAGAAALVKQKNPSWSNVQIRNHLKNTATSLGSTNLYGSGLVNAEAATR

SEQ ID NO: 55024 - protein, 269 aa, Bacillus subtilis
AQSVPWGISRVQAPAAHNRGLTGSGVKVAVLDTGISTHPDLNIRGGASFVPGEPSTQDGNGHGTHVAGTIAALNNSIGVLGVAPSAELYAVKVLGASGSGSVSSIAQGLEWAGNNGMHVANLSLGSPSPSATLEQAVNSATSRGVLVVAASGNSGAGSISYPARYANAMAVGATDQNNNRASFSQYGAGLDIVAPGVNVQSTYPGSTYASLNGTSMATPHVAGAAALVRQRNPSWSNVQIRNHLNNTATSLGSTNLFGSGLVNAEAATR

SEQ ID NO: 55025 - protein, 269 aa, Unidentified
AQSVPWGISRVQAPAAHNRGLTGSGVKVAVLDTGISTHPDLNIRGGASFVPGEPSTQDGNGHGTHVAGTIAALNNSIGVLGVAPSAELYAVKVLGASGSGSLSSIAQGLEWAGNNGMHVANLSLGSPSPSATLEQAVNSATSRGVLVVAASGNSGEGSISYPARYANAMAVGATDQNNNHASFSQYGAGLDIVAPGVNVQSTYPGSTYASLNGTSMATPHVAGAAALVKQKNPSWSNVQIRNRLKNTATSLGSTNLYGSGLVNAEAATR

SEQ ID NO: 55026 - protein, 269 aa, Unidentified
AQSVPWGISRVQAPAAHNRGLTGFGVKVAVLDTGISTHPDLNIRGGASFVPGEPSTQDGNGHGTHVAGTIAALNNNIGVLGVAPSAELYAVKVLGASGSGSVSSIAQGLEWAGNNRMHVANLSLGSPSPSATLEQAVNSATSRGVLVVAASGNSGAGSIDYPARYANAMAVGATDQNNNRASFSQYGAGLDIVAPGVNVQSTYPGSTYASLNGTSMATPHVAGAAALVKQKNPSWSNVQIRNHLKNTATSLGSTNLYGSGLVNAEAATR

SEQ ID NO: 55027 - protein, 269 aa, Unidentified
AQSVPWGISRVQAPAAHNRKLTGSGVKVAVLDTGISTHPDLNIRGGASFVPGEPSTQDGEGHGTHVAGTIAALNNSIGVLGVAPSAELYAVKVLGASGSGSVSSIAQGLEWAGNNGMHVANLSLGIPSPSATLEQAVNSATSRGVLVVAASGNSGAGSISYPARYANAMAVGATDQNNNRASFSQYGAGLDIVAPGVNVQSTYPGSAYASLNGTSMATPHVAGAAALVKQKNPSWSNVQIRNHLKNTATSLGSTNLYGSGLVNAEAATR

SEQ ID NO: 55028 - protein, 269 aa, Unidentified
AQSVPWGISRVQAPAAYNRGLTGRGVKVAVLDSGISTHPDLNIRGGASFVPGEPSTQDGNGHGTHVAGTIAALNNSIGVLGVAWSAELYAVKVLGASGSGSVSSIAQGLEWAGNNGMHVANLSLGSPSPSATLEQAVNSATSRGVLVVAASGNSGAGSISYPARYANAMAVGATDQNNNRASFSQYGAGLDIVAPGVNVQSTYPGSTYASLNGTSMATPHVAGAAALVKQKNPSWSNVQIRNHLKNTATSLGSTNLYGSGLVNAEAATR

SEQ ID NO: 55029 - protein, 269 aa, Unidentified
AQSVPWGISRVQAPAAHNRKLTGSGVKVAVLDTGISTHPDLRIRGGASFVPGEPSTQDGEGHGTHVAGTIAALNNSIGVLGVAPSAELYAVKVLGASGSGSVSSIAQGLEWAGNNGMHVANLSLGSPSPSATLEQAVNSATSRGVLVVAASGNSGAGSISYPARYANAMAVGATDQNNNRASFSQYGAGLDIVAPGVNVQSTYPGSTYTSLNGTSMATPHVAGAAALVKQKNPSWSNVQIRNHLKNTATSLGSTNLYGSGLVNAEAATR

SEQ ID NO: 55030 - protein, 269 aa, Unidentified
AQSVPWGISRVQAPAAHNRKLTGSGVKVAVLDTGISTHPDLNIRGGASFVPGEPSTQDGNGHGTHVAGTIAALNNNIGVLGVAPSAELYAVKVLGASGSGSVSSIAQGLEWAGNNGMHVANLSLGLPSPSATLEQAVNSATSRGVLVVAASGNSGAGSISYPARYANAMAVGATDQNNNRASFSQYGAGLDIVAPGVNVQSTYPGSTYASLNGTSMATPHVAGAAALVKQKNPSWSNVQIRNHLKNTATSLGSTNLYGSGLVNALAATR

SEQ ID NO: 55031 - protein, 269 aa, Unidentified
AQSVPWGISRVQAPAAHNRGLTGSGVKVAVLDTGISTHPDLNIRGGASFVPGEPSTQDGNGHGTHVAGTIAALNNSIGVLGVAPSAELYAVKVLGQAGAASVSSIAQGLEWAGNNGMHVANLSLGSPSPSATLEQAVNSATSRGVLVVAASGNSGAGSISYPARYANAMAVGATDQNNNRASFSQYGAGLDIVAPGVNVQSTYPGSTYASLNGTSMATPHVAGAAALVKQKNPSWSNVQIRNHLKNTATSLGSTNLYGSGLVNAEAATR

SEQ ID NO: 55032 - protein, 269 aa, Unidentified
AQSVPWGISRVQAPAAHRRGLTGSGVKVAVLDTGISTHPDLNIRGGASFVPGEPSTQDGNGHGTHVAGTIAALNNSIGVLGVAPSAELYAVKVLGASGSGAVSSIAQGLEWAGNNGMHVANLSLGSPSPSATLEQAVNSATSRGVLVVAASGNSGAGSISYPARYANAMAVGATDQNNNRASFSQYGAGLDIVAPGVNVQSTYPGSTYASLNGTSMATPHVAGAAVLVKQKNPSWSNVQIRNRLKNTATSLGSTNLYGSGLVNAEAATR

SEQ ID NO: 55033 - protein, 269 aa, Unidentified
AQSVPWGISRVQAPASHNRGLAGSGVKVAVLDTGISTHPDLNIRGGASFVPGEPSTQDGNGHGTHVAGTIAALNNSIGVLGVAPSAELYAVKVLGASGSGGVSSIAQGLEWAGNNGMHVANLSLGNPSPSATLEQAVNSATSRGVLVVAASGNSGAGSISYPARYANAMAVGATDQNNNRASFSQYGAGLDIVAPGVNVQSTYPGSTYASLNGTSMATPHVAGAAALVKQKNPSWSNVQIRNHLKNTATSLGSTNLYGSGLVNAEAATR

SEQ ID NO: 55034 - protein, 269 aa, Unidentified
AQSVPWGISRVQAPAAHNRGLTASGVKVAVLDTGISTHPDLNIRGGASFVPGEPSTQDGEGHGTHVAGTIAALNNSIGVLGVAPSAELYAVKVLGASGSGSVSSIAQGLEWAGLNRMHVANLSLGSPSPSATLEQAVNSATSRGVLVVAASGNSGAGSISYPARYANAMAVGATDQNNNRASFSQYGAGLDIVAPGVNVQSTYPGSTYASLNGTSMATPHVAGAAALVKQKNPSWSNVQIRNHLKNTATSLGSTNLYGSGLVNAEAATR

SEQ ID NO: 55035 - protein, 269 aa, Unidentified
AQSVPWGISRVQAPAAHNRGLTGSGVKVAVLDTGISTHPDLNIRGGASFVPGEPSTQDGEGHGTHVAGTIAALNNDIGVLGVAPSAELYAVKVLGASGSGSVSSIAQGLEWAGNNSMHVANLSLGSPSPSATLEQAVNSATSRGVLVVAASGNSGADSISYPARYANAMAVGATDQNNNRASFSQYGAGLDIVAPGVNVQSTYPGSTYASLNGTSMATPHVAGAAALVKQKNPSWSNVQIRNHLKNTATSLGSTNLYGSGLVNAEAATR

SEQ ID NO: 55036 - protein, 269 aa, Unidentified
AQSVPWGIARVQAPAAHNRRLTGSGVKVAVLDTGISTHPDRNIRGGASFVPGEPSTQDGNGHGTHVAGTIAALNNSIGVLGVAPSAELYAVKVLGASGSGSVSSIAQGLEWAGNNGMHVANLSLGSPSPSATLEQAVNSATSRGVLVVAASGNSGAGSISYPARYANAMAVGATDQNNNRASFSQYGAGLDIVAPGVNVQSTYPGFTYASLNGTSMATPHVAGAAALVKQKNPSWSNVQIRNHLKNTATSLGSTNLYGSGLVNAEAATR

SEQ ID NO: 55037 - protein, 269 aa, Unidentified
AQSVPWGISRVQAPAAHNRGLTGSGVKVAVLDTGISTHPDLNIRGGASFVPGEPSTQDGNGHGTHVAGTIAALNNDIGVLGVAPSAELYAVKVLGASGSGSVSSIAQGLEWAGNNSMHVANLSLGSPSPSATLEQAVNSATSRGVLVVAASGNSGADSISYPARYANAMAVGATDQNNNRASFSQYGAGLDIVAPGVNVQSTYPGSTYASLNGTSMATPHVAGAAALVKQKNPSWSNVQIRNRLKNTATSLGSTNLYGSGLVNAEAATR

SEQ ID NO: 55038 - protein, 269 aa, Unidentified
AQSVPWGISRVQAPAAHNRGLTGSGVKVAVLDTGISTHPDLNIRGGASFVPGEPSTQDGNGHGTHVAGTIAALDNNIGVLGVAPSAELYAVKVLGASGSGSVSSIAQGLEWAGNNGMHVANLSLGSPSPSATLEQAVNSATSRGVLVVAASGNSGAGSISYPARYANAMAVGATDQNNNRASFSQYGAGLDIVAPGVNVLSTYPGSTYASLNGTSMATPHVAGAAALVKQKNPSWSNVQIRNRLKNTATSLGSTNLYGSGLVNAEAATR

SEQ ID NO: 55039 - protein, 269 aa, Synthetic construct
AQSVPWGISRVQAPAAHNRGLTGSGVKVAVLDTGISTHPDLNIRGGASFVPGEPSTQDGNGHGTHVAGTIAALDNSIGVLGVAPSAELYAVKVLGASGSGAISSIAQGLEWAGNNGMHVANLSLGGPSPSATLEQAVNSATSRGVLVVAASGNSGAGSISYPARYANAMAVGATDQNNNRASFSQYGAGLDIVAPGVNVQSTYPGSTYASLNGTSMATPHVAGAAALVKQKNPSWSNVQIRNHLKNTATSLGSTNLYGSGLVNAEAATR

SEQ ID NO: 55040 - protein, 269 aa, Unidentified
AQSVPWGISRVQAPAAHNRRLTGRGVKVAVLDTGISTHPDLNIRGGASFVPGEPSTQDGNGHGTHVAGTIAALNNSIGVLGVAPSAELYAVKVLGASGSGSVSSIAQGLEWAGNNGMHVANLSLGSPSPSATLEQAVNSATSRGVLVVAASGNSGADSISYPARYANAMAVGATDQNNNRASFSQYGAGLDIVAPGVNVQSTYPGSTYASLNGTSMATPHVAGAAALVKQKNPSWSNVQIRDHLKNTATSLGSTNLYGSGLVNAEAATR

SEQ ID NO: 55041 - protein, 269 aa, Unidentified
AQSVPWGISRVQAPAAHNRGLTGRGVKVAVLDTGISTHPDLNIRGGASFVPGEPSTQDGNGHGTHVAGTIAALNNSIGVLGVAPSAELYAVKVLGASGSGSVSSIAQGLEWAGNNRMHVANLSLGSPSPSATLEQAVNSATSRGVLVVAASGNSGAGSISYPARYANAMAVGATDQNNNRASFSQYGAGLDIVAPGVNVQSTYPGSTYASLNGTSMATPHVAGAAALVKQKNPSWSNVQIRDRLKNTATSLGSTNLYGSGLVNAEAATR

SEQ ID NO: 55042 - protein, 269 aa, Unidentified
AQSVPWGISRVQAPAAHNRRLTGRGVKVAVLDTGISTHPDLNIRGGASFVPGEPSTQDGNGHGTHVAGTIAALDNSIGVLGVAPSAELYAVKVLGASGSGSVSSIAQGLEWAGNNGMHVANLSLGSPSPSATLEQAVNSATSRGVLVVAASGNSGAGSISYPARYANAMAVGATDQNNNRASFSQYGAGLDIVAPGVNVQSTYPGSTYASLNGTSMATPHVAGAAALVKQKNPSWSNVQIRNRLKNTATSLGSTNLYGSGLVNAEAATR

SEQ ID NO: 55043 - protein, 269 aa, Unidentified
AQSVPWGISRVQAPAAHNRKLTGSGVKVAVLDTGISTHPDLNIRGGASFVPGEPSTQDGEGHGTHVAGTIAALNNSIGVLGVAPSAELYAVKVLGASGQGSVSSIANGLEWAGLNGMHVANLSLGSPSPSATLEQAVNSATSRGVLVVAASGNSGAGSISYPARYANAMAVGATDQNNNRASFSQYGAGLDIVAPGVNVQSTYPGSTYASLNGTSSATPHVAGAAALVKQKNPSWSNVQIRNHLKNTATSLGSTNLYGSGLVNAEAATR

SEQ ID NO: 55044 - protein, 269 aa, Bacillus lentus
AQSVPWGISRVQAPAAHNRGLTGSGVKVAVLDTGISTHPDLNIRGGASFVPGEPSTQDGNGHGTHVAGTIAALNNSIGVLGVAPRAELYAVKVLGASGSGSVSSIARGLEWAGNNGMHVANLSLGSPSPSATLEQAVNSATSRGVLVVAASGNSGAGSISYPARYANAMAVGATDQNNNRARFSQYGAGLDIVAPGVNVQSTYPGSTYASLNGTSMATPHVAGAAALVKQKNPSWSNVQIRRHLKNTATSLGSTNLYGSGLVNAEAATR

SEQ ID NO: 55045 - protein, 269 aa, Unidentified
AQSVPWGISRVQAPAAHNRGLTGRGVKVAVLDTGISTHPDLNIRGGASFVPGEPSTQDGNGHGTHVAGTIAALNNSIGVLGVAPSAELYAVKVLGASGGGSISSIAQGLEWAGNNGMHVANLSLGSPSPSATLEQAVNSATSRGVLVVAASGNSGAGSISYPARYANAMAVGATDQNNNRASFSQYGAGLDIVAPGVNVQSTYPGSTYASLNGTSMATPHVAGAAALVKQKNPSWSNVRIRNHLKNTATSLGSTNLYGSGLVNAEAATR

SEQ ID NO: 55046 - protein, 269 aa, Synthetic construct
AQSVPWGISRVQAPAAHNRGLTGSGVKVAVLDTGISTHPDLNIRGGASFVPGEPSTQDGNGHGTHVAGTIAALDNSIGVLGVAPSAELYAVKVLGASGSGAISSIAQGLEWAGNNGMHVANLSLGSPSPSATLEQAVNSATSRGVLVVAASGNSGAGSISYPARYANAMAVGATDQNNNRASFSQYGAGLDIVAPGVNVQSPYPGSTYASLNGTSMATPHVAGAAALVKQKNPSWSNVQIRNHLKNTATSLGSTNLYGSGLVNAEAATR

SEQ ID NO: 55047 - protein, 269 aa, Unidentified
AQSVPWGISRVQAPAAHNRRLTGSGVKVAVLDTGISTHPDLNIRGGASFVPGEPSTQDGNGHGTHVAGTIAALNNSIGVLGVAPSAELYAVKVLGASGSGGVSSIAQGLEWAGNNGMHVANLSLGSPSPSATLEQAVNSATSRGVLVVAASGNSGAGSISYPARYANAMAVGATDQNNNRASFSQYGAGLDIVAPGVNVQSTYPGSTYASLNGTSMATPHVAGAAVLVKQKNPSWSNVRIRNHLKNTATSLGSTNLYGSGLVNAEAATR

SEQ ID NO: 55048 - protein, 269 aa, Unidentified
AQVVPWGISRVQAPAAHNRGLTGSGVKVAVLDTGISTHEDLNIRGGASFVPGEPSTQDGNGHGTHVAGTIAALDNSIGVLGVAPSAELYAVKVLGASGSGSVSSIAQGLEWAGNNRMHVANLSLGSPSPSATLEQAVNSATSRGVLVVAASGNSGAGSISYPARYANAMAVGATDQNNNRASFSQYGAGLDIVAPGVNVQSTYPGSTYASLNGTSMATPHVAGAAALVKQKNPSWSNVQIRNHLKNTATSLGSTNLYGSGLVNAEAATR

SEQ ID NO: 55049 - protein, 269 aa, Unidentified
AQSVPWGISRVQAPAAHNRGLWGSGVKVAVLDTGISTHPDLNIRGGASFVPGEPSTQDGNGHGTHVAGTIAALNNSIGVLGVAPSAELYAVKVLGASGAGSVSSIAQGLEWAGNNGMHVANLSLGSPSPSATLEQAVNSATSRGVLVVAASGNSGAGSISYPARYANAMAVGATDQNNNRASFSQYGAGLDIVAPGVNVQSTYIQSTYASLNGTSMATPHVAGAAALVKQKNPSWSNVQIRNHLKNTATSLGSTNLYGSGLVNAEAATR

SEQ ID NO: 55050 - protein, 269 aa, Unidentified
AQSVPWGISRVQAPAAHNRKLLGFGVKVAVLDTGISTHPDLNIRGGASFVPGEPSTQDGNGHGTHVAGTIAALNNSIGVLGVAPSAELYAVKVLGASGSGSVSSIAQGLEWAGNNRMHVANLSLGSPSPSATLEQAVNSATSRGVLVVAASGNSGAGSISYPARYANAMAVGATDQNNNRASFSQYGAGLDIVAPGVNVQSTYPGSTYASLNGTSMATPHVAGAAALVKQKNPSWSNVQIRNHLKNTATSLGSTNLYGSGLVNAEAATR

SEQ ID NO: 55051 - protein, 270 aa, Synthetic construct
AQSVPWGISRVQAPAAHNRGLTGSGVKVAVLDTGIDSTHPDLNIRGGASFVPGEPSTQDGNGHGTHVAGTIAALNNSIGVLGVAPSAELYAVKVLGASGSGSYSSIAQGLEWAGNNGMDVANLSLGSPSPSATLEQAVNSATSRGVLVVAASGNSGAGSISYPARYANAMAVGATDQNNNRASFSQYGPELDIVAPGVNVQSTYPGSTYASLNGTSMATPHVAGAAALVKQKNPSWSNVQIRNHLKNTATSLGSTNLYGSGLVNAEAATR

SEQ ID NO: 55052 - protein, 269 aa, Unidentified
AQSVPWGISRVQAPAAHNRGLAGRGVKVAVLDTGISTHPDLNIRGGASFVPGEPSTQDGNGHGTHVAGTIAALNNSIGVLGVAPSAELYAVKVLGASGSGSVSSIAQGLEWAGLNGMHVANLSLGIPSPSATLEQAVNSATSRGVLVVAASGNSGAGSISYPARYANAMAVGATDQNNNRASFSQYGAGLDIVAPGVNVQSTYPGSTYASLNGTSMATPHVAGAAALVKQKNPSWSNVQIRNHLKNTATSLGSTNLYGSGLVNAEAATR

SEQ ID NO: 55053 - protein, 269 aa, Unidentified
AQSVPWGISRVQAPAAHNRKLTGSGVKVAVLDTGISTHPDLNIRGGASFVPGEPSTQDGNGHGTHVAGTIAALNNNIGVLGVAPSAELYAVKVLGASGDGSVSSIAQGLEWAGNNGMHVANLSLGSPSPSATLEQAVNSATSRGVLVVAASGNSGAGSISYPARYANAMAVGATDQNNNRASFSQYGAGLDIVAPGVNVQSTYPGSTYASLNGTSMATPHVAGAAALVKQKNPSWSNVQTRNHLKNTATSLGSTNLYGSGLVNAEAATR

SEQ ID NO: 55054 - protein, 269 aa, Unidentified
AQSVPWGISRVQAPAAHNRGLAGSGVKVAVLDTGISTHPDLNIRGGASFVPGEPSTQDGNGHGTHVAGTIAALNNSIGVLGVAPSAELYAVKVLGASGAGSLSSIAQGLEWAGNNGMHVANLSLGNPSPSATLEQAVNSATSRGVLVVAASGNSGAGSISYPARYANAMAVGATDQNNNRASFSQYGAGLDIVAPGVNVQSTYPGSTYASLNGTSMATPHVAGAAALVKQKNPSWSNVQIRNHLKNTATSLGSTNLYGSGLVNAEAATR

SEQ ID NO: 55055 - protein, 269 aa, Unidentified
AQSVPWGISRVQAPAAHNRGLTGSGVKVAVLDTGISTHPDLNIRGGASFVPGEPSTQDGNGHGTHVAGTIAALNNSIGVLGVAPSAELYAVKVLSASGGGSVSSIAQGLEWAGNNGMHVANLSLGAPSPSATLEQAVNSATSRGVLVVAASGNSGAGSISYPARYANAMAVGATDQNNNRADFSQYGAGLDIVAPGVNVQSTYPGSTYASLNGTSMATPHVAGAAALVKQKNPSWSNVQIRNHLKNTATSLGSTNLYGSGLVNAEAATR

SEQ ID NO: 55056 - protein, 270 aa, Bacillus subtilis
AQSVPWGISRVQAPAAHNRGLTGSGVKVAVLDTGIDSTHPDLNIRGGASFVPGEPSTQDGNGHGTHVAGTIAALNDSIGVLGVAPSAELYAVKVLGASGSGSVSSIAQGLEWAGNNGMDVANLSLGSPSPSATLEQAVNSATSRGVLVVAASGNSGAGSISYPARYANAMAVGATDQNNNRASFSQYGAELDIVAPGVNVQSTYPGSTYASLNGTSMATPHVAGAAALVLQKNPSWSNVQIRNHLKNTATSLGSTNLYGSGLVNAEAATR

SEQ ID NO: 55057 - protein, 269 aa, Unidentified
AQSVPWGISRVQAPAAHNRGLTGSGVKVAVLDTGISTHPDLNIRGGASFVPGEPSTQDGNGHGTHVAGTIAALDNSIGVLGVAPSAELYAVKVLGASGSGAISSIAQGLEWAGNNGMHVANLSLGSPSPSATLEQAVNSATSRGVLVVAASGNSGAGSISYPARYANAMAVGATDQNNNRASFSQYGAGLDIVAPGVNVQSTYPGSTYASLNGTSMATPHVAGAAALVKQKNPSWSNVQIRNHLKNTATSLGSTNLYGSGLVNAGAATR

SEQ ID NO: 55058 - protein, 269 aa, Bacillus lentus
AQSVPWGISRVQAPAAHNRGLTGSGVKVAVLDTGISTHPDLNIRGGASFVPGEPSTQDGNGHGTHVAGTIAALNNSIGVLGVAPSAELYAVKVLGASGSGSVSSIAQGLEWAGNNGMHVANLSLGSPSPSATLEQAVNSATSRGVLVVAASGNSGAGSISAPASYANTLAVGATDQNNNRASFSQYGAGLDIVAPGVNVQSTYPGSTYASLNGTSMATPHVAGAAALVKQKNPSWSNVQIRNHLKNTATSLGSTNLYGSGLVNAEAATR

SEQ ID NO: 55059 - protein, 269 aa, Unidentified
AQSVPWGISRVQAPAAHNRGLTGSGVKVAVLDTGISTHPDLNIRGGASFVPGEPSTQDGNGHGTHVAGTIAALNNSIGVLGVAPSAELYAVKVLSASGNGSVSSIAGGLEWAGNNGMHVANLSLGAPSPSATLEQAVNSATSRGVLVVAASGNSGAGSISYPARYANAMAVGATDQNNNRASFSQYGAGLDIVAPGVNVQSTYPGSTYASLNGTSMATPHVAGAAALVKQKNPSWSNVQIRNHLKNTATSLGSTNLYGSGLVNAEAATR

SEQ ID NO: 55060 - protein, 269 aa, Unidentified
AQSVPWGISRVQAPAAHNRGLTGSGVKVAVLDTGISTHPDLNIRGGASFVPGEPSTQDGEGHGTHVAGTIAALNNNIGVLGVAPSAELYAVKVLGASGSGSVSSIAQGLEWAGNNGMHVANLSLGSPSPSATLEQAVNSATRRGVLVVAASGNSGAGSISYPARYANAMAVGATDQNNNRASFSQYGAGLDIVAPGVNVQSTYPGMTYASLNGTSMATPHVAGAAALVKQKNPSWSNVQIRNHLKNTATSLGSTNLYGSGLVNAEAATR

SEQ ID NO: 55061 - protein, 269 aa, Unidentified
AQSVPWGISRVQAPAAHNRGLTGSGVKVAVLDSGISTHPDLNIRGGASFVPGEPSTQDGNGHGTHVAGTIAALNNSIGVLGVAPSAELYAVKVLGASGSGSVSSIAQGLEWAGLNGMHVANLSLGSPSPSATLEQAVNSATSRGVLVVAASGNSGAGSIDYPARYANAMAVGATDQNNNRADFSQYGAGLDIVAPGVNVQSTYPGSTYASLNGTSMATPHVAGAAALVKQKNPSWSNVQIRNHLKNTATSLGSTNLYGSGLVNAEAATR

SEQ ID NO: 55062 - protein, 269 aa, Bacillus lentus
AQSVPWGISRVQAPAAHNRGLTGSGVKVAVLDTGISTHPDLNIRGGASFVPGEPSTQDGNGHGTHAAGTIAALNNSIGVLGVAPSAELYAVKVLGAGGSGSVSSIAQGLEWAGNNGMHVANLSLGSPSPSATLEQAVNSATSRGVLVVAASGNSGAGSISYPARYANAMAVGATDQNNNRASFSQYGAGLDIVAPGVNVQSTYPGSTYASLNGTSMATPHVAGAAALVKQKNPSWSNVRIRNHLKNTATSLGSTDLYGSGLVNAEAATR

SEQ ID NO: 55063 - protein, 269 aa, Unidentified
AQSVPWGISRVQAPAAHNRGLTGSGVKVAVLDTGISTHPDLNIRGGASFVPGEPSTQDGNGHGTHVAGTIAALNNSIGVLGVAPSAELYAVKVLGATGAASLSSIAQGLEWAGNNGMHVANLSLGSPSPSATLEQAVNSATSRGVLVVAASGNSGAGSISYPARYANAMAVGATDQNNNRASFSQYGAGLDIVAPGVNVQSTYPGSTYASLNGTSMATPHVAGAAALVKQKNPSWSNVQIRNHLKNTATSLGSTNLYGSGLVNAEAATR

SEQ ID NO: 55064 - protein, 269 aa, Alkalihalobacillus clausii
AQSVPWGISRIQAPAAHNRGLTGSGVKVAVLDTGISTHPDLNIRGGASFVPGEPSTQDGNGHGTHVAGTIAALNNSIGVLGVAPSAELYAVKVLVASGSGSVSSIAQGLEWAGNNGMHVANLSLGSPSPSATLEQAVNSATSRGILVVAASGNSGAGSISYPARYANAMAVGATDQNNNRASFSQYGAGLDIVAPGVNVQSTYPGSTYASLSGTSMATPHVAGAAALVKQKNPSWSNVQIRNHLKNTATSLGSTNLYGSGLVNAEAATR

SEQ ID NO: 55065 - protein, 269 aa, Unidentified
AQSVPWGISRVQAPAAHNRGLTGSGVKVAVLDTGISTHPDLNIRGGASFVPGEPSTQDGNGHGTHVAGTIAALNNSIGVLGVAPSAELYAVKVLGQGSSGSISSIAQGLEWAGNNGMHVANLSLGSPSPSATLEQAVNSATSRGVLVVAASGNSGAGSISYPARYANAMAVGATDQNNNRASFSQYGAGLDIVAPGVNVQSTYPGSTYASLNGTSMATPHVAGAAALVKQKNPSWSNVQIRNHLKNTATSLGSTNLYGSGLVNAEAATR

SEQ ID NO: 55066 - protein, 269 aa, Unidentified
AQSVPWGISRVQAPAAHNRGLTGSGVKVAVLDTGISTHPDLNIRGGASFVPGEPSTQDGNGHGTHAAGTIAALDNSIGVLGVAPSAELYAVKVLGASGSGAISSIAQGLEWAGNNGMHVANLSLGSPSPSATLEQAVNSATSRGVLVVAASGNSGAGSISYPARYANAMAVGATDQNNNRASFSQYGAGLDIVAPGVNVQSTYPGSTYASLNGTSMATPHVAGAAALVKQKNPSWSNVQIRNHLKNTATSLGSTNLYGSGLVNAEAATR

SEQ ID NO: 55067 - protein, 269 aa, Unidentified
AQSVPWGISRVQAPAAHNRGLTGGGVKVAVLDTGISTHPDLNIRGGASFVPGEPSTQDGNGHGTHVAGTIAALNNSIGVLGVAPSAELYAVKVLSASGQGSVSSIAGGLEWAGNNGMHVANLSLGSPSPSATLEQAVNSATSRGVLVVAASGNSGAGSISYPARYANAMAVGATDQNNNRASFSQYGAGLDIVAPGVNVQSTYPGSTYASLNGTSMATPHVAGAAALVKQKNPSWSNVQIRNHLKNTATSLGSTNLYGSGLVNAEAATR

SEQ ID NO: 55068 - protein, 269 aa, Unidentified
AQSVPWGISRVQAPAAHNRGLTGSGVKVAVLDTGISTHPDLNIRGGASFVPGEPSTQDGNGHGTHVAGTIAALNNSIGVLGVAPSAELYAVKVLGASGSGSVSSIAQGLEWAGNNGMHVANLSLGSPSPSATLEQAVNSATSRGVLVVAASGNSGADSISYPARYANAMAVGATDQNNNRADFSQYGAGLDIVAPGVNVQSTYPGSTYASLNGTSMATPHVAGAAALVKQKNPSWSNVRIRDHLKNTATSLGSTNLYGSGLVNAEAATR

SEQ ID NO: 55069 - protein, 269 aa, Unidentified
AQSVPWGISRVQAPAAHNRGLTGSGVKVAVLDTGISTHPDLNIRGGASFVPGEPSTQDGNGHGTHVAGTIAALDNSIGVLGVAPSAELYAVKVLGASGSGAISSIAQGLEWAGNNGMHVANLSLGSPSPSATLEQAVNSATSRGVLVVAASGNSGAGSISYPARYANAMAVGATNQNNNRASFSQYGAGLDIVAPGVNVQSTYPGSTYASLNGTSMATPHVAGAAALVKQKNPSWSNVQIRNHLKNTATSLGSTNLYGSGLVNAEAATR

SEQ ID NO: 55070 - protein, 269 aa, Unidentified
AQSVPWGISRVQAPAAHNRGLTGSGFKVAVLDTGISTHPDLNIRGGASFWPGEPSTQDGNGHGTHVAGTIAALNNSIGVLGVAPSAELYAVKVLGASGSGSLSEIAQGLEWAGNNGMHVANLSLGSPSPSATLEQAVNSATSRGVLVVAASGNSGAGSISYPARYANAMAVGATDQNNNRASFSQYGAGLDIVAPGVNVQSTYPGSTYASLNGTSMATPHVAGAAALVKQKNPSWSNVQIRNHLKNTATSLGSTNLYGSGLVNAEAATR

SEQ ID NO: 55071 - protein, 269 aa, Unidentified
AQSVPWGISRVQAPAAHNRGLAGSGVKVAVLDSGISTHPDLNIRGGASFVPGEPSTQDGNGHGTHVAGTIAALNNSIGVLGVAPSAELYAVKVLGASGSGSVSSIAQGLEWAGNNGMHVANLSLGSPSPSATLEQAVNSATSRGVLVVAASGNSGAGSIDYPARYANAMAVGATDQNNNRADFSQYGAGLDIVAPGVNVQSTYPGSTYASLNGTSMATPHVAGAAALVKQKNPSWSNVQIRNHLKNTATSLGSTNLYGSGLVNAEAATR

SEQ ID NO: 55072 - protein, 269 aa, Unidentified
AQSVPWGIARVQAPAAHNRGLTGRGVKVAVLDTGISTHPDLRIRGGASFVPGEPSTQDGNGHGTHVAGTIAALNNSIGVLGVAPSAELYAVKVLGASGSGSVSSIAQGLEWAGNNGMHVANLSLGSPSPSATLEQAVNSATSRGVLVVAASGNSGAGSISYPARYANAMAVGATDQNNNRASFSQYGAGLDIVAPGVNVQSTYPGSTYASLNGTSMATPHVAGAAALVKQKNPSWSNRQIRNHLKNTATSLGSTNLYGSGLVNAEAATR

SEQ ID NO: 55073 - protein, 269 aa, Unidentified
AQSVPWGISRVQAPAAHNRGLTGSGVKVAVLDTGISTHPDLNIRGGASFVPGEPSTQDGNGHGTHVAGTIAALNNSIGVLGVAPSAELYAVKVLPQASSGSVSSIAQGLEWAGNNGMHVANLSLGSPSPSATLEQAVNSATSRGVLVVAASGNSGAGSISYPARYANAMAVGATDQNNNRASFSQYGAGLDIVAPGVNVQSTYPGSTYASLNGTSMATPHVAGAAALVKQKNPSWSNVQIRNHLKNTATSLGSTNLYGSGLVNAEAATR

SEQ ID NO: 55074 - protein, 269 aa, Unidentified
AQSVPWGISRVQAPAAHNRGLAGSGVKVAVLDSGISTHPDLNIRGGASFVPGEPSTQDGNGHGTHVAGTIAALNNSIGVLGVAPSAELYAVKVLGASGSGSVSSIAQGLEWAGNNRMHVANLSLGIPSPSATLEQAVNSATSRGVLVVAASGNSGAGSISYPARYANAMAVGATDQNNNRASFSQYGAGLDIVAPGVNVQSTYPGSTYASLNGTSMATPHVAGAAALVKQKNPSWSNVQIRNHLKNTATSLGSTNLYGSGLVNAEAATR

SEQ ID NO: 55075 - protein, 269 aa, Unidentified
AQSVPWGISRVQAPAAHNRGLTGSGVKVAVLDTGISTHPDLNIRGGASFAPGEPSTQDGNGHGTHVAGTIAALNNSIGVLGVAPSAELYAVKVLGASGAGSVSSIAQGLEWAGNNGMHVANLSLGSPSPSATLEQAVNSATSRGVLVVAASGNSGAGSISYPARYANAMAVGATDQNNNRASFSQYGAGLDIVAPGVNVQSTYIGSAYASLNGTSMATPHVAGAAALVKQKNPSWSNVQIRNHLKNTATSLGSTNLYGSGLVNAEAATR

SEQ ID NO: 55076 - protein, 269 aa, Unidentified
AQSVPWGISRVQAPAAHNRRLTGSGVKVAVLDTGISTHPDRNIRGGASFVPGEPSTQDGNGHGTHVAGTIAALNNRIGVLGVAPSAELYAVKVLGASGSGSVSSIAQGLEWAGNNGMHVANLSLGSPSPSATLEQAVNSATSRGVLVVAASGNSGAGSISYPARYANAMAVGATDQNNNRASFSQYGAGLDIVAPGVNVQSTYPGSTYASLNGTSMATPHVAGAAALVKQKNPSWSNVQIRNRLKNTATSLGSTNLYGSGLVNAEAATR

SEQ ID NO: 55077 - protein, 269 aa, Unidentified
AQSVPWGISRVQAPAAHNRGLTGSGVKVAVLDTGISTHPDLNIRGGASFVPGEPSTQDGNGHGTHVAGTIAALNNSIGVLGVAPSAELYAVKVLPATGGGSISSIAQGLEWAGNNGMHVANLSLGSPSPSATLEQAVNSATSRGVLVVAASGNSGAGSISYPARYANAMAVGATDQNNNRASFSQYGAGLDIVAPGVNVQSTYPGSTYASLNGTSMATPHVAGAAALVKQKNPSWSNVQIRNHLKNTATSLGSTNLYGSGLVNAEAATR

SEQ ID NO: 55078 - protein, 269 aa, Unidentified
AQSVPWGISRVQAPAAHNRGLTGSGVKVAVLDTGISTHPDLNIRGGASFVPGEPSTQDGNGHGTHVAGTIAALNNSIGVLGVAPSAELYAVKVLGASSSGSVSSIAQGLEWAGLNGMHVANLSLGSPSPSATLEQAVNSATSRGVLVVAASGNSGEGSISYPARYANAMAVGATDQNNNRASFSQYGAGLDIVAPGVNVQSTYPGSAYASLNGTSMATPHVAGAAALVKQKNPSWSNVQIRNHLKNTATSLGSTNLYGSGLVNAEAATR

SEQ ID NO: 55079 - protein, 269 aa, Unidentified
AQSVPWGISRVQAPAAHNRGLTGSGVKVAVLDTGISTHPDLRIRGGASFVPGEPSTQDGNGHGTHVAGTIAALNNSIGVLGVAPSAELYAVKVLGASGSASVSSIAQGLEWAGNNGMHVANLSLGLPSPSATLEQAVNSATSRGVLVVAASGNSGAGSISYPARYANAMAVGATDQNNNRASFSQYGAGLDIVAPGVNVQSTYPGSTYASLNGTSMATPHVAGAAALVKQKNPRWSNVQIRNHLKNTATSLGSTNLYGSGLVNAEAATR

SEQ ID NO: 55080 - protein, 269 aa, Unidentified
AQSVPWGISRVQAPAAHNRRLWGSGVKVAVLDTGISTHPDLNIRGGASFVPGEPSTQDGNGHGTHVAGTIAALNNSIGVLGVAPSAELYAVKVLGASGAGSVSSIAQGLEWAGNNGMHVANLSLGSPSPSATLEQAVNSATSRGVLVVAASGNSGAGSISYPARYANAMAVGATDQNNNRASFSQYGAGLDIVAPGVNVQSTYPGSAYASLNGTSMATPHVAGAAALVKQKNPSWSNVQIRNHLKNTATSLGSTNLYGSGLVNAEAATR

SEQ ID NO: 55081 - protein, 269 aa, Unidentified
AQSVPWGISRVQAPAAHNRGLAGSGVKVAVLDTGISTHPDLNIRGGASFVPGEPSTQDGNGHGTHVAGTIAALNNSIGVLGVAPSAELYAVKVLGASGSGAISSIAQGLEWAGNNGMHVANLSLGSPSPSATLEQAVNSATSRGVIVVAASGNSGAGSISYPARYANAMAVGATDQNNNRASFSQYGAGLDIVAPGVNVQSTYPGSTYASLNGTSMATPHVAGAAALVKQKNPSWSNVQIRNHLKNTATSLGSTNLYGSGLVNAEAATR

SEQ ID NO: 55082 - protein, 269 aa, Unidentified
AQSVPWGISRVQAPAAHNRGLTGSGVKVAVLDTGISTHPDLNIRGGASFVPGEPSTQDGNGHGTHVAGTIAALDNSIGVLGVAPSAELYAVKVLGASGSGAISSIAQGLEWAGNNGMHVANLSLGSPSPSATLEQAVNSATSRGVLVVAASGNSGAGSISYPARYANAMAVGATDQNNNRASFSQYGAGLDIVAPGVNVQSTYPGSTYASLNGTSMATPHVAGAAALVKQKNPSWTNVQIRNHLKNTATSLGSTNLYGSGLVNAEAATR

SEQ ID NO: 55083 - protein, 269 aa, Unidentified
AQSVPWGISRVQAPAAHNRGLTGSGVKVAVLDTGISTHPDLNIRGGASFVPGEPSTQDGNGHGTHVAGTIAALNNSIGVLGVAPSAELYAVKVLPQTSSGSVSSIAQGLEWAGNNGMHVANLSLGSPSPSATLEQAVNSATSRGVLVVAASGNSGAGSISYPARYANAMAVGATDQNNNRASFSQYGAGLDIVAPGVNVQSTYPGSTYASLNGTSMATPHVAGAAALVKQKNPSWSNVQIRNHLKNTATSLGSTNLYGSGLVNAEAATR

SEQ ID NO: 55084 - protein, 269 aa, Unidentified
AQSVPWGISRVQAPAAHNRGLTASGVKVAVLDTGISTHPDLWIRGGASFVPGEPSTQDGNGHGTHVAGTIAALNNSIGVLGVAPSAELYAVKVLGASGSGSVSSIAQGLEWAGNNGMHVANLSLGSPSPSATLEQAVNSATSRGVLVVAASGNSGAGSISYPARYANAMAVGATDQNNNRADFSQYGAGLDIVAPGVNVQSTYPGSAYASLNGTSMATPHVAGAAALVKQKNPSWSNVQIRNHLKNTATSLGSTNLYGSGLVNAEAATR

SEQ ID NO: 55085 - protein, 269 aa, Synthetic construct
AQSVPWGISRVQAPAAHNRGLTGSGVKVAVLDTGISTHPDLNIRGGASFVPGEPSTQDGNGHGTHVAGTIAALNNSIGVLGVAPSAELYAVKVLGASGSGSVSSIAQGLEWAGNNGMHVANLSLGSPSPSATLEQAVNSATSRGVLVVAASGNSGAGSISYPARYANAMAVGATDQNNNRASFSQYGAGLDIVANGANVQSTYPGSSYASLDGTSMATPHVAGAAALVKQKNPSWSNVQIRNHLKNTATSLGSTNLYGSGLVNAEAATR

SEQ ID NO: 55086 - protein, 269 aa, Unidentified
AQSVPWGISRVQAPAAHNRGLAGSGVKVAVLDTGISTHPDLNIRGGASFVPGEPSTQDGNGHGTHVAGTIAALNNSIGVLGVAPSAELYAVKVLGASGSGALSSIAQGLEWAGNNGMHVANLSLGNPSPSATLEQAVNSATSRGVLVVAASGNSGAGSISYPARYANAMAVGATDQNNNRASFSQYGAGLDIVAPGVNVQSTYPGSTYASLNGTSMATPHVAGAAALVKQKNPSWSNVQIRNHLKNTATSLGSTNLYGSGLVNAEAATR

SEQ ID NO: 55087 - protein, 269 aa, Unidentified
AQSVPWGISRVQAPAAHNRGLTGSGVKVAVLDTGISTHPDLNIRGGASFVPGEPSTQDGNGHGTHVAGTIAALNNSIGVLGVAPSAELYAVKVLGASGSGSVSSIAQGLEWAGNNGMHVANLSLGLPSPSATLEQAVNSATSRGVLVVAASGNSGAGSISYPARYANAMAVGATDQNNNRASFSQYGAGLDIVAPGVNVQSTYPGSTYASENGTSMAAPHVAGAAALVKQKNPSWSNVQIRNHLKNTATSLGSTNLYGSGLVNALAATR

SEQ ID NO: 55088 - protein, 269 aa, Unidentified
AQSVPWGISRVQAPAAHNRGLTGSGVKVAVLDTGISTHPDLNIRGGASFVPGEPSTQDGNGHGTHVAGTIAALNNSIGVLGVAPSAELYAVKVLGASGSGSVSSIAQGLEWAGNFGMHVANLSLGSPSPSATLEQAVNSATSRGVLVVAASGNSGAGSISYPARYANAMAVGATDQNNNRASFSQYGFGLDIVAPGVNVQSTYPGSAYASLNGTSMATPHVAGAAALVKQKNPSWSNVQIRNHLKNTATSLGSTNLYGSGLVNCEAATR

SEQ ID NO: 55089 - protein, 269 aa, Unidentified
AQSVPWGISRVQAPAAHNRGLTGSGVKVAVLDTGISTHPDLAIRGGASFVPGEPSTQDGQGHGTHVAGTIAALNNSIGVLGVAPSAELYAVKVLGASGSGSVSSIAQGLEWAGNNGMHVANLSLGSPSPSATLEQAVNSATSRGVLVVAASGNSGAGSISYPARYANAMAVGATDQNNNRASFSQYGFGLDIVAPGVNVQSTYPQSTYASLNGTSMATPHVAGAAALVKQKNPSWSNVQIRNHLKNTATSLGSTNLYGSGLVNAEAATR

SEQ ID NO: 55090 - protein, 269 aa, Unidentified
AQSVPWGISRVQAPAAHNRGLAGSGVKVAVLDTGISTHPDLNIRGGASFVPGEPSTQDGNGHGTHVAGTIAALNNSIGVLGVAPSAELYAVKVLGASGAGSISSIAQGVEWAGNNGMHVANLSLGSPSPSATLEQAVNSATSRGVLVVAASGNSGAGSISYPARYANAMAVGATDQNNNRASFSQYGAGLDIVAPGVNVQSTYPGSTYASLNGTSMATPHVAGAAALVKQKNPSWSNVQIRNHLKNTATSLGSTNLYGSGLVNAEAATR

SEQ ID NO: 55091 - protein, 269 aa, Unidentified
AQSVPWGISRVQAPAAHNRRLTGSGVKVAVLDTGISTHPDLNITGGASFVPGEPSTQDGNGHGTHVAGTIAALNNSIGVLGVAPSAELYAVKVLGASGAGSVSSIAQGLEWAGNNGMHVANLSLGSPSPSATLEQAVNSATSRGVLVVAASGNSGAGSISYPARYANAMAVGATDQNNNRASFSQYGAGLDIVAPGVNVQSTYPGSAYASLNGTSMATPHVAGAAALVKQKNPSWSNVQIRNHLKNTATSLGSTNLYGSGLVNAEAATR

SEQ ID NO: 55092 - protein, 269 aa, Unidentified
AQSVPWGISRVQAPAAHNRKLTGSGVKVAVLDTGISTHPDLNIRGGASFVPGEPSTQDGNGHGTHVAGTIAALNNSIGVLGVAPSAELYAVKVLGASGSGSVSSIAQGLEWAGNNGMHVANLSLGSPSPSATLEQAVNSATSRGVLVVAASGNSGAGSISYPARYANAMAVGATDQNNNRASFSQYGAGLDIVAPGVNVQSTYPGSTYASENGTSMATPHVAGAAALVKQKNPRWSNVQIRNHLKNTATSLGSTNLYGSGLVNALAATR

SEQ ID NO: 55093 - protein, 269 aa, Unidentified
AQSVPWGISRVQAPAAHNRGLTGSGVKVAVLDTGISTHPDLNIRGGASFVPGEPSTQDGNGHGTHVAGTIAALDNSIGVLGVAPSAELYAVKVLGASGSGSISSIAQGLEWAGNNGMHVANLSLGSPSPSATLEQAVNSATSRGVLVVAASGNSGAGSISYPARYANAMAVGATDQNNNRASFSQYGAGLDIVAPGVNVQSTYPGSTYASLNGTSMATPHVAGAAVLVKQKNPSWSNVQIRNRLKNTATSLGSTNLYGSGLVNAEAATR

SEQ ID NO: 55094 - protein, 269 aa, Unidentified
AQSVPWGISRVQAPAAHNRRLTGRGVKVAVLDTGISTHPDLNIRGGASFVPGEPSTQDGNGHGTHVAGTIAALNNSIGVLGVAPSAELYAVKVLGASGAGSVSSIAQGLEWAGNNGMHVANLSLGSPSPSATLEQAVNSATSRGVLVVAASGNSGAGSISYPARYANAMAVGATDQNNNRASFSQYGAGLDIVAPGVNVQSTYPQSTYASLNGTSMATPHVAGAAALVKQKNPSWSNVQIRNHLKNTATSLGSTNLYGSGLVNAEAATR

SEQ ID NO: 55095 - protein, 269 aa, Unidentified
AQSVPWGISRVQAPAAHNRGLAGSGVKVAVLDTGISTHPDLNIRGGASFVPGEPSTQDGNGHGTHVAGTIAALNNSIGVLGVAPSAELYAVKVLGASGSGGISSIAQGLEWAGNNGMHVANLSLGSPSPSATLEQAVNSATSRGVIVVAASGNSGAGSISYPARYANAMAVGATDQNNNRASFSQYGAGLDIVAPGVNVQSTYPGSTYASLNGTSMATPHVAGAAALVKQKNPSWSNVQIRNHLKNTATSLGSTNLYGSGLVNAEAATR

SEQ ID NO: 55096 - protein, 269 aa, Unidentified
AQSVPWGISRVQAPAAHNRGLTGSGVKVAVLDTGISTHPDLNIRGGASFVPGEPSTQDGNGHGTHVAGTIAALNNDIGVLGVAPSAELYAVKVLGASGSGSVSSIAQGLEWAGNNGMRVANLSLGSPRPSATLEQAVNSATSRGVLVVAASGNSGAGSISYPARYQNAMAVGATDQNNNRASFSQYGAGLDIVAPGVNVQSTYPGSTYASLNGTSMATPHVAGAAALVKQKNPSWSNVQIRNHLKNTATSLGSTNLYGSGLVNAEAATR

SEQ ID NO: 55097 - protein, 269 aa, Unidentified
AQSVPWGISRVQAPAAHNRGLTGGGVKVAVLDTGISTHPDLNIRGGASFVPGEPSTQDGNGHGTHVAGTIAALNNSIGVLGVAPSAELYAVKVLGASGDGSVSSIAQGLEWAGNNGMHVANLSLGQPSPSATLEQAVNSATSRGVLVVAASGNSGAGSISYPARYANAMAVGATDQNNNRASFSQYGAGLDIVAPGVNVQSTYPGSTYASENGTSMATPHVAGAAALVKQKNPSWSNVQIRNHLKNTATSLGSTNLYGSGLVNAEAATR

SEQ ID NO: 55098 - protein, 269 aa, Unidentified
AQSVPWGISRVQAPAAHNRGLTGSGVKVAVLDTGISTHPDLNIRGGASFVPGEPSTQDGNGHGTHVAGTIAALNNSIGVLGVAPSAELYAVKVLGASGAGSVSSIAQGLEWAGNNGMHVANLSLGSPSPSATLEQAVNSATSRGVLVVAASGNSGAGSISYPARYANAMAVGATDQNNNRASFSQYGAGLDIVAPGVNVQSTYIQSAYASLNGTSMATPHVAGAAALVKQKNPSWSNVQIRNHLKNTATSLGSTNLYGSGLVNAEAATR

SEQ ID NO: 55099 - protein, 269 aa, Unidentified
AQTVPWGISRVQAPAAHNRGLTGAGVKVAVLDTGISTHPDLNIRGGASFVPGEPSTQDGNGHGTHVAGTIAALDNSIGVLGVAPSAELYAVKVLGASGSGSVSSIAQGLEWAGTNGMHVANLSLGSPSPSATLEQAVNSATSRGVLVVAASGNSGAGSISYPARYANAMAVGATDQNNNRASFSQYGAGLDIVAPGVNVQSTYPGSTYASLNGTSMATPHVAGAAALVKQKNPSWSNVQIRNHLKNTATSLGSTNLYGSGLVNAEAATR

SEQ ID NO: 55100 - protein, 269 aa, Unidentified
AQSVPWGISRVQAPAAHNRGLTGSGVKVAVLDTGISTHPDLNIRGGASFVPGEPSTQDGNGHGTHVAGTIAALNNSIGVLGVAPNAELYAVKVLGASGSGSVSSIAQGLEWAGNNVMHVANLSLGRQDPSATLEQAVNSATSRGVLVVAASGNSGAGSISYPARYANAMAVGATDQNNNRASFSQYGAGLDIVAPGVNVQSTYPGSTYASLNGTSSATPHVAGAAALVKQKNPSWSNVQIRNHLKNTATSLGSTNLYGSGLVNAEAATR

SEQ ID NO: 55101 - protein, 269 aa, Unidentified
AQSVPWGISRVQAPAAHNRKLTASGVKVAVLDTGISTHPDLWIRGGASFVPGEPSTQDGNGHGTHVAGTIAALNNSIGVLGVAPSAELYAVKVLGASGSGSVSSIAQGLEWAGNNGMHVANLSLGSPSPSATLEQAVNSATSRGVLVVAASGNSGAGSISYPARYANAMAVGATDQNNNRASFSQYGAGLDIVAPGVNVQSTYPGSAYASLNGTSMATPHVAGAAALVKQKNPSWSNVQIRNHLKNTATSLGSTNLYGSGLVNAEAATR

SEQ ID NO: 55102 - protein, 269 aa, Unidentified
AQSVPWGISRVQAPAAHNRRLWGSGVKVAVLDTGISTHPDLRIRGGASFVPGEPSTQDGNGHGTHVAGTIAALNNSIGVLGVAPSAELYAVKVLGASGAGSVSSIAQGLEWAGNNGMHVANLSLGSPSPSATLEQAVNSATSRGVLVVAASGNSGAGSISYPARYANAMAVGATDQNNNRASFSQYGAGLDIVAPGVNVQSTYPGSTYASLNGTSMATPHVAGAAALVKQKNPSWSNVQIRNHLKNTATSLGSTNLYGSGLVNAEAATR

SEQ ID NO: 55103 - protein, 269 aa, Unidentified
AQSVPWGISRVQAPAAHNRKLTGSGVKVAVLDTGISTHPDLNIRGGASFVPGEPSTQDGNGHGTHVAGTIAALNNNIGVLGVAPSAELYAVKVLGASGDGSVSSIAQGLEWAGNNGMHVANLSLGQPSPSATLEQAVNSATSRGVLVVAASGNSGAGSISYPARYANAMAVGATDQNNNRASFSQYGAGLDIVAPGVNVQSTYPGSTYASLNGTSMATPHVAGAAALVKQKNPSWSNVQIRNHLKNTATSLGSTNLYGSGLVNAEAATR

SEQ ID NO: 55104 - protein, 269 aa, Unidentified
AQSVPWGISRVQAPAAHNRGLTGGGVKVAVLDTGISTHPDLNIRGGASFVPGEPSTQDGNGHGTHVAGTIAALNNNIGVLGVAPSAELYAVKVLGASGNGSVSSIAGGLEWAGNNGMHVANLSLGSPSPSATLEQAVNSATSRGVLVVAASGNSGAGSISYPARYANAMAVGATDQNNNRASFSQYGAGLDIVAPGVNVQSTYPGSTYASQNGTSSATPHVAGAAALVKQKNPSWSNVQIRNHLKNTATSLGSTNLYGSGLVNAEAATR

SEQ ID NO: 55105 - protein, 269 aa, Unidentified
AQSVPWGISRVQAPAAHNRGLTGSGVKVAVLDTGISTHPDLNIRGGASFVPGEPSTQDGEGHGTHVAGTIAALNNSIGVLGVAPSAELYAVKVLGASGSGSVSSIAQGLEWAGLNRMHVANLSLGSPSPSATLEQAVNSATSRGVLVVAASGNSGEGSISYPARYANAMAVGATDQNNNRASFSQYGAGLDIVAPGVNVQSTYPGSTYASLNGTSMATPHVAGAAALVKQKNPSWSNVQIRNHLKNTATSLGSTNLYGSGLVNAEAATR

SEQ ID NO: 55106 - protein, 269 aa, Unidentified
AQSVPWGISRVQAPAAHNRGLTGSGVKVAVLDTGISTHPDLNIRGGASFVPGEPSTQDGNGHGTHVAGTIAALNNSIGVLGVAPSAELYAVKVLPQAGSGAVSSIAQGLEWAGNNGMHVANLSLGSPSPSATLEQAVNSATSRGVLVVAASGNSGAGSISYPARYANAMAVGATDQNNNRASFSQYGAGLDIVAPGVNVQSTYPGSTYASLNGTSMATPHVAGAAALVKQKNPSWSNVQIRNHLKNTATSLGSTNLYGSGLVNAEAATR

SEQ ID NO: 55107 - protein, 269 aa, Unidentified
AQSVPWGISRVQAPAAHNRGLTASGVKVAVLDTGISTHPDLNIRGGASFVPGEPSTQDGNGHGTHVAGTIAALNNSIGVLGVAPSAELYAVKVLGASSSGSVSSIAQGLEWAGNNGMHVANLSLGSPSPSATLEQAVNSATSRGVLVVAASGNSGAGSISYPARYANAMAVGATDQNNNRASFSQYGEGLDIVAPGVNVQSTYPGMTYASLNGTSMATPHVAGAAALVKQKNPSWSNVQIRNHLKNTATSLGSTNLYGSGLVNAEAATR

SEQ ID NO: 55108 - protein, 269 aa, Unidentified
AQSVPWGISRVQAPAAHNRGLTGRGVKVAVLDTGISTHPDLNIRGGASFVPGEPSTQDGEGHGTHVAGTIAALNNSIGVLGVAPSAELYAVKVLGASGSGSVSSIAQGLEWAGNNGMHVANLSLGIPSPSATLEQAVNSATSRGVLVVAASGNSGEGSISYPARYANAMAVGATDQNNNRASFSQYGAGLDIVAPGVNVQSTYPGSTYASLNGTSMATPHVAGAAALVKQKNPSWSNVQIRNHLKNTATSLGSTNLYGSGLVNAEAATR

SEQ ID NO: 55109 - protein, 269 aa, Unidentified
AQSVPWGISRVQAPAAHNRGLLGSGVKVAVLDTGISTHPDLNIRGGASFVPGEPSTQDGNGHGTHVAGTIAALNNSIGVLGVAPSAELYAVKVLGASGSGSVSSIAQGLEWAGNNGMHVANLSLGDPSPSATLEQAVNSATSRGVLVVAASGNSGAGSIDYPARYANAMAVGATDQNNNRASFSQYGAGLDIVAPGVNVQSTYPGSAYASLNGTSMATPHVAGAAALVKQKNPSWSNVQIRNHLKNTATSLGSTNLYGSGLVNAEAATR

SEQ ID NO: 55110 - protein, 269 aa, Unidentified
AQSVPWGISRVQAPAAHNRGLTGSGVKVAVLDTGISTHPDLNIRGGASFVPGEPSTQDGNGHGTHVAGTIAALNNSIGVLGVAPSAELYAVKVLGASGSGAISSIAQGLEWAGNNGMHVANLSLGNPSPSATLEQAVNSATSRGVIVVAASGNSGAGSISYPARYANAMAVGATDQNNNRASFSQYGAGLDIVAPGVNVQSTYPGSTYASLNGTSMATPHVAGAAALVKQKNPSWSNVQIRNHLKNTATSLGSTNLYGSGLVNAEAATR

SEQ ID NO: 55111 - protein, 269 aa, Unidentified
AQSVPWGISRVQAPAAHNRKLLGSGVKVAVLDTGISTHPDLNIRGGASFVPGEPSTQDGNGHGTHVAGTIAALNNSIGVLGVAPSAELYAVKVLGASGSGSVSSIAQGLEWAGNNGMHVANLSLGDPSPSATLEQAVNSATSRGVLVVAASGNSGAGSIDYPARYANAMAVGATDQNNNRASFSQYGAGLDIVAPGVNVQSTYPGSTYASLNGTSMATPHVAGAAALVKQKNPSWSNVQIRNHLKNTATSLGSTNLYGSGLVNAEAATR

SEQ ID NO: 55112 - protein, 269 aa, Unidentified
AQSVPWGISRVQAPAAHNRGLTGSGVKVAVLDTGISTHPDLNIRGGASFVPGEPSTQDGNGHGTHVAGTIAALNNSIGVLGVAPSAELYAVKVLGASGSGSVSSIAQGLEWAGNNRMHVANLSLGIPSPSATLEQAVNSATSRGVLVVAASGNSGEGSISYPARYANAMAVGATDQNNNRADFSQYGAGLDIVAPGVNVQSTYPGSTYASLNGTSMATPHVAGAAALVKQKNPSWSNVQIRNHLKNTATSLGSTNLYGSGLVNAEAATR

SEQ ID NO: 55113 - protein, 269 aa, Unidentified
AQSVPWGISRVQAPAAHNRKLLGSGVKVAVLDTGISTHPDLNIRGGASFVPGEPSTQDGNGHGTHVAGTIAALNNSIGVLGVAPSAELYAVKVLGASGSGSVSSIAQGLEWAGNNRMHVANLSLGDPSPSATLEQAVNSATSRGVLVVAASGNSGAGSISYPARYANAMAVGATDQNNNRASFSQYGAGLDIVAPGVNVQSTYPGSTYASLNGTSMATPHVAGAAALVKQKNPSWSNVQIRNHLKNTATSLGSTNLYGSGLVNAEAATR

SEQ ID NO: 55114 - protein, 269 aa, Unidentified
AQSEPWGISRVQAPAAHNRGLTGSGVKVAVLDTGISTHPDLNIRGGASFVPGEPSTQDGNGHGTHVAGTIAALDNSIGVLGVAPSAELYAVKVLGASGSGAISSIAQGLEWAGNNGMHVANLSLGSPSPSATLEQAVNSATSRGVLVVAASGNSGAGSISYPARYANAMAVGATDQNNNRASFSQYGAGLDIVAPGVNVQSTYPGSTYASLNGTSMATPHVAGAAALVKQKNPSWSNVQIRNHLKNTATSLGSTNLYGSGLVNAEAATR

SEQ ID NO: 55115 - protein, 269 aa, Unidentified
AQSVPWGISRVQAPAAHNRGLAGRGVKVAVLDTGISTHPDLNIRGGASFVPGEPSTQDGEGHGTHVAGTIAALNNSIGVLGVAPSAELYAVKVLGASGSGSVSSIAQGLEWAGNNGMHVANLSLGSPSPSATLEQAVNSATSRGVLVVAASGNSGEGSISYPARYANAMAVGATDQNNNRASFSQYGAGLDIVAPGVNVQSTYPGSTYASLNGTSMATPHVAGAAALVKQKNPSWSNVQIRNHLKNTATSLGSTNLYGSGLVNAEAATR

SEQ ID NO: 55116 - protein, 269 aa, Unidentified
AQSVPWGISRVQAPAAHNRGLTGSGVKVAVLDTGISTHPDLNIRGGASFVPGEPSTQDGNGHGTHVAGTIAALNNNIGVLGVAPSAELYAVKVLAASGQGSVSSIAQGLEWAGNNGMHVANLSLGSPSPSATLEQAVNSATSRGVLVVAASGNSGAGSISYPARYANAMAVGATDQNNNRASFSQYGAGLDIVAPGVNVQSTYPGSTYASQNGTSMATPHVAGAAALVKQKNPSWSNVQIRNHLKNTATSLGSTNLYGSGLVNAEAATR

SEQ ID NO: 55117 - protein, 269 aa, Unidentified
AQSVPWGISRVQAPASHNRGLTGSGVKVAVLDTGISTHPDLNIRGGASFVPGEPSTQDGNGHGTHVAGTIAALNNSIGVLGVAPSAELYAVKVLGASGGGGLSSIAQGLEWAGNNGMHVANLSLGSPSPSATLEQAVNSATSRGVLVVAASGNSGAGSISYPARYANAMAVGATDQNNNRASFSQYGAGLDIVAPGVNVQSTYPGSTYASLNGTSMATPHVAGAAALVKQKNPSWSNVQIRNHLKNTATSLGSTNLYGSGLVNAEAATR

SEQ ID NO: 55118 - protein, 269 aa, Unidentified
AQSVPWGISRVQAPAAHNRRLTGRGVKVAVLDTGISTHPDLNIRGGASFVPGEPSTQDGNGHGTHVAGTIAALNNSIGVLGVAPSAELYAVKVLGASGAGSVSSIAQGLEWAGLNGMHVANLSLGSPSPSATLEQAVNSATSRGVLVVAASGNSGAGSISYPARYANAMAVGATDQNNNRASFSQYGAGLDIVAPGVNVQSTYPGSTYASLNGTSMATPHVAGAAALVKQKNPSWSNVQIRNHLKNTATSLGSTNLYGSGLVNAEAATR

SEQ ID NO: 55119 - protein, 269 aa, Synthetic construct
AQSVPWGISRVQAPAAHNRGLTGSGVKVAVLDTGISTHPDLNIRGGASFVPGEPSTQDGNGHGTHVAGTIAALDNSIGVLGVAPSAELYAVKVLGADGRGAVSSIAQGLEWAGNNGMHVANLSLGSPSPSATLEQAVNSATSRGVLVVAASGNSGAGSISYPARYANAMAVGATDQNNNRASFSQYGAGLDIVAPGVNVQSTYPGSTYASLNGTSMATPHVAGAAALVKQKNPSWSNVQIRNHLKNTATSLGSTNLYGSGLVNAEAATR

SEQ ID NO: 55120 - protein, 269 aa, Unidentified
AQSVPWGISRVQAPAAHNRGLLGFGVKVAVLDTGISTHPDLNIRGGASFVPGEPSTQDGNGHGTHVAGTIAALNNSIGVLGVAPSAELYAVKVLGASGSGSVSSIAQGLEWAGNNGMHVANLSLGSPSPSATLEQAVNSATSRGVLVVAASGNSGAGSISYPARYANAMAVGATDQNNNRASFSQYGAGLDIVAPGVNVQSTYPGSAYASENGTSMATPHVAGAAALVKQKNPSWSNVQIRNHLKNTATSLGSTNLYGSGLVNAEAATR

SEQ ID NO: 55121 - protein, 269 aa, Unidentified
AQSVPWGISRVQAPAAHNRKLTGSGVKVAVLDTGISTHPDLRIRGGASFVPGEPSTQDGNGHGTHVAGTIAALNNSIGVLGVAPSAELYAVKVLGASGSGSVSSIAQGLEWAGNNGMHVANLSLGLPSPSATLEQAVNSATSRGVLVVAASGNSGAGSISYPARYANAMAVGATDQNNNRASFSQYGAGLDIVAPGVNVQSTYPGSTYASLNGTSMATPHVAGAAALVKQKNPRWSNVQIRNHLKNTATSLGSTNLYGSGLVNAEAATR

SEQ ID NO: 55122 - protein, 269 aa, Unidentified
AQSVPWGISRVQAPAAHNRGLTGSGVKVAVLDTGISTHPDLNIRGGASFVPGEPSTQDGNGHGTHVAGTIAALNNSIGVLGVAPSAELYAVKVLPATGAGSLSSIAQGLEWAGNNGMHVANLSLGSPSPSATLEQAVNSATSRGVLVVAASGNSGAGSISYPARYANAMAVGATDQNNNRASFSQYGAGLDIVAPGVNVQSTYPGSTYASLNGTSMATPHVAGAAALVKQKNPSWSNVQIRNHLKNTATSLGSTNLYGSGLVNAEAATR

SEQ ID NO: 55123 - protein, 269 aa, Unidentified
AQSVPWGISRVQAPAAHNRGLTGSGVKVAVLDTGISTHPDLNIRGGASFVPGEPSTQDGNGHGTHVAGTIAALDNSIGVLGVAPSAELYAVKVLGASGGGSISSIAQGLEWAGNNGMHVANLSLGSPSPSATLEQAVNSATSRGVLVVAASGNSGAGSISYPARYANAMAVGATDQNNNRASFSQYGAGLDIVAPGVNVQSTYPGSTYASLNGTSMATPHVAGAAALVKQKNPSWSNVRIRNHLKNTATSLGSTNLYGSGLVNAEAATR

SEQ ID NO: 55124 - protein, 269 aa, Unidentified
AQSVPWGISRVQAPASHNRGLTGSGVKVAVLDTGISTHPDLNIRGGASFVPGEPSTQDGNGHGTHVAGTIAALNNSIGVLGVAPSAELYAVKVLGASGAGSVSSIAQGLEWAGNNGMHVANLSLGNPSPSATLEQAVNSATSRGVLVVAASGNSGAGSISYPARYANAMAVGATDQNNNHASFSQYGAGLDIVAPGVNVQSTYPGSTYASLNGTSMATPHVAGAAALVKQKNPSWSNVQIRNHLKNTATSLGSTNLYGSGLVNAEAATR

SEQ ID NO: 55125 - protein, 269 aa, Unidentified
AQSVPWGISRVQAPAAHNRGLTGRGVKVAVLDTGISTHPDLRIRGGASFVPGEPSTQDGNGHGTHVAGTIAALNNSIGVLGVAPSAELYAVKVLGASGAGSVSSIAQGLEWAGNNGMHVANLSLGSPSPSATLEQAVNSATSRGVLVVAASGNSGAGSISYPARYANAMAVGATDQNNNRASFSQYGAGLDIVAPGVNVQSTYIGSTYASLNGTSMATPHVAGAAALVKQKNPSWSNVQIRNHLKNTATSLGSTNLYGSGLVNAEAATR

SEQ ID NO: 55126 - protein, 269 aa, Unidentified
AQSVPWGISRVQAPAAHNRGLTGSGVKVAVLDTGISTHPDLNIRGGASFVPGEPSTQDGNGHGTHVAGTIAALNNSIGVLGVAPSAELYAVKVLGASGSGSVSSIAQGLEWAGLNRMHVANLSLGSESPSATLEQAVNSATSRGVLVVAASGNSGAGSISYPARYANAMAVGATDQNNNRADFSQYGAGLDIVAPGVNVQSTYPGSTYASLNGTSMATPHVAGAAALVKQKNPSWSNVQIRNHLKNTATSLGSTNLYGSGLVNAEAATR

SEQ ID NO: 55127 - protein, 269 aa, Unidentified
AQSVPWGISRVQAPAAHNRRLTGSGVKVAVLDTGISTHPDLRIRGGASFVPGEPSTQDGNGHGTHVAGTIAALNNRIGVLGVAPSAELYAVKVLGASGSGSVSSIAQGLEWAGNNGMHVANLSLGSPSPSATLEQAVNSATSRGVLVVAASGNSGAGSISYPARYANAMAVGATDQNNNRASFSQYGAGLDIVAPGVNVQSTYPGSTYASLNGTSMATPHVAGAAALVKQKNPSWSNVQIRNRLKNTATSLGSTNLYGSGLVNAEAATR

SEQ ID NO: 55128 - protein, 269 aa, Synthetic construct
AQSVPWGISRVQAPAAHNRGLTGSGVKVAVLDTGISTHPDLNIRGGASFVPGEPSTQDGNGHGTHVAGTIAALDNSIGVLGVAPSAELYAVKVLGASGSGAISSIAQGLEWAGNNGMHVASLSLGSPSPSATLEQAVNSATSRGVLVVAASGNSGAGSISYPARYANAMAVGATDQNNNRASFSQYGAGLDIVAPGVNVQSTYPGSTYASLNGTSMATPHVAGAAALVKQKNPSWSNVQIRNHLKNTATSLGSTNLYGSGLVNAEAATR

SEQ ID NO: 55129 - protein, 269 aa, Unidentified
AQSVPWGISRVQAPAAHRRRLTGSGVKVAVLDTGISTHPDLRIRGGASFVPGEPSTQDGNGHGTHVAGTIAALDNSIGVLGVAPSAELYAVKVLGASGSGSVSSIAQGLEWAGNNGMHVANLSLGSPSPSATLEQAVNSATSRGVLVVAASGNSGAGSISYPARYANAMAVGATDQNNNRASFSQYGAGLDIVAPGVNVQSTYPGSTYASLNGTSMATPHVAGAAALVKQKNPSWSNVQIRNHLKNTATSLGSTNLYGSGLVNAEAATR

SEQ ID NO: 55130 - protein, 269 aa, Unidentified
AQSVPWGISRVQAPAAHNRGLTGSGVKVAVLDTGISTHPDLNIRGGASFVPGEPSTQDGNGHGTHVAGTIAALNNDINVLGVAPSAELYAVKVLGASGSGSVSSIAQGLEWAGNNGMRVANLSLGSPRPSATLEQAVNSATSRGVLVVAASGNSGAGSISYPARYANAMAVGATDQNNNRASFSQYGAGLDIVAPGVNVQSTYPGSTYASLNGTSMATPHVAGAAALVKQKNPSWSNVQIRNHLKNTATSLGSTNLYGSGLVNAEAATR

SEQ ID NO: 55131 - protein, 269 aa, Unidentified
AQSVPWGISRVQAPAAHNRGLTGSGVKVAVLDTGISTHPDLNIRGGASFVPGEPSTQDGNGHGTHVAGTIAALNNSIGVLGVAPSAELYAVKVLGASGSGSVSSIAQGLEWAGNNVMHVANLSLGVMSPSATLEQAVNSATSRGVLVVAASGNSGAGSISYPARYANAMAVGATDQNNNRASFSQYGAGLDIVAPGVGVQSTYPGSTYASLNGTSMATPHVAGAAALVKQKNPSWSNVQIRNHLKNTATSLGSTNLYGSGLVNAEAATR

SEQ ID NO: 55132 - protein, 269 aa, Unidentified
AQSVPWGISRVQAPAAHNRRLTGSGVKVAVLDTGISTHPDLNIRGGASFVPGEPSTQDGNGHGTHVAGTIAALNNSIGVLGVAPSAELYAVKVLGASGSGSVSSIAQGLEWAGNNRMHVANLSLGSPSPSATLEQAVNSATSRGVLVVAASGNSGAGSISYPARYANAMAVGATDQNNNRADFSQYGAGLDIVAPGVNVQSTYPGSTYASLNGTSMATPHVAGAAALVKQKNPSWSNVQIRDHLKNTATSLGSTNLYGSGLVNAEAATR

SEQ ID NO: 55133 - protein, 269 aa, Unidentified
AQSVPWGISRVQAPAAHNRGLTGRGVKVAVLDTGISTHPDLNIRGGASFVPGEPSTQDGNGHGTHVAGTIAALNNSIGVLGVAPSAELYAVKVLGASGSGSVSSIAQGLEWAGLNRMHVANLSLGSPSPSATLEQAVNSATSRGVLVVAASGNSGAGSIDYPARYANAMAVGATDQNNNRASFSQYGAGLDIVAPGVNVQSTYPGSTYASLNGTSMATPHVAGAAALVKQKNPSWSNVQIRNHLKNTATSLGSTNLYGSGLVNAEAATR

SEQ ID NO: 55134 - protein, 269 aa, Unidentified
AQSVPWGISRVQAPAAHNRRLTGSGVKVAVLDTGISTHPDLRIRGGASFVPGEPSTQDGNGHGTHVAGTIAALNNSIGVLGVAPSAELYAVKVLGASGAGSVSSIAQGLEWAGNNGMHVANLSLGSPSPSATLEQAVNSATSRGVLVVAASGNSGAGSISYPARYANAMAVGATDQNNNRASFSQYGAGLDIVAPGVNVQSTYIGSTYASLNGTSMATPHVAGAAALVKQKNPSWSNVQIRNHLKNTATSLGSTNLYGSGLVNAEAATR

SEQ ID NO: 55135 - protein, 269 aa, Unidentified
AQSVPWGISRVQAPAAHRRGLTGRGVKVAVLDTGISTHPDLNIRGGASFVPGEPSTQDGNGHGTHVAGTIAALDNSIGVLGVAPSAELYAVKVLGASGSGSVSSIAQGLEWAGNNGMHVANLSLGSPSPSATLEQAVNSATSRGVLVVAASGNSGAGSISYPARYANAMAVGATDQNNNRASFSQYGAGLDIVAPGVNVQSTYPGSTYASLNGTSMATPHVAGAAVLVKQKNPSWSNVQIRNHLKNTATSLGSTNLYGSGLVNAEAATR

SEQ ID NO: 55136 - protein, 269 aa, Unidentified
AQSVPWGISRVQAPAAHNRGLTGSGVKVAVLDTGISTHPDLNIRGGASFVPGEPSTQDGNGHGTHVAGTIAALNNSIGVLGVAPSAELYAVKVLPFAGSGSISSIAQGLEWAGNNGMHVANLSLGSPSPSATLEQAVNSATSRGVLVVAASGNSGAGSISYPARYANAMAVGATDQNNNRASFSQYGAGLDIVAPGVNVQSTYPGSTYASLNGTSMATPHVAGAAALVKQKNPSWSNVQIRNHLKNTATSLGSTNLYGSGLVNAEAATR

SEQ ID NO: 55137 - protein, 269 aa, Unidentified
AQSVPWGISRVQAPAAHNRGLTGSGVKVAVLDTGISTHEDLNIRGGASFVPGEPSTQDGNGHGTHVAGTIAALNNSIGVLGVAPSAELYAVKVLGASGRGSVSSIAQGLEWAGNNGMHVANLSLGTPSPSATLEQAVNSATSRGVLVVAASGNSGAGSISYPARYANAMAVGATDQNNNRASFSQYGAGLDIVAPGVNVQSTYPGSTYASLNGTSMATPHVAGAAALVKQKNPSWSNVQIRDHLKNTATSLGSTNLYGSGLVNAEAATR

SEQ ID NO: 55138 - protein, 269 aa, Unidentified
AQSVPWGISRVQAPAAHNRGLTGSGVKVAVLDTGISTHPDLNIRGGASFVPGEPSTQDGNGHGTHVAGTIAALNNGIGVLGVAPSAELYAVKVLGASGSGSVSSIAQGLEWAGNNDMHVANLSLGSESPSATLEQAVNSATSRGVLVVAASGNSGADSISYPARYANAMAVGATDQNNNRASFSQYGAGLDIVAPGVNVQSTYPGSTYASLNGTSMATPHVAGAAALVKQKNPSWSNVQIRNHLKNTATSLGSTNLYGSGLVNAEAATR

SEQ ID NO: 55139 - protein, 269 aa, Unidentified
AQSVPWGISRVQAPAAHNRGLAGSGVKVAVLDTGISTHPDLNIRGGASFVPGEPSTQDGNGHGTHVAGTIAALNNSIGVLGVAPSAELYAVKVLGASGSGSVSSIAQGLEWAGNNRMHVANLSLGIPSPSATLEQAVNSATSRGVLVVAASGNSGEGSISYPARYANAMAVGATDQNNNRASFSQYGAGLDIVAPGVNVQSTYPGSTYASLNGTSMATPHVAGAAALVKQKNPSWSNVQIRNHLKNTATSLGSTNLYGSGLVNAEAATR

SEQ ID NO: 55140 - protein, 269 aa, Synthetic construct
AQSVPWGISRVQAPAAHNRGLTGSGVKVAVLDTGISTHPDLNIRGGASFVPGDPSTQDGNGHGTHVAGTIAALNNSIGVLGVAPSAELFAVRVLGASGSGSVSSIAQGLEWAGNNGMNVANLSLGSPSPSATLEQAVNSATSRGVLVVAASGNSGAGSISYPARYANAMAVGATDQNNNRASFSQYGAGLDIVAPGVNVQSTYPGSTYASLNGTSMATPHVAGAAALVKQKNPSWSNVQIRNHLKNTATSLGSTNLYGSGLVNAEAATR

SEQ ID NO: 55141 - protein, 269 aa, Alkalihalobacillus clausii
AQSVPWGISRLQAPAAHNRGLTGSGVKVAVLDTGISTHPDLNIRGGASFVPGEPSTQDGNGHGTHVAGTIAALNNSIGVLGVAPSAELYAVKVLPASGSGSVSSIAQGLEWAGNNGMHVANLSLGSPSPSATLEQAVNSATSRGLLVVAASGNSGAGSISYPARYANAMAVGATDQNNNRASFSQYGAGLDIVAPGVNVQSTYPGSTYASLTGTSMATPHVAGAAALVKQKNPSWSNVQIRNHLKNTATSLGSTNLYGSGLVNAEAATR

SEQ ID NO: 55142 - protein, 269 aa, Unidentified
AQSVPWGISRVQAPAAHNRGLTGSGVKVAVLDTGISTHPDLNIRGGASFVPGEPSTQDGNGHGTHVAGTIAALNNSIGVLGVAPSAELYAVKVLPQTGAGSVSSIAQGLEWAGNNGMHVANLSLGSPSPSATLEQAVNSATSRGVLVVAASGNSGAGSISYPARYANAMAVGATDQNNNRASFSQYGAGLDIVAPGVNVQSTYPGSTYASLNGTSMATPHVAGAAALVKQKNPSWSNVQIRNHLKNTATSLGSTNLYGSGLVNAEAATR

SEQ ID NO: 55143 - protein, 269 aa, Unidentified
AQSVPWGISRVQAPAAHRRGLTGSGVKVAVLDTGISTHPDLRIRGGASFVPGEPSTQDGNGHGTHVAGTIAALDNSIGVLGVAPSAELYAVKVLGASGSGSVSSIAQGLEWAGNNGMHVANLSLGSPSPSATLEQAVNSATSRGVLVVAASGNSGAGSISYPARYANAMAVGATDQNNNRASFSQYGAGLDIVAPGVNVQSTYPGSTYASLNGTSMATPHVAGEAALVKQKNPSWSNVQIRNHLKNTATSLGSTNLYGSGLVNAEAATR

SEQ ID NO: 55144 - protein, 269 aa, Alkalihalobacillus clausii
AQSVPWGISRLQAPAAHNRGLTGSGVKVAVLDTGISTHPDLNIRGGASFVPGEPSTQDGNGHGTHVAGTIAALNNSIGVLGVAPSAELYAVKVLPASGSGSVSSIAQGLEWAGNNGMHVANLSLGSPSPSATLEQAVNSATSRGLLVVAASGNSGAGSISYPARYANAMAVGATDQNNNRASFSQYGAGLDIVAPGVNVQSTYPGSTYASLSGTSMATPHVAGAAALVKQKNPSWSNVQIRNHLKNTATSLGSTNLYGSGLVNAEAATR

SEQ ID NO: 55145 - protein, 269 aa, Unidentified
AQSVPWGISRVQAPAAHNRGLAGSGVKVAVLDSGISTHPDLNIRGGASFVPGEPSTQDGNGHGTHVAGTIAALNNSIGVLGVAPSAELYAVKVLGASGSGSVSSIAQGLEWAGNNGMHVANLSLGIPSPSATLEQAVNSATSRGVLVVAASGNSGAGSIDYPARYANAMAVGATDQNNNRASFSQYGAGLDIVAPGVNVQSTYPGSTYASLNGTSMATPHVAGAAALVKQKNPSWSNVQIRNHLKNTATSLGSTNLYGSGLVNAEAATR

SEQ ID NO: 55146 - protein, 269 aa, Unidentified
AQSVPWGISRVQAPAAHNRRLTGSGVKVAVLDTGISTHPDLNITGGASFVPGEPSTQDGNGHGTHVAGTIAALNNSIGVLGVAPSAELYAVKVLGASGSGSVSSIAQGLEWAGANGMHVANLSLGSPSPSATLEQAVNSATSRGVLVVAASGNSGAGSISYPARYANAMAVGATDQNNNRASFSQYGAGLDIVAPGVNVQSTYPGSTYASLNGTSMATPHVAGAAALVKQKNPSWSNVQIRNHLKNTATSLGSTNLYGSGLVRAEAATR

SEQ ID NO: 55147 - protein, 269 aa, Unidentified
AQSVPWGISRVQAPAAHNRGLLGSGVKVAVLDTGISTHPDLNIRGGASFVPGEPSTQDGNGHGTHVAGTIAALNNNIGVLGVAPSAELYAVKVLGASGSGSVSSIAQGLEWAGNNGMHVANLSLGSPSPSATLEQAVNSATSRGVLVVAASGNSGAGSIDYPARYANAMAVGATDQNNNRASFSQYGAGLDIVAPGVNVQSTYPGSAYASLNGTSMATPHVAGAAALVKQKNPSWSNVQIRNHLKNTATSLGSTNLYGSGLVNAEAATR

SEQ ID NO: 55148 - protein, 269 aa, Unidentified
AQSVPWGISRVQAPAAHNRGLLGFGVKVAVLDTGISTHPDLNIRGGASFVPGEPSTQDGNGHGTHVAGTIAALNNNIGVLGVAPSAELYAVKVLGASGSGSVSSIAQGLEWAGNNGMHVANLSLGSPSPSATLEQAVNSATSRGVLVVAASGNSGAGSIDYPARYANAMAVGATDQNNNRASFSQYGAGLDIVAPGVNVQSTYPGSTYASLNGTSMATPHVAGAAALVKQKNPSWSNVQIRNHLKNTATSLGSTNLYGSGLVNAEAATR

SEQ ID NO: 55149 - protein, 269 aa, Unidentified
AQVVPWGISRVQAPAAHNRGLTGSGVKVAVLDTGISTHPDLNIRGGASFVPGEPSTQDGNGHGTHVAGTIAALNNSIGVLGVAPSAELYAVKVLGASGSGSVSSIAQGLEWAGNNGMHVANLSMGSPSPSATLEQAVNSATSRGVLVVAASGNSGAGSISYPARYQNAMAVGATDQNNNRASFSQYGAGLDIVAPGVNVQSTYPGSTYAILNGTSMATPHVAGAAALVKQKNPSWSNVQIRNHLKNTATSLGSTNLYGSGLVNAEAATR

SEQ ID NO: 55150 - protein, 269 aa, Unidentified
AQSVPWGISRVRAPAAHNRGLTGSGVKVAVLDTGISTHPDLNIRGGASFVPGEPSTQDGNGHGTHVAGTIAALDNSIGVLGVAPSAELYAVKVLGASGSGKISSIAQGLEWAGNNGMHVANLSLGSPSPSATLEQAVNSATSRGVLVVAASGNSGAGSISYPARYANAMAVGATDQNNNRASFSQYGAGLDIVAPGVNVQSTYPGSTYASLNGTSMATPHVAGAAALVKQKNPSWSNVQIRNHLKNTATSLGSTNLYGSGLVNAEAATR

SEQ ID NO: 55151 - protein, 269 aa, Unidentified
AQSVPWGISRVQAPAAHNRGLTGSGVKVAVLDTGISTHPDLNIRGGASFVPGEPSTQDGNGHGTHVAGTIAALNNSIGVLGVAPSAELYAVKVLGASGSGSVSSIAQGLEWAGLNRMHVANLSLGIPSPSATLEQAVNSATSRGVLVVAASGNSGAGSIDYPARYANAMAVGATDQNNNRASFSQYGAGLDIVAPGVNVQSTYPGSTYASLNGTSMATPHVAGAAALVKQKNPSWSNVQIRNHLKNTATSLGSTNLYGSGLVNAEAATR

SEQ ID NO: 55152 - protein, 269 aa, Unidentified
AQSVPWGISRVQAPAAHNRGLTGSGVKVAVLDTGISTHPDLNIRGGASFVPGEPSTQDGEGHGTHVAGTIAALNNGIGVLGVAPSAELYAVKVLGASGSGSVSSIAQGLEWAGNNDMHVANLSLGSESPSATLEQAVNSATSRGVLVVAASGNSGAGSISYPARYANAMAVGATDQNNNRASFSQYGAGLDIVAPGVNVQSTYPGSTYASLNGTSMATPHVAGAAALVKQKNPSWSNVQIRNHLKNTATSLGSTNLYGSGLVNAEAATR

SEQ ID NO: 55153 - protein, 269 aa, Synthetic construct
AQSVPWGISRVQAPAAHNRGLTGSGVKVAVLDTGISTHPDLNIRGGASFVPGEPSTQDGNGHGTHVAGTIAALDNSIGVLGVAPSAELYAVKVLGASGSGATSSAAQGLEWAGNNGMHVANLSLGSPSPSATLEQAVNSATSRGVLVVAASGNSGAGSISYPARYANAMAVGATDQNNNRASFSQYGAGLDIVAPGVNVQSTYPGSTYASLNGTSMATPHVAGAAALVKQKNPSWSNVQIRNHLKNTATSLGSTNLYGSGLVNAEAATR

SEQ ID NO: 55154 - protein, 269 aa, Unidentified
AQSVPWGISRVQAPAAHNRGLTGSGVKVAVLDTGISTHPDLNIRGGASFVPGEPSTQDGNGHGTHVAGTIAALNNSIGVLGVAPSAELYAVKVLGASGGGSVSSIAQGLEWAGNNGMHVANLSLGSPSPSATLEQAVNSATSRGVLVVAASGNSGAGSISYPARYANALAVGATDQNNNRASFSQYGAGLDIVAPGVNVQSTYPGSTYASLNGTSMATPHVAGAAVLVKQKNPSWSNVRIRNHLKNTATSLGSTNLYGSGLVNAEAATR

SEQ ID NO: 55155 - protein, 269 aa, Unidentified
AQSVPWGISRVQAPAAHNRGLAGSGVKVAVLDTGISTHPDLNIRGGASFVPGEPSTQDGNGHGTHVAGTIAALNNSIGVLGVAPSAELYAVKVLGASGSGALSSIAQGLEWAGNNGMHVANLSLGSPSPSATLEQAVNSATSRGVIVVAASGNSGAGSISYPARYANAMAVGATDQNNNRASFSQYGAGLDIVAPGVNVQSTYPGSTYASLNGTSMATPHVAGAAALVKQKNPSWSNVQIRNHLKNTATSLGSTNLYGSGLVNAEAATR

SEQ ID NO: 55156 - protein, 269 aa, Unidentified
AQSVPWGISRVQAPAAHRRGLTGRGVKVAVLDTGISTHPDLNIRGGASFVPGEPSTQDGNGHGTHVAGTIAALNNSIGVLGVAPSAELYAVKVLGASGSGSISSIAQGLEWAGNNGMHVANLSLGSPSPSATLEQAVNSATSRGVLVVAASGNSGAGSISYPARYANAMAVGATDQNNNRASFSQYGAGLDIVAPGVNVQSTYPGSTYASLNGTSMATPHVAGAAALVKQKNPSWSNVQIRNRLKNTATSLGSTNLYGSGLVNAEAATR

SEQ ID NO: 55157 - protein, 269 aa, Unidentified
AQSVPWGISRVQAPAAHNRGLTGSGVKVAVLDTGISTHPDLRIRGGASFVPGEPSTQDGNGHGTHVAGTIAALNNSIGVLGVAPSAELYAVKVLGASSSGSVSSIAQGLEWAGNNGMHVANLSLGLPSPSATLEQAVNSATSRGVLVVAASGNSGAGSISYPARYANAMAVGATDQNNNRASFSQYGAGLDIVAPGVNVQSTYPGSTYASENGTSMATPHVAGAAALVKQKNPSWSNVQIRNHLKNTATSLGSTNLYGSGLVNAEAATR

SEQ ID NO: 55158 - protein, 269 aa, Unidentified
AQSVPWGISRVQAPAAHNRGLTGRGVKVAVLDSGISTHPDLNIRGGASFVPGEPSTQDGEGHGTHVAGTIAALNNSIGVLGVAPSAELYAVKVLGASGSGSVSSIAQGLEWAGLNGMHVANLSLGSPSPSATLEQAVNSATSRGVLVVAASGNSGAGSISYPARYANAMAVGATDQNNNRASFSQYGAGLDIVAPGVNVQSTYPGSTYASLNGTSMATPHVAGAAALVKQKNPSWSNVQIRNHLKNTATSLGSTNLYGSGLVNAEAATR

SEQ ID NO: 55159 - protein, 269 aa, Unidentified
AQSVPWGISRVQAPAAHNRGLTGSGVKVAVLDTGISTHPDLNIRGGASFVPGEPSTQDGNGHGTHVAGTIAALDNSIGVLGVAPSAELYAVKVLGASGSGAISSIAQGLEWAGNNGMHVANLSLGSPSPSATLEQAVNSATSRGVLVVAASGNSGAGSISYPARYANAMAVGATDQNNNRASFSQYGAGLDIVAPGVNVQSTYPGSTYASLNGTSSATPHVAGAAVLVKQKNPSWSNVRIRNHLKNTATSLGSTNLYGSGLVNAEAATR

SEQ ID NO: 55160 - protein, 269 aa, Unidentified
AQSVPWGISRVQAPAAHNRGLTGFGVKVAVLDTGISTHPDLNIRGGASFVPGEPSTQDGEGHGTHVAGTIAALNNSIGVLGVAPSAELYAVKVLGASGSGSVSSIAQGLEWAGNNRMHVANLSLGSPSPSATLEQAVNSATSRGVLVVAASGNSGAGSISYPARYANAMAVGATDQNNNRASFSQYGAGLDIVAPGVNVQSTYPGSTYASLNGTSMATPHVAGAAALVKQKNGSWSNVQIRNHLKNTATSLGSTNLYGSGLVNAEAATR

SEQ ID NO: 55161 - protein, 269 aa, Unidentified
AQSVPWGISRVQAPAAHNRKLTGSGVKVAVLDTGISTHPDLNIRGGASFVPGEPSTQDGEGHGTHVAGTIAALNNSIGVLGVAPSAELYAVKVLGASGDGSVSSIAQGLEWAGNNGMHVANLSLGSPSPSATLEQAVNSATSRGVLVVAASGNSGAGSISYPARYANAMAVGATDQNNNRASFSQYGAGLDIVAPGVNVQSTYPGSTYASLNGTSMATPHVAGAAALVKQKNPRWSNVQIRNHLKNTATSLGSTNLYGSGLVNAEAATR

SEQ ID NO: 55162 - protein, 269 aa, Unidentified
AQSVPWGISRVQAPAAHNRGLAGSGVKVAVLDTGISTHPDLNIRGGASFVPGEPSTQDGNGHGTHVAGTIAALNNSIGVLGVAPSAELYAVKVLGASGGGSLSSIAQGLEWAGNNGMHVANLSLGSPSPSATLEQAVNSATSRGVIVVAASGNSGAGSISYPARYANAMAVGATDQNNNRASFSQYGAGLDIVAPGVNVQSTYPGSTYASLNGTSMATPHVAGAAALVKQKNPSWSNVQIRNHLKNTATSLGSTNLYGSGLVNAEAATR

SEQ ID NO: 55163 - protein, 269 aa, Unidentified
AQSVPWGISRVQAPAAHNRGLTGSGVKVAVLDTGISTHPDLNIRGGASFVPGEPSTQDGNGHGTHVAGTIAALNNDIGVLGVAPSAELYAVKVLGASGSGSVSSIAQGLEWAGNNGMHVANLSMGSPQPSATLEQAVNSATSRGVLVVAASGNSGAGSISYPARYANAMAVGATDQNNNRASFSQYGAGLDIVAPGVNVQSTYPGSTYASLNGTSMLTPHVAGAAALVKQKNPSWSNVQIRNHLKNTATSLGSTNLYGSGLVNAEAATR

SEQ ID NO: 55164 - protein, 269 aa, Unidentified
AQSVPWGISRVQAPAAHNRGLTGRGVKVAVLDTGISTHPDLNIRGGASFVPGEPSTQDGNGHGTHVAGTIAALNNSIGVLGVAPSAELYAVKVLGASGSGSVSSIAQGLEWAGNNRMHVANLSLGSPSPSATLEQAVNSATSRGVLVVAASGNSGAGSISYPARYANAMAVGATDQNNNRASFSQYGAGLDIVAPGVNVQSTAPGSTYASLNGTSMATPHVAGAAALVFQKNPSWSNVQIRNHLKNTATSLGSTNLYGSGLVNAEAATR

SEQ ID NO: 55165 - protein, 269 aa, Unidentified
AQSVPWGISRVQAPAAHNRKLTGSGVKVAVLDTGISTHPDLNIRGGASFVPGEPSTQDGNGHGTHVAGTIAALNNNIGVLGVAPSAELYAVKVLGASGDGSVSSIAQGLEWAGNNGMHVANLSLGLPSPSATLEQAVNSATSRGVLVVAASGNSGAGSISYPARYANAMAVGATDQNNNRASFSQYGAGLDIVAPGVNVQSTYPGSTYASLNGTSMATPHVAGAAALVKQKNPSWSNVQIRNHLKNTATSLGSTNLYGSGLVNAEAATR

SEQ ID NO: 55166 - protein, 269 aa, Unidentified
AQSVPWGISRVQAPAAHNRGLTGSGVKVAVLDTGISTHPDLNIRGGASFVPGEPSTQDGNGHGTHVAGTIAALNNSIGVLGVAPSAELYAVKVLGASGSGAISSIAQGVEWAGNNGMHVANLSLGNPSPSATLEQAVNSATSRGVLVVAASGNSGAGSISYPARYANAMAVGATDQNNNRASFSQYGAGLDIVAPGVNVQSTYPGSTYASLNGTSMATPHVAGAAALVKQKNPSWSNVQIRNHLKNTATSLGSTNLYGSGLVNAEAATR

SEQ ID NO: 55167 - protein, 269 aa, Unidentified
AQSVPWGISRVQAPAAHNRGLTGSGVKVAVLDTGISTHPDLNIRGGASFVPGEPSTQDGNGHGTHVAGTIAALDNSIGVLGVAPSAELYAVKVLGASGSGAISSIARGLEWAGNNGMHVANLSLGSPSPSATLEQAVNSATSRGVLVVAASGNSGAGSISYPARYANAMAVGATDQNNNRASFSQYGAGLDIVAPGVNVQSTYPGSTYASLNGTSSATPHVAGAAALVKQKNPSWSNVQIRNHLKNTATSLGSTNLYGSGLVNADAATR

SEQ ID NO: 55168 - protein, 269 aa, Unidentified
AQSVPWGISRVQAPAAHNRKLTGSGVKVAVLDTGISTHPDLRIRGGASFVPGEPSTQDGNGHGTHVAGTIAALNNSIGVLGVAPSAELYAVKVLGASGSASVSSIAQGLEWAGNNGMHVANLSLGLPSPSATLEQAVNSATSRGVLVVAASGNSGAGSISYPARYANAMAVGATDQNNNRASFSQYGAGLDIVAPGVNVQSTYPGSTYASLNGTSMATPHVAGAAALVKQKNPSWSNVQIRNHLKNTATSLGSTNLYGSGLVNAEAATR

SEQ ID NO: 55169 - protein, 269 aa, Unidentified
AQVVPWGISRVQAPAAHNRGLTGSGVKVAVLDTGISTHPDLNIRGGASFVPGEPSTQDGNGHGTHVAGTIAALNNDIGVLGVAPSAELYAVKVLGASGSGSVSSIAQGLEWAGNNGMHVANLSLGSPSPSATLEQAVNSATSRGVLVVAASGNSGAGSISYPARYQNAMAVGATDQNNNRASFSQYGAGLDIVAPGVNVQSTYPGSTYAILNGTSMATPHVAGAAALVKQKNPSWSNVQIRNHLKNTATSLGSTNLYGSGLVNAEAATR

SEQ ID NO: 55170 - protein, 269 aa, Unidentified
AQSVPWGISRVQAPAAHNRGLTGSGVKVAVLDTGISTHPDLNIRGGASFVPGEPSTQDGNGHGTHVAGTIAALNNDIGVLGVAPSAELYAVKVLGASGSGSVSSIAQGLEWAGNNGMHVANLSMGSPSPSATLEQAVNSATSRGVLVVAASGNSGAGSISYPARYQNAMAVGATDQNNNRASFSQYGAGLDIVAPGVNVQSTYPGSTYASPNGTSMATPHVAGAAALVKQKNPSWSNVQIRNHLKNTATSLGSTNLYGSGLVNAEAATR

SEQ ID NO: 55171 - protein, 269 aa, Unidentified
AQSVPWGISRVQAPAAHNRGLTGSGVKVAVLDTGISTHPDLNIRGGASFVPGEPSTQDGNGHGTHVAGTIAALNNSIGVLGVAPSAELYAVKVLPQSSSGAVSSIAQGLEWAGNNGMHVANLSLGSPSPSATLEQAVNSATSRGVLVVAASGNSGAGSISYPARYANAMAVGATDQNNNRASFSQYGAGLDIVAPGVNVQSTYPGSTYASLNGTSMATPHVAGAAALVKQKNPSWSNVQIRNHLKNTATSLGSTNLYGSGLVNAEAATR

SEQ ID NO: 55172 - protein, 269 aa, Synthetic construct
AQSVPWGISRVQAPAAHNRGLTGSGVKVAVLDTGISTHPDLNIRGGASFVPGDPSTQDGNGHGTHVAGTIAALNNSIGVLGVAPSAELFAVRVLGASGSGSVSSIAQGLEWAGNNGMDVANLSLGSPSPSATLEQAVNSATSRGVLVVAASGNSGAGSISYPARYANAMAVGATDQNNNRASFSQYGAGLDIVAPGVNVQSTYPGSTYASLNGTSMATPHVAGAAALVKQKNPSWSNVQIRNHLKNTATSLGSTNLYGSGLVNAEAATR

SEQ ID NO: 55173 - protein, 269 aa, Unidentified
AQSVPWGISRVQAPAAHNRGLAGRGVKVAVLDTGISTHPDLNIRGGASFVPGEPSTQDGNGHGTHVAGTIAALNNSIGVLGVAPSAELYAVKVLGASGSGSVSSIAQGLEWAGLNGMHVANLSLGSPSPSATLEQAVNSATSRGVLVVAASGNSGAGSIDYPARYANAMAVGATDQNNNRASFSQYGAGLDIVAPGVNVQSTYPGSTYASLNGTSMATPHVAGAAALVKQKNPSWSNVQIRNHLKNTATSLGSTNLYGSGLVNAEAATR

SEQ ID NO: 55174 - protein, 269 aa, Unidentified
AQSVPWGISRVQAPAAHNRGLTGSGVKVAVLDTGISTHPDLNIRGGASFVPGEPSTQDGNGHGTHVAGTIAALNNSIGVLGVAPSAELYAVKVLGASGSGSVSSIAQGLEWAGNNRMHVANLSLGSPSPSATLEQAVNSATSRGVLVVAASGNSGAGSIDYPARYANAMAVGATDQNNNRASFSQYGAGLDIVAPGVNVQSTYPGSAYASENGTSMATPHVAGAAALVKQKNPSWSNVQIRNHLKNTATSLGSTNLYGSGLVNAEAATR

SEQ ID NO: 55175 - protein, 269 aa, Unidentified
AQSVPWGISRVQAPAAHNRGLTGSGVKVAVLDTGISTHEDLNIRGGASFVPGEPSYQDGNGHGTHVAGTIAALNNSIGVLGVAPSADLYAVKVLGASGSGSVSSIAQGLEWAGQNGMHVANLSLGSPSPSATLEQAVNSATSRGVLVVAASGNSGAGSISYPARYANAMAVGATDQNNNRASFSQYGAGLDIVAPGVNVQSTYPGSTYASLNGTSMATPHVAGAAALVKQKNPSWSNVQIRNHLKNTATSLGSTNLYGSGLVNAEAATR

SEQ ID NO: 55176 - protein, 269 aa, Unidentified
AQSVPWGISRVQAPAAHNRGLTGRGVKVAVLDTGISTHPDLNIRGGASFVPGEPSTQDGNGHGTHVAGTIAALNNSIGVLGVAPSAELYAVKVLGASGSGSVSSIAQGLEWAGLNGMHVANLSLGIPSPSATLEQAVNSATSRGVLVVAASGNSGAGSIDYPARYANAMAVGATDQNNNRASFSQYGAGLDIVAPGVNVQSTYPGSTYASLNGTSMATPHVAGAAALVKQKNPSWSNVQIRNHLKNTATSLGSTNLYGSGLVNAEAATR

SEQ ID NO: 55177 - protein, 269 aa, Unidentified
AQSVPWGISRVQAPAAHRRGLTGRGVKVAVLDTGISTHPDLNIRGGASFVPGEPSTQDGNGHGTHVAGTIAALDNSIGVLGVAPSAELYAVKVLGASGGGSVSSIAQGLEWAGNNGMHVANLSLGSPSPSATLEQAVNSATSRGVLVVAASGNSGAGSISYPARYANAMAVGATDQNNNRASFSQYGAGLDIVAPGVNVQSTYPGSTYASLNGTSMATPHVAGAAALVKQKNPSWSNVQIRNHLKNTATSLGSTNLYGSGLVNAEAATR

SEQ ID NO: 55178 - protein, 269 aa, Unidentified
AQSVPWGISRVQAPAAHNRGLTGSGVKVAVLDTGISTHPDLNIRGGASFVPGEPSTQDGNGHGTHVAGTIAALNNGIGVLGVAPSAELYAVKVLGASGSGSVSSIAQGLEWAGNNSMHVANLSLGSPSPSATLEQAVNSATSRGVLVVAASGNSGADSISYPARYANAMAVGATDQNNNRASFSQYGAGLDIVAPGVNVQSTYPGSTYASLNGTSMATPHVAGAAALVKQKNPSWSNVQIRDHLKNTATSLGSTNLYGSGLVNAEAATR

SEQ ID NO: 55179 - protein, 269 aa, Unidentified
AQSVPWGISRVQAPAAHNRGLTGSGVKVAVFDTGISTHPDLNIRGGASFVPGEPSTQDGNGHGTHVAGTIAALNNSIGVLGVAPSAELYAVKVLGASGSGSVSSIAQGLEWAGLNGMHVANLSLGSPSPSATLEQAVNSATSRGVLVVAASGNSGAGSISYPARYANAMAVGATDQNNNRASFSQYGAGLDIVAPGVNVQSTYPGSTYASLNGTSMATPHVAGAAALVKQKNPSWSNVQIRNHLKNTATNLGSTNLYGSGLVNAEFATR

SEQ ID NO: 55180 - protein, 269 aa, Unidentified
AQSVPWGISRVQAPAAHNRGLAGSGVKVAVLDTGISTHPDLNIRGGASFVPGEPSTQDGEGHGTHVAGTIAALNNSIGVLGVAPSAELYAVKVLGASGSGSVSSIAQGLEWAGNNGMHVANLSLGSPSPSATLEQAVNSATSRGVLVVAASGNSGEGSISYPARYANAMAVGATDQNNNRADFSQYGAGLDIVAPGVNVQSTYPGSTYASLNGTSMATPHVAGAAALVKQKNPSWSNVQIRNHLKNTATSLGSTNLYGSGLVNAEAATR

SEQ ID NO: 55181 - protein, 269 aa, Unidentified
AQSVPWGISRVQAPAAHNRGLTGSGVKVAVLDTGISTHPDLNIRGGASFVPGEPSTQDGNGHGTHVAGTIAALNNSIGVLGVAPSAELYAVKVLGASGSGSVSSIAQGLEWAGLNGMHVANLSLGIPSPSATLEQAVNSATSRGVLVVAASGNSGEGSIDYPARYANAMAVGATDQNNNRASFSQYGAGLDIVAPGVNVQSTYPGSTYASLNGTSMATPHVAGAAALVKQKNPSWSNVQIRNHLKNTATSLGSTNLYGSGLVNAEAATR

SEQ ID NO: 55182 - protein, 269 aa, Unidentified
AQSVPWGISRVQAPAAHNRGLTGSGVKVAVLDTGISTHPDLNIRGGASFVPGEPSTQDGNGHGTHVAGTIAALNNNIGVLGVAPSAELYAVKVLGASGSGSVSSIAQGLEWAGNNRMHVANLSLGSPSPSATLEQAVNSATSRGVLVVAASGNSGAGSIDYPARYANAMAVGATDQNNNRASFSQYGAGLDIVAPGVNVQSTYPGSTYASENGTSMATPHVAGAAALVKQKNPSWSNVQIRNHLKNTATSLGSTNLYGSGLVNAEAATR

SEQ ID NO: 55183 - protein, 269 aa, Unidentified
AQSVPWGISRVQAPAAHNRGLTGSGVKVAVLDTGISTHPDLNIRGGASFVPGEPSTQDGEGHGTHVAGTIAALNNSIGVLGVAPSAELYAVKVLGASGSGSVSSIAQGLEWAGLNRMHVANLSLGSPSPSATLEQAVNSATSRGVLVVAASGNSGAGSISYPARYANAMAVGATDQNNNRASFSQYGAGLDIVAPGVNVQSTYPGSAYASLNGTSMATPHVAGAAALVKQKNPSWSNVQIRNHLKNTATSLGSTNLYGSGLVNAEAATR

SEQ ID NO: 55184 - protein, 269 aa, Unidentified
AQSVPWGISRVQAPAAHNRKLTGSGVKVAVLDTGISTHPDLNIRGGASFVPGEPSTQDGEGHGTHVAGTIAALNNSIGVLGVAPSAELYAVKVLGASGSGSVSSIAQGLEWAGLNGMHVANLSLGSPSPSATLEQAVNSATSRGVLVVAASGNSGAGSISYPARYANAMAVGATDQNNNRADFSQYGAGLDIVAPGVNVQSTYPGSTYASLNGTSMATPHVAGAAALVKQKNPSWSNVQIRNHLKNTATSLGSTNLYGSGLVNAEAATR

SEQ ID NO: 55185 - protein, 269 aa, Unidentified
AQSVPWGISRVQAPAAHNRGLTGSGVKVAVLDTGISTHPDLNIRGGASFVPGEPSTQDGEGHGTHVAGTIAALNNDIGVLGVAPSAELYAVKVLGASGSGSVSSIAQGLEWAGNNDMHVANLSLGSPSPSATLEQAVNSATSRGVLVVAASGNSGADSISYPARYANAMAVGATDQNNNRASFSQYGAGLDIVAPGVNVQSTYPGSTYASLNGTSMATPHVAGAAALVKQKNPSWSNVQIRNHLKNTATSLGSTNLYGSGLVNAEAATR

SEQ ID NO: 55186 - protein, 269 aa, Unidentified
AQSVPWGISRVQAPAAHNRKLTGSGVKVAVLDTGISTHPDLNIRGGASFVPGEPSTQDGEGHGTHVAGTIAALNNNIGVLGVAPSAELYAVKVLGASGSGSVSSIAQGLEWAGNNGMHVANLSLGIPSPSATLEQAVNSATSRGVLVVAASGNSGAGSISYPARYANAMAVGATDQNNNRASFSQYGAGLDIVAPGVNVQSTYPGSTYASLNGTSMATPHVAGAAALVKQKNPSWSNVQIRNHLKNTATSLGSTNLYGSGLVNAEAATR

SEQ ID NO: 55187 - protein, 269 aa, Unidentified
AQSVPWGISRVQAPAAHNRGLLGSGVKVAVLDTGISTHPDLNIRGGASFVPGEPSTQDGNGHGTHVAGTIAALNNSIGVLGVAPSAELYAVKVLGASGSGSVSSIAQGLEWAGNNRMHVANLSLGDPSPSATLEQAVNSATSRGVLVVAASGNSGAGSISYPARYANAMAVGATDQNNNRASFSQYGAGLDIVAPGVNVQSTYPGSAYASLNGTSMATPHVAGAAALVKQKNPSWSNVQIRNHLKNTATSLGSTNLYGSGLVNAEAATR

SEQ ID NO: 55188 - protein, 269 aa, Unidentified
AQSVPWGISRVQAPAAHNRGLAGSGVKVAVLDSGISTHPDLNIRGGASFVPGEPSTQDGNGHGTHVAGTIAALNNSIGVLGVAPSAELYAVKVLGASGSGSVSSIAQGLEWAGLNGMHVANLSLGSPSPSATLEQAVNSATSRGVLVVAASGNSGEGSISYPARYANAMAVGATDQNNNRASFSQYGAGLDIVAPGVNVQSTYPGSTYASLNGTSMATPHVAGAAALVKQKNPSWSNVQIRNHLKNTATSLGSTNLYGSGLVNAEAATR

SEQ ID NO: 55189 - protein, 269 aa, Unidentified
AQSVPWGISRVQAPAAHNRKLTGSGVKVAVLDTGISTHPDLNIRGGASFVPGEPSTQDGNGHGTHVAGTIAALNNSIGVLGVAPSAELYAVKVLGASGSGSVSSIAQGLEWAGLNGMHVANLSLGLPSPSATLEQAVNSATSRGVLVVAASGNSGAGSISYPARYANAMAVGATDQNNNRASFSQYGAGLDIVAPGVNVQSTYPGSAYASLNGTSMATPHVAGAAALVKQKNPSWSNVQIRNHLKNTATSLGSTNLYGSGLVNAEAATR

SEQ ID NO: 55190 - protein, 269 aa, Unidentified
AQSVPWGISRVQAPAAHNRGLTGRGVKVAVLDSGISTHPDLNIRGGASFVPGEPSTQDGNGHGTHVAGTIAALNNSIGVLGVAPSAELYAVKVLGASGSGSVSSIAQGLEWAGNNRMHVANLSLGSPSPSATLEQAVNSATSRGVLVVAASGNSGAGSISYPARYANAMAVGATDQNNNRADFSQYGAGLDIVAPGVNVQSTYPGSTYASLNGTSMATPHVAGAAALVKQKNPSWSNVQIRNHLKNTATSLGSTNLYGSGLVNAEAATR

SEQ ID NO: 55191 - protein, 269 aa, Unidentified
AQSVPWGISRVQAPAAHNRGLTGSGVKVAVLDTGISTHPDLNIRGGASFVPGEPSTQDGNGHGTHVAGTIAALNNSIGVLGVAPSAELYAVKVLPASGGGAISSIAQGLEWAGNNGMHVANLSLGSPSPSATLEQAVNSATSRGVLVVAASGNSGAGSISYPARYANAMAVGATDQNNNRASFSQYGAGLDIVAPGVNVQSTYPGSTYASLNGTSMATPHVAGAAALVKQKNPSWSNVQIRNHLKNTATSLGSTNLYGSGLVNAEAATR

SEQ ID NO: 55192 - protein, 269 aa, Synthetic construct
AQSVPWGISRVQAPAAHNRGLTGSGVKVAVLDTGISTHPDLNIRGGASFVPGEPSTQDGNGHGTHVAGTIAALDNSIGVLGVAPSAELYAVKVLGASGSGAIDSIAQGLEWAGNNGMHVANLSLGSPSPSATLEQAVNSATSRGVLVVAASGNSGAGSISYPARYANAMAVGATDQNNNRASFSQYGAGLDIVAPGVNVQSTYPGSTYASLNGTSMATPHVAGAAALVKQKNPSWSNVQIRNHLKNTATSLGSTNLYGSGLVNAEAATR

SEQ ID NO: 55193 - protein, 269 aa, Unidentified
AQSVPWGISRVQAPAAHNRKLTGSGVKVAVLDTGISTHPDLNIRGGASFVPGEPSTQDGEGHGTHVAGTIAALNNNIGVLGVAPSAELYAVKVLGASGSGSVSSIAQGLEWAGLNGMHVANLSLGSPSPSATLEQAVNSATSRGVLVVAASGNSGAGSISYPARYANAMAVGATDQNNNRASFSQYGAGLDIVAPGVNVQSTYPGSAYASLNGTSSATPHVAGAAALVKQKNPSWSNVQIRNHLKNTATSLGSTNLYGSGLVNAEAATR

SEQ ID NO: 55194 - protein, 269 aa, Unidentified
AQSVPWGISRVQAPAAHNRGLTGSGVKVAVLDTGISTHPDLNIRGGRSFVPGEPSTQDGNGHGTHVAGTIAALNNSIGVLGVAPSAELYAVKVLGASGSGSVSSIAQGLEWAGNNGMHVANLSLGDPSPSATLEQAVNSATSRGVLVVAASGNSGAGSISYPARYANAMAVGATDQNNERASFSQYGAGLDIVAPGVNVQSTYPGSTYASLNGTSMATPHVAGAAALVKQKNGSWSNVQIRNHLKNTATSLGSTNLYGSGLVNAEAATR

SEQ ID NO: 55195 - protein, 269 aa, Unidentified
AQSVPWGISRVQAPAAHNRGLTGSGVKVAVLDTGISTHPDLNIRGGASFVPGEPSTQDGNGHGTHVAGTIAALNNSIGVLGVAPSAELYAVKVLGASGDGSVSSIAQGLEWAGNNGMHVANLSLGLPSPSATLEQAVNSATSRGVLVVAASGNSGAGSISYPARYANAMAVGATDQNNNRASFSQYGAGLDIVAPGVNVQSTYPGSTYASENGTSMATPHVAGAAALVKQKNPRWSNVQIRNHLKNTATSLGSTNLYGSGLVNAEAATR

SEQ ID NO: 55196 - protein, 269 aa, Unidentified
AQSVPWGIARVQAPAAHNRGLTGSGVKVAVLDTGISTHPDLRIRGGASFVPGEPSTQDGNGHGTHVAGTIAALNNRIGVLGVAPSAELYAVKVLGASGSGSVSSIAQGLEWAGNNGMHVANLSLGSPSPSATLEQAVNSATSRGVLVVAASGNSGAGSISYPARYANAMAVGATDQNNNRASFSQYGAGLDIVAPGVNVQSTYPGSTYASLNGTSMATPHVAGAAALVKQKNPSWRNVQIRNHLKNTATSLGSTNLYGSGLVNAEAATR

SEQ ID NO: 55197 - protein, 269 aa, Unidentified
AQSVPWGISRVQAPAAHNRKLTASGVKVAVLDTGISTHPDLNIRGGASFVPGEPSTQDGEGHGTHVAGTIAALNNSIGVLGVAPSAELYAVKVLGASGSGSVSSIAQGLEWAGLNGMHVANLSLGSPSPSATLEQAVNSATSRGVLVVAASGNSGAGSISYPARYANAMAVGATDQNNNRASFSQYGAGLDIVAPGVNVQSTYPGSTYASLNGTSMATPHVAGAAALVKQKNPSWSNVQIRNHLKNTATSLGSTNLYGSGLVNAEAATR

SEQ ID NO: 55198 - protein, 269 aa, Unidentified
AQSVPWGISRVQAPAAHNRRLTGSGVKVAVLDTGISTHPDLNIRGGASFVPGEPSTQDGNGHGTHVAGTIAALNNSIGVLGVAPSAELYAVKVLGASGSGSVSSIAQGLEWAGNNGMHVANLSLGSESPSATLEQAVNSATSRGVLVVAASGNSGADSISYPARYANAMAVGATDQNNNRASFSQYGAGLDIVAPGVNVQSTYPGSTYASLNGTSMATPHVAGAAALVKQKNPSWSNVQIRDHLKNTATSLGSTNLYGSGLVNAEAATR

SEQ ID NO: 55199 - protein, 269 aa, Unidentified
AQSVPWGISRVQAPAAHNRGLTGSGVKVAVLDTGISTHPDLNIRGGASFVPGEPSTQDGEGHGTHVAGTIAALNNSIGVLGVAPSAELYAVKVLGASGAGSVSSIAQGLEWAGNNGMHVANLSLGSPSPSATLEQAVNSATSRGVLVVAASGNSGAESISYPARYANAMAVGATDQNNNRASFSQYGAGLDIVAPGVNVQSTYPGSTYASLNGTSMATPHVAGAAALVKQKNPSWSNVQIRNRLKNTATSLGSTNLYGSGLVNAEAATR

SEQ ID NO: 55200 - protein, 269 aa, Unidentified
AQSVPWGISRVQAPAAHNRGLTGRGVKVAVLDTGISTHPDLRIRGGASFVPGEPSTQDGNGHGTHVAGTIAALNNSIGVLGVAPSAELYAVKVLGASGAGSVSSIAQGLEWAGNNGMHVANLSLGSPSPSATLEQAVNSATSRGVLVVAASGNSGAGSISYPARYANAMAVGATDQNNNRASFSQYGAGLDIVAPGVNVQSTYPGSAYASLNGTSMATPHVAGAAALVKQKNPSWSNVQIRNHLKNTATSLGSTNLYGSGLVNAEAATR

SEQ ID NO: 55201 - protein, 269 aa, Unidentified
AQSVPWGISRVQAPAAHNRGLAGSGVKVAVLDTGISTHPDLNIRGGASFVPGEPSTQDGNGHGTHVAGTIAALNNSIGVLGVAPSAELYAVKVLGASGSGSVSSIAQGLEWAGNNRMHVANLSLGSPSPSATLEQAVNSATSRGVLVVAASGNSGEGSIDYPARYANAMAVGATDQNNNRASFSQYGAGLDIVAPGVNVQSTYPGSTYASLNGTSMATPHVAGAAALVKQKNPSWSNVQIRNHLKNTATSLGSTNLYGSGLVNAEAATR

SEQ ID NO: 55202 - protein, 269 aa, Unidentified
AQSVPWGISRVQAPAAHNRGLTGSGVKVAVLDSGISTHPDLNIRGGASFVPGEPSTQDGNGHGTHVAGTIAALNNSIGVLGVAPSAELYAVKVLGASGSGSVSSIAQGLEWAGNNRMHVANLSLGSPSPSATLEQAVNSATSRGVLVVAASGNSGEGSIDYPARYANAMAVGATDQNNNRASFSQYGAGLDIVAPGVNVQSTYPGSTYASLNGTSMATPHVAGAAALVKQKNPSWSNVQIRNHLKNTATSLGSTNLYGSGLVNAEAATR

SEQ ID NO: 55203 - protein, 269 aa, Unidentified
AQSVPWGISRVQAPAAHNRGLTGSGVKVAVLDTGISTHPDLNIRGGASFVPGEPSTQDGEGHGTHVAGTIAALNNSIGVLGVAPSAELYAVKVLGASGSGSVSSIAQGLEWAGNNGMHVANLSLGSPSPSATLEQAVNSATSRGVLVVAASGNSGAESISYPARYANAMAVGATDQNNNRADFSQYGAGLDIVAPGVNVQSTYPGSTYASLNGTSMATPHVAGAAALVKQKNPSWSNVQIRNRLKNTATSLGSTNLYGSGLVNAEAATR

SEQ ID NO: 55204 - protein, 269 aa, Unidentified
AQSVPWGISRVQAPAAHNRGLTGSGVKVAVLDTGISTHPDLNIRGGASFVPGEPSTQDGEGHGTHVAGTIAALNNSIGVLGVAPSAELYAVKVLGASGSGSVSSIAQGLEWAGLNRMHVANLSLGSPSPSATLEQAVNSATSRGVLVVAASGNSGAGSIDYPARYANAMAVGATDQNNNRASFSQYGAGLDIVAPGVNVQSTYPGSTYASLNGTSMATPHVAGAAALVKQKNPSWSNVQIRNHLKNTATSLGSTNLYGSGLVNAEAATR

SEQ ID NO: 55205 - protein, 269 aa, Unidentified
AQSVPWGISRVQAPAAHNRGLTGSGVKVAVLDTGISTHPDLNIRGGASFVPGEPSTQDGNGHGTHVAGTIAALNNSIGVLGVAPSAELYAVKVLGASGSGSVSSIAQGLEWAGLNRMHVANLSLGIPSPSATLEQAVNSATSRGVLVVAASGNSGEGSISYPARYANAMAVGATDQNNNRASFSQYGAGLDIVAPGVNVQSTYPGSTYASLNGTSMATPHVAGAAALVKQKNPSWSNVQIRNHLKNTATSLGSTNLYGSGLVNAEAATR

SEQ ID NO: 55206 - protein, 269 aa, Unidentified
AQSVPWGISRVQAPAAHNRRLTGSGVKVAVLDTGISTHPDLNIRGGASFVPGEPSTQDGNGHGTHVAGTIAALNNSIGVLGVAPSAELYAVKVLGASGSGAVSSIAQGLEWAGNNGMHVANLSLGSPSPSATLEQAVNSATSRGVLVVAASGNSGAGSISYPARYANAMAVGATDQNNNRASFSQYGAGLDIVAPGVNVQSTYPGSTYASLNGTSMATPHVAGAAVLVKQKNPSWSNVRIRNHLKNTATSLGSTNLYGSGLVNAEAATR

SEQ ID NO: 55207 - protein, 269 aa, Unidentified
AQSVPWGISRVQAPAAHNRGLTGSGVKVAVLDTGISTHPDLNIRGGASFVPGEPSTQDGNGHGTHVAGTIAALNNGIGVLGVAPSAELYAVKVLGASGSGSVSSIAQGLEWAGNNSMHVANLSLGSPSPSATLEQAVNSATSRGVLVVAASGNSGAGSISYPARYANAMAVGATDQNNNRASFSQYGAGLDIVAPGVNVQSTYPGSTYASLNGTSMATPHVAGAAALVKQKNPSWSNVQIRDRLKNTATSLGSTNLYGSGLVNAEAATR

SEQ ID NO: 55208 - protein, 269 aa, Unidentified
AQSVPWGISRVQAPAAHNRKLTGSGVKVAVLDTGISTHPDLNIRGGASFVPGEPSTQDGEGHGTHVAGTIAALNNSIGVLGVAPSAELYAVKVLGASGGGSVSSIAQGLEWAGLNGMHVANLSLGAPSPSATLEQAVNSATSRGVLVVAASGNSGAGSISYPARYANAMAVGATDQNNNRASFSQYGAGLDIVAPGVNVQSTYPGSTYASLNGTSSATPHVAGAAALVKQKNPSWSNVQIRNHLKNTATSLGSTNLYGSGLVNAEAATR

SEQ ID NO: 55209 - protein, 269 aa, Unidentified
AQSVPWGISRVQAPAAHNRRLTGSGVKVAVLDTGISTHPDLNIRGGASFVPGEPSTQDGEGHGTHVAGTIAALNNDIGVLGVAPSAELYAVKVLGASGSGSVSSIAQGLEWAGNNSMHVANLSLGSPSPSATLEQAVNSATSRGVLVVAASGNSGAGSISYPARYANAMAVGATDQNNNRASFSQYGAGLDIVAPGVNVQSTYPGSTYASLNGTSMATPHVAGAAALVKQKNPSWSNVQIRNHLKNTATSLGSTNLYGSGLVNAEAATR

SEQ ID NO: 55210 - protein, 269 aa, Unidentified
AQSVPWGISRVQAPAAHNRKLTGFGVKVAVLDTGISTHPDLNIRGGASFVPGEPSTQDGNGHGTHVAGTIAALNNSIGVLGVAPSAELYAVKVLGASGSGSVSSIAQGLEWAGNNGMHVANLSLGDPSPSATLEQAVNSATSRGVLVVAASGNSGAGSISYPARYANAMAVGATDQNNNRASFSQYGAGLDIVAPGVKVQSTYPGSTYASLNGTSMATPHVAGAAALVKQKNPSWSNVQIRNHLKNTATSLGSTNLYGSGLVNAEAATR

SEQ ID NO: 55211 - protein, 269 aa, Unidentified
AQSVPWGISRVQAPAAHNRGLWGSGVKVAVLDTGISTHPDLRIRGGASFVPGEPSTQDGNGHGTHVAGTIAALNNSIGVLGVAPSAELYAVKVLGASGAGSVSSIAQGLEWAGNNGMHVANLSLGSPSPSATLEQAVNSATSRGVLVVAASGNSGAGSISYPARYANAMAVGATDQNNNRASFSQYGAGLDIVAPGVNVQSTYIGSTYASLNGTSMATPHVAGAAALVKQKNPSWSNVQIRNHLKNTATSLGSTNLYGSGLVNAEAATR

SEQ ID NO: 55212 - protein, 269 aa, Unidentified
AQSVPWGISRVQAPAAHNRKLTASGVKVAVLDTGISTHPDLNIRGGASFVPGEPSTQDGNGHGTHVAGTIAALNNSIGVLGVAPSAELYAVKVLGASGSGSVSSIAQGLEWAGLNGMHVANLSLGSPSPSATLEQAVNSATSRGVLVVAASGNSGAGSISYPARYANAMAVGATDQNNNRADFSQYGAGLDIVAPGVNVQSTYPGSTYASLNGTSMATPHVAGAAALVKQKNPSWSNVQIRNHLKNTATSLGSTNLYGSGLVNAEAATR

SEQ ID NO: 55213 - protein, 269 aa, Unidentified
AQSVPWGISRVQAPAAHNRGLTGSGVKVAVLDTGISTHPDLNIRGGASFVPGEPSTQDGNGHGTHVAGTIAALNNSIGVLGVAPSAELYAVKVLGFTSSGSLSSIAQGLEWAGNNGMHVANLSLGSPSPSATLEQAVNSATSRGVLVVAASGNSGAGSISYPARYANAMAVGATDQNNNRASFSQYGAGLDIVAPGVNVQSTYPGSTYASLNGTSMATPHVAGAAALVKQKNPSWSNVQIRNHLKNTATSLGSTNLYGSGLVNAEAATR

SEQ ID NO: 55214 - protein, 269 aa, Unidentified
AQSVPWGISRVQAPAAHNRRLTGSGVKVAVLDTGISTHPDLRIRGGASFVPGEPSTQDGNGHGTHVAGTIAALDNSIGVLGVAPSAELYAVKVLGASGSGSVSSIAQGLEWAGNNGMHVANLSLGSPSPSATLEQAVNSATSRGVLVVAASGNSGAGSISYPARYANAMAVGATDQNNNRASFSQYGAGLDIVAPGVNVQSTYPGSTYASLNGTSMATPHIAGAAALVKQKNPSWSNVQIRNHLKNTATSLGSTNLYGSGLVNAEAATR

SEQ ID NO: 55215 - protein, 269 aa, Unidentified
AQSVPWGIARVQAPAAHNRGLRGSGVKVAVLDTGISTHPDLRIRGGASFVPGEPSTQDGNGHGTHVAGTIAALNNRIGVLGVAPSAELYAVKVLGASGSGSVSSIAQGLEWAGNNGMHVANLSLGSPSPSATLEQAVNSATSRGVLVVAASGNSGAGSISYPARYANAMAVGATDQNNNRASFSQYGAGLDIVAPGVNVQSTYPGSTYASLNGTSMATPHVAGAAALVKQKNPSWSNVQIRNHLKNTATSLGSTNLYGSGLVNAEAATR

SEQ ID NO: 55216 - protein, 269 aa, Unidentified
AQSVPWGISRVQAPAAHNRGLAGSGVKVAVLDTGISTHPDLNIRGGASFVPGEPSTQDGNGHGTHVAGTIAALNNSIGVLGVAPSAELYAVKVLGASGGGAISSIAQGLEWAGNNGMHVANLSLGSPSPSATLEQAVNSATSRGVLVVAASGNSGAGSISYPARYANAMAVGATDQNNNRASFSQYGAGLDIVAPGVNVQSTYPGSTYASLNGTSMATPHVAGAAALVKQKNPSWSNVQIRNHLKNTATSLGSTNLYGSGLVNAEAATR

SEQ ID NO: 55217 - protein, 269 aa, Unidentified
AQSVPWGISRVQAPAAHNRGLLGFGVKVAVLDTGISTHPDLNIRGGASFVPGEPSTQDGNGHGTHVAGTIAALNNSIGVLGVAPSAELYAVKVLGASGSGSVSSIAQGLEWAGNNRMHVANLSLGSPSPSATLEQAVNSATSRGVLVVAASGNSGAGSIDYPARYANAMAVGATDQNNNRASFSQYGAGLDIVAPGVNVQSTYPGSTYASLNGTSMATPHVAGAAALVKQKNPSWSNVQIRNHLKNTATSLGSTNLYGSGLVNAEAATR

SEQ ID NO: 55218 - protein, 269 aa, Unidentified
AQSVPWGISRVQAPASHNRGLTGSGVKVAVLDTGISTHPDLNIRGGASFVPGEPSTQDGNGHGTHVAGTIAALNNSIGVLGVAPSAELYAVKVLGASGSGGLSSIAQGLEWAGNNGMHVANLSLGSPSPSATLEQAVNSATSRGVIVVAASGNSGAGSISYPARYANAMAVGATDQNNNRASFSQYGAGLDIVAPGVNVQSTYPGSTYASLNGTSMATPHVAGAAALVKQKNPSWSNVQIRNHLKNTATSLGSTNLYGSGLVNAEAATR

SEQ ID NO: 55219 - protein, 269 aa, Unidentified
AQSVPWGISRVQAPAAHNRGLAGSGVKVAVLDTGISTHPDLNIRGGASFVPGEPSTQDGNGHGTHVAGTIAALNNSIGVLGVAPSAELYAVKVLGASGSGSVSSIAQGLEWAGLNRMHVANLSLGSPSPSATLEQAVNSATSRGVLVVAASGNSGAGSISYPARYANAMAVGATDQNNNRADFSQYGAGLDIVAPGVNVQSTYPGSTYASLNGTSMATPHVAGAAALVKQKNPSWSNVQIRNHLKNTATSLGSTNLYGSGLVNAEAATR

SEQ ID NO: 55220 - protein, 269 aa, Synthetic construct
AQSVPWGISRVQAPAAHNRGLTGSGVKVAVLDTGISTHPDLNIRGGASFVPGEPSTQDGNGHGTHVAGTIAALDNSIGVLGVAPSAELYAVKVLGASGSGAISSIAQGLEWAGNNGMHVANLSIGSPSPSATLEQAVNSATSRGVLVVAASGNSGAGSISYPARYANAMAVGATDQNNNRASFSQYGAGLDIVAPGVNVQSTYPGSTYASLNGTSMATPHVAGAAALVKQKNPSWSNVQIRNHLKNTATSLGSTNLYGSGLVNAEAATR

SEQ ID NO: 55221 - protein, 269 aa, Unidentified
AQSVPWGISRVQAPAAHNRGLTGSGVKVAVLDTGISTHPDLNIRGGASFVPGEPSTQDGNGHGTHVAGTIAALNNNIGVLGVAPSAELYAVKVLGASGQGSVSSIANGLEWAGNNGMHVANLSLGSPSPSATLEQAVNSATSRGVLVVAASGNSGAGSISYPARYANAMAVGATDQNNNRADFSQYGAGLDIVAPGVNVQSTYPGSTYASQNGTSSATPHVAGAAALVKQKNPSWSNVQIRNHLKNTATSLGSTNLYGSGLVNAEAATR

SEQ ID NO: 55222 - protein, 269 aa, Unidentified
AQSVPWGISRVQAPAAHNRGLTGSGVKVAVLDTGISTHPDLNIRGGASFVPGEPSTQDGNGHGTHVAGTIAALNNNIGVLGVAPSAELYAVKVLGASGSGSVSSIAQGLEWAGNNGMHVANLSLGQPSPSATLEQAVNSATSRGVLVVAASGNSGAGSISYPARYANAMAVGATDQNNNRASFSQYGAGLDIVAPGVNVQSTYPGSTYASENGTSMATPHVAGAAALVKQKNPSWSNVQIRNHLKNTATSLGSTNLYGSGLVSAEAATR

SEQ ID NO: 55223 - protein, 269 aa, Unidentified
AQVVPWGISRVQAPAAHNRGLTGSGVKVAVLDTGISTHPDLNIRGGASFVPGEPSTQDGNGHGTHVAGTIAALNNSINVLGVAPSAELYAVKVLGASGSGSVSSIAQGLEWAGNNGMHVANLSLGSPSPSATLEQAVNSATSRGVLVVAASGNSGAGSISYPARYQNAMAVGATDQNNNRASFSQYGAGLDIVAPGVNVQSTYPGSTYASLNGTSMASPHVAGAAALVKQKNPSWSNVQIRNHLKNTATSLGSTNLYGSGLVNAEAATR

SEQ ID NO: 55224 - protein, 269 aa, Synthetic construct
AQSVPWGISRVQAPAAHNRGLTGSGVKVAVLDTGISTHPDLNIRGGASFVPGEPSTQDGNGHGTHVAGTIAALDNSIGVLGVAPSAELYAVKVLGASGSGAISSIAQGLEWAGNNGMHVANLSLGSPSPSATIEQAVNSATSRGVLVVAASGNSGAGSISYPARYANAMAVGATDQNNNRASFSQYGAGLDIVAPGVNVQSTYPGSTYASLNGTSMATPHVAGAAALVKQKNPSWSNVQIRNHLKNTATSLGSTNLYGSGLVNAEAATR

SEQ ID NO: 55225 - protein, 269 aa, Bacillus lentus
AQSVPWGISRVQAPAAHNRGLTGSGVKVAVLDTGISTHPDLNIRGGASFVPGEPSTQDGNGHGTHVAGTIAALNNSIGVLGVAPDAELYAVKVLGASGSGSVSSIADGLEWAGNNGMHVANLSLGSPSPSATLEQAVNSATSRGVLVVAASGNSGAGSISYPARYANAMAVGATDQNNNRARFSQYGAGLDIVAPGVNVQSTYPGSTYASLNGTSMATPHVAGAAALVKQKNPSWSNVQIRDHLKNTATSLGSTNLYGSGLVNAEAATR

SEQ ID NO: 55226 - protein, 269 aa, Unidentified
AQSVPWGISRVQAPAAHNRGLTGSGVKVAVLDTGISTHPDLNIRGGASFVPGEPSTQDGNGHGTHVAGTIAALDNSIGVLGVAPSAELYAVKVLGASGGGSVSSIAQGLEWAGNNGMHVANLSLGSPSPSATLEQAVNSATSRGVLVVAASGNSGAGSISYPARYANAMAVGATDQNNNRASFSQYGAGLDIVAPGVNVQSTYPGSTYASLNGTSMATPHVAGAAVLVKQKNPSWSNVRIRNHLKNTATSLGSTNLYGSGLVNAEAATR

SEQ ID NO: 55227 - protein, 269 aa, Bacillus lentus
AQSVPWGISRVQAPAAHNRGLTGSGVKVAVLDTGISTHPDLNIRGGASFVPGEPSTQDGNGHGTHVAGTIAALNNSIGVLGVAPSAELYAVKVLGASGSGSVSSIAQGLEWAGNNGMHVANLSLGSPSPSATLEQAVNSATSRGVLVVAASGNSGAGSISAPASYANAMAVGATDQNNNRASFSQYGPGLDIVAPGVNVQSTYPGSTYASLNGTSMATPHVAGAAALVKQKNPSWSNVQIRNHLKNTATSLGSTNLYGKGLVNAEAATR

SEQ ID NO: 55228 - protein, 269 aa, Unidentified
AQSVPWGISRVQAPAAHNRGLTGSGVKVAVLDTGISTHPDLNIRGGASFVPGEPSTQDGNGHGTHVAGTIAALNNNIGVLGVAPSAELYAVKVLGASGSGSVSSIAQGLEWAGNNRMHVANLSLGSPSPSATLEQAVNSATSRGVLVVAASGNSGAGSISYPARYANAMAVGATDQNNNRASFSQYGAGLDIVAPGVNVQSTYPGSAYASENGTSMATPHVAGAAALVKQKNPSWSNVQIRNHLKNTATSLGSTNLYGSGLVNAEAATR

SEQ ID NO: 55229 - protein, 269 aa, Unidentified
AQSVPWGISRVQAPAAHNRGLTGSGVKVAVLDTGISTHPDLNIRGGASFVPGEPSTQDGNGHGTHVAGTIAALNNGIGVLGVAPSAELYAVKVLGASGSGSVSSIAQGLEWAGNNDMHVANLSLGSPSPSATLEQAVNSATSRGVLVVAASGNSGAGSISYPARYANAMAVGATDQNNNRASFSQYGAGLDIVAPGVNVQSTYPGSTYASLNGTSMATPHVAGAAALVKQKNPSWSNVRIRNRLKNTATSLGSTNLYGSGLVNAEAATR

SEQ ID NO: 55230 - protein, 269 aa, Unidentified
AQSVPWGISRVQAPAAHNRGLTGRGVKVAVLDTGISTHPDLNIRGGASFVPGEPSTQDGNGHGTHVAGTIAALNNSIGVLGVAPSAELYAVKVLGASGSGAISSIAQGLEWAGNNGMHVANLSLGSPSPSATLEQAVNSATSRGVLVVAASGNSGAGSISYPARYANAMAVGATDQNNNRASFSQYGAGLDIVAPGVNVQSTYPGSTYASLNGTSMATPHVAGAAALVKQKNPSWSNVRIRNHLKNTATSLGSTNLYGSGLVNAEAATR

SEQ ID NO: 55231 - protein, 269 aa, Unidentified
AQSVPWGISRVQAPAAHNRGLTGRGVKVAVLDTGISTHPDLNIRGGASFVPGEPSTQDGNGHGTHVAGTIAALNNRIGVLGVAPSAELYAVKVLGASGSGSVSSIAQGLEWAGNNRMHVANLSLGSPSPSATLEQAVNSATSRGVLVVAASGNSGADSISYPARYANAMAVGATDQNNNRASFSQYGAGLDIVAPGVNVQSTYPGSTYASLNGTSMATPHVAGAAALVKQKNPSWSNVQIRNHLKNTATSLGSTNLYGSGLVNAEAATR

SEQ ID NO: 55232 - protein, 269 aa, Unidentified
AQSVPWGISRVQAPAAHNRRLRGSGVKVAVLDTGISTHPDLNIRGGASFVPGEPSTQDGNGHGTHVAGTIAALNNRIGVLGVAPSAELYAVKVLGASGSGSVSSIAQGLEWAGNNGMHVANLSLGSPSPSATLEQAVNSATSRGVLVVAASGNSGAGSISYPARYANAMAVGATDQNNNRASFSQYGAGLDIVAPGVNVQSTYPGSTYASLNGTSMATPHVAGAAALVKQKNPSWRNVQIRNHLKNTATSLGSTNLYGSGLVNAEAATR

SEQ ID NO: 55233 - protein, 269 aa, Unidentified
AQSVPWGISRVQAPAAHNRGLTGSGVKVAVLDTGISTHPDLNIRGGASFVPGEPSTQDGNGHGTHVAGTIAALNNSIGVLGVAPSAELYAVKVLPAAGSGAISSIAQGLEWAGNNGMHVANLSLGSPSPSATLEQAVNSATSRGVLVVAASGNSGAGSISYPARYANAMAVGATDQNNNRASFSQYGAGLDIVAPGVNVQSTYPGSTYASLNGTSMATPHVAGAAALVKQKNPSWSNVQIRNHLKNTATSLGSTNLYGSGLVNAEAATR

SEQ ID NO: 55234 - protein, 269 aa, Unidentified
AQSVPWGISRVQAPAAHNRKLTGSGVKVAVLDTGISTHPDLNIRGGASFVPGEPSTQDGNGHGTHVAGTIAALNNNIGVLGVAPSAELYAVKVLGASGSGSVSSIAQGLEWAGNNGMHVANLSLGSPSPSATLEQAVNSATSRGVLVVAASGNSGAGSISYPARYANAMAVGATDQNNNRASFSQYGAGLDIVAPGVNVQSTYPGSTYASENGTSMATPHVAGAAALVKQKNPSWSNVQIRNHLKNTATSLGSTNLYGSGLVNALAATR

SEQ ID NO: 55235 - protein, 269 aa, Bacillus sp.
AQSVPWGISRVQAPAAHNRGLTGSGVKVAVLDTGISTHPDLNIRGGASFVPGEPSTQDGNGHGTHVAGTIAALNNSIGVLGVAPNAELYAVKVLGASGSGSVSSIAQGLEWAGNNVMHVANLSLGHYSPSATLEQAVNSATSRGVLVVAASGNSGAGSISYPARYANAMAVGATDQNNNRASFSQYGAGLDIVAPGVNVQSTYPGSTYASLNGTSMATPHVAGAAALVKQKNPSWSNVQIRNHLKNTATSLGSTNLYGSGLVNAEAATR

SEQ ID NO: 55236 - protein, 269 aa, Unidentified
AQSVPWGISRVQAPAAHNRKLTGSGVKVAVLDTGISTHPDLNIRGGASFVPGEPSTQDGEGHGTHVAGTIAALNNNIGVLGVAPSAELYAVKVLGASGSGSVSSIAQGLEWAGLNGMHVAGLSLGSPSPSATLEQAVNSATSRGVLVVAASGNSGAGSISYPARYANAMAVGATDQNNNRASFSQYGAGLDIVAPGVNVQSTYPGSTYASLNGTSSATPHVAGAAALVKQKNPSWSNVQIRNHLKNTATSLGSTNLYGSGLVNAEAATR

SEQ ID NO: 55237 - protein, 269 aa, Unidentified
AQSVPWGISRVQAPAAHNRRLTGSGVKVAVLDTGISTHPDLNIRGGASFVPGEPSTQDGNGHGTHVAGTIAALNNGIGVLGVAPSAELYAVKVLGASGSGSVSSIAQGLEWAGNNDMHVANLSLGSESPSATLEQAVNSATSRGVLVVAASGNSGAGSISYPARYANAMAVGATDQNNNRASFSQYGAGLDIVAPGVNVQSTYPGSTYASLNGTSMATPHVAGAAALVKQKNPSWSNVQIRNHLKNTATSLGSTNLYGSGLVNAEAATR

SEQ ID NO: 55238 - protein, 269 aa, Unidentified
AQSVPWGISRVQAPAAHNRGLTGSGVKVAVLDTGISTHPDLNIRGGASFVPGEPSTQDGNGHGTHVAGTIAALNNSIGVLGVAPSAELYAVKVLGASGSGSVSSIAQGLEWAGNNGMHVANLSLGSPSPSATLEQAVNSATSRGVLVVAASGNSGAGSISYPARYANAMAVGATDQNNNRASFSQYGAGLDIVAPGVNVQSTYPGSTYASLNGTSMATPHVAGAAALVKQKNPSWSNVRIRDHLKNTATSLGSTNLYGSGLVNAFVATR

SEQ ID NO: 55239 - protein, 269 aa, Unidentified
AQSVPWGISRVQAPAAHNRGLTGRGVKVAVLDTGISTHPDLNIRGGASFVPGEPSTQDGNGHGTHVAGTIAALNNGIGVLGVAPSAELYAVKVLGASGSGSVSSIAQGLEWAGNNDMHVANLSLGSPSPSATLEQAVNSATSRGVLVVAASGNSGAGSISYPARYANAMAVGATDQNNNRASFSQYGAGLDIVAPGVNVQSTYPGSTYASLNGTSMATPHVAGAAALVKQKNPSWSNVQIRDHLKNTATSLGSTNLYGSGLVNAEAATR

SEQ ID NO: 55240 - protein, 269 aa, Unidentified
AQSVPWGISRVQAPAAHNRRLTGSGVKVAVLDTGISTHPDLNITGGASFVPGEPSTQDGNGHGTHVAGTIAALNNSIGVLGVAPSAELYAVKVLGASGAGSVSSIAQGLEWAGNNGMHVANLSLGSPSPSATLEQAVNSATSRGVLVVAASGNSGAGSISYPARYANAMAVGATDQNNNRASFSQYGAGLDIVAPGVNVQSTYPQSTYASLNGTSMATPHVAGAAALVKQKNPSWSNVQIRNHLKNTATSLGSTNLYGSGLVNAEAATR

SEQ ID NO: 55241 - protein, 269 aa, Unidentified
AQSVPWGISRVQAPAAHNRGLTGRGVKVAVLDSGISTHPDLNIRGGASFVPGEPSTQDGNGHGTHVAGTIAALNNSIGVLGVAWSAELYAVKVLGASGSGSVSSIAQGLEWAGNNRMHVANLSLGSPSPSATLEQAVNSATSRGVLVVAASGNSGAGSISYPARYANAMAVGATDQNNNRASFSQYGAGLDIVAPGVNVQSTYPGSTYASLNGTSMATPHVAGAAALVKQKNPSWSNVQIRNHLKNTATSLGSTNLYGSGLVNAEAATR

SEQ ID NO: 55242 - protein, 269 aa, Unidentified
AQSVPWGISRVQAPAAHNRGLTGSGVKVAVLDTGISTHPDLNIRGGASFVPGEPSTQDGNGHGTHVAGTIAALNNSIGVLGVAPSAELYAVKVLGQGSSGSLSSIAQGLEWAGNNGMHVANLSLGSPSPSATLEQAVNSATSRGVLVVAASGNSGAGSISYPARYANAMAVGATDQNNNRASFSQYGAGLDIVAPGVNVQSTYPGSTYASLNGTSMATPHVAGAAALVKQKNPSWSNVQIRNHLKNTATSLGSTNLYGSGLVNAEAATR

SEQ ID NO: 55243 - protein, 269 aa, Unidentified
AQSVPWGISRVQAPAAHRRGLTGRGVKVAVLDTGISTHPDLNIRGGASFVPGEPSTQDGNGHGTHVAGTIAALDNSIGVLGVAPSAELYAVKVLGASGSGSVSSIAQGLEWAGNNGMHVANLSLGSPSPSATLEQAVNSATSRGVLVVAASGNSGAGSISYPARYANAMAVGATDQNNNRASFSQYGAGLDIVAPGVNVQSTYPGSTYASLNGTSMATPHVAGAAALVKQKNPSWSNVQIRNRLKNTATSLGSTNLYGSGLVNAEAATR

SEQ ID NO: 55244 - protein, 269 aa, Unidentified
AQSVPWGISRVQAPAAHNRKLLGSGVKVAVLDTGISTHPDLNIRGGASFVPGEPSTQDGNGHGTHVAGTIAALNNSIGVLGVAPSAELYAVKVLGASGSGSVSSIAQGLEWAGNNRMHVANLSLGSPSPSATLEQAVNSATSRGVLVVAASGNSGAGSISYPARYANAMAVGATDQNNNRASFSQYGAGLDIVAPGVNVQSTYPGSTYASENGTSMATPHVAGAAALVKQKNPSWSNVQIRNHLKNTATSLGSTNLYGSGLVNAEAATR

SEQ ID NO: 55245 - protein, 269 aa, Unidentified
AQSVPWGISRVQAPAAHNRGLTGSGVKVAVLDTGISTHPDLNIRGGASFVPGEPSTQDGNGHGTHVAGTIAALNNDIGVLGVAPSADLYAVKVLGASGSGSVSSIAQGLEWAGNNGMHVANLSMGSPSPSATLEQAVNSATSRGVLVVAASGNSGAGSISYPARYANAMAVGATDQNNNRASFSQYGAGLDIVAPGVNVQSTYPGSTYASLNGTSMASPHVAGAAALVKQKNPSWSNVQIRNHLKNTATSLGSTNLYGSGLVNAEAATR

SEQ ID NO: 55246 - protein, 269 aa, Unidentified
AQVVPWGISRVQAPAAHNRGLTGSGVKVAVLDTGISTHPDLNIRGGASFVPGEPSTQDGNGHGTHVAGTIAALNNSINVLGVAPSAELYAVKVLGASGSGSVSSIAQGLEWAGNNGMHVANLSLGSPSPSATLEQAVNSATSRGRLVVAASGNSGAGSISYPARYANAMAVGATDQNNNRASFSQYGAGLDIVAPGVNVQSTYPGSTYASLNGTSMASPHVAGAAALVKQKNPSWSNVQIRNHLKNTATSLGSTNLYGSGLVNAEAATR

SEQ ID NO: 55247 - protein, 269 aa, Unidentified
AQQVPWGISRVQAPAAHNRGLTGSGVKVAVLDTGISTHPDLNIRGGASFVPGEPSTQDGNGHGTHVAGTIAALNNDIGVLGVAPSAELYAVKVLGASGSGSVSSIAQGLEWAGNNGMHVANLSMGSPSPSATLEQAVNSATSRGVLVVAASGNSGAGSISYPARYQNAMAVGATDQNNNRASFSQYGAGLDIVAPGVNVQSTYPGSTYASLNGTSMATPHVAGAAALVKQKNPSWSNVQIRNHLKNTATSLGSTNLYGSGLVNAEAATR

SEQ ID NO: 55248 - protein, 269 aa, Unidentified
AQSVPWGISRVQAPAAHNRGLTGSGVKVAVLDTGISTHPDLNIRGGASFVPGEPSTQDGNGHGTHVAGTIAALNNDIGVLGVAPSAELYAVKVLGASGSGSVSSIAQGLEWAGNNDMHVANLSLGSPSPSATLEQAVNSATSRGVLVVAASGNSGAGSISYPARYANAMAVGATDQNNNRASFSQYGAGLDIVAPGVNVQSTYPGSTYASLNGTSMATPHVAGAAALVKQKNPSWSNVRIRNRLKNTATSLGSTNLYGSGLVNAEAATR

SEQ ID NO: 55249 - protein, 269 aa, Unidentified
AQSVPWGISRVQAPAAHNRKLTGSGVKVAVLDTGISTHPDLNIRGGASFVPGEPSTQDGNGHGTHVAGTIAALNNNIGVLGVAPSAELYAVKVLGASGSGSVSSIAQGLEWAGNNGMHVANLSLGDPSPSATLEQAVNSATSRGVLVVAASGNSGAGSISYPARYANAMAVGATDQNNNRASFSQYGAGLDIVAPGVNVQSTYPGSTYASENGTSMATPHVAGAAALVKQKNPSWSNVQIRNHLKNTATSLGSTNLYGSGLVNAEAATR

SEQ ID NO: 55250 - protein, 269 aa, Unidentified
AQSVPWGISRVQAPAAHNRGLTGSRVKVAVLDTGISTHPDLAIRGGASFVPGEPSTQDGNGHGTHVAGTIAALNNSIGVLGVAPSAILYAVKVLGASGSGSVSSIAQGLEWAGNFGMHVANLSLGSPSPSATLEQAVNSATSRGVLVVAASGNSGAGSISYPARYANAMAVGATDQNNNRASFSQYGAGLDIVAPGVNVQSTYPGSTYASLNGTSMATPHVAGAAALVKQKNPSWSNVQIRNHLKNTATSLGSTNLYGSGLVNAEAATR

SEQ ID NO: 55251 - protein, 269 aa, Unidentified
AQSVPWGISRVQAPAAHNRGLTGSGVKVAVLDTGISTHPDLNIRGGASFVPGEPSTQDGNGHGTHVAGTIAALNNSIGVLGVAPSAELYAVKVLSASGQGSVSSIANGLEWAGNNGMHVANLSLGSPSPSATLEQAVNSATSRGVLVVAASGNSGAGSISYPARYANAMAVGATDQNNNRASFSQYGAGLDIVAPGVNVQSTYPGSTYASQNGTSMATPHVAGAAALVKQKNPSWSNVQIRNHLKNTATSLGSTNLYGSGLVNAEAATR

SEQ ID NO: 55252 - protein, 269 aa, Unidentified
AQSVPWGISRVQAPASHNRGLAGSGVKVAVLDTGISTHPDLNIRGGASFVPGEPSTQDGNGHGTHVAGTIAALNNSIGVLGVAPSAELYAVKVLGASGSGGLSSIAQGLEWAGNNGMHVANLSLGSPSPSATLEQAVNSATSRGVLVVAASGNSGAGSISYPARYANAMAVGATDQNNNRASFSQYGAGLDIVAPGVNVQSTYPGSTYASLNGTSMATPHVAGAAALVKQKNPSWSNVQIRNHLKNTATSLGSTNLYGSGLVNAEAATR

SEQ ID NO: 55253 - protein, 269 aa, Unidentified
AQSVPWGISRVQAPAAHNRGLTGRGVKVAVLDTGISTHPDLNIRGGASFVPGEPSTQDGNGHGTHVAGTIAALNNSIGVLGVAPSAELYAVKVLGASGSGSVSSIAQGLEWAGNNRMHVANLSLGSPSPSATLEQAVNSATSRGVLVVAASGNSGAGSISYPARYANAMAVGATDQNNNRASFSQYGAGLDIVAPGVNVQSTAPGSTYASLNGTSMATPHVAGAAALVKQKNPSWSFVQIRNHLKNTATSLGSTNLYGSGLVNAEAATR

SEQ ID NO: 55254 - protein, 269 aa, Unidentified
AQSVPWGISRVQAPAAHNRGLTGGGVKVAVLDTGISTHPDLNIRGGASFVPGEPSTQDGNGHGTHVAGTIAALNNNIGVLGVAPSAELYAVKVLGASGNGSVSSIAQGLEWAGNNGMHVANLSLGSPSPSATLEQAVNSATSRGVLVVAASGNSGAGSISYPARYANAMAVGATDQNNNRASFSQYGAGLDIVAPGVNVQSTYPGSTYASQNGTSMATPHVAGAAALVKQKNPSWSNVQIRNHLKNTATSLGSTNLYGSGLVNAEAATR

SEQ ID NO: 55255 - protein, 269 aa, Unidentified
AQSVPWGISRVQAPAAHNRGLTGSGVKVAVLDTGISTHPDLNIRGGASFVPGEPSTQDGNGHGTHVAGTIAALDNSIGVLGVAPSAELYAVKVLGASGGGAVSSIAQGLEWAGNNGMHVANLSLGSPSPSATLEQAVNSATSRGVLVVAASGNSGAGSISYPARYANAMAVGATDQNNNRASFSQYGAGLDIVAPGVNVQSTYPGSTYASLNGTSMATPHVAGAAALVKQKNPSWSNVRIRNHLKNTATSLGSTNLYGSGLVNAEAATR

SEQ ID NO: 55256 - protein, 269 aa, Unidentified
AQSVPWGISRVQAPAAHNRGLLGSGVKVAVLDTGISTHPDLNIRGGASFVPGEPSTQDGNGHGTHVAGTIAALNNSIGVLGVAPSAELYAVKVLGASGSGSVSSIAQGLEWAGNNRMHVANLSLGSPSPSATLEQAVNSATSRGVLVVAASGNSGAGSISYPARYANAMAVGATDQNNNRASFSQYGAGLDIVAPGVNVQSTYPGSAYASENGTSMATPHVAGAAALVKQKNPSWSNVQIRNHLKNTATSLGSTNLYGSGLVNAEAATR

SEQ ID NO: 55257 - protein, 269 aa, Unidentified
AQSVPWGISRVQAPAAHNRGLTGSGVKVAVLDTGISTHPDLNIRGGASFVPGEPSTQDGEGHGTHVAGTIAALNNSIGVLGVAPSAELYAVKVLGASGSGSVSSIAQGLEWAGLNGMHVANLSLGSPSPSATLEQAVNSATSRGVLVVAASGNSGAGSIDYPARYANAMAVGATDQNNNRADFSQYGAGLDIVAPGVNVQSTYPGSTYASLNGTSMATPHVAGAAALVKQKNPSWSNVQIRNHLKNTATSLGSTNLYGSGLVNAEAATR

SEQ ID NO: 55258 - protein, 269 aa, Unidentified
AQSVPWGISRVQAPAAHNRGLTGSGVKVAVLDTGISTHPDLNIRGGASFVPGEPSTQDGNGHGTHVAGTIAALNNSIGVLGVAPSAELYAVKVLGASGSGSVSSIAQGLEWAGNNGMHVANLSLGSESPSATLEQAVNSATSRGVLVVAASGNSGADSISYPARYANAMAVGATDQNNNRASFSQYGAGLDIVAPGVNVQSTYPGSTYASLNGTSMATPHVAGAAALVKQKNPSWSNVRIRDHLKNTATSLGSTNLYGSGLVNAEAATR

SEQ ID NO: 55259 - protein, 269 aa, Unidentified
AQSVPWGISRVQAPAAHNRGLTGSGVKVAVLDTGISTHPDLNIRGGASFVPGEPSTQDGNGHGTHVAGTIAALNNSIGVLGVAPSAELYAVKVLGASGSGSLSSIAQGLEWAGNNGMHVANLSLGSPSPSATLEQAVNSATSRGVIVVAASGNSGAGSISYPARYANAMAVGATDQNNNRADFSQYGAGLDIVAPGVNVQSTYPGSTYASLNGTSMATPHVAGAAALVKQKNPSWSNVQIRNRLKNTATSLGSTNLYGSGLVNAEAATR

SEQ ID NO: 55260 - protein, 269 aa, Unidentified
AQSVPWGISRVQAPAAHNRGLAGSGVKVAVLDSGISTHPDLNIRGGASFVPGEPSTQDGNGHGTHVAGTIAALNNSIGVLGVAPSAELYAVKVLGASGSGSVSSIAQGLEWAGNNGMHVANLSLGSPSPSATLEQAVNSATSRGVLVVAASGNSGEGSISYPARYANAMAVGATDQNNNRADFSQYGAGLDIVAPGVNVQSTYPGSTYASLNGTSMATPHVAGAAALVKQKNPSWSNVQIRNHLKNTATSLGSTNLYGSGLVNAEAATR

SEQ ID NO: 55261 - protein, 269 aa, Unidentified
AQSVPWGISRVQAPAAHNRGLTGRGVKVAVLDTGISTHPDLNIRGGASFVPGEPSTQDGNGHGTHVAGTIAALDNSIGVLGVAPSAELYAVKVLGASGGGSVSSIAQGLEWAGNNGMHVANLSLGSPSPSATLEQAVNSATSRGVLVVAASGNSGAGSISYPARYANAMAVGATDQNNNRASFSQYGAGLDIVAPGVNVQSTYPGSTYASLNGTSMATPHVAGAAALVKQKNPSWSNVRIRNHLKNTATSLGSTNLYGSGLVNAEAATR

SEQ ID NO: 55262 - protein, 269 aa, Unidentified
AQSVPWGISRVQAPAAHNRGLTGSGVKVAVLDTGISTHPDLNIRGGASFVPGEPSTQDGNGHGTHVAGTIAALNNDIGVLGVAPSAELYAVKVLGASGSGSVSSIAQGLEWAGNNDMHVANLSLGSPSPSATLEQAVNSATSRGVLVVAASGNSGAGSISYPARYANAMAVGATDQNNNRASFSQYGAGLDIVAPGVNVQSTYPGSTYASLNGTSMATPHVAGAAALVKQKNPSWSNVRIRDHLKNTATSLGSTNLYGSGLVNAEAATR

SEQ ID NO: 55263 - protein, 269 aa, Unidentified
AQSVPWGISRVQAPAAHNRGLTGSGVKVAVLDTGISTHPDLNIRGGASFVPGEPSTQDGNGHGTHVAGTIAALNNSIGVLGVAPSAELYAVKVLPASGSAAISSIAQGLEWAGNNGMHVANLSLGSPSPSATLEQAVNSATSRGVLVVAASGNSGAGSISYPARYANAMAVGATDQNNNRASFSQYGAGLDIVAPGVNVQSTYPGSTYASLNGTSMATPHVAGAAALVKQKNPSWSNVQIRNHLKNTATSLGSTNLYGSGLVNAEAATR

SEQ ID NO: 55264 - protein, 269 aa, Unidentified
AQSVPWGISRVQAPAAHNRGLTGSGVKVAVLDTGISTHPDLNIRGGASFVPGEPSTQDGNGHGTHVAGTIAALNNSIGVLGVAPSAELYAVKVLGAGGAAAVSSIAQGLEWAGNNGMHVANLSLGSPSPSATLEQAVNSATSRGVLVVAASGNSGAGSISYPARYANAMAVGATDQNNNRASFSQYGAGLDIVAPGVNVQSTYPGSTYASLNGTSMATPHVAGAAALVKQKNPSWSNVQIRNHLKNTATSLGSTNLYGSGLVNAEAATR

SEQ ID NO: 55265 - protein, 269 aa, Unidentified
AQSVPWGISRVQAPAAHNRGLTGRGVKVAVLDTGISTHPDLRIRGGASFVPGEPSTQDGNGHGTHVAGTIAALNNSIGVLGVAPSAELYAVKVLGASGAGSVSSIAQGLEWAGNNGMHVANLSLGSPSPSATLEQAVNSATSRGVLVVAASGNSGAGSISYPARYANAMAVGATDQNNNRASFSQYGAGLDIVAPGVNVQSTYPGSTYFSLNGTSMATPHVAGAAALVKQKNPSWSNVQIRNHLKNTATSLGSTNLYGSGLVNAEAATR

SEQ ID NO: 55266 - protein, 269 aa, Unidentified
AQSVPWGISRVQAPAAHNRGLTGSGVKVAVLDTGISTHPDLNIRGGASFVPGEPSTQDGEGHGTHVAGTIAALNNDIGVLGVAPSAELYAVKVLGASGSGSVSSIAQGLEWAGNNSMHVANLSLGSPSPSATLEQAVNSATSRGVLVVAASGNSGAGSISYPARYANAMAVGATDQNNNRASFSQYGAGLDIVAPGVNVQSTYPGSTYASLNGTSMATPHVAGAAALVKQKNPSWSNVQIRDHLKNTATSLGSTNLYGSGLVNAEAATR

SEQ ID NO: 55267 - protein, 269 aa, Unidentified
AQSVPWGISRVQAPAAHNRGLTGSGVKVAVLDTGISTHPDLNIRGGASFVPGEPSTQDGNGHGTHVAGTIAALNNSIGVLGVAPSAELYAVKVLPATGAGSISSIAQGLEWAGNNGMHVANLSLGSPSPSATLEQAVNSATSRGVLVVAASGNSGAGSISYPARYANAMAVGATDQNNNRASFSQYGAGLDIVAPGVNVQSTYPGSTYASLNGTSMATPHVAGAAALVKQKNPSWSNVQIRNHLKNTATSLGSTNLYGSGLVNAEAATR

SEQ ID NO: 55268 - protein, 269 aa, Unidentified
AQSVPWGISRVQAPAAHRRGLTGSGVKVAVLDTGISTHPDLNIRGGASFVPGEPSTQDGNGHGTHVAGTIAALNNSIGVLGVAPSAELYAVKVLGASGGGAVSSIAQGLEWAGNNGMHVANLSLGSPSPSATLEQAVNSATSRGVLVVAASGNSGAGSISYPARYANAMAVGATDQNNNRASFSQYGAGLDIVAPGVNVQSTYPGSTYASLNGTSMATPHVAGAAALVKQKNPSWSNVRIRNHLKNTATSLGSTNLYGSGLVNAEAATR

SEQ ID NO: 55269 - protein, 269 aa, Unidentified
AQSVPWGISRVQAPAAHNRGLTGSGVKVAVLDTGISTHPDLNIRGGASFVPGEPSTQDGNGHGTHVAGTIAALNNSIGVLGVAPSAELYAVKVLPAGGGGAVSSIAQGLEWAGNNGMHVANLSLGSPSPSATLEQAVNSATSRGVLVVAASGNSGAGSISYPARYANAMAVGATDQNNNRASFSQYGAGLDIVAPGVNVQSTYPGSTYASLNGTSMATPHVAGAAALVKQKNPSWSNVQIRNHLKNTATSLGSTNLYGSGLVNAEAATR

SEQ ID NO: 55270 - protein, 269 aa, Unidentified
AQSVPWGISRVQAPAAHNRGLTGSGVKVAVLDSGISTHPDLNIRGGASFVPGEPSTQDGNGHGTHVAGTIAALNNSIGVLGVAPSAELYAVKVLGASGSGSVSSIAQGLEWAGLNGMHVANLSLGSPSPSATLEQAVNSATSRGVLVVAASGNSGEGSISYPARYANAMAVGATDQNNNRASFSQYGAGLDIVAPGVNVQSTYPGSTYASLNGTSMATPHVAGAAALVKQKNPSWSNVQIRNHLKNTATSLGSTNLYGSGLVNAEDATR

SEQ ID NO: 55271 - protein, 269 aa, Unidentified
AQSVPWGISRVQAPAAHNRGLTGSGVKVAVLDTGISTHPDLNIRGGASFVPGEPSTQDGNGHGTHVAGTIAALNNSIGVLGVAPSAELYAVKVLGQTGSGAISSIAQGLEWAGNNGMHVANLSLGSPSPSATLEQAVNSATSRGVLVVAASGNSGAGSISYPARYANAMAVGATDQNNNRASFSQYGAGLDIVAPGVNVQSTYPGSTYASLNGTSMATPHVAGAAALVKQKNPSWSNVQIRNHLKNTATSLGSTNLYGSGLVNAEAATR

SEQ ID NO: 55272 - protein, 269 aa, Unidentified
AQSVPWGISRVQAPAAHNRGLAGRGVKVAVLDTGISTHPDLNIRGGASFVPGEPSTQDGNGHGTHVAGTIAALNNSIGVLGVAPSAELYAVKVLGASGSGSVSSIAQGLEWAGLNRMHVANLSLGSPSPSATLEQAVNSATSRGVLVVAASGNSGAGSISYPARYANAMAVGATDQNNNRASFSQYGAGLDIVAPGVNVQSTYPGSTYASLNGTSMATPHVAGAAALVKQKNPSWSNVQIRNHLKNTATSLGSTNLYGSGLVNAEAATR

SEQ ID NO: 55273 - protein, 269 aa, Unidentified
AQSVPWGISRVQAPAAHNRKLTGSGVKVAVLDTGISTHPDLNIRGGASFVPGEPSTQDGNGHGTHVAGTIAALNNSIGVLGVAPSAELYAVKVLGASGDGSVSSIAQGLEWAGNNGMHVANLSLGLPSPSATLEQAVNSATSRGVLVVAASGNSGAGSISYPARYANAMAVGATDQNNNRASFSQYGAGLDIVAPGVNVQSTYPGSTYASLNGTSMATPHVAGAAALVKQKNPSWSNVQIRNHLKNTATSLGSTNLYGSGLVNALAATR

SEQ ID NO: 55274 - protein, 269 aa, Unidentified
AQSVPWGISRVQAPAAHRRGLTGSGVKVAVLDTGISTHPDLNIRGGASFVPGEPSTQDGNGHGTHVAGTIAALDNSIGVLGVAPSAELYAVKVLGASGSGSVSSIAQGLEWAGNNGMHVANLSLGSPSPSATLEQAVNSATSRGVLVVAASGNSGAGSISYPARYANAMAVGATDQNNNRASFSQYGAGLDIVAPGVNVQSTYPGSTYASLNGTSMATPHVAGAAALVKQKNPSWRNVQIRNRLKNTATSLGSTNLYGSGLVNAEAATR

SEQ ID NO: 55275 - protein, 269 aa, Unidentified
AQSVPWGISRVQAPAAHNRRLTGRGVKVAVLDTGISTHPDRNIRGGASFVPGEPSTQDGNGHGTHVAGTIAALNNSIGVLGVAPSAELYAVKVLGASGSGSVSSIAQGLEWAGNNGMHVANLSLGSPSPSATLEQAVNSATSRGVLVVAASGNSGAGSISYPARYANAMAVGATDQNNNRASFSQYGAGLDIVAPGVNVQSTYPGSTYASLNGTSMATPHVAGAAALVKQKNPSWRNVQIRNHLKNTATSLGSTNLYGSGLVNAEAATR

SEQ ID NO: 55276 - protein, 269 aa, Unidentified
AQSVPWGISRVQAPAAHNRKLTGSGVKVAVLDTGISTHPDLNIRGGASFVPGEPSTQDGNGHGTHVAGTIAALNNNIGVLGVAPSAELYAVKVLGASGSGSVSSIAQGLEWAGNNGMHVANLSLGSPSPSATLEQAVNSATSRGVLVVAASGNSGAGSISYPARYANAMAVGATDQNNNRASFSQYGAGLDIVAPGVNVQSTYPGSTYASENGTSMATPHVAGAAALVKQKNPRWSNVQIRNHLKNTATSLGSTNLYGSGLVNAEAATR

SEQ ID NO: 55277 - protein, 269 aa, Unidentified
AQSVPWGIARVQAPAAHNRRLTGSGVKVAVLDTGISTHPDLRIRGGASFVPGEPSTQDGNGHGTHVAGTIAALNNSIGVLGVAPSAELYAVKVLGASGSGSVSSIAQGLEWAGNNGMHVANLSLGSPSPSATLEQAVNSATSRGVLVVAASGNSGAGSISYPARYANAMAVGATDQNNNRASFSQYGAGLDIVAPGVNVQSTYPGSTYASLNGTSMATPHVAGAAALVKQKNPSRSNVQIRNHLKNTATSLGSTNLYGSGLVNAEAATR

SEQ ID NO: 55278 - protein, 269 aa, Bacillus lentus
AQSVPWGISRVQAPAAHNRGLTGSGVKVAVLDTGISTHPDLNIRGGASFVPGEPSTQDGNGHGTHVAGTIAALNNSIGVLGVAPRAELYAVKVLGASGSGSVSSIARGLEWAGNNGMHVANLSLGSPSPSATLEQAVNSATSRGVLVVAASGNSGAGSISYPARYANAMAVGATDQNNNRARFSQYGAGLDIVAPGVNVQSTYPGSTYASLNGTSMATPHVAGAAALVKQKNPSWSNVQIRDHLKNTATSLGSTNLYGSGLVNAEAATR

SEQ ID NO: 55279 - protein, 269 aa, Unidentified
AQSVPWGISRVQAPAAHNRGLTGSGVKVAVLDTGISTHPDLNIRGGASFVPGEPSTQDGNGHGTHVAGTIAALDNSIGVLGVAPSAELYAVKVLGASGSGAISSIAQGLEWAGNNGMHVANLSLGSPSPSATLEQAVNSATSRGVLVVAASGNSGADSISYPARYANAMAVGATDQNNNRASFSQYGAGLDIVAPGVNVQSTYPGSTYASLNGTSMATPHVAGAAALVKQKNPSWSNVQIRNHLKNTATSLGSTNLYGSGLVNAEAATR

SEQ ID NO: 55280 - protein, 269 aa, Unidentified
AQSVPWGISRVQAPAAHNRGLTGSGVKVAVLDTGISTHPDLNIRGGASFVPGEPSTQDGNGHGTHVAGTIAALNNNIGVLGVAPSAELYAVKVLGASGSGSVSSIAQGLEWAGNNRMHVANLSLGDPSPSATLEQAVNSATSRGVLVVAASGNSGAGSISYPARYANAMAVGATDQNNNRASFSQYGAGLDIVAPGVNVQSTYPGSTYASENGTSMATPHVAGAAALVKQKNPSWSNVQIRNHLKNTATSLGSTNLYGSGLVNAEAATR

SEQ ID NO: 55281 - protein, 269 aa, Unidentified
AQSVPWGISRVQAPAAHNRRLTGSGVKVAVLDTGISTHPDLRIRGGASFVPGEPSTQDGNGHGTHVAGTIAALNNSIGVLGVAPSAELYAVKVLGASGAGSVSSIAQGLEWAGNNGMHVANLSLGSPSPSATLEQAVNSATSRGVLVVAASGNSGAGSISYPARYANAMAVGATDQNNNRASFSQYGAGLDIVAPGVNVQSTYPGSTYASLNGTSMATPHVAGAAALVKQKNPSWSNVQIRNHLKNTATSLGSTNLYGSGLVRAEAATR

SEQ ID NO: 55282 - protein, 269 aa, Unidentified
AQSVPWGISRVQAPAAHNRKLTGFGVKVAVLDTGISTHPDLNIRGGASFVPGEPSTQDGNGHGTHVAGTIAALNNSIGVLGVAPSAELYAVKVLGASGSGSVSSIAQGLEWAGNNGMHVANLSLGSPSPSATLEQAVNSATSRGVLVVAASGNSGAGSISYPARYANAMAVGATDQNNNRASFSQYGAGLDIVAPGVNVQSTYPGSAYASENGTSMATPHVAGAAALVKQKNPSWSNVQIRNHLKNTATSLGSTNLYGSGLVNAEAATR

SEQ ID NO: 55283 - protein, 269 aa, Unidentified
AQSVPWGISRVQAPAAHNRGLTGSGVKVAVLDTGISTHPDLNIRGGASFVPGEPSTQDGNGHGTHVAGSIAALNNDIGVLGVAPSAELYAVKVLGASGSGSVSSIAQGLEWAGNNGMHVANLSLGSPSPSATLEQAVNSATSRGVLVVAASGNSGAGSISYPARYQNAMAVGATDQNNNRASFSQYGAGLDIVAPGVNVQSTYPGSTYASLNGTSMASPHVAGAAALVKQKNPSWSNVQIRNHLKNTATSLGSTNLYGSGLVNAEAATR

SEQ ID NO: 55284 - protein, 269 aa, Unidentified
AQSVPWGISRVQAPAAHRRGLTGSGVKVAVLDTGISTHPDLNIRGGASFVPGEPSTQDGNGHGTHVAGTIAALNNSIGVLGVAPSAELYAVKVLGASGSGSVSSIAQGLEWAGNNGMHVANLSLGSPSPSATLEQAVNSATSRGVLVVAASGNSGAGSINYPARYANAMAVGATDQNNNRASFSQYGAGLDIVAPGVNVQSTWPGSAYASLNGTSQATPHVAGAAALVKQKNPSWSNVQIRNHLKNTATSLGSTNLYGSGLVNAEAATR

SEQ ID NO: 55285 - protein, 269 aa, Unidentified
AQSVPWGISRVQAPAAHNRGLTGSGVKVAVLDTGISTHPDLNIRGGASFVPGEPSTQDGNGHGTHVAGTIAALNNSIGVLGVAPSAELYAVKVLGQTGGGSISSIAQGLEWAGNNGMHVANLSLGSPSPSATLEQAVNSATSRGVLVVAASGNSGAGSISYPARYANAMAVGATDQNNNRASFSQYGAGLDIVAPGVNVQSTYPGSTYASLNGTSMATPHVAGAAALVKQKNPSWSNVQIRNHLKNTATSLGSTNLYGSGLVNAEAATR

SEQ ID NO: 55286 - protein, 269 aa, Unidentified
AQSVPWGISRVQAPAAHNRRLTGSGVKVAVLDTGISTHPDLNIRGGASFVPGEPSTQDGNGHGTHVAGTIAALNNSIGVLGVAPSAELYAVKVLGASGSGSVSSIAQGLEWAGNNGMHVANLSLGSESPSATLEQAVNSATSRGVLVVAASGNSGAGSISYPARYANAMAVGATDQNNNRADFSQYGAGLDIVAPGVNVQSTYPGSTYASLNGTSMATPHVAGAAALVKQKNPSWSNVQIRNRLKNTATSLGSTNLYGSGLVNAEAATR

SEQ ID NO: 55287 - protein, 269 aa, Unidentified
AQSVPWGISRVQAPAAHNRGLTGFGVKVAVLDTGISTHPDLNIRGGASFVPGEPSTQDGNGHGTHVAGTIAALNNNIGVLGVAPSAELYAVKVLGASGSGSVSSIAQGLEWAGNNGMHVANLSLGDPSPSATLEQAVNSATSRGVLVVAASGNSGAGSISYPARYANAMAVGATDQNNNRASFSQYGAGLDIVAPGVNVQSTYPGSAYASLNGTSMATPHVAGAAALVKQKNPSWSNVQIRNHLKNTATSLGSTNLYGSGLVNAEAATR

SEQ ID NO: 55288 - protein, 269 aa, Unidentified
AQSVPWGISRVQAPAAHNRGLTGSGVKVAVLDTGISTHPDLNIRGGASFVPGEPSTQDGNGHGTHVAGTIAALNNNIGVLGVAPSAELYAVKVLSASGNGSVSSIANGLEWAGNNGMHVANLSLGSPSPSATLEQAVNSATSRGVLVVAASGNSGAGSISYPARYANAMAVGATDQNNNRASFSQYGAGLDIVAPGVNVQSTYPGSTYASLNGTSMATPHVAGAAALVKQKNPSWSNVQIRNHLKNTATSLGSTNLYGSGLVNAEAATR

SEQ ID NO: 55289 - protein, 269 aa, Unidentified
AQSVPWGISRVQAPAAHNRGLTGSGVKVAVLDTGISTHPDLNIRGGASFVPGEPSTQDGNGHGTHVAGTIAALNNSIGVLGVAPSAELYAVKVLGFAGSGAISSIAQGLEWAGNNGMHVANLSLGSPSPSATLEQAVNSATSRGVLVVAASGNSGAGSISYPARYANAMAVGATDQNNNRASFSQYGAGLDIVAPGVNVQSTYPGSTYASLNGTSMATPHVAGAAALVKQKNPSWSNVQIRNHLKNTATSLGSTNLYGSGLVNAEAATR

SEQ ID NO: 55290 - protein, 269 aa, Unidentified
AQSVPWGISRVQAPAAHNRRLTGSGVKVAVLDTGISTHPDLNIRGGASFVPGEPSTQDGNGHGTHVAGTIAALNNGIGVLGVAPSAELYAVKVLGASGSGSVSSIAQGLEWAGNNSMHVANLSLGSESPSATLEQAVNSATSRGVLVVAASGNSGAGSISYPARYANAMAVGATDQNNNRASFSQYGAGLDIVAPGVNVQSTYPGSTYASLNGTSMATPHVAGAAALVKQKNPSWSNVQIRNHLKNTATSLGSTNLYGSGLVNAEAATR

SEQ ID NO: 55291 - protein, 269 aa, Unidentified
AQSVPWGISRVQAPAAHNRGLTGSGVKVAVLDTGISTHPDLNIRGGASFVPGEPSTQDGNGHGTHVAGTIAALNNSINVLGVAPSAELYAVKVLGASGSGSVSSIAQGLEWAGNNGMHVANLSMGSPSPSATLEQAVNSATSRGVLVVAASGNSGAGSISYPARYQNAMAVGATDQNNNRASFSQYGAGLDIVAPGVNVQSTYPGSTYASLNGTSMATPHVAGAAALVKQKNPSWSNVQIRNHLKNTATSLGSTNLYGPGLVNAEAATR

SEQ ID NO: 55292 - protein, 269 aa, Unidentified
AQSVPWGIARVQAPAAHNRGLTGRGVKVAVLDTGISTHPDRNIRGGASFVPGEPSTQDGNGHGTHVAGTIAALNNSIGVLGVAPSAELYAVKVLGASGSGSVSSIAQGLEWAGNNGMHVANLSLGSPSPSATLEQAVNSATSRGVLVVAASGNSGAGSISYPARYANAMAVGATDQNNNRASFSQYGAGLDIVAPGVNVQSTYPGSTYASLNGTSMATPHVAGAAALVKQKNPSWRNVQIRNHLKNTATSLGSTNLYGSGLVNAEAATR

SEQ ID NO: 55293 - protein, 269 aa, Unidentified
AQSVPWGIARVQAPAAHNRRLTGRGVKVAVLDTGISTHPDLRIRGGASFVPGEPSTQDGNGHGTHVAGTIAALNNSIGVLGVAPSAELYAVKVLGASGSGSVSSIAQGLEWAGNNGMHVANLSLGSPSPSATLEQAVNSATSRGVLVVAASGNSGAGSISYPARYANAMAVGATDQNNNRASFSQYGAGLDIVAPGVNVQSTYPGSTYASLNGTSMATPHVAGAAALVKQKNPSWSNVQIRNHLKNTATSLGSTNLYGSGLVNAEAATR

SEQ ID NO: 55294 - protein, 269 aa, Unidentified
AQSVPWGISRVQAPAAHNRRLTGSGVKVAVLDTGISTHPDLNIRGGASFVPGEPSTQDGNGHGTHVAGTIAALNNDIGVLGVAPSAELYAVKVLGASGSGSVSSIAQGLEWAGNNDMHVANLSLGSPSPSATLEQAVNSATSRGVLVVAASGNSGAGSISYPARYANAMAVGATDQNNNRASFSQYGAGLDIVAPGVNVQSTYPGSTYASLNGTSMATPHVAGAAALVKQKNPSWSNVQIRDHLKNTATSLGSTNLYGSGLVNAEAATR

SEQ ID NO: 55295 - protein, 269 aa, Unidentified
AQSVPWGISRVQAPAAHNRKLTGSGVKVAVLDTGISTHPDLNIRGGASFVPGEPSTQDGEGHGTHVAGTIAALNNSIGVLGVAPSAELYAVKVLGASGSGSVSSIAQGLEWAGNNGMHVANLSLGQPSPSATLEQAVNSATSRGVLVVAASGNSGAGSISYPARYANAMAVGATDQNNNRASFSQYGAGLDIVAPGVNVQSTYPGSTYASNNGTSMATPHVAGAAALVKQKNPSWSNVQIRNHLKNTATSLGSTNLYGSGLVNAEAATR

SEQ ID NO: 55296 - protein, 269 aa, unidentified
AQSVPWGISRVQAPAAHNRGLTGSGVRVAVLDTGISTHPDLNIRGGASFVPGEPSTQDGNGHGTHVAGTIAALNNSIGVLGVAPSAELYAVKVLGASGSGSYSSIAQGLEWAGNNGMHVASLSLGSPSPSATLEQAVNSATSRGVLVVAASGNSGAGSISYPARYANAMAVGATDQNNNRASFSQYGAGLDIVAPGVNVQSTYPGSTYASLNGTSMATPHVAGAAALVKQKNPSWSNVQIRNHLKNTATSLGSTNLYGSGLVNAEAAAR

SEQ ID NO: 55297 - protein, 269 aa, Unidentified
AQSVPWGISRVQAPAAHNRGLTGSGVKVAVLDTGISTHPDLNIRGGASFVPGEPSTQDGNGHGTHVAGTIAALDNSIGVLGVAPSAELYAVKVLGASGSGAISSIAQGLEWAGNNGMHVANLSLGSPSPSATLEQAVNSATSRGVLVVAASGNSGAGSISYPARYANAMAVGATDQNNNRASPSQYGAGLDIVAPGVNVQSTYPGSTYASLNGTSMATPHVAGAAALVKQKNPSWSNVQIRNHLKNTATSLGSTNLYGSGLVNAEAATR

SEQ ID NO: 55298 - protein, 269 aa, Unidentified
AQSVPWGISRVQAPAAHNRGLAGSGVKVAVLDSGISTHPDLNIRGGASFVPGEPSTQDGNGHGTHVAGTIAALNNSIGVLGVAPSAELYAVKVLGASGSGSVSSIAQGLEWAGNNGMHVANLSLGSPSPSATLEQAVNSATSRGVLVVAASGNSGEGSIDYPARYANAMAVGATDQNNNRASFSQYGAGLDIVAPGVNVQSTYPGSTYASLNGTSMATPHVAGAAALVKQKNPSWSNVQIRNHLKNTATSLGSTNLYGSGLVNAEAATR

SEQ ID NO: 55299 - protein, 269 aa, Unidentified
AQSVPWGISRVQAPAAHNRGLTGSGVKVAVLDTGISTHPDLRIRGGASFVPGEPSTQDGNGHGTHVAGTIAALNNSIGVLGVAPSAELYAVKVLGASGAGSVSSIAQGLEWAGNNGMHVANLSLGSPSPSATLEQAVNSATSRGVLVVAASGNSGAGSISYPARYANAMAVGATDQNNNRASFSQYGAGLDIVAPGVNVQSTYIQSTYASLNGTSMATPHVAGAAALVKQKNPSWSNVQIRNHLKNTATSLGSTNLYGSGLVNAEAATR

SEQ ID NO: 55300 - protein, 269 aa, Unidentified
AQSVPWGISRVQAPAAHNRGLAGSGVKVAVLDSGISTHPDLNIRGGASFVPGEPSTQDGNGHGTHVAGTIAALNNSIGVLGVAPSAELYAVKVLGASGSGSVSSIAQGLEWAGNNRMHVANLSLGSPSPSATLEQAVNSATSRGVLVVAASGNSGEGSISYPARYANAMAVGATDQNNNRASFSQYGAGLDIVAPGVNVQSTYPGSTYASLNGTSMATPHVAGAAALVKQKNPSWSNVQIRNHLKNTATSLGSTNLYGSGLVNAEAATR

SEQ ID NO: 55301 - protein, 269 aa, Unidentified
AQSVPWGISRVQAPAAHNRGLLGSGVKVAVLDTGISTHPDLNIRGGASFVPGEPSTQDGNGHGTHVAGTIAALNNNIGVLGVAPSAELYAVKVLGASGSGSVSSIAQGLEWAGNNRMHVANLSLGDPSPSATLEQAVNSATSRGVLVVAASGNSGAGSISYPARYANAMAVGATDQNNNRASFSQYGAGLDIVAPGVNVQSTYPGSTYASLNGTSMATPHVAGAAALVKQKNPSWSNVQIRNHLKNTATSLGSTNLYGSGLVNAEAATR

SEQ ID NO: 55302 - protein, 269 aa, Unidentified
AQSVPWGISRVQAPAAHNRGLTGSGVKVAVLDTGISTHPDLNIRGGASFVPGEPSTQDGNGHGTHVAGTIAALNNSIGVLGVAPSAELYAVKVLAASGQGSVSSIAGGLEWAGNNGMHVANLSLGAPSPSATLEQAVNSATSRGVLVVAASGNSGAGSISYPARYANAMAVGATDQNNNRASFSQYGAGLDIVAPGVNVQSTYPGSTYASLNGTSMATPHVAGAAALVKQKNPSWSNVQIRNHLKNTATSLGSTNLYGSGLVNAEAATR

SEQ ID NO: 55303 - protein, 269 aa, Unidentified
AQSVPWGISRVQAPAAHRRGLTGSGVKVAVLDTGISTHPDLNIRGGASFVPGEPSTQDGNGHGTHVAGTIAALDNSIGVLGVAPSAELYAVKVLGASGSGSISSIAQGLEWAGNNGMHVANLSLGSPSPSATLEQAVNSATSRGVLVVAASGNSGAGSISYPARYANAMAVGATDQNNNRASFSQYGAGLDIVAPGVNVQSTYPGSTYASLNGTSMATPHVAGAAALVKQKNPSWSNVRIRNHLKNTATSLGSTNLYGSGLVNAEAATR

SEQ ID NO: 55304 - protein, 269 aa, Unidentified
AQSVPWGISRVQAPAAHNRGLTAFGVRVAVLDTGISTHPDLNIRGGASFVPGEPSTQDGEGHGTHVAGTIAALNNSIGVLGVAPSAELYAVKVLGASGSGSVSSIAQGLEWAGNNGMHVANLSLGSPSPSATLEQAVNSATSRGVLVVAASGNSGAGSISYPARYANAMAVGATDQNNNRASFSQYGAGLDIVAPGVNVQSTYPGSTYASLNGTSMATPHVAGAAALVKQKNPSWSNVQIRNHLKNTATSLGSTNLYGSGLVNAEAATR

SEQ ID NO: 55305 - protein, 269 aa, Unidentified
AQSVPWGISRVQAPAAHRRGLTGRGVKVAVLDTGISTHPDLNITGGASFVPGEPSTQDGNGHGTHVAGTIAALNNSIGVLGVAPSAELYAVKVLGASGSGSVSSIAQGLEWAGNNGMHVANLSLGSPSPSATLEQAVNSATSRGVLVVAASGNSGAGSISYPARYANAMAVGATDQNNNRASFSQYGAGLDIVAPGVNVQSTYPGSTYASLNGTSMATPHVAGAAALVKQKNPSWRNVQIRNHLKNTATSLGSTNLYGSGLVNAEAATR

SEQ ID NO: 55306 - protein, 269 aa, Unidentified
AQSVPWGISRVQAPAAHNRGLAGRGVKVAVLDTGISTHPDLNIRGGASFVPGEPSTQDGEGHGTHVAGTIAALNNSIGVLGVAPSAELYAVKVLGASGSGSVSSIAQGLEWAGNNGMHVANLSLGSPSPSATLEQAVNSATSRGVLVVAASGNSGAGSIDYPARYANAMAVGATDQNNNRASFSQYGAGLDIVAPGVNVQSTYPGSTYASLNGTSMATPHVAGAAALVKQKNPSWSNVQIRNHLKNTATSLGSTNLYGSGLVNAEAATR

SEQ ID NO: 55307 - protein, 269 aa, Alkalihalobacillus clausii
AQSVPWGISRLQAPAAHNRGLTGSGVKVAVLDTGISTHPDLNIRGGASFVPGEPSTQDGNGHGTHVAGTIAALNNSIGVLGVAPSAELYAVKVLPASGSGSVSSIAQGLEWAGNNGMHVANLSLGSPSPSATLEQAVNSATSRGILVVAASGNSGAGSISYPARYANAMAVGATDQNNNRASFSQYGAGLDIVAPGVNVQSTYPGSTYASLTGTSMATPHVAGAAALVKQKNPSWSNVQIRNHLKNTATSLGSTNLYGSGLVNAEAATR

SEQ ID NO: 55308 - protein, 269 aa, Unidentified
AQSVPWGISRVQAPAAHNRKLTGSGVKVAVLDTGISTHPDLNIRGGASFVPGEPSTQDGEGHGTHVAGTIAALNNSIGVLGVAPSAELYAVKVLGASGSGSVSSIAQGLEWAGNNGMHVANLSLGLPSPSATLEQAVNSATSRGVLVVAASGNSGAGSISYPARYANAMAVGATDQNNNRASFSQYGAGLDIVAPGVNVQSTYPGSTYASLNGTSMATPHVAGAAALVKQKNPRWSNVQIRNHLKNTATSLGSTNLYGSGLVNAEAATR

SEQ ID NO: 55309 - protein, 269 aa, Bacillus lentus
AQSVPWGISRVQAPAAHNRGLTGSGVKVAVLDTGISTHPDLNIRGGASFVPGEPSTQDGNGHGTHVAGTIAALNNSIGVLGVAPSAELYAVKVLGASGSGSVSSIAQGLEWAGNNGMHVANLSLGSPSPSATLEQAVNSATSRGVLVVAASGNSGAGSISAPASYANAMAVGATDQNNNRASFSQYGPGLDIVAPGVNVQSTYPGSTYASLNGTSMATPHVAGAAALVKQKNPSWSNRQIRNHLKNTATSLGSTNLYGSGLVNAEAATR

SEQ ID NO: 55310 - protein, 269 aa, Unidentified
AQSVPWGISRVQAPAAHNRGLTGSGVKVAVLDTGISTHPDLNIRGGASFVPGEPSTQDGNGHGTHVAGTIAALNNSIGVLGVAPSAELYAVKVLGQASAGSVSSIAQGLEWAGNNGMHVANLSLGSPSPSATLEQAVNSATSRGVLVVAASGNSGAGSISYPARYANAMAVGATDQNNNRASFSQYGAGLDIVAPGVNVQSTYPGSTYASLNGTSMATPHVAGAAALVKQKNPSWSNVQIRNHLKNTATSLGSTNLYGSGLVNAEAATR

SEQ ID NO: 55311 - protein, 269 aa, Unidentified
AQSVPWGISRVQAPAAHNRGLAGSGVKVAVLDTGISTHPDLNIRGGASFVPGEPSTQDGNGHGTHVAGTIAALNNSIGVLGVAPSAELYAVKVLGASGSGAVSSIAQGVEWAGNNGMHVANLSLGSPSPSATLEQAVNSATSRGVIVVAASGNSGAGSISYPARYANAMAVGATDQNNNRASFSQYGAGLDIVAPGVNVQSTYPGSTYASLNGTSMATPHVAGAAALVKQKNPSWSNVQIRNHLKNTATSLGSTNLYGSGLVNAEAATR

SEQ ID NO: 55312 - protein, 269 aa, Unidentified
AQSVPWGISRVQAPAAHNRGLTGGGVKVAVLDTGISTHPDLNIRGGASFVPGEPSTQDGNGHGTHVAGTIAALNNNIGVLGVAPSAELYAVKVLAASGQGSVSSIAQGLEWAGNNGMHVANLSLGAPSPSATLEQAVNSATSRGVLVVAASGNSGAGSISYPARYANAMAVGATDQNNNRASFSQYGAGLDIVAPGVNVQSTYPGSTYASLNGTSSATPHVAGAAALVKQKNPSWSNVQIRNHLKNTATSLGSTNLYGSGLVNAEAATR

SEQ ID NO: 55313 - protein, 269 aa, Unidentified
AQSVPWGISRVQAPAAHNRGLTGSGVKVAVLDTGISTHPDLNIRGGASFVPGEPSTQDGNGHGTHVAGTIAALNNSIGVLGVAPSAELYAVKVLGASGSGSISSIAQGVEWAGNNGMHVANLSLGNPSPSATLEQAVNSATSRGVIVVAASGNSGAGSISYPARYANAMAVGATDQNNNRASFSQYGAGLDIVAPGVNVQSTYPGSTYASLNGTSMATPHVAGAAALVKQKNPSWSNVQIRNHLKNTATSLGSTNLYGSGLVNAEAATR

SEQ ID NO: 55314 - protein, 269 aa, Unidentified
AQSVPWGISRVQAPAAHNRGLTGSGVKVAVLDTGISTHPDLNIRGGASFVPGEPSTQDGNGHGTHVAGTIAALNNNIGVLGVAPSAELYAVKVLGASGSGSVSSIAQGLEWAGNNGMHVANLSLGDPSPSATLEQAVNSATSRGVLVVAASGNSGAGSIDYPARYANAMAVGATDQNNNRASFSQYGAGLDIVAPGVNVQSTYPGSAYASLNGTSMATPHVAGAAALVKQKNPSWSNVQIRNHLKNTATSLGSTNLYGSGLVNAEAATR

SEQ ID NO: 55315 - protein, 269 aa, Unidentified
AQSVPWGISRVQAPAAHNRRLTGSGVKVAVLDTGISTHPDLNIRGGASFVPGEPSTQDGNGHGTHVAGTIAALNNSIGVLGVAPSAELYAVKVLGASGSGAVSSIAQGLEWAGNNGMHVANLSLGSPSPSATLEQAVNSATSRGVLVVAASGNSGAGSISYPARYANAMAVGATDQNNNRASFSQYGAGLDIVAPGVNVQSTYPGSTYASLNGTSMATPHVAGAAVLVKQKNPSWRNVQIRNHLKNTATSLGSTNLYGSGLVNAEAATR

SEQ ID NO: 55316 - protein, 269 aa, Unidentified
AQSVPWGISRVQAPAAHNRGLTGSGVKVAVLDTGISTHPDLNIRGGASFVPGEPSTQDGNGHGTHVAGTIAALNNSIGVLGVAPSAELYAVKVLGASGSGSVSSIAQGLEWAGNNRMHVANLSLGDPSPSATLEQAVNSATSRGVLVVAASGNSGAGSIDYPARYANAMAVGATDQNNNRASFSQYGAGLDIVAPGVNVQSTYPGSAYASLNGTSMATPHVAGAAALVKQKNPSWSNVQIRNHLKNTATSLGSTNLYGSGLVNAEAATR

SEQ ID NO: 55317 - protein, 269 aa, Unidentified
AQSVPWGISRVQAPAAHNRGLTGFGVKVAVLDTGISTHPDLNIRGGASFVPGEPSTQDGNGHGTHVAGTIAALNNSIGVLGVAPSAELYAVKVLGASGSGSVSSIAQGLEWAGNNGMHVANLSLGDPSPSATLEQAVNSATSRGVLVVAASGNSGAGSIDYPARYANAMAVGATDQNNNRASFSQYGAGLDIVAPGVNVQSTYPGSAYASLNGTSMATPHVAGAAALVKQKNPSWSNVQIRNHLKNTATSLGSTNLYGSGLVNAEAATR

SEQ ID NO: 55318 - protein, 269 aa, Unidentified
AQSVPWGISRVQAPAAHNRKLTGSGVKVAVLDTGISTHPDLNIRGGASFVPGEPSTQDGNGHGTHVAGTIAALNNSIGVLGVAPSAELYAVKVLGASGSGSVSSIAQGLEWAGNNGMHVANLSLGLPSPSATLEQAVNSATSRGVLVVAASGNSGAGSISYPARYANAMAVGATDQNNNRASFSQYGAGLDIVAPGVNVQSTYPGSTYASENGTSMATPHVAGAAALVKQKNPRWSNVQIRNHLKNTATSLGSTNLYGSGLVNAEAATR

SEQ ID NO: 55319 - protein, 269 aa, Unidentified
AQSVPWGISRVQAPAAHNRGLTGSGVKVAVLDTGISTHPDLNIRGGASFVPGEPSTQDGNGHGTHVAGTIAALNNSIGVLGVAPSAELYAVKVLGASGSGGISSIAQGLEWAGNNGMHVANLSLGNPSPSATLEQAVNSATSRGVIVVAASGNSGAGSISYPARYANAMAVGATDQNNNRASFSQYGAGLDIVAPGVNVQSTYPGSTYASLNGTSMATPHVAGAAALVKQKNPSWSNVQIRNHLKNTATSLGSTNLYGSGLVNAEAATR

SEQ ID NO: 55320 - protein, 269 aa, Unidentified
AQSVPWGISRVQAPAAHNRGLTGSGVKVAVLDTGISTHPDLNIRGGASFVPGEPSTQDGEGHGTHVAGTIAALNNDIGVLGVAPSAELYAVKVLGASGSGSVSSIAQGLEWAGNNSMHVANLSLGSPSPSATLEQAVNSATSRGVLVVAASGNSGAGSISYPARYANAMAVGATDQNNNRADFSQYGAGLDIVAPGVNVQSTYPGSTYASLNGTSMATPHVAGAAALVKQKNPSWSNVQIRNHLKNTATSLGSTNLYGSGLVNAEAATR

SEQ ID NO: 55321 - protein, 269 aa, Unidentified
AQSVPWGISRVQAPAAHRRGLTGRGVKVAVLDTGISTHPDLNIRGGASFVPGEPSTQDGNGHGTHVAGTIAALNNSIGVLGVAPRAELYAVKVLGASGSGSVSSIAQGLEWAGNNGMHVANLSLGSPSPSATLEQAVNSATSRGVLVVAASGNSGAGSISYPARYANAMAVGATDQNNNRASFSQYGAGLDIVAPGVNVQSTWPGSTYASLNGTSMATPHVAGAAALVKQKNPSWSNVQIRNHLKNTATSLGSTNLYGSGLVNAEAATR

SEQ ID NO: 55322 - protein, 269 aa, Unidentified
AQSVPWGISRVQAPAAHNRGLAGSGVKVAVLDSGISTHPDLNIRGGASFVPGEPSTQDGNGHGTHVAGTIAALNNSIGVLGVAPSAELYAVKVLGASGSGSVSSIAQGLEWAGNNRMHVANLSLGSPSPSATLEQAVNSATSRGVLVVAASGNSGAGSIDYPARYANAMAVGATDQNNNRASFSQYGAGLDIVAPGVNVQSTYPGSTYASLNGTSMATPHVAGAAALVKQKNPSWSNVQIRNHLKNTATSLGSTNLYGSGLVNAEAATR

SEQ ID NO: 55323 - protein, 269 aa, Synthetic construct
AQSVPWGISRVQAPAAHNRGLTGSGVKVAVLDTGISTHPDLNIRGGASFVPGEPSTQDGNGHGTHVAGTIAALNNSIGVLGVAPSAELYAVKVLGASGSGSVSSTAQGLEWAGNNGMHVANLSLGSNSPSATLEQAVNSATSRGVLVVAASGNSGANSISPPARYANAMAVGATDQNNNRASFSQYGAGLDIVAPGVNVQSTYPGSTYASLNGTSMATPHVAGAAALVKQKNPSWSNVQIRNHLKNTATSLGSTNLYGSGLVNAEAATR

SEQ ID NO: 55324 - protein, 269 aa, Unidentified
AQSVPWGISRVQAPAAHNRGLTGSGVKVAVLDTGISTHPDLNIRGGASFVPGEPSTQDGEGHGTHVAGTIAALNNSIGVLGVAPSAELYAVKVLGASGSGSVSSIAQGLEWAGNNGMHVANLSLGSPSPSATLEQAVNSATSRGVLVVAASGNSGEGSISYPARYANAMAVGATDQNNNRASFSQYGAGLDIVAPGVNVQSTYPGSTYASLNGTSMATPHVAGAAALVKQKNPSWSNVQIRNRLKNTATSLGSTNLYGSGLVNAFAATR

SEQ ID NO: 55325 - protein, 269 aa, Synthetic construct
AQSVPWGISRVQAPAAHNRGLTGSGVKVAVLDTGISTHPDLNIRGGASFVPGEPSTQDGNGHGTHVAGTIAALDNSIGVLGVAPSAELYAVKVLGASGSGAISSIAQGLEWAGNNGMHVANLSLGSPSPSATLEQAVNSATSRGVLVVAASGNSGAGSISYPARYANAMAVGATDQNNNRASFSQYGAGLEIVAPGVNVQSTYPGSTYASLNGTSMATPHVAGAAALVKQKNPSWSNVQIRNHLKNTATSLGSTNLYGSGLVNAEAATR

SEQ ID NO: 55326 - protein, 269 aa, Unidentified
AQSVPWGISRVQAPAAHNRGLAGSGVKVAVLDTGISTHPDLNIRGGASFVPGEPSTQDGNGHGTHVAGTIAALNNSIGVLGVAPSAELYAVKVLGASGSGSVSSIAQGLEWAGNNRMHVANLSLGIPSPSATLEQAVNSATSRGVLVVAASGNSGAGSISYPARYANAMAVGATDQNNNRADFSQYGAGLDIVAPGVNVQSTYPGSTYASLNGTSMATPHVAGAAALVKQKNPSWSNVQIRNHLKNTATSLGSTNLYGSGLVNAEAATR

SEQ ID NO: 55327 - protein, 269 aa, Unidentified
AQSVPWGIARVQAPAAHNRRLTGRGVKVAVLDTGISTHPDRNIRGGASFVPGEPSTQDGNGHGTHVAGTIAALNNSIGVLGVAPSAELYAVKVLGASGSGSVSSIAQGLEWAGNNGMHVANLSLGSPSPSATLEQAVNSATSRGVLVVAASGNSGAGSISYPARYANAMAVGATDQNNNRASFSQYGAGLDIVAPGVNVQSTYPGSTYASLNGTSMATPHVAGAAALVKQKNPSWSNVQIRNHLKNTATSLGSTNLYGSGLVNAEAATR

SEQ ID NO: 55328 - protein, 269 aa, Unidentified
AQSVPWGISRVQAPAAHNRKLTGFGVKVAVLDTGISTHPDLNIRGGASFVPGEPSTQDGNGHGTHVAGTIAALNNNIGVLGVAPSAELYAVKVLGASGSGSVSSIAQGLEWAGNNGMHVANLSLGSPSPSATLEQAVNSATSRGVLVVAASGNSGAGSIDYPARYANAMAVGATDQNNNRASFSQYGAGLDIVAPGVNVQSTYPGSTYASLNGTSMATPHVAGAAALVKQKNPSWSNVQIRNHLKNTATSLGSTNLYGSGLVNAEAATR

SEQ ID NO: 55329 - protein, 269 aa, Unidentified
AQSVPWGISRVQAPAAHNRGLAGSGVKVAVLDTGISTHPDLNIRGGASFVPGEPSTQDGNGHGTHVAGTIAALNNSIGVLGVAPSAELYAVKVLGASGSGSVSSIAQGLEWAGLNGMHVANLSLGSPSPSATLEQAVNSATSRGVLVVAASGNSGAGSIDYPARYANAMAVGATDQNNNRADFSQYGAGLDIVAPGVNVQSTYPGSTYASLNGTSMATPHVAGAAALVKQKNPSWSNVQIRNHLKNTATSLGSTNLYGSGLVNAEAATR

SEQ ID NO: 55330 - protein, 269 aa, Synthetic construct
AQSVPWGISRVQAPAAHNRGLTGSGVKVAVLDTGISTHPDLNIRGGASFVPGEPSTQDGNGHGTHVAGTIAALDNSIGVLGVAPSAELYAVKVLGASGSGAISSIAQGLEWAGNNGMHVANLSLGSPSPSATFEQAVNSATSRGVLVVAASGNSGAGSISYPARYANAMAVGATDQNNNRASFSQYGAGLDIVAPGVNVQSTYPGSTYASLNGTSMATPHVAGAAALVKQKNPSWSNVQIRNHLKNTATSLGSTNLYGSGLVNAEAATR

SEQ ID NO: 55331 - protein, 269 aa, Unidentified
AQSVPWGISRVQAPAAHNRGLTGSGVKVAVLDTGISTHPDLRIRGGASFVPGEPSTQDGNGHGTHVAGTIAALDNSIGVLGVAPSAELYAVKVLGASGSGSVSSIAQGLEWAGNNGMHVANLSLGSPSPSATLEQAVNSATSRGVLVVAASGNSGAGSISYPARYANAMAVGATDQNNNRASFSQYGAGLDIVAPGVNVQSTYPGSTYASLNGTSMATPHVAGEAALVKQKNPSWSNVQIRNRLKNTATSLGSTNLYGSGLVNAEAATR

SEQ ID NO: 55332 - protein, 269 aa, Unidentified
AQSVPWGISRVQAPAAHNRGLTGSGVKVAVLDTGISTHPDLNIRGGASFVPGEPSTQDGNGHGTHVAGTIAALNNSIGVLGVAPRAELYAVKVLGASGSGSVSSIARGLEWAGNNGMHVANLSLGSPSPSATLEQAVNSATSRGVLVVAASGNSGAGSISYPARYANAMAVGATDQNNNRADFSQYGAGLDIVAPGVNVQSTYPGSTYASLNGTSMATPHVAGAAALVKQKNPSWSNVQIRDHLKNTATSLGSTNLYGSGLVNAEAATR

SEQ ID NO: 55333 - protein, 269 aa, Unidentified
AQTVPWGISRVQAPAAHNRGLTGSGVKVAVLDTGISTHPDLNIRGGASFVPGEPSTQDGNGHGTHVAGTIAALNNDINVLGVAPSAELYAVKVLGASGSGSVSSIAQGLEWAGNNGMHVANLSLGSPSPSATLEQAVNSATSRGVLVVAASGNSGAGSISYPARYANAMAVGATDQNNNRASFSQYGAGLDIVAPGVNVQSTYPGSTYASLNGTSMASPHVAGAAALVKQKNPSWSNVQIRNHLKNTATSLGSTNLYGSGLVNAEAATR

SEQ ID NO: 55334 - protein, 269 aa, Unidentified
AQSVPWGISRVQAPAAHNRKLTGSGVKVAVLDTGISTHPDLWIRGGASFVPGEPSTQDGNGHGTHVAGTIAALNNSIGVLGVAPSAELYAVKVLGASGSGSVSSIAQGLEWAGNNGMHVANLSLGSPSPSATLEQAVNSATSRGVLVVAASGNSGAGSISYPARYANAMAVGATDQNNNRADFSQYGAGLDIVAPGVNVQSTYPGSAYASLNGTSMATPHVAGAAALVKQKNPSWSNVQIRNHLKNTATSLGSTNLYGSGLVNAEAATR

SEQ ID NO: 55335 - protein, 269 aa, Unidentified
AQSVPWGISRVQAPAAHNRGLTGSGVKVAVLDTGISTHPDLNIRGGASFVPGEPSTQDGNGHGTHVAGTIAALNNSIGVLGVAPSAELYAVKVLGASGSGSVSSIAQGLEWAGNNGMHVANLSLGSPSPSATLEQAVNSATSRGVLVVAASGNSGEGSISYPARYANAMAVGATDQNNNHASFSQYGAGLDIVAPGVNVQSTYPGSTYASLNGTSMATPHVAGAAALVKQKNPSWSNVQIRNHLKRTATSLGSTNLYGSGLVNAFAATR

SEQ ID NO: 55336 - protein, 269 aa, Unidentified
AQSVPWGISRVQAPAAHNRGLTGRGVKVAVLDTGISTHPDLNIRGGASFVPGEPSTQDGEGHGTHVAGTIAALNNSIGVLGVAPSAELYAVKVLGASGSGSVSSIAQGLEWAGLNRMHVANLSLGSPSPSATLEQAVNSATSRGVLVVAASGNSGAGSISYPARYANAMAVGATDQNNNRASFSQYGAGLDIVAPGVNVQSTYPGSTYASLNGTSMATPHVAGAAALVKQKNPSWSNVQIRNHLKNTATSLGSTNLYGSGLVNAEAATR

SEQ ID NO: 55337 - protein, 269 aa, Unidentified
AQSVPWGISRVQAPAAHNRKLTGFGVKVAVLDTGISTHPDLNIRGGASFVPGEPSTQDGNGHGTHVAGTIAALNNSIGVLGVAPSAELYAVKVLGASGSGSVSSIAQGLEWAGNNGMHVANLSLGDPSPSATLEQAVNSATSRGVLVVAASGNSGAGSISYPARYANAMAVGATDQNNNRASFSQYGAGLDIVAPGVNVQSTYPGSAYASLNGTSMATPHVAGAAALVKQKNPSWSNVQIRNHLKNTATSLGSTNLYGSGLVNAEAATR

SEQ ID NO: 55338 - protein, 269 aa, Unidentified
AQSVPWGISRVQAPAAHNRRLTGSGVKVAVLDTGISTHPDLNIRGGASFVPGEPSTQDGNGHGTHVAGTIAALNNSIGVLGVAPSAELYAVKVLGASGSGSVSSIAQGLEWAGNNRMHVANLSLGSESPSATLEQAVNSATSRGVLVVAASGNSGAGSISYPARYANAMAVGATDQNNNRADFSQYGAGLDIVAPGVNVQSTYPGSTYASLNGTSMATPHVAGAAALVKQKNPSWSNVQIRNHLKNTATSLGSTNLYGSGLVNAEAATR

SEQ ID NO: 55339 - protein, 269 aa, Unidentified
AQSVPWGISRVQAPAAHNRGLTGSGVKVAVFDTGISTHPDLNIRGGASFVPGEPSTQDGNGHGTHVAGTIAALNNSIGVLGVAPSAELYAVKVLGASGSGSVTSIAQGLEWAGNNGMHVANLSLGSPSPSATLEQAVNSATSRGVLVVAASGNSGAGSISYPARYANAMAVGATDQNNNKADFSQYGAGLDIVAPGVNVQSTYPGSTYASLNGTSMATPHVAGAAALVKQKNPSWSNVQIRNHLKNTATSLGSTNLYGSGLVNAEAATR

SEQ ID NO: 55340 - protein, 269 aa, Unidentified
AQSVPWGISRVQAPAAHNRGLTGSGVKVAVLDTGISTHPDLNIRGGASFVPGEPSTQDGNGHGTHVAGTIAALNNDIGVLGVAPSAELYAVKVLGASGSGSVSSIAQGLEWAGNNGMHVANLSLGSPSPSATLEQAVNSATSRGVLVVAASGNSGAGSISYPARYQNAMAVGATDQNNNRASFSQYGAGLDIVAPGVNVQSTYPGSTYASLNGTSMATPHVAGAAALVKQKNPSWSNVQIRNHLKNTDTSLGSTNLYGPGLVNAEAATR

SEQ ID NO: 55341 - protein, 269 aa, Unidentified
AQSVPWGISRVQAPAAHNRGLTGSGVKVAVLDTGISTHPDLNIRGGASFVPGEPSTQDGNGHGTHVAGTIAALNNSIGVLGVAPSAELYAVKVLGASGAGSVSSIAQGLEWAGNNGMHVANLSLGSPSPSATLEQAVNSATSRGVLVVAASGNSGEGSISYPARYANAMAVGATDQNNNHASFSQYGAGLDIVAPGVNVQSTYPGSTYASLNGTSMATPHVAGAAALVKQKNPSWSNVQIRNRLKNTATSLGSTNLYGSGLVNAEAATR

SEQ ID NO: 55342 - protein, 269 aa, Synthetic construct
AQSVPWGISRVQAPAAHNRGLTGSGVKVAVLDTGISTHPDLNIRGGASFVPGEPSTQDGNGHGTHVAGTIAALNNSIGVLGVAPSAELYAVKVLGASGSGSVSSIAQGLEWAGNNGMHVANLSLGSPSPSATLEQAVNSATSRGVLVVAASGNSGAGSISYPARYANAMAVGATDQNNNRGDGSNYGAGLDIVAPGVNVQSTYPGSTYASLNGTSMATPHVAGAAALVKQKNPSWSNVQIRNHLKNTATSLGSTNLYGSGLVNAEAATR

SEQ ID NO: 55343 - protein, 269 aa, Unidentified
AQSVPWGISRVQAPAAHNRGLTGRGVKVAVLDTGISTHPDLNIRGGASFVPGEPSTQDGNGHGTHVAGTIAALNNSIGVLGVAPSAELYAVKVLGASGSGSVSSIAQGLEWAGNNGMHVANLSLGSESPSATLEQAVNSATSRGVLVVAASGNSGAGSISYPARYANAMAVGATDQNNNRASFSQYGAGLDIVAPGVNVQSTYPGSTYASLNGTSMATPHVAGAAALVKQKNPSWSNVRIRDHLKNTATSLGSTNLYGSGLVNAEAATR

SEQ ID NO: 55344 - protein, 269 aa, Unidentified
AQSVPWGISRVQAPASHNRGLTGSGVKVAVLDTGISTHPDLNIRGGASFVPGEPSTQDGNGHGTHVAGTIAALNNSIGVLGVAPSAELYAVKVLGASGSGSLSSIAQGVEWAGNNGMHVANLSLGNPSPSATLEQAVNSATSRGVLVVAASGNSGAGSISYPARYANAMAVGATDQNNNRASFSQYGAGLDIVAPGVNVQSTYPGSTYASLNGTSMATPHVAGAAALVKQKNPSWSNVQIRNHLKNTATSLGSTNLYGSGLVNAEAATR

SEQ ID NO: 55345 - protein, 269 aa, Bacillus subtilis
AQSVPWGISRVQAPAAHNRGLTGSGVKVAVLDTGISTHPDLNIRGGASFVPGEPSTQDGNGHGTHVAGTIAALNNSIGVLGVAPSAELYAVKVLGASGSGSVSSIAQGLEWAGNNGMHVANLSLGSPSPSATLEQAVNSATSRGVLVVAASGNSGAGSISYPARYANAMAVGATDQNNNRASFSQYGAGLDIVAPGVNVQSTYPGSTYASLNGTSMATPHVAGAAALVLQRNPSWSNVQIRNHLNNTATSLGSTNLFGSGLVNAEAATR

SEQ ID NO: 55346 - protein, 269 aa, Unidentified
AQSVPWGISRVQAPAAHNRGLWGSGVKVAVLDTGISTHPDLRIRGGASFVPGEPSTQDGNGHGTHVAGTIAALNNSIGVLGVAPSAELYAVKVLGASGAGSVSSIAQGLEWAGNNGMHVANLSLGSPSPSATLEQAVNSATSRGVLVVAASGNSGAGSISYPARYANAMAVGATDQNNNRASFSQYGAGLDIVAPGVNVQSTYPGSAYASLNGTSMATPHVAGAAALVKQKNPSWSNVQIRNHLKNTATSLGSTNLYGSGLVNAEAATR

SEQ ID NO: 55347 - protein, 269 aa, Unidentified
AQSVPWGISRVQAPAAHNRGLTGSGVKVAVLDTGISTHPDLRIRGGASFVPGEPSTQDGNGHGTHVAGTIAALNNNIGVLGVAPSAELYAVKVLGASGSASVSSIAQGLEWAGNNGMHVANLSLGSPSPSATLEQAVNSATSRGVLVVAASGNSGAGSISYPARYANAMAVGATDQNNNRASFSQYGAGLDIVAPGVNVQSTYPGSTYGSLNGTSMATPHVAGAAALVKQKNPSWSNVQIRNHLKNTATSLGSTNLYGSGLVNAEAATR

SEQ ID NO: 55348 - protein, 269 aa, Unidentified
AQSVPWGISRVQAPAAHNRKLTGSGVKVAVLDTGISTHPDLNIRGGASFVPGEPSTQDGNGHGTHVAGTIAALNNSIGVLGVAPSAELYAVKVLGASGGGSVSSIAQGLEWAGNNGMHVANLSLGSPSPSATLEQAVNSATSRGVLVVAASGNSGAGSISYPARYANAMAVGATDQNNNRASFSQYGAGLDIVAPGVNVQSTYPGSTYASENGTSMATPHVAGAAALVKQKNPRWSNVQIRNHLKNTATSLGSTNLYGSGLVNAEAATR

SEQ ID NO: 55349 - protein, 269 aa, Unidentified
AQSVPWGISRVQAPAAHNRGLAGRGVKVAVLDTGISTHPDLNIRGGASFVPGEPSTQDGEGHGTHVAGTIAALNNSIGVLGVAPSAELYAVKVLGASGSGSVSSIAQGLEWAGNNRMHVANLSLGSPSPSATLEQAVNSATSRGVLVVAASGNSGAGSISYPARYANAMAVGATDQNNNRASFSQYGAGLDIVAPGVNVQSTYPGSTYASLNGTSMATPHVAGAAALVKQKNPSWSNVQIRNHLKNTATSLGSTNLYGSGLVNAEAATR

SEQ ID NO: 55350 - protein, 269 aa, Unidentified
AQSVPWGISRVQAPAAHNRGLLGFGVKVAVLDTGISTHPDLNIRGGASFVPGEPSTQDGNGHGTHVAGTIAALNNSIGVLGVAPSAELYAVKVLGASGSGSVSSIAQGLEWAGNNRMHVANLSLGDPSPSATLEQAVNSATSRGVLVVAASGNSGAGSISYPARYANAMAVGATDQNNNRASFSQYGAGLDIVAPGVNVQSTYPGSTYASLNGTSMATPHVAGAAALVKQKNPSWSNVQIRNHLKNTATSLGSTNLYGSGLVNAEAATR

SEQ ID NO: 55351 - protein, 269 aa, Unidentified
AQSVPWGISRVQAPAAHNRGLTGSGVKVAVLDTGISTHPDLNIRGGASFVPGEPSTQDGNGHGTHVAGTIAALNNSIGVLGVAPSAELYAVKVLPQGGSASVSSIAQGLEWAGNNGMHVANLSLGSPSPSATLEQAVNSATSRGVLVVAASGNSGAGSISYPARYANAMAVGATDQNNNRASFSQYGAGLDIVAPGVNVQSTYPGSTYASLNGTSMATPHVAGAAALVKQKNPSWSNVQIRNHLKNTATSLGSTNLYGSGLVNAEAATR

SEQ ID NO: 55352 - protein, 269 aa, Synthetic construct
AQSVPWGISRVQAPAAHNRGLTGSGVKVAVLDTGISTHPDLNIRGGASFVPGEPSTQDGNGHGTHVAGTIAALDNSIGVLGVAPSAELYAVKVLGASGSGAISSIAQGLEWAGNNGMHVANLSLGLPSPSATLEQAVNSATSRGVLVVAASGNSGAGSISYPARYANAMAVGATDQNNNRASFSQYGAGLDIVAPGVNVQSTYPGSTYASLNGTSMATPHVAGAAALVKQKNPSWSNVQIRNHLKNTATSLGSTNLYGSGLVNAEAATR

SEQ ID NO: 55353 - protein, 269 aa, Unidentified
AQSVPWGISRVQAPAAHNRKLTGSGVKVAVLDTGISTHPDLNIRGGASFVPGEPSTQDGNGHGTHVAGTIAALNNNIGVLGVAPSAELYAVKVLGASGSGSVSSIAQGLEWAGNNGMHVANLSLGQPSPSATLEQAVNSATSRGVLVVAASGNSGAGSISYPARYANAMAVGATDQNNNRASFSQYGAGLDIVAPGVNVQSTYPGSTYASLNGTSMATPHVAGAAALVKQKNPSWSNVQIRNHLKNTATSLGSTNLYGSGLVNALAATR

SEQ ID NO: 55354 - protein, 269 aa, Unidentified
AQSVPWGISRVQAPAAHNRGLTGSGVKVAVLDTGISTHPDLNIRGGASFVPGEPSTQDGEGHGTHVAGTIAALNNNIGVLGVAPSAELYAVKVLGASGSGSVSSIAQGLEWAGLNGMHVANLSLGSPSPSATLEQAVNSATSRGVLVVAASGNSGAGSISYPARYANAMAVGATDQNNNRASFSQYGAGLDIVAPGVNVQSTYPGSTYASLNGTSMAAPHVAGAAALVKQKNPSWSNVQIRNHLKNTATSLGSTNLYGSGLVNAEAATR

SEQ ID NO: 55355 - protein, 269 aa, Unidentified
AQSVPWGISRVQAPAAHNRKLLGSGVKVAVLDTGISTHPDLNIRGGASFVPGEPSTQDGNGHGTHVAGTIAALNNNIGVLGVAPSAELYAVKVLGASGSGSVSSIAQGLEWAGNNGMHVANLSLGDPSPSATLEQAVNSATSRGVLVVAASGNSGAGSISYPARYANAMAVGATDQNNNRASFSQYGAGLDIVAPGVNVQSTYPGSTYASLNGTSMATPHVAGAAALVKQKNPSWSNVQIRNHLKNTATSLGSTNLYGSGLVNAEAATR

SEQ ID NO: 55356 - protein, 269 aa, Unidentified
AQSVPWGISRVQAPAAHNRGLLGSGVKVAVLDTGISTHPDLNIRGGASFVPGEPSTQDGNGHGTHVAGTIAALNNSIGVLGVAPSAELYAVKVLGASGSGSVSSIAQGLEWAGNNRMHVANLSLGDPSPSATLEQAVNSATSRGVLVVAASGNSGAGSIDYPARYANAMAVGATDQNNNRASFSQYGAGLDIVAPGVNVQSTYPGSTYASLNGTSMATPHVAGAAALVKQKNPSWSNVQIRNHLKNTATSLGSTNLYGSGLVNAEAATR

SEQ ID NO: 55357 - protein, 269 aa, Unidentified
AQSVPWGISRVQAPAAHNRGLAGSGVKVAVLDSGISTHPDLNIRGGASFVPGEPSTQDGNGHGTHVAGTIAALNNSIGVLGVAPSAELYAVKVLGASGSGSVSSIAQGLEWAGNNRMHVANLSLGSESPSATLEQAVNSATSRGVLVVAASGNSGAGSISYPARYANAMAVGATDQNNNRASFSQYGAGLDIVAPGVNVQSTYPGSTYASLNGTSMATPHVAGAAALVKQKNPSWSNVQIRNHLKNTATSLGSTNLYGSGLVNAEAATR

SEQ ID NO: 55358 - protein, 269 aa, Unidentified
AQSVPWGISRVQAPAAHNRGLTGSGVKVAVLDTGISTHPDLNIRGGASFVPGEPSTQDGNGHGTHVAGTIAALNNSIGVLGVAPSAELYAVKVLGATGAAAVSSIAQGLEWAGNNGMHVANLSLGSPSPSATLEQAVNSATSRGVLVVAASGNSGAGSISYPARYANAMAVGATDQNNNRASFSQYGAGLDIVAPGVNVQSTYPGSTYASLNGTSMATPHVAGAAALVKQKNPSWSNVQIRNHLKNTATSLGSTNLYGSGLVNAEAATR

SEQ ID NO: 55359 - protein, 269 aa, Unidentified
AQSRPWGISRVQAPAAHNRRLTGRGVKVAVLDTGISTHPDLNIRGGASFVPGEPSTQDGNGHGTHVAGTIAALNNSIGVLGVAPSAELYAVKVLGASGSGSVSSIAQGLEWAGNNGMHVANLSLGSPSPSATLEQAVNSATSRGVLVVAASGNSGAGSISYPARYANAMAVGATDQNNNRASFSQYGAGLDIVAPGVNVQSTYPGSTYASLNGTSMATPHVAGAAALVKQKNPSWSNVQIRNRLKNTATSLGSTNLYGSGLVNAEAATR

SEQ ID NO: 55360 - protein, 269 aa, Unidentified
AQSVPWGISRVQAPAAHNRGLTGSGVKVAVLDSGISTHPDLNIRGGASFVPGEPSTQDGNGHGTHVAGTIAALNNSIGVLGVAPSAELYAVKVLGASGSGSVSSIAQGLEWAGLNRMHVANLSLGSPSPSATLEQAVNSATSRGVLVVAASGNSGAGSIDYPARYANAMAVGATDQNNNRASFSQYGAGLDIVAPGVNVQSTYPGSTYASLNGTSMATPHVAGAAALVKQKNPSWSNVQIRNHLKNTATSLGSTNLYGSGLVNAEAATR

SEQ ID NO: 55361 - protein, 269 aa, Bacillus lentus
AQSVPWGIRRVQAHAAHNLGLTGSGVKVAVLDTGISTHPDLNIRGGASFVPGEPSTQDGDGHGTHVAGTIAALNNSIGVLGVAPSAELYAVKVLGASGSGSVSSIAQGLEWAGNNGMHVANLSLGSPSPSATLEQAVNSATSRGVLVVAASGNSGAGSISYPARYANAMAVGATDQNNNRASFSQYGAGLDIVAPGVNVQSTYPGSTYASLNGTSMATPHVAGAAALVKQKNPSWSNVQIRNHLKNTATSLGSTNLYGSGLVNAEAATR

SEQ ID NO: 55362 - protein, 269 aa, Unidentified
AQSVPWGISRVQAPAAHNRGLTGSGVKVAVLDTGISTHPDLNIRGGASFVPGEPSTQDGNGHGTHVAGTIAALDNSIGVLGVAPSAELYAVKVLGASGSGAISSIAQGLEWAGNNGMHVANLSLGSPSPSATLEQAVNSATSRGVLVVAASGNSGAGSISYPARYANAMAVGATDQNNNRASFSQYGAGLDIVAPGVNVQSTYPGSTYACLNGTSMATPHVAGAAALVKQKNPSWSNVQIRNHLKNTATSLGSTNLYGSGLVNAEAATR

SEQ ID NO: 55363 - protein, 269 aa, Unidentified
AQSVPWGISRVQAPAAHNRKLTGSGVKVAVLDTGISTHPDLNIRGGASFVPGEPSTQDGNGHGTHVAGTIAALNNSIGVLGVAPSAELYAVKVLGASGDGSVSSIAQGLEWAGNNGMHVANLSLGSPSPSATLEQAVNSATSRGVLVVAASGNSGAGSISYPARYANAMAVGATDQNNNRASFSQYGAGLDIVAPGVNVQSTYPGSTYASENGTSMATPHVAGAAALVKQKNPRWSNVQIRNHLKNTATSLGSTNLYGSGLVNAEAATR

SEQ ID NO: 55364 - protein, 269 aa, Unidentified
AQSVPWGISRVQAPAAHNRGLTGSGVKVAVLDTGISTHPDLNIRGGASFVPGEPSTQDGEGHGTHVAGTIAALNNSIGVLGVAPSAELYAVKVLGASGDGSVSSIAQGLEWAGNNGMHVANLSLGLPSPSATLEQAVNSATSRGVLVVAASGNSGAGSISYPARYANAMAVGATDQNNNRASFSQYGAGLDIVAPGVNVQSTYPGSTYASLNGTSMATPHVAGAAALVKQKNPRWSNVQIRNHLKNTATSLGSTNLYGSGLVNAEAATR

SEQ ID NO: 55365 - protein, 269 aa, Unidentified
AQSVPWGISRVQAPAAHNRGLLGSGVKVAVLDTGISTHPDLNIRGGASFVPGEPSTQDGNGHGTHVAGTIAALNNNIGVLGVAPSAELYAVKVLGASGSGSVSSIAQGLEWAGNNGMHVANLSLGDPSPSATLEQAVNSATSRGVLVVAASGNSGAGSISYPARYANAMAVGATDQNNNRASFSQYGAGLDIVAPGVNVQSTYPGSTYASENGTSMATPHVAGAAALVKQKNPSWSNVQIRNHLKNTATSLGSTNLYGSGLVNAEAATR

SEQ ID NO: 55366 - protein, 269 aa, Unidentified
AQSVPWGISRVQAPAAHNRGLTGFGVKVAVLDTGISTHPDLNIRGGASFVPGEPSTQDGNGHGTHVAGTIAALNNNIGVLGVAPSAELYAVKVLGASGSGSVSSIAQGLEWAGNNRMHVANLSLGDPSPSATLEQAVNSATSRGVLVVAASGNSGAGSISYPARYANAMAVGATDQNNNRASFSQYGAGLDIVAPGVNVQSTYPGSTYASLNGTSMATPHVAGAAALVKQKNPSWSNVQIRNHLKNTATSLGSTNLYGSGLVNAEAATR

SEQ ID NO: 55367 - protein, 269 aa, Unidentified
AQSVPWGISRVQAPAAHNRGLTGSGVKVAVLDTGISTHPDLNIRGGASFVPGEPSTQDGNGHGTHVAGTIAALNNDIGVLGVAPSADLYAVKVLGASGSGSVSSIAQGLEWAGNNGMHVANLSMGSPSPSATLEQAVNSATSRGVLVVAASGNSGAGSISYPARYQNAMAVGATDQNNNRASFSQYGAGLDIVAPGVNVQSTYPGSTYASLNGTSMATPHVAGAAALVKQKNPSWSNVQIRNHLKNTATSLGSTNLYGSGLVNAEAATR

SEQ ID NO: 55368 - protein, 269 aa, Unidentified
AQSVPWGISRVQAPAAHNRRLTGSGVKVAVLDTGISTHPDLRIRGGASFVPGEPSTQDGNGHGTHVAGTIAALNNSIGVLGVAPSAELYAVKVLGASGSGSVSSIAQGLEWAGNNGMHVANLSLGSPSPSATLEQAVNSATSRGVLVVAASGNSGAGSISYPARYANAMAVGATDQNNNRASFSQYGAGLDIVAPGVNVQSTYPGSTYASLNGTSMATPHVAGAAALVKQKNPSWRNVQIRNHLKNTATSLGSTNLYGSGLVNALAATR

SEQ ID NO: 55369 - protein, 269 aa, Unidentified
AQSVPWGISRVQAPAAHNRKLTGSGVKVAVLDTGISTHPDLNIRGGASFVPGEPSTQDGEGHGTHVAGTIAALNNSIGVLGVAPSAELYAVKVLGASGQGSVSSIAQGLEWAGLNGMHVANLSLGSPSPSATLEQAVNSATSRGVLVVAASGNSGAGSISYPARYANAMAVGATDQNNNRASFSQYGAGLDIVAPGVNVQSTYPGSTYASLNGTSMATPHVAGAAALVKQKNPSWSNVQIRNHLKNTATSLGSTNLYGSGLVNAEAATR

SEQ ID NO: 55370 - protein, 269 aa, Unidentified
AQSVPWGISRVQAPAAHNRGLTGSGVKVAVLDTGISTHPDLNIRGGASFVPGEPSTQDGEGHGTHVAGTIAALNNGIGVLGVAPSAELYAVKVLGASGSGSVSSIAQGLEWAGNNSMHVANLSLGSPSPSATLEQAVNSATSRGVLVVAASGNSGAGSISYPARYANAMAVGATDQNNNRADFSQYGAGLDIVAPGVNVQSTYPGSTYASLNGTSMATPHVAGAAALVKQKNPSWSNVQIRNHLKNTATSLGSTNLYGSGLVNAEAATR

SEQ ID NO: 55371 - protein, 269 aa, Unidentified
AQSVPWGISRVQAPAAHNRGLTGSGVKVAVLDTGISTHPDLNIRGGASFVPGEPSTQDGNGHGTHVAGTIAALNNSIGVLGVAPSAELYAVKVLGASGAGGISSIAQGLEWAGNNGMHVANLSLGSPSPSATLEQAVNSATSRGVIVVAASGNSGAGSISYPARYANAMAVGATDQNNNRASFSQYGAGLDIVAPGVNVQSTYPGSTYASLNGTSMATPHVAGAAALVKQKNPSWSNVQIRNHLKNTATSLGSTNLYGSGLVNAEAATR

SEQ ID NO: 55372 - protein, 269 aa, Unidentified
AQSVPWGISRVQAPAAHNRGLTGSGVKVAVLDTGISTHPDLNIRGGASFVPGEPSTQDGNGHGTHVAGTIAALNNSIGVLGVAPSAELYAVKVLGFTGSAGVSSIAQGLEWAGNNGMHVANLSLGSPSPSATLEQAVNSATSRGVLVVAASGNSGAGSISYPARYANAMAVGATDQNNNRASFSQYGAGLDIVAPGVNVQSTYPGSTYASLNGTSMATPHVAGAAALVKQKNPSWSNVQIRNHLKNTATSLGSTNLYGSGLVNAEAATR

SEQ ID NO: 55373 - protein, 269 aa, Unidentified
AQSVPWGISRVQAPAAHNRGLAGSGVKVAVLDTGISTHPDLNIRGGASFVPGEPSTQDGNGHGTHVAGTIAALNNSIGVLGVAPSAELYAVKVLGASGSGAISSIAQGVEWAGNNGMHVANLSLGSPSPSATLEQAVNSATSRGVLVVAASGNSGAGSISYPARYANAMAVGATDQNNNRASFSQYGAGLDIVAPGVNVQSTYPGSTYASLNGTSMATPHVAGAAALVKQKNPSWSNVQIRNHLKNTATSLGSTNLYGSGLVNAEAATR

SEQ ID NO: 55374 - protein, 269 aa, Unidentified
AQSVPWGISRVQAPAAHNRGLTGSGVKVAVLDTGISTHPDLNIRGGASFVPGEPSTQDGNGHGTHVAGTIAALNNDIGVLGVAPSAELYAVKVLGASGSGSVSSIAQGLEWAGNNSMHVANLSLGSESPSATLEQAVNSATSRGVLVVAASGNSGAGSISYPARYANAMAVGATDQNNNRASFSQYGAGLDIVAPGVNVQSTYPGSTYASLNGTSMATPHVAGAAALVKQKNPSWSNVQIRNRLKNTATSLGSTNLYGSGLVNAEAATR

SEQ ID NO: 55375 - protein, 269 aa, Unidentified
AQSVPWGISRVQAPAAHNRGLTGSGVKVAVLDTGISTHPDLNIRGGASFVPGEPSTQDGNGHGTHVAGTIAALNNGIGVLGVAPSAELYAVKVLGASGSGSVSSIAQGLEWAGNNDMHVANLSLGSPSPSATLEQAVNSATSRGVLVVAASGNSGAGSISYPARYANAMAVGATDQNNNRASFSQYGAGLDIVAPGVNVQSTYPGSTYASLNGTSMATPHVAGAAALVKQKNPSWSNVQIRDRLKNTATSLGSTNLYGSGLVNAEAATR

SEQ ID NO: 55376 - protein, 269 aa, Unidentified
AQSVPWGISRVQAPAAHNRGLTGSGVKVAVLDTGISTHPDLNIRGGASFVPGEPSTQDGNGHGTHVAGTIAALNNSIGVLGVAPSAELYAVKVLGASGSGSVSSIAQGLEWAGNNRMHVANLSLGSPSPSATLEQAVNSATSRGVLVVAASGNSGEGSIDYPARYANAMAVGATDQNNNRADFSQYGAGLDIVAPGVNVQSTYPGSTYASLNGTSMATPHVAGAAALVKQKNPSWSNVQIRNHLKNTATSLGSTNLYGSGLVNAEAATR

SEQ ID NO: 55377 - protein, 269 aa, Unidentified
AQSVPWGISRVQAPAAHNRGLTGSGVKVAVLDTGISTHPDLNIRGGASFVPGEPSTQDGNGHGTHVAGTIAALNNSIGVLGVAPSAELYAVKVLSASGNGSVSSIAGGLEWAGNNGMHVANLSLGAPSPSATLEQAVNSATSRGVLVVAASGNSGAGSISYPARYANAMAVGATDQNNNRADFSQYGAGLDIVAPGVNVQSTYPGSTYASLNGTSSATPHVAGAAALVKQKNPSWSNVQIRNHLKNTATSLGSTNLYGSGLVNAEAATR

SEQ ID NO: 55378 - protein, 270 aa, Aspergillus oryzae
AQSVPWGISRVQAPAAHNRGLTGSGVKVAVLDTGISTHPDLNIRGGASFVPGEPSTQDGNGHGTHVAGTIAALNNSIGVLGVAPSAELYAVKVLGASEGSGSVSSIAQGLEWAGNNGMHVANLSLGSPSPSATLEQAVNSATSRGVLVVAASGNSGADSISYPARYANAMAVGATDQNNNRASFSQYGAPLDIVAPGVNVQSTYPPSTYASLNGTSMATPHVAGAAALVKQKNPSWSNVQIRNHLKNTATSLGSNNLYGSGLVNAEAATR

SEQ ID NO: 55379 - protein, 269 aa, Unidentified
AQSRPWGISRVQAPAAHNRRLTGRGVKVAVLDTGISTHPDLNIRGGASFVPGEPSTQDGNGHGTHVAGTIAALNNSIGVLGVAPSAELYAVKVLGASGSGSVSSIAQGLEWAGNNGMHVANLSLGSPSPSATLEQAVNSATSRGVLVVAASGNSGAGSISYPARYANAMAVGATDQNNNRASFSQYGAGLDIVAPGVNVQSTYPGSTYASLNGTSMATPHVAGAAALVKQKNPSWSNRQIRNHLKNTATSLGSTNLYGSGLVNAEAATR

SEQ ID NO: 55380 - protein, 269 aa, Unidentified
AQSVPWGISRVQAPAAHNRGLTGRGVKVAVLDTGISTHPDLNIRGGASFVPGEPSTQDGNGHGTHVAGTIAALNNSIGVLGVAPSAELYAVKVLGASGSGSVSSIAQGLEWAGNNRMHVANLSLGSPSPSATLEQAVNSATSRGVLVVAASGNSGEGSISYPARYANAMAVGATDQNNNRADFSQYGAGLDIVAPGVNVQSTYPGSTYASLNGTSMATPHVAGAAALVKQKNPSWSNVQIRNHLKNTATSLGSTNLYGSGLVNAEAATR

SEQ ID NO: 55381 - protein, 269 aa, Unidentified
AQSVPWGISRVQAPAAHNRGLTGSGVKVAVLDTGISTHPDLNIRGGASFVPGEPSTQDGNGHGTHVAGTIAALNNSIGVLGVAPSAELYAVKVLAASGQGSVSSIAQGLEWAGNNGMHVANLSLGAPSPSATLEQAVNSATSRGVLVVAASGNSGAGSISYPARYANAMAVGATDQNNNRADFSQYGAGLDIVAPGVNVQSTYPGSTYASLNGTSMATPHVAGAAALVKQKNPSWSNVQIRNHLKNTATSLGSTNLYGSGLVNAEAATR

SEQ ID NO: 55382 - protein, 269 aa, Unidentified
AQSVPWGISRVQAPAAHNRGLAGSGVKVAVLDTGISTHPDLNIRGGASFVPGEPSTQDGNGHGTHVAGTIAALNNSIGVLGVAPSAELYAVKVLGASGSGSVSSIAQGLEWAGNNGMHVANLSLGSPSPSATLEQAVNSATSRGVLVVAASGNSGEGSIDYPARYANAMAVGATDQNNNRADFSQYGAGLDIVAPGVNVQSTYPGSTYASLNGTSMATPHVAGAAALVKQKNPSWSNVQIRNHLKNTATSLGSTNLYGSGLVNAEAATR

SEQ ID NO: 55383 - protein, 269 aa, Unidentified
AQSVPWGISRVQAPAAHNRGLTGGGVKVAVLDTGISTHPDLNIRGGASFVPGEPSTQDGNGHGTHVAGTIAALNNSIGVLGVAPSAELYAVKVLAASGQGSVSSIANGLEWAGNNGMHVANLSLGSPSPSATLEQAVNSATSRGVLVVAASGNSGAGSISYPARYANAMAVGATDQNNNRASFSQYGAGLDIVAPGVNVQSTYPGSTYASLNGTSMATPHVAGAAALVKQKNPSWSNVQIRNHLKNTATSLGSTNLYGSGLVNAEAATR

SEQ ID NO: 55384 - protein, 269 aa, Unidentified
AQSVPWGISRVQAPAAHNRGLTGSGVKVAVLDTGISTHPDLNIRGGASFVPGEPSTQDGNGHGTHVAGTIAALNNGIGVLGVAPSAELYAVKVLGASGSGSVSSIAQGLEWAGNNSMHVANLSLGSPSPSATLEQAVNSATSRGVLVVAASGNSGAGSISYPARYANAMAVGATDQNNNRADFSQYGAGLDIVAPGVNVQSTYPGSTYASLNGTSMATPHVAGAAALVKQKNPSWSNVQIRNRLKNTATSLGSTNLYGSGLVNAEAATR

SEQ ID NO: 55385 - protein, 269 aa, Unidentified
AQSVPWGISRVQAPAAHNRGLTGSGVRVAVLDTGISFHPDLNIRGGASFVPGEPSTQDGNGHGTHVAGTIAALNNSIGVLGVAPSAELYAVKVLGASGSASVSSIAQGLEWAGLNGMHVANLSLGSPSPSATLEQAVNSATSRGVLVVAASGNSGAGSISYPARYANAMAVGATDQNNNRASFSQYGAGLDIVAPGVNVQSTYPGSTYASLNGTSMATPHVAGAAALVKQKNPSWSNVQIRNHLKNTATSLGSTNLYGSGLVNAEAATR

SEQ ID NO: 55386 - protein, 269 aa, Unidentified
AQSVPWGISRVQAPAAHNRGLTGSGVKVAVLDTGISTHPDLNIRRGASFVPGEPSTADGNGHGTHVAGTIAALNNSIGVLGVAPSAELYAVKVLGASGSGNVSSIAQGLEWAGNNGMHVANLSLGSPSPSATLEQAVNSATSRGVLVVAASGNSGAGSISYPARYANAMAVGATDQNNNRASFSQYGAGLDIVAPGVNVQSTYPMSTYASLNGTSMATPHVAGAAALVKQKNPSWSNVQIRNHLKNTATSLGSTNLYGSGLVNAEAATR

SEQ ID NO: 55387 - protein, 269 aa, Unidentified
AQSVPWGISRVQAPAAHNRGLTGRGVKVAVLDTGISTHPDLNIRGGASFVPGEPSTQDGNGHGTHVAGTIAALNNRIGVLGVAPSAELYAVKVLGASGSGSVSSIAQGLEWAGNNGMHVANLSLGSPSPSATLEQAVNSATSRGVLVVAASGNSGADSISYPARYANAMAVGATDQNNNRADFSQYGAGLDIVAPGVNVQSTYPGSTYASLNGTSMATPHVAGAAALVKQKNPSWSNVQIRNHLKNTATSLGSTNLYGSGLVNAEAATR

SEQ ID NO: 55388 - protein, 269 aa, Unidentified
AQSVPWGISRVQAPAAHNRGLTGSGVKVAVLDTGISTHPDLNIRGGASFVPGEPSTQDGNGHGTHVAGTIAALDNSIGVLGVAPSAELYAVKVLGASGSGAISSIAQGLEWAGNNGMHVANLSLGSPSPSATLEQAVNSATSRGVLVVAASGNSGAGSISYPARYANAMAVGATDQNNNRASFSQYGAGLDIVAPGVNVQSTYPGSTYASLNGTSMATPHVAGAAALVKQKNPSWSNVQIRNHLTNTATSLGSTNLYGSGLVNAEAATR

SEQ ID NO: 55389 - protein, 269 aa, Unidentified
AQSVPWGISRVQAPAAHNRRLTGSGVKVAVLDTGISTHPDLNIRGGASFVPGEPSTQDGNGHGTHVAGTIAALNNSIGVLGVAPSAELYAVKVLGASGAGSVSSIAQGLEWAGNNGMHVANLSLGSPSPSATLEQAVNSATSRGVLVVAASGNSGAGSISYPARYANAMAVGATDQNNNRASFSQYGAGLDIVAPGVNVQSTYPGSTYASLNGTSMATPHVAGAAVLVKQKNPSWRNVQIRNHLKNTATSLGSTNLYGSGLVNAEAATR

SEQ ID NO: 55390 - protein, 269 aa, Unidentified
AQSVPWGISRVQAPAAHNRGLTGSGVKVAVLDTGISTHPDLNIRGGASFVPGEPSTQDGNGHGTHVAGTIAALNNSIGVLGVAPSAELYAVKVLAASGNGSVSSIAQGLEWAGNNGMHVANLSLGAPSPSATLEQAVNSATSRGVLVVAASGNSGAGSISYPARYANAMAVGATDQNNNRADFSQYGAGLDIVAPGVNVQSTYPGSTYASLNGTSMATPHVAGAAALVKQKNPSWSNVQIRNHLKNTATSLGSTNLYGSGLVNAEAATR

SEQ ID NO: 55391 - protein, 269 aa, Unidentified
AQSVPWGISRVQAPAAHNRGLTGRGVKVAVLDSGISTHPDLNIRGGASFVPGEPSTQDGNGHGTHVAGTIAALNNSIGVLGVAPSAELYAVKVLGASGSGSVSSIAQGLEWAGNNRMHVANLSLGSPSPSATLEQAVNSATSRGVLVVAASGNSGEGSISYPARYANAMAVGATDQNNNRASFSQYGAGLDIVAPGVNVQSTYPGSTYASLNGTSMATPHVAGAAALVKQKNPSWSNVQIRNHLKNTATSLGSTNLYGSGLVNAEAATR

SEQ ID NO: 55392 - protein, 269 aa, Unidentified
AQSVPWGISRVQAPAAHNRKLTGFGVKVAVLDTGISTHPDLNIRGGASFVPGEPSTQDGNGHGTHVAGTIAALNNSIGVLGVAPSAELYAVKVLGASGSGSVSSIAQGLEWAGNNRMHVANLSLGSPSPSATLEQAVNSATSRGVLVVAASGNSGAGSISYPARYANAMAVGATDQNNNRASFSQYGAGLDIVAPGVNVQSTYPGSAYASLNGTSMATPHVAGAAALVKQKNPSWSNVQIRNHLKNTATSLGSTNLYGSGLVNAEAATR

SEQ ID NO: 55393 - protein, 269 aa, Unidentified
AQSVPWGISRVQAPAAHNRGLTGRGVKVAVLDTGISTHPDLNIRGGASFVPGEPSTQDGNGHGTHVAGTIAALDNSIGVLGVAPSAELYAVKVLGASGGGSVSSIAQGLEWAGNNGMHVANLSLGSPSPSATLEQAVNSATSRGVLVVAASGNSGAGSISYPARYANAMAVGATDQNNNRASFSQYGAGLDIVAPGVNVQSTYPGSTYASLNGTSMATPHVAGAAVLVKQKNPSWSNVQIRNHLKNTATSLGSTNLYGSGLVNAEAATR

SEQ ID NO: 55394 - protein, 269 aa, Unidentified
AQSVPWGIERVQAPAAHNRGLTGSGVKVAVLDTGISTHPDLRIRGGASFVPGEPSTQDGNGHGTHVAGTIAALDNSIGVLGVAPSAELYAVKVLGASGSGSVSSIAQGLEWAGNNGMHVANLSLGSPSPSATLEQAVNSATSRGVLVVAASGNSGAGSISYPARYANAMAVGATDQNNNRASFSQYGAGLDIVAPGVNVQSTYPGSTYASLNGTSMATPHVAGAAALVKQKNPSWSNVQIRNHLKNTATSLGSTNEYGSGLVNAEAATR

SEQ ID NO: 55395 - protein, 269 aa, Unidentified
AQSVPWGISRVQAPAAHNRGLTGSGVKVAVLDTGISTHPDLNIRGGASFVPGEPSTQDGNGHGTHVAGTIAALNNSIGVLGVAPSAELYAVKVLPAAGAGAVSSIAQGLEWAGNNGMHVANLSLGSPSPSATLEQAVNSATSRGVLVVAASGNSGAGSISYPARYANAMAVGATDQNNNRASFSQYGAGLDIVAPGVNVQSTYPGSTYASLNGTSMATPHVAGAAALVKQKNPSWSNVQIRNHLKNTATSLGSTNLYGSGLVNAEAATR

SEQ ID NO: 55396 - protein, 269 aa, Unidentified
AQSVPWGISRVQAPAAHNRGLTGSGVKVAVLDTGISTHPDLNIRGGASFVPGEPSTQDGNGHGTHVAGTIAALNNSIGVLGVAPSAELYAVKVLPQSGSASLSSIAQGLEWAGNNGMHVANLSLGSPSPSATLEQAVNSATSRGVLVVAASGNSGAGSISYPARYANAMAVGATDQNNNRASFSQYGAGLDIVAPGVNVQSTYPGSTYASLNGTSMATPHVAGAAALVKQKNPSWSNVQIRNHLKNTATSLGSTNLYGSGLVNAEAATR

SEQ ID NO: 55397 - protein, 269 aa, Unidentified
AQSVPWGISRVQAPAAHNRGLTGSGVKVAVLDTGISTHPDLNIRGGASFVPGEPSTQDGNGHGTHVAGTIAALNNSIGVLGVAPSAELYAVKVLPAGGGGSISSIAQGLEWAGNNGMHVANLSLGSPSPSATLEQAVNSATSRGVLVVAASGNSGAGSISYPARYANAMAVGATDQNNNRASFSQYGAGLDIVAPGVNVQSTYPGSTYASLNGTSMATPHVAGAAALVKQKNPSWSNVQIRNHLKNTATSLGSTNLYGSGLVNAEAATR

SEQ ID NO: 55398 - protein, 269 aa, Unidentified
AQSVPWGISRVQAPAAHNRGLTGRGVKVAVLDTGISTHPDLNIRGGASFVPGEPSTQDGEGHGTHVAGTIAALNNDIGVLGVAPSAELYAVKVLGASGSGSVSSIAQGLEWAGNNDMHVANLSLGSPSPSATLEQAVNSATSRGVLVVAASGNSGAGSISYPARYANAMAVGATDQNNNRASFSQYGAGLDIVAPGVNVQSTYPGSTYASLNGTSMATPHVAGAAALVKQKNPSWSNVQIRNHLKNTATSLGSTNLYGSGLVNAEAATR

SEQ ID NO: 55399 - protein, 269 aa, Unidentified
AQSVPWGISRVQAPAAHRRGLTGSGVKVAVLDTGISTHPDLNIRGGASFVPGEPSTQDGNGHGTHVAGTIAALDNSIGVLGVAPSAELYAVKVLGASGGGSVSSIAQGLEWAGNNGMHVANLSLGSPSPSATLEQAVNSATSRGVLVVAASGNSGAGSISYPARYANAMAVGATDQNNNRASFSQYGAGLDIVAPGVNVQSTYPGSTYASLNGTSMATPHVAGAAVLVKQKNPSWSNVQIRNHLKNTATSLGSTNLYGSGLVNAEAATR

SEQ ID NO: 55400 - protein, 269 aa, Bacillus lentus
AQSVPWGISRVQAPAAHNRGLTGSGVKVAVLDTGISTHPDLNIRGGASFVPGEPSTQDGNGHGTHVAGTIAALNNSIGVLGVAPSAELYAVKVLGASGSGSVSSIAQGLEWAGNNGMHVANLSLGSPSPSATLEQAVNSATSRGVLVVAASGNSGAGSISIPALYANAMAVGATDQNNNRASFSQYGPGLDIVAPGVNVQSTYPGSTYASLSGTSMATPHVAGAAALVKQKNPSWSNVQIRNHLKNTATSLGSTNLYGSGLVNAEAATR

SEQ ID NO: 55401 - protein, 269 aa, Unidentified
AQSVPWGIARVQAPAAHNRGLRGSGVKVAVLDTGISTHPDLNIRGGASFVPGEPSTQDGNGHGTHVAGTIAALNNSIGVLGVAPSAELYAVKVLGASGSGSVSSIAQGLEWAGNNGMHVANLSLGSPSPSATLEQAVNSATSRGVLVVAASGNSGAGSISYPARYANAMAVGATDQNNNRASFSQYGAGLDIVAPGVNVQSTYPGFTYASLNGTSMATPHVAGAAALVKQKNPSRSNVQIRNHLKNTATSLGSTNLYGSGLVNAEAATR

SEQ ID NO: 55402 - protein, 270 aa, Synthetic construct
AQSVPWGISRVQAPAAHNRGLTGSGVKVAVLDTGIDSTHPDLNIRGGASFVPGEPSTQDGNGHGTHVAGTIAALNNSIGVLGVAPSAELYAVKVLGASGSGSVSSIAQGLEWAGNNGMDVANLSLGSPSPSATLEQAVNSATSRGVLVVAASGNSGAGSISYPARYANAMAVGATDQNNNRASFSQYGPELDIVAPGVNVQSTYPGSTYASLNGTSMATPHVAGAAALVLQKNPSWSNVQIRNHLKNTATSLGSTNLYGSGLVNAEAATR

SEQ ID NO: 55403 - protein, 269 aa, Bacillus sp.
AQSVPWGISRVQAPAAHNRGLTGSGVKVAVLDTGISTHPDLNIRGGASFVPGEPSTQDGNGHGTHVAGTIAALNNSIGVLGVAPNAELYAVKVLGASGSGSVSSIAQGLEWAGNNGMHVANLSLGMAGPSATLEQAVNSATSRGVLVVAASGNSGAGSISYPARYANAMAVGATDQNNNRASFSQYGAGLDIVAPGVNVQSTYPGSTYASLNGTSMATPHVAGAAALVKQKNPSWSNVQIRNHLKNTATSLGSTNLYGSGLVNAEAATR

SEQ ID NO: 55404 - protein, 269 aa, Unidentified
AQSVPWGISRVQAPAAHNRGLTGSGVKVAVLDTGISTHPDLNIRGGASFVPGEPSTQDGEGHGTHVAGTIAALNNSIGVLGVAPSAELYAVKVLGASGSGSVSSIAQGLEWAGNNGMHVANLSLGSPSPSATLEQAVNSATSRGVLVVAASGNSGAESISYPARYANAMAVGATDQNNNRASFSQYGAGLDIVAPGVNVQSTYPGSTYASLNGTSMATPHVAGAAALVKQKNPSWSNVQIRNHLKRTATSLGSTNLYGSGLVNAFAATR

SEQ ID NO: 55405 - protein, 269 aa, Unidentified
AQSVPWGISRVQAPAAHNRGLTGRGVKVAVLDTGISTHPDLNIRGGASFVPGEPSTQDGEGHGTHVAGTIAALNNSIGVLGVAPSAELYAVKVLGASGSGSVSSIAQGLEWAGLNGMHVANLSLGSPSPSATLEQAVNSATSRGVLVVAASGNSGEGSISYPARYANAMAVGATDQNNNRASFSQYGAGLDIVAPGVNVQSTYPGSTYASLNGTSMATPHVAGAAALVKQKNPSWSNVQIRNHLKNTATSLGSTNLYGSGLVNAEAATR

SEQ ID NO: 55406 - protein, 269 aa, Synthetic construct
AQSVPWGISRVQAPAAHNRGLTGSGVKVAVLDTGISTHPDLNIRGGASFVPGEPSTQDGNGHGTHVAGTIAALDNSIGVLGVAPSAELYAVKVLGASGSGAISSIAQGLEWAGNNGMHVANLSLGSPSPSATLEQAVNSATSRGVLVVAASGNSGAGSIDYPARYANAMAVGATDQNNNRASFSQYGAGLDIVAPGVNVQSTYPGSTYASLNGTSMATPHVAGAAALVKQKNPSWSNVQIRNHLKNTATSLGSTNLYGSGLVNAEAATR

SEQ ID NO: 55407 - protein, 269 aa, Unidentified
AQSVPWGISRVQAPAAHNRGLTGSGVKVAVLDTGISTHPDLNIRGGASFVPGEPSTQDGNGHGTHVAGTIAALDNSIGVLGVAPSAELYAVKVLGASGSGAISSIAQGLEWAGNNGMHVANLSLGSPLPSATLEQAVNSATSRGVLVVAASGNSGAGSISYPARYANAMAVGATDQNNNRASFSQYGAGLDIVAPGVNVQSTYPGSTYASLNGTSMATPHVAGAAALVKQKNPSWSNVQIRNHLKNTATSLGSTNLYGSGLVNAEAATR

SEQ ID NO: 55408 - protein, 269 aa, Unidentified
AQSVPWGISRVQAPAAHNRGLTGSGVKVAVLDTGISTHPELNIRGGASFVPGEPSTQDGNGHGTHVAGTIAALNNDIGVLGVAPSAELYAVKVLGASGSGSVSSIAQGLEWAGNNGMHVANLSLGSPSPSATLEQAVNSATSRGVLVVAASGNSGAGSISYPARYQNAMAVGATDQNNNRASFSQYGAGLDIVAPGVNVQSTYPGSTYAILNGTSMATPHVAGAAALVKQKNPSWSNVQIRNHLKNTATSLGSTNLYGSGLVNAEAATR

SEQ ID NO: 55409 - protein, 269 aa, Unidentified
AQVVPWGISRVQAPAAHNRGLTGSGVKVAVLDTGISTHPDLNIRGGASFVPGEPSTQDGNGHGTHVAGTIAALDNSIGVLGVAPSAELYAVKVLGASGSGSVSSIAQGLEWAGNNRMHVANLSLGRPSPSATLEQAVNSATSRGVLVVAASGNSGAGSISYPARYANAMAVGATDQNNNRASFSQYGAGLDIVAPGVNVQSTYPGSTYASLNGTSMATPHVAGAAALVKQKNPSWSNVQIRNHLKNTATSLGSTNLYGSGLVNAEAATR

SEQ ID NO: 55410 - protein, 269 aa, Unidentified
AQSVPWGISRVQAPAAHNRGLTGSGVKVAVLDTGISTHPDLNIRGGASFVPGEPSTQDGNGHGTHVAGTIAALNNSIGVLGVAPSAELYAVKVLGASGSGSVSSIAQGLEWAGNNGMHVANLSLGSESPSATLEQAVNSATSRGVLVVAASGNSGAGSISYPARYANAMAVGATDQNNNRASFSQYGAGLDIVAPGVNVQSTYPGSTYASLNGTSMATPHVAGAAALVKQKNPSWSNVRIRDRLKNTATSLGSTNLYGSGLVNAEAATR

SEQ ID NO: 55411 - protein, 269 aa, Unidentified
AQSVPWGISRVQAPAAHNRGLTGRGVKVAVLDTGISTHPDLNIRGGASFVPGEPSTQDGNGHGTHVAGTIAALNNDIGVLGVAPSAELYAVKVLGASGSGSVSSIAQGLEWAGNNDMHVANLSLGSPSPSATLEQAVNSATSRGVLVVAASGNSGAGSISYPARYANAMAVGATDQNNNRADFSQYGAGLDIVAPGVNVQSTYPGSTYASLNGTSMATPHVAGAAALVKQKNPSWSNVQIRNHLKNTATSLGSTNLYGSGLVNAEAATR

SEQ ID NO: 55412 - protein, 269 aa, Unidentified
AQSVPWGISRVQAPAAHNRRLTGSGVKVAVLDTGISTHPDLNIRGGASFVPGEPSTQDGNGHGTHVAGTIAALNNRIGVLGVAPSAELYAVKVLGASGSGSVSSIAQGLEWAGNNGMHVANLSLGSPSPSATLEQAVNSATSRGVLVVAASGNSGADSISYPARYANAMAVGATDQNNNRADFSQYGAGLDIVAPGVNVQSTYPGSTYASLNGTSMATPHVAGAAALVKQKNPSWSNVQIRNHLKNTATSLGSTNLYGSGLVNAEAATR

SEQ ID NO: 55413 - protein, 269 aa, Unidentified
AQSVPWGISRVQAPAAHNRGLTGSGVKVAVLDTGISTHPDLNIRGGASFVPGEPSTQDGNGHGTHVAGTIAALNNRIGVLGAAPSAELYAVKVLGASGSGSVSSIAQGLEWAGNNGMHVANLSLGSESPSATLEQAVNSATSRGVLVVAASGNSGAGSISYPARYANAMAVGATDQNNNRASFSQYGAGLDIVAPGVNVQSTYPGSTYASLNGTSMATPHVAGAAALVKQKNPSWSNVRIRNHLKNTATSLGSTNLYGSGLVNAEAATR

SEQ ID NO: 55414 - protein, 269 aa, Unidentified
AQSVPWGISRVQAPAAHNRGLTGSGVKVAVLDTGISTHPDLNIRGGASFVPGEPSTQDGNGHGTHVAGTIAALNNSIGVLGVAPSAELYAVKVLGASGGGALSSIAQGLEWAGNNGMHVANLSLGSPSPSATLEQAVNSATSRGVIVVAASGNSGAGSISYPARYANAMAVGATDQNNNRASFSQYGAGLDIVAPGVNVQSTYPGSTYASLNGTSMATPHVAGAAALVKQKNPSWSNVQIRNHLKNTATSLGSTNLYGSGLVNAEAATR

SEQ ID NO: 55415 - protein, 269 aa, Unidentified
AQSVPWGISRVQAPASHNRGLTGSGVKVAVLDTGISTHPDLNIRGGASFVPGEPSTQDGNGHGTHVAGTIAALNNSIGVLGVAPSAELYAVKVLGASGAGSVSSIAQGVEWAGNNGMHVANLSLGNPSPSATLEQAVNSATSRGVLVVAASGNSGAGSISYPARYANAMAVGATDQNNNRASFSQYGAGLDIVAPGVNVQSTYPGSTYASLNGTSMATPHVAGAAALVKQKNPSWSNVQIRNHLKNTATSLGSTNLYGSGLVNAEAATR

SEQ ID NO: 55416 - protein, 269 aa, Unidentified
AQSVPWGISRVQAPASHNRGLTGSGVKVAVLDTGISTHPDLNIRGGASFVPGEPSTQDGNGHGTHVAGTIAALNNSIGVLGVAPSAELYAVKVLGASGSGSVSSIAQGLEWAGNNGMHVANLSLGSPSPSATLEQAVNSATSRGVLVVAASGNSGEGSISYPARYANAMAVGATDQNNNRASFSQYGAGLDIVAPGVNVQSTYPGSTYASLNGTSMATPHVAGAAALVKQKNPSWSNVQIRNHLKRTATSLGSTNLYGSGLVNAFAATR

SEQ ID NO: 55417 - protein, 269 aa, Unidentified
AQSVPWGISRVQAPAAHNRGLTGSGVKVAVLDTGISTHPDLNIRGGASFVPGEPSTQDGNGHGTHVAGTIAALDNSIGVLGVAPSAELYAVKVLGASGSGAISSIAQGLEWAGNNGMHVANLSLGSPSPSATLEQAVNSATSRGVLVVAASGNSGAGSISYPARYANAMAVGATDQNNNRASFSQYGAGLDIVAPGVNVQSTYPGSTYASLNGTSMATPHVAGAAALVKQKNPSWSNVQIRNHLKDTATSLGSTNLYGSGLVNAEAATR

SEQ ID NO: 55418 - protein, 269 aa, Unidentified
AQSVPWGISRVQAPAAHNRGLTGRGVKVAVLDSGISTHPDLNIRGGASFVPGEPSTQDGNGHGTHVAGTIAALNNSIGVLGVAPSAELYAVKVLGASGSGSVSSIAQGLEWAGLNGMHVANLSLGIPSPSATLEQAVNSATSRGVLVVAASGNSGAGSISYPARYANAMAVGATDQNNNRASFSQYGAGLDIVAPGVNVQSTYPGSTYASLNGTSMATPHVAGAAALVKQKNPSWSNVQIRNHLKNTATSLGSTNLYGSGLVNAEAATR

SEQ ID NO: 55419 - protein, 269 aa, Unidentified
AQSVPWGISRVQAPAAHNRGLTGSGVKVAVLDSGISTHPDLNIRGGASFVPGEPSTQDGEGHGTHVAGTIAALNNSIGVLGVAPSAELYAVKVLGASGSGSVSSIAQGLEWAGLNGMNVANLSLGSPSPSATLEQAVNSATSRGVLVVAASGNSGAGSISYPARYANAMAVGATDQNNNRASFSQYGAGLDIVAPGVNVQSTYPGSTYASLNGTSMATPHVAGAAALVKQKNPSWSNVQIRNHLKNTATSLGSTNLYGSGLVNAEAATR

SEQ ID NO: 55420 - protein, 269 aa, Unidentified
AQSVPWGISRVQAPAAHNRGLTGSGVKVAVLDTGISTHPDLNIRGGASFVPGEPSTQDGNGHGTHVAGTIAALNNGIGVLGVAPSAELYAVKVLGASGSGSVSSIAQGLEWAGNNDMHVANLSLGSPSPSATLEQAVNSATSRGVLVVAASGNSGADSISYPARYANAMAVGATDQNNNRASFSQYGAGLDIVAPGVNVQSTYPGSTYASLNGTSMATPHVAGAAALVKQKNPSWSNVRIRNHLKNTATSLGSTNLYGSGLVNAEAATR

SEQ ID NO: 55421 - protein, 269 aa, Unidentified
AQSVPWGISRVQAPAAHNRGLTGSGVKVAVLDTGISTHPDLNIRGGASFVPGEPSTQDGNGHGTHVAGTIAALDNSIGVLGVAPSAELYAVKVLGASGSGAISSIAQGLEWAGNNGMHVANLSLGSPSPSATLEQAVNSATSRGVLVVAASGNSGAGSISYPARYANVMAVGATDQNNNRASFSQYGAGLDIVAPGVNVQSTYPGSTYASLNGTSMATPHVAGAAALVKQKNPSWSNVQIRNHLKNTATSLGSTNLYGSGLVNAEAATR

SEQ ID NO: 55422 - protein, 269 aa, Unidentified
AQSVPWGISRVQAPAAHNRGLTGSGVKVAVLDTGISTHPDLNIRGGASFVPGEPSTQDGNGHGTHVAGTIAALNNSIGVLGVAPSAELYAVKVLAASGNGSVSSIAQGLEWAGNNGMHVANLSLGAPSPSATLEQAVNSATSRGVLVVAASGNSGAGSISYPARYANAMAVGATDQNNNRASFSQYGAGLDIVAPGVNVQSTYPGSTYASQNGTSMATPHVAGAAALVKQKNPSWSNVQIRNHLKNTATSLGSTNLYGSGLVNAEAATR

SEQ ID NO: 55423 - protein, 269 aa, Bacillus sp.
AQSVPWGISRVQAPAAHNRGLTGSGVKVAVLDTGISTHPDLNIRGGASFVPGEPSTQDGNGHGTHVAGTIAALNNSIGVLGVAPNAELYAVKVLGASGSGSVSSIAQGLEWAGNNGMHVANLSLGNAGPSATLEQAVNSATSRGVLVVAASGNSGAGSISYPARYANAMAVGATDQNNNRASFSQYGAGLDIVAPGVNVQSTYPGSTYASLNGTSMATPHVAGAAALVKQKNPSWSNVQIRNHLKNTATSLGSTNLYGSGLVNAEAATR

SEQ ID NO: 55424 - protein, 269 aa, Unidentified
AQSVPWGISRVQAPAAHNRGLTGSGVKVAVLDTGISTHPDLNIRGGASFVPGEPSTQDGNGHGTHVAGTIAALNNSIGVLGVAPSAELYAVKVLGASGSGAISSIAQGVEWAGNNGMHVANLSLGSPSPSATLEQAVNSATSRGVIVVAASGNSGAGSISYPARYANAMAVGATDQNNNRASFSQYGAGLDIVAPGVNVQSTYPGSTYASLNGTSMATPHVAGAAALVKQKNPSWSNVQIRNHLKNTATSLGSTNLYGSGLVNAEAATR

SEQ ID NO: 55425 - protein, 269 aa, Unidentified
AQSVPWGISRVQAPAAHNRGLTGSGVKVAVLDTGISTHPDLNIRGGASFVPGEPSTQDGEGHGTHVAGTIAALNNSIGVLGVAPSAELYAVKVLGASGSGSVSSIAQGLEWAGNNGMHVANLSLGSESPSATLEQAVNSATSRGVLVVAASGNSGADSISYPARYANAMAVGATDQNNNRASFSQYGAGLDIVAPGVNVQSTYPGSTYASLNGTSMATPHVAGAAALVKQKNPSWSNVQIRDHLKNTATSLGSTNLYGSGLVNAEAATR

SEQ ID NO: 55426 - protein, 269 aa, Unidentified
AQSVPWGISRVQAPAAHNRRLTGSGVKVAVLDTGISTHPDLNIRGGASFVPGEPSTQDGNGHGTHVAGTIAALNNGIGVLGVAPSAELYAVKVLGASGSGSVSSIAQGLEWAGNNDMHVANLSLGSPSPSATLEQAVNSATSRGVLVVAASGNSGAGSISYPARYANAMAVGATDQNNNRASFSQYGAGLDIVAPGVNVQSTYPGSTYASLNGTSMATPHVAGAAALVKQKNPSWSNVQIRDHLKNTATSLGSTNLYGSGLVNAEAATR

SEQ ID NO: 55427 - protein, 269 aa, Unidentified
AQSVPWGISRVQAPAAHNRGLAGSGVKVAVLDTGISTHPDLNIRGGASFVPGEPSTQDGNGHGTHVAGTIAALNNSIGVLGVAPSAELYAVKVLGASGSGGLSSIAQGLEWAGNNGMHVANLSLGNPSPSATLEQAVNSATSRGVLVVAASGNSGAGSISYPARYANAMAVGATDQNNNRASFSQYGAGLDIVAPGVNVQSTYPGSTYASLNGTSMATPHVAGAAALVKQKNPSWSNVQIRNHLKNTATSLGSTNLYGSGLVNAEAATR

SEQ ID NO: 55428 - protein, 269 aa, Unidentified
AQSVPWGISRVQAPAAHNRGLTGSGVKVAVLDTGISTHPDLNIRGGASFVPGEPSTQDGNGHGTHVAGTIAALNNSIGVLGVAPSAELYAVKVLPSGGSASVSSIAQGLEWAGNNGMHVANLSLGSPSPSATLEQAVNSATSRGVLVVAASGNSGAGSISYPARYANAMAVGATDQNNNRASFSQYGAGLDIVAPGVNVQSTYPGSTYASLNGTSMATPHVAGAAALVKQKNPSWSNVQIRNHLKNTATSLGSTNLYGSGLVNAEAATR

SEQ ID NO: 55429 - protein, 269 aa, Unidentified
AQSVPWGISRVQAPASHNRGLAGSGVKVAVLDTGISTHPDLNIRGGASFVPGEPSTQDGNGHGTHVAGTIAALNNSIGVLGVAPSAELYAVKVLGASGSGSLSSIAQGLEWAGNNGMHVANLSLGSPSPSATLEQAVNSATSRGVIVVAASGNSGAGSISYPARYANAMAVGATDQNNNRASFSQYGAGLDIVAPGVNVQSTYPGSTYASLNGTSMATPHVAGAAALVKQKNPSWSNVQIRNHLKNTATSLGSTNLYGSGLVNAEAATR

SEQ ID NO: 55430 - protein, 269 aa, Unidentified
AQSVPWGISRVQAPAAHNRGLLGFGVKVAVLDTGISTHPDLNIRGGASFVPGEPSTQDGNGHGTHVAGTIAALNNSIGVLGVAPSAELYAVKVLGASGSGSVSSIAQGLEWAGNNGMHVANLSLGDPSPSATLEQAVNSATSRGVLVVAASGNSGAGSISYPARYANAMAVGATDQNNNRASFSQYGAGLDIVAPGVNVQSTYPGSAYASLNGTSMATPHVAGAAALVKQKNPSWSNVQIRNHLKNTATSLGSTNLYGSGLVNAEAATR

SEQ ID NO: 55431 - protein, 269 aa, Unidentified
AQSVPWGISRVQAPAAHNRGLTGSGVKVAVLDTGISTHPDLNIRGGASFVPGEPSTQDGNGHGTHVAGTIAALNNSIGVLGVAPNAELYAVKVLGASGSGSVSSIAQGLEWAGNNVMHVANLSLGNSAPSATLEQAVNSATSRGVLVVAASGNSGAGSISYPARYANAMAVGATDQNNNRASFSQYGAGLDIVAPGVNVQSTYPGSTYASLNGTSSATPHVAGAAALVKQKNPSWSNVQIRNHLKNTATSLGSTNLYGSGLVNAEAATR

SEQ ID NO: 55432 - protein, 269 aa, Unidentified
AQSVPWGISRVQAPAAHNRRLRGSGVKVAVLDTGISTHPDLRIRGGASFVPGEPSTQDGNGHGTHVAGTIAALNNSIGVLGVAPSAELYAVKVLGASGSGSVSSIAQGLEWAGNNGMHVANLSLGSPSPSATLEQAVNSATSRGVLVVAASGNSGAGSISYPARYANAMAVGATDQNNNRASFSQYGAGLDIVAPGVNVQSTYPGSTYASLNGTSMATPHVAGAAALVKQKNPSRSNVQIRNHLKNTATSLGSTNLYGSGLVNAEAATR

SEQ ID NO: 55433 - protein, 269 aa, Unidentified
AQSVPWGISRVQAPAAHRRGLTGRGVKVAVLDTGISTHPDLNIRGGASFVPGEPSTQDGNGHGTHVAGTIAALNNSIGVLGVAPRAELYAVKVLGASGSGSVSSIAQGLEWAGNNGMHVANLSLTSPSPSATLEQAVNSATSRGVLVVAASGNSGAGSISYPARYANAMAVGATDQNNNRASFSQYGAGLDIVAPGVNVQSTYPGSTYASLNGTSMATPHVAGAAALVKQKNPSWSNVQIRNHLKNTATSLGSTNLYGSGLVNAEAATR

SEQ ID NO: 55434 - protein, 270 aa, Unidentified
AQSVPWGISRVQAPAAHNRGLTGSGVRVAVLDTGISTHPDLNIRGGASFVPGEPSTQDGNGHGTHVAGTIAALNNSIGVLGVAPSAELYAVKVLGAXSGSGSYSSIAQGLEWAGNNGMHVASLSLGSPSPSATLEQAVNSATSRGVLVVAASGNSGAGSISYPARYANAMAVGATDQNNNRASFSQYGAGLDIVAPGVNVQSTYPGSTYASLNGTSMATPHVAGAAALVKQKNPSWSNVQIRNHLKNTATSLGSTNLYGSGLVNAEAAAR

SEQ ID NO: 55435 - protein, 269 aa, Unidentified
AQSVPWGISRVQAPAAHNRGLTGSGVKVAVLDTGISTHPDLNIRGGASFVPGEPSTQDGNGHGTHVAGTIAALDNSIGVLGVAPSAELYAVKVLGASGSGAISSIAQGLEWAGNNGMHVANLSLGSPSPSATLEQAVNSATSRGVLVVAASGNSGAGSISYPARYANAMAVGATDQNNNRASFSQYGAGLDIVAPGVNVQSTYPGSTYASLNGTXMATPHVAGAAALVKQKNPSWSNVQIRNHLKNTATSLGSTNLYGSGLVNAEAATR

SEQ ID NO: 55436 - protein, 269 aa, Unidentified
AQSVPWGISRVQAPAAHNRGLTGSGVKVAVLDTGISTHPDLNIRGGASFVPGEPSTQDGNGHGTHVAGTIAALNNSIGVLGVAPSAELYAVKVLGASGSGSVSSIAQGLEWAGNNGMHVANLSLGNPSPSATLEQAVNSATSRGVLVVAASGNSGEGSISYPARYANAMAVGATDQNNNHASFSQYGAGLDIVAPGVNVQSTYPGSTYASLNGTSMATPHVAGAAALVKQKNPSWSNVQIRNHLKNTATSLGSTNLYGSGLVNAFAATR

SEQ ID NO: 55437 - protein, 269 aa, Unidentified
AQSVPWGISRVQAPAAHNRGLTGSGVKVAVLDTGISTHPDLNIRGGASFVPGEPSTQDGNGHGTHVAGTIAALNNSIGVLGVAPSAELYAVKVLPAGGSGAISSIAQGLEWAGNNGMHVANLSLGSPSPSATLEQAVNSATSRGVLVVAASGNSGAGSISYPARYANAMAVGATDQNNNRASFSQYGAGLDIVAPGVNVQSTYPGSTYASLNGTSMATPHVAGAAALVKQKNPSWSNVQIRNHLKNTATSLGSTNLYGSGLVNAEAATR

SEQ ID NO: 55438 - protein, 269 aa, Unidentified
AQSVPWGISRVQAPAAHNRGLTGSGVKVAVLDTGISTHPDLNIRGGASFVPGEPSTQDGNGHGTHVAGTIAALNNSIGVLGVAPSAELYAVKVLGATSSGAISSIAQGLEWAGNNGMHVANLSLGSPSPSATLEQAVNSATSRGVLVVAASGNSGAGSISYPARYANAMAVGATDQNNNRASFSQYGAGLDIVAPGVNVQSTYPGSTYASLNGTSMATPHVAGAAALVKQKNPSWSNVQIRNHLKNTATSLGSTNLYGSGLVNAEAATR

SEQ ID NO: 55439 - protein, 269 aa, Unidentified
AQSVPWGIARVQAPAAHNRGLTGRGVKVAVLDTGISTHPDLRIRGGASFVPGEPSTQDGNGHGTHVAGTIAALNNSIGVLGVAPSAELYAVKVLGASGSGSVSSIAQGLEWAGNNGMHVANLSLGSPSPSATLEQAVNSATSRGVLVVAASGNSGAGSISYPARYANAMAVGATDQNNNRASFSQYGAGLDIVAPGVNVQSTYPGSTYASLNGTSMATPHVAGAAALVKQKNPSWRNVQIRNHLKNTATSLGSTNLYGSGLVNAEAATR

SEQ ID NO: 55440 - protein, 269 aa, Unidentified
AQSVPWGISRVQAPAAHNRGLTGRGVKVAVLDTGISTHPDLNIRGGASFVPGEPSTQDGEGHGTHVAGTIAALNNSIGVLGVAPSAELYAVKVLGASGSGSVSSIAQGLEWAGNNGMHVANLSLGSPSPSATLEQAVNSATSRGVLVVAASGNSGAGSIDYPARYANAMAVGATDQNNNRADFSQYGAGLDIVAPGVNVQSTYPGSTYASLNGTSMATPHVAGAAALVKQKNPSWSNVQIRNHLKNTATSLGSTNLYGSGLVNAEAATR

SEQ ID NO: 55441 - protein, 269 aa, Unidentified
AQSVPWGISRVQAPAAHNRRLTGSGVKVAVLDTGISTHPDLNIRGGASFVPGEPSTQDGNGHGTHVAGTIAALNNSIGVLGVAPSAELYAVKVLGASGSGSLSSIAQGLEWAGNNGMHVANLSLGSPSPSATLEQAVNSATSRGVLVVAASGNSGAGSISYPARYANAMAVGATDQNNNRASFSQYGAGLDIVAPGVNVQSTYPGSTYASLNGTSMATPHVAGAAVLVKQKNPSWRNVQIRNHLKNTATSLGSTNLYGSGLVNAEAATR

SEQ ID NO: 55442 - protein, 269 aa, Unidentified
AQSVPWGISRVRAPAAHNRGLTGSGVKVAVLDTGISTHPDLNIRGGASFVPGEPSTQDGNGHGTHVAGTIAALDNSIGVLGVAPSAELYAVKVLGASGSGAISSIAQGLEWAGNNGMHVANLSLGSPSPSATLEQAVNSATSRGVLVVAASGNSGAGSISYPARYANAMAVGATDQNNNRASFSQYGAGLDIVAPGVNVQSTYPGSTYASLNGTSSATPHVAGAAALVKQKNPSWSNVRIRNHLKNTATSLGSTNLYGSGLVNAEAATR

SEQ ID NO: 55443 - protein, 269 aa, Alkalihalobacillus clausii
AQSVPWGISRLQAPAAHNRGLTGSGVKVAVLDTGISTHPDLNIRGGASFVPGEPSTQDGNGHGTHVAGTIAALNNSIGVLGVAPSAELYAVKVLVASGSGSVSSIAQGLEWAGNNGMHVANLSLGSPSPSATLEQAVNSATSRGILVVAASGNSGAGSISYPARYANAMAVGATDQNNNRASFSQYGAGLDIVAPGVNVQSTYPGSTYASLSGTSMATPHVAGAAALVKQKNPSWSNVQIRNHLKNTATSLGSTNLYGSGLVNAEAATR

SEQ ID NO: 55444 - protein, 269 aa, Unidentified
AQSVPWGISRVQAPAAHNRRLTGSGVKVAVLDTGISTHPDLNTRGGASFVPGEPSTQDGNGHGTHVAGTIAALNNSIGVLGVAPSAELYAVKVLGASGSGSVSSIAQGLEWAGANGMHVANLSLGSPSPSATLEQAVNSATSRGVLVVAASGNSGAGSISYPARYANAMAVGATDQNNNRASFSQYGAGLDIVAPGVNVQSTYPGSTYASLNGTSMATPHVAGAAALVKQKNPSWSNVQIRNHLKNTATSLGSTNLYGSGLVRAEAATR

SEQ ID NO: 55445 - protein, 269 aa, Unidentified
AQSVPWGISRVQAPAAHNRGLTGSGVKVAVLDTGISTHPDLNIRGGASFVPGEPSTQDGNGHGTHVAGTIAALNNDINVLGVAPSADLYAVKVLGASGSGSVSSIAQGLEWAGNNGMHVANLSLGSPSPSATLEQAVNSATSRGVLVVAASGNSGAGSISYPARYQNAMAVGATDQNNNRASFSQYGAGLDIVAPGVNVQSTYPGSTYASLNGTSMATPHVAGAAALVKQKNPSWSNVQIRNHLKNTATSLGSTNLYGSGLVNAEAATR

SEQ ID NO: 55446 - protein, 269 aa, Unidentified
AQSVPWGISRVQAPAAHNRRLRGRGVKVAVLDTGISTHPDLRIRGGASFVPGEPSTQDGNGHGTHVAGTIAALNNSIGVLGVAPSAELYAVKVLGASGSGSVSSIAQGLEWAGNNGMHVANLSLGSPSPSATLEQAVNSATSRGVLVVAASGNSGAGSISYPARYANAMAVGATDQNNNRASFSQYGAGLDIVAPGVNVQSTYPGSTYASLNGTSMATPHVAGAAALVKQKNPSWSNVQIRNHLKNTATSLGSTNLYGSGLVNAEAATR

SEQ ID NO: 55447 - protein, 269 aa, Unidentified
AQSVPWGISRVQAPAAHNRGLTGSGVKVAVLDTGISTHPDLNIRGGASFVPGEPSTQDGNGHGTHVAGTIAALNNSIGVLGVAPSAELYAVKVLGASGSGSVSSIAQGLEWAGNNGMHVANLSMGSPSPSATLEQAVNSATSRGVLVVAASGNSGAGSISYPARYANAMAVGATDQNNNRASFSQYGAGLDIVAPGVNVQSTYPGSTYASLNGTSMLSPHVAGAAALVKQKNPSWSNVQIRNHLKNTDTSLGSTNLYGSGLVNAEAATR

SEQ ID NO: 55448 - protein, 269 aa, Unidentified
AQSVPWGISRVQAPAAHNRGLTGSGVKVAVLDTGISTHPDLNIRGGASFVPGEPSTQDGNGHGTHVAGTIAALDNSIGVLGVAPSAELYAVKVLGASGSGAISSIAQGLEWAGNNGMHVANLSLGSPSPSATLEQAVNSATSRGVLVVAASGNSGAGSISYPARYANAMAVGATDQNNNRASFSQYGAGLDIVAPGVNVRSTYPGSTYASLNGTSMATPHVAGAAALVKQKNPSWSNVQIRNHLKNTATSLGSTNLYGSGLVNAEAATR

SEQ ID NO: 55449 - protein, 269 aa, Unidentified
AQSVPWGISRVQAPAAHNRGLTGRGVKVAVLDTGISTHPDLNIRGGASFVPGEPSTQDGEGHGTHVAGTIAALNNGIGVLGVAPSAELYAVKVLGASGSGSVSSIAQGLEWAGNNDMHVANLSLGSPSPSATLEQAVNSATSRGVLVVAASGNSGAGSISYPARYANAMAVGATDQNNNRASFSQYGAGLDIVAPGVNVQSTYPGSTYASLNGTSMATPHVAGAAALVKQKNPSWSNVQIRNHLKNTATSLGSTNLYGSGLVNAEAATR

SEQ ID NO: 55450 - protein, 269 aa, Unidentified
AQSVPWGISRVQAPAAHNRGLTGSGVKVAVLDTGISTHPDLRITGGASFVPGEPSTQDGNGHGTHVAGTIAALNNSIGVLGVAPSAELYAVKVLGASGAGSVSSIAQGLEWAGNNGMHVANLSLGSPSPSATLEQAVNSATSRGVLVVAASGNSGAGSISYPARYANAMAVGATDQNNNRASFSQYGAGLDIVAPGVNVQSTYPGSAYASLNGTSMATPHVAGAAALVKQKNPSWSNVQIRNHLKNTATSLGSTNLYGSGLVNAEAATR

SEQ ID NO: 55451 - protein, 269 aa, Unidentified
AQSVPWGISRVQAPAAHNRKLLGSGVKVAVLDTGISTHPDLNIRGGASFVPGEPSTQDGNGHGTHVAGTIAALNNSIGVLGVAPSAELYAVKVLGASGSGSVSSIAQGLEWAGNNGMHVANLSLGDPSPSATLEQAVNSATSRGVLVVAASGNSGAGSISYPARYANAMAVGATDQNNNRASFSQYGAGLDIVAPGVNVQSTYPGSAYASLNGTSMATPHVAGAAALVKQKNPSWSNVQIRNHLKNTATSLGSTNLYGSGLVNAEAATR

SEQ ID NO: 55452 - protein, 269 aa, Unidentified
AQSVPWGISRVQAPAAHNRGLTGRGVKVAVLDTGISTHPDLNIRGGASFVPGEPSTQDGNGHGTHVAGTIAALNNGIGVLGVAPSAELYAVKVLGASGSGSVSSIAQGLEWAGNNSMHVANLSLGSPSPSATLEQAVNSATSRGVLVVAASGNSGAGSISYPARYANAMAVGATDQNNNRADFSQYGAGLDIVAPGVNVQSTYPGSTYASLNGTSMATPHVAGAAALVKQKNPSWSNVQIRNHLKNTATSLGSTNLYGSGLVNAEAATR

SEQ ID NO: 55453 - protein, 269 aa, Unidentified
AQSVPWGISRVQAPAAHNRGLTGSGVKVAVLDTGISTHPDLNIRGGASFVPGEPSTQDGNGHGTHVAGTIAALNNNIGVLGVAPSAELYAVKVLGASGDGSVSSIAQGLEWAGNNGMHVANLSLGSPSPSATLEQAVNSATSRGVLVVAASGNSGAGSISYPARYANAMAVGATDQNNNRASFSQYGAGLDIVAPGVNVQSTYPGSTYASENGTSMATPHVAGAAALVKQKNPRWSNVQIRNHLKNTATSLGSTNLYGSGLVNAEAATR

SEQ ID NO: 55454 - protein, 269 aa, Unidentified
AQSVPWGISRVQAPAAHNRGLTGSGVKVAVLDTGISTHPDLNIRGGASFVPGEPSTQDGNGHGTHVAGTIAALNNSIGVLGVAPDAELYAVKVLGASGSGSVSSIAQGLEWAGNNGMHVANLSLGSPSPSATLEQAVNSATSRGVLVVAASGNSGAGSIDYPARYANAMAVGATDQNNNRASFSQYGAGLDIVAPGVNVQSTYPGSAYASLNGTSMATPHVAGAAALVKQKNPSWSNVQIRNRLKNTATSLGSTNLYGSGLVNAEAATR

SEQ ID NO: 55455 - protein, 269 aa, Unidentified
AQSVPWGISRVQAPAAHNRRLTGRGVKVAVLDTGISTHPDLRIRGGASFVPGEPSTQDGNGHGTHVAGTIAALNNSIGVLGVAPSAELYAVKVLGASGSGSVSSIAQGLEWARNNGMHVANLSLGSPSPSATLEQAVNSATSRGVLVVAASGNSGAGSISYPARYANAMAVGATDQNNNRASFSQYGAGLDIVAPGVNVQSTYPGSTYASLNGTSMATPHVAGAAALVKQKNPSWSNVQIRNHLKNTATSLGSTNLYGSGLVNAEAATR

SEQ ID NO: 55456 - protein, 269 aa, Unidentified
AQSVPWGISRVQAPAAHNRKLTGSGVKVAVLDTGISTHPDLNIRGGASFVPGEPSTQDGNGHGTHVAGTIAALNNSIGVLGVAPSAELYAVKVLGASGSGSVSSIAQGLEWAGNNRMHVANLSLGSPSPSATLEQAVNSATSRGVLVVAASGNSGAGSIDYPARYANAMAVGATDQNNNRASFSQYGAGLDIVAPGVNVQSTYPGSAYASLNGTSMATPHVAGAAALVKQKNPSWSNVQIRNHLKNTATSLGSTNLYGSGLVNAEAATR

SEQ ID NO: 55457 - protein, 269 aa, Unidentified
AQSVPWGISRVQAPAAHNRGLTGSGVKVAVLDTGISTHPDLNIRGGASFVPGEPSTQDGNGHGTHVAGTIAALNNDINVLGVAPSAELYAVKVLGASGSGSVSSIAQGLEWAGNNGMHVANLSMGSPSPSATLEQAVNSATSRGVLVVAASGNSGAGSISYPARYANAMAVGATDQNNNRASFSQYGAGLDIVAPGVNVQSTYPGSTYASPNGTSMATPHVAGAAALVKQKNPSWSNVQIRNHLKNTATSLGSTNLYGSGLVNAEAATR

SEQ ID NO: 55458 - protein, 269 aa, Unidentified
AQSVPWGISRVQAPAAHNRKLTGSGVKVAVLDTGISTHPDLWIRGGASFVPGEPSTQDGEGHGTHVAGTIAALNNSIGVLGVAPSAELYAVKVLGASGSGSVSSIAQGLEWAGNNRMHVANLSLGSPSPSATLEQAVNSATSRGVLVVAASGNSGAGSISYPARYANAMAVGATDQNNNRASFSQYGAGLDIVAPGVNVQSTYPGSTYASLNGTSMATPHVAGAAALVKQKNPSWSNVQIRNHLKNTATSLGSTNLYGSGLVNAEAATR

SEQ ID NO: 55459 - protein, 269 aa, Unidentified
AQSVPWGISRVQAPAAHNRGLTGSGVKVAVLDTGISTHPDLNIRGGASFVPGEPSTQDGNGHGTHVAGTIAALNNSIGVLGVAPSAELYAVKVLGASGSGSVSSIAQGLEWAGNNVMHVANLSLGVMSPSATLEQAVNSATSRGVLVVAASGNSGAGSIDYPARYANAMAVGATDQNNNRASFSQYGAGLDIVAPGVNVQSTYPGSTYASLNGTSMATPHVAGAAALVKQKNPSWSNVQIRNHLKNTATSLGSTNLYGSGLVNAEAATR

SEQ ID NO: 55460 - protein, 269 aa, Bacillus lentus
AQSVPWGISRMQAPAAHNRGLTGSGVKVAVLDTGISTHPDLNIRGGASFVPGEPSTQDGNGHGTHVAGTIAALDNSIGVLGVAPSAELYAVKVLGASGSGSVSSIAQGLEWAGNNGMHVANLSFGSPSPSATLEQAVNSATSRGVLVVAASGNSGAGSISYPARYANAMAVGATDQNNNRASFSQYGAGLDIVAPGVNVQSTYPGSTYASLNGTSMATPHVAGAAALVKQKNPSWSNVQIRNHLRNTATSLGSTNLYGSGLVNAEAATR

SEQ ID NO: 55461 - protein, 269 aa, Unidentified
AQSVPWGISRVQAPAAHNRGLTGSGVKVAVLDTGISTHPDLNIRGGASFVPGEPSTQDGNGHGTHVAGTIAALNNNIGVLGVAPSAELYAVKVLGASGDGSVSSIAQGLEWAGNNGMHVANLSLGSPSPSATLEQAVNSATSRGVLVVAASGNSGAGSISYPARYANAMAVGATDQNNNRASFSQYGAGLDIVAPGVNVQSTYPGSTYASLNGTSMATPHVAGAAALVKQKNPRWSNVQIRNHLKNTATSLGSTNLYGSGLVNALAATR

SEQ ID NO: 55462 - protein, 269 aa, Unidentified
AQSVPWGISRVQAPASHNRGLTGSGVKVAVLDTGISTHPDLNIRGGASFVPGEPSTQDGNGHGTHVAGTIAALNNSIGVLGVAPSAELYAVKVLGASGSGGISSIAQGVEWAGNNGMHVANLSLGSPSPSATLEQAVNSATSRGVLVVAASGNSGAGSISYPARYANAMAVGATDQNNNRASFSQYGAGLDIVAPGVNVQSTYPGSTYASLNGTSMATPHVAGAAALVKQKNPSWSNVQIRNHLKNTATSLGSTNLYGSGLVNAEAATR

SEQ ID NO: 55463 - protein, 269 aa, Unidentified
AQSVPWGISRVQAPAAHNRGLTGSGVKVAVLDTGISTHPDLNIRGGASFVPGEPSTQDGNGHGTHVAGTIAALNNSIGVLGVAPSAILYAVKVLGASGSGSVSSIAQGLEWAGNFGMHVANLSLGSPSPSATLEQAVNSATSRGVLVVAASGNSGAGSISYPARYANAMAVGATDQNNNRASFSQYGAGLDIVAPGVNVQSTYPGSTYASLNGTSMAAPHVAGAAALVKQKNPSWSNVQIRNRLKNTATSLGSTNLYGSGLVNAEAATR

SEQ ID NO: 55464 - protein, 269 aa, Unidentified
AQSVPWGISRVQAPAAHNRGLTGSGVKVAVLDTGISTHPDLNIRGGASFVPGEPSTQDGNGHGTHVAGTIAALNNSIGVLGVAPNAELYAVKVLGASGSGSVSSIAQGLEWAGNNGMHVANLSLGMAGPSATLEQAVNSATSRGVLVVAASGNSGAGSISYPARYANAMAVGATDQNNNRASFSQYGAGLDIVAPGVNVQSTYPGSTYASLNGTSQATPHVAGAAALVKQKNPSWSNVQIRNHLKNTATSLGSTNLYGSGLVNAEAATR

SEQ ID NO: 55465 - protein, 269 aa, Unidentified
AQSVPWGISRVQAPAAHNRGLTASGVKVAVLDTGISTHPDLWIRGGASFVPGEPSTQDGNGHGTHVAGTIAALNNSIGVLGVAPSAELYAVKVLGASGSGSVSSIAQGLEWAGLNGMHVANLSLGSPSPSATLEQAVNSATSRGVLVVAASGNSGAGSISYPARYANAMAVGATDQNNNRASFSQYGAGLDIVAPGVNVQSTYPGSTYASLNGTSMATPHVAGAAALVKQKNGSWSNVQIRNHLKNTATSLGSTNLYGSGLVNAEAATR

SEQ ID NO: 55466 - protein, 269 aa, Unidentified
AQSVPWGISRVQAPAAHRRGLTGSGVKVAVLDTGISTHPDLNIRGGASFVPGEPSTQDGNGHGTHVAGTIAALNNSIGVLGVAPSAELYAVKVLGASGSGSVSSIAQGLEWAGNNRMHVANLSLGSPSPSATLEQAVNSATSRGVLVVAASGNSGAGSISYPARYANAMAVGATDQNNNRASFSQYGAGLDIVAPGVNVLSTWPGSTYASLNGTSMATPHVAGAAALVKQKNPSWSNVQIRNHLKNTATSLGSTNLYGSGLVNAEAATR

SEQ ID NO: 55467 - protein, 269 aa, Unidentified
AQVVPWGISRVQAPAAHNRGLTGSGVKVAVLDTGISTHPDLNIRGGASFVPGEPSTQDGNGHGTHVAGTIAALNNDIGVLGVAPSAELYAVKVLGASGSGSVSSIAQGLEWAGNNGMHVANLSLGSPSPSATLEQAVNSATSRGVLVVAASGNSGAGSISYPARYQNAMAVGATDQNNNRAEFSQYGAGLDIVAPGVNVQSTYPGSTYASLNGTSMATPHVAGAAALVKQKNPSWSNVQIRNHLKNTATSLGSTNLYGSGLVNAEAATR

SEQ ID NO: 55468 - protein, 269 aa, Unidentified
AQSVPWGISRVRAPAAHNRGLTGSGVKVAVLDTGISTHPDLNIRGGASFVPGEPSTQDGNGHGTHVAGTIAALDNSIGVLGVAPSAELYAVKVLGASGSGAVSSIAQGLEWAGNNGMHVANLSLGSPSPSATLEQAVNSATSRGVLVVAASGNSGAGSISYPARYANAMAVGATDQNNNRASFSQYGAGLDIVAPGVNVQSTYTGSTYASLNGTSSATPHVAGAAALVKQKNPSWSNVRIRNHLKNTATSLGSTNLYGSGLVNAEAATR

SEQ ID NO: 55469 - protein, 269 aa, Unidentified
AQSVPWGISRVQAPAAHNRGLTAFGVKVAVLDTGISTHPDLNIRGGASFWPGEPSTQDGNGHGTHVAGTIAALNNSIGVLGVAPSAELYAVKVLGASGSGSVSSIAQGLEWAGNNGMHVANLSLGSPSPSATLEQAVNSATSRGVLVVAASGNSGEGSISYPARYANAMAVGATDQNNNRASFSQYGAGLDIVAPGVNVQSTYPGSTYASLNGTSMATPHVAGAAALVKQKNPSWSNVQIRNHLKNTATSLGSTNLYGSGLVNAEAATR

SEQ ID NO: 55470 - protein, 269 aa, Unidentified
AQSVPWGISRVQAPAAHNRGLTGSGVKVAVLDTGISTHPDLNIRGGASFVPGEPSTQDRNGHGTHVAGTIAALDNSIGVLGVAPSAELYAVKVLGASGSGAISSIAQGLEWAGNNGMHVANLSLGSPSPSATLERAVNSATSRGVLVVAASGNSGAGSISYPARYANAMAVGATDQNNNRASFSQYGAGLDIVAPGVNVQSTYPGSTYASLNGTSSATPHVAGAAALVKQKNPSWSNVQIRNHLKNTATSLGSTNLYGSGLVNAEAATR

SEQ ID NO: 55471 - protein, 269 aa, Unidentified
AQSVPWGISRVQAPAAHNRGLTGSGVKVAVLDTGISTHPDLNIRGGASFVPGEPSTQDGNGHGTHVAGTIAALDNSIGVLGVAPSAELYAVKVLGESGSGAISSIAQGLEWAGNNGMHVANLSLGSPSPSATLEQAVNSATSRGVLVVAASGNSGAGSISYPARYANAMAVGATDQNNNRASFSQYGAGLDIVAPGVNVQSTYPGSTYASLNGTSMATPHVAGAAALVKQKNPSWSNVQIRNHLKNTATSLGSTNLYGSGLVNAEAATR

SEQ ID NO: 55472 - protein, 269 aa, Unidentified
AQSVPWGISRVQAPAAHNRGLTGSGVKVAVLDTGISTHPDLNIRGGASFVPGEPSTQDGNGHGTHVAGTIAALDNSIGVLGVAPSAELYAVKVLGASGSGAISSIAQGLEWAGNNGMHVANLSLGSPSPSATLEQAVNSATSRGVLVVAASGNSGEGSISYPARYANAMAVGATDQNNNRASFSQYGAGLDIVAPGVNVQSTYPGSTYASLNGTSMATPHVAGAAALVKQKNPSWSNVQIRNHLKNTATSLGSTNLYGSGLVNAEAATR

SEQ ID NO: 55473 - protein, 269 aa, Bacillus lentus
AQSVPWGISRVQATAAHKRGLTGSGVKVAVLDTGISTHPDLNIRGGASFVPGEPSTQDGNGHGTHVAGTIAALNNSIGVLGVAPSAELYAVKVLGASGSGSVSSIAQGLEWAGNNGMHVANLSLGSPSPSATLEQAVNSATSRGVLVVAASGNSGAGSISAPASYANAMAVGATDQNNNRASFSQYGAGLDIVAPGVNVQSTYPGSTYASLNGTSMATPHVAGAAALVKQKNPSWSNVQIRNHLKNTATSLGSTNLYGSGLVNAEAATR

SEQ ID NO: 55474 - protein, 269 aa, Alkalihalobacillus clausii
AQSVPWGISRVQAPAAHNRGLTGSGVKVAVLDTGISTHPDLNIRGGASFVPGEPSTQDGNGHGTHVAGTIAALDNSIGVLGVAPSAELYAVKVLGASGSGSVSSIAQGLEWAGNNGMDVANLSLGSPSPSATLEQAVNSATSRGVLVVAASGNSGAGSISYPARYANAMAVGATDQNNNRASFSQYGAELDIVAPGVNVQSTYPGSTYASLNGTSMATPHVAGAAALVLQKNPSWSNVQIRNHLKNTATSLGSTNLYGSGLVNAEAATR

SEQ ID NO: 55475 - protein, 269 aa, Unidentified
AQSVPWGISRVQAPAAHNRKLTGSGVKVAVLDTGISTHPDLNIRGGASFVPGEPSTQDGEGHGTHVAGTIAALNNNIGVLGVAPSAELYAVKVLGASGSGSVSSIAQGLEWAGNNGMHVANLSLGQPSPSATLEQAVNSATSRGVLVVAASGNSGAGSISYPARYANAMAVGATDQNNNRASFSQYGAGLDIVAPGVNVQSTYPGSTYASLNGTSMATPHVAGAAALVKQKNPSWSNVQIRNHLKNTATSLGSTNLYGSGLVNAEAATR

SEQ ID NO: 55476 - protein, 269 aa, Unidentified
AQSVPWGISRVQAPAAHNRGLTGSGVKVAVLDTGISTHPDLNIRGGASFVPGEPSTQDGNGHGTHVAGTIAALNNSIGVLGVAPSAELYAVKVLGASGRGAISSIAQGLEWAGNNGMHVANLSLGSPSPSATLEQAVNSATSRGVLVVAASGNSGASSISYPARYANAMAVGATDQNNNRASFSQYGAGLDIVAPGVNVQSTYPGSTYASLNGTSMATPHVAGAAALVKQKNPSWSNVQIRNHLKNTATSLGSTNLYGSGLVNAEAATR

SEQ ID NO: 55477 - protein, 269 aa, Unidentified
AQSVPWGISRVQAPAAHNRGLTGSGVKVAVLDTGISTHPDLNIRGGASFVPGEPSTQDGEGHGTHVAGTIAALNNDIGVLGVAPSAELYAVKVLGASGSGSVSSIAQGLEWAGNNDMHVANLSLGSPSPSATLEQAVNSATSRGVLVVAASGNSGAGSISYPARYANAMAVGATDQNNNRASFSQYGAGLDIVAPGVNVQSTYPGSTYASLNGTSMATPHVAGAAALVKQKNPSWSNVRIRNHLKNTATSLGSTNLYGSGLVNAEAATR

SEQ ID NO: 55478 - protein, 269 aa, Unidentified
AQSVPWGISRVQAPAAHNRGLTGSGVKVAVLDTGISTHPDLNIRGGASFVPGEPSTQDGNGHGTHVAGTIAALNNDIGVLGVAPSAELYAVKVLGASGSGSVSSIAQGLEWAGNNGMRVANLSLGSPSPSATLEQAVNSATSRGVLVVAASGNSGAGSISYPARYQNAMAVGATDQNNNRASFSQYGAGLDIVAPGVNVQSTYPGSTYASLNGTSMASPHVAGAAALVKQKNPSWSNVQIRNHLKNTATSLGSTNLYGSGLVNAEAATR

SEQ ID NO: 55479 - protein, 269 aa, Unidentified
AQSVPWGISRVQAPAAHNRGLLGFGVKVAVLDTGISTHPDLNIRGGASFVPGEPSTQDGNGHGTHVAGTIAALNNNIGVLGVAPSAELYAVKVLGASGSGSVSSIAQGLEWAGNNGMHVANLSLGSPSPSATLEQAVNSATSRGVLVVAASGNSGAGSISYPARYANAMAVGATDQNNNRASFSQYGAGLDIVAPGVNVQSTYPGSAYASLNGTSMATPHVAGAAALVKQKNPSWSNVQIRNHLKNTATSLGSTNLYGSGLVNAEAATR

SEQ ID NO: 55480 - protein, 269 aa, Unidentified
AQSVPWGISRVQAPAAHNRGLTGSGVKVAVLDTGISTHPDLNIRGGASFVPGEPSTQDGNGHGTHVAGTIAALNNSIGVLGVAPSAELYAVKVLGASGGGALSSIAQGLEWAGNNGMHVANLSLGNPSPSATLEQAVNSATSRGVLVVAASGNSGAGSISYPARYANAMAVGATDQNNNRASFSQYGAGLDIVAPGVNVQSTYPGSTYASLNGTSMATPHVAGAAALVKQKNPSWSNVQIRNHLKNTATSLGSTNLYGSGLVNAEAATR

SEQ ID NO: 55481 - protein, 269 aa, Unidentified
AQSVPWGISRVQAPAAHNRGLTGSGVKVAVLDTGISTHPDLNIRGGASFVPGEPSTQDGEGHGTHVAGTIAALNNDIGVLGVAPSAELYAVKVLGASGSGSVSSIAQGLEWAGNNSMHVANLSLGSPSPSATLEQAVNSATSRGVLVVAASGNSGAGSISYPARYANAMAVGATDQNNNRASFSQYGAGLDIVAPGVNVQSTYPGSTYASLNGTSMATPHVAGAAALVKQKNPSWSNVQIRNRLKNTATSLGSTNLYGSGLVNAEAATR

SEQ ID NO: 55482 - protein, 269 aa, Unidentified
AQSVPWGISRVQAPAAHNRGLTGRGVKVAVLDTGISTHPDLNIRGGASFVPGEPSTQDGNGHGTHVAGTIAALNNSIGVLGVAPSAELYAVKVLGASGSGSVSSIAQGLEWAGNNRMHVANLSLGSPSPSATLEQAVNSATSRGVLVVAASGNSGEGSIDYPARYANAMAVGATDQNNNRASFSQYGAGLDIVAPGVNVQSTYPGSTYASLNGTSMATPHVAGAAALVKQKNPSWSNVQIRNHLKNTATSLGSTNLYGSGLVNAEAATR

SEQ ID NO: 55483 - protein, 269 aa, Bacillus lentus
AQSVPWGISRVQAPAAHNRGLTGSGVKVAVLDTGISTHPDLNIRGGASFVPGEPSTQDGNGHGTHVAGTIAALNNSIGVLGVAPRAELYAVKVLGASGSGSVSSIADGLEWAGNNGMHVANLSLGSPSPSATLEQAVNSATSRGVLVVAASGNSGAGSISYPARYANAMAVGATDQNNNRARFSQYGAGLDIVAPGVNVQSTYPGSTYASLNGTSMATPHVAGAAALVKQKNPSWSNVQIRRHLKNTATSLGSTNLYGSGLVNAEAATR

SEQ ID NO: 55484 - protein, 269 aa, Synthetic construct
AQSVPWGISRVQAPAAHNRGLTGSGVKVAVLDTGISTHPDLNIRGGASFVPGEPSTQDGNGHGTHVAGTIAALDNSIGVLGVAPSAELYAVKVLGASGSGAIASIAQGLEWAGNNGMHVANLSLGSPSPSATLEQAVNSATSRGVLVVAASGNSGAGSISYPARYANAMAVGATDQNNNRASFSQYGAGLDIVAPGVNVQSTYPGSTYASLNGTSMATPHVAGAAALVKQKNPSWSNVQIRNHLKNTATSLGSTNLYGSGLVNAEAATR

SEQ ID NO: 55485 - protein, 269 aa, Alkalihalobacillus clausii
AQSVPWGISRLQAPAAHNRGLTGSGVKVAVLDTGISTHPDLNIRGGASFVPGEPSTQDGNGHGTHVAGTIAALNNSIGVLGVAPSAELYAVKVLPASGSGSVSSIAQGLEWAGNNGMHVANLSLGSPSPSATLEQAVNSATSRGILVVAASGNSGAGSISYPARYANAMAVGATDQNNNRASFSQYGAGLDIVAPGVNVQSTYPGSTYASLSGTSMATPHVAGAAALVKQKNPSWSNVQIRNHLKNTATSLGSTNLYGSGLVNAEAATR

SEQ ID NO: 55486 - protein, 269 aa, Unidentified
AQSVPWGISRVQAPAAHNRGLTGSGVKVAVLDTGISTHPDLNIRGGASFVPGEPSTQDGNGHGTHVAGTIAALNNSIGVLGVAPSAELYAVKVLPQSGSGAISSIAQGLEWAGNNGMHVANLSLGSPSPSATLEQAVNSATSRGVLVVAASGNSGAGSISYPARYANAMAVGATDQNNNRASFSQYGAGLDIVAPGVNVQSTYPGSTYASLNGTSMATPHVAGAAALVKQKNPSWSNVQIRNHLKNTATSLGSTNLYGSGLVNAEAATR

SEQ ID NO: 55487 - protein, 269 aa, Bacillus lentus
AQSVPWGISRVQAPAAHNRGLTGSGVKVAVLDTGISTHPDLNIRGGASFVPGEPSTQDGNGHGTHVAGTIAALNNSIGVLGVAPDAELYAVKVLGASGSGSVSSIARGLEWAGNNGMHVANLSLGSPSPSATLEQAVNSATSRGVLVVAASGNSGAGSISYPARYANAMAVGATDQNNNRARFSQYGAGLDIVAPGVNVQSTYPGSTYASLNGTSMATPHVAGAAALVKQKNPSWSNVQIRRHLKNTATSLGSTNLYGSGLVNAEAATR

SEQ ID NO: 55488 - protein, 269 aa, Unidentified
AQSVPWGISRVQAPAAHNRRLTGRGVKVAVLDTGISTHPDLRIRGGASFVPGEPSTQDGNGHGTHVAGTIAALNNSIGVLGVAPSAELYAVKVLGASGAGSVSSIAQGLEWAGNNGMHVANLSLGSPSPSATLEQAVNSATSRGVLVVAASGNSGAGSISYPARYANAMAVGATDQNNNRASFSQYGAGLDIVAPGVNVQSTYPGSTYASLNGTSMATPHVAGAAALVKQKNPSWSNVQIRNHLKNTATSLGSTNLYGSGLVNAEAATR

SEQ ID NO: 55489 - protein, 269 aa, Unidentified
AQSVPWGISRVQAPAAHNRGLTGSGVKVAVLDTGISTHPDLNIRGGRSFVPGEPSTQDGNGHGTHVAGTIAALNNSIGVLGVAPSAELYAVKVLGASGSGSVSSIAQGLEWAGNNGMHVANLSLGDPSPSATLEQAVNSATSRGVLVVAASGNSGAGSISYPARYANAMAVGATDQNNNEASFSQYGAGLDIVAPGVNVQSTYPGSTYASLNGTSMATPHVAGAAALVKQKNGSWSNVQIRNHLKNTATSLGSTNLYGSGLVNAEAATR

SEQ ID NO: 55490 - protein, 269 aa, Unidentified
AQSVPWGISRVQAPAAHNRGLAGSGVKVAVLDSGISTHPDLNIRGGASFVPGEPSTQDGNGHGTHVAGTIAALNNSIGVLGVAPSAELYAVKVLGASGSGSVSSIAQGLEWAGLNGMHVANLSLGIPSPSATLEQAVNSATSRGVLVVAASGNSGAGSISYPARYANAMAVGATDQNNNRASFSQYGAGLDIVAPGVNVQSTYPGSTYASLNGTSMATPHVAGAAALVKQKNPSWSNVQIRNHLKNTATSLGSTNLYGSGLVNAEAATR

SEQ ID NO: 55491 - protein, 269 aa, Unidentified
AQSVPWGISRVQAPAAHNRGLTGRGVKVAVLDSGISTHPDLNIRGGASFVPGEPSTQDGNGHGTHVAGTIAALNNSIGVLGVAPSAELYAVKVLGASGSGSVSSIAQGLEWAGNNRMHVANLSLGSPSPSATLEQAVNSATSRGVLVVAASGNSGAGSISYPARYANAMAVGATDQNNNRASFSQYGAGLDIVAPGVNVQSTYPGSTYASLNGTSMATPHVAGAAALVFQKNPSWSNVQIRNHLKNTATSLGSTNLYGSGLVNAEAATR

SEQ ID NO: 55492 - protein, 269 aa, Unidentified
AQSVPWGISRVQAPAAHRRGLTGSGVKVAVLDTGISTHPDLRIRGGASFVPGEPSTQDGNGHGTHVAGTIAALDNSIGVLGVAPSAELYAVKVLGASGSGSVSSIAQGLEWAGNNGMHVANLSLGSPSPSATLEQAVNSATSRGVLVVAASGNSGAGSISYPARYANAMAVGATDQNNNRASFSQYGAGLDIVAPGVNVQSTYPGSTYASLNGTSMATPHVAGAAALVKQKNPSWRNVQIRNHLKNTATSLGSTNLYGSGLVNAEAATR

SEQ ID NO: 55493 - protein, 269 aa, Unidentified
AQSVPWGISRVQAPAAHNRGLLGFGVKVAVLDTGISTHPDLNIRGGASFVPGEPSTQDGNGHGTHVAGTIAALNNSIGVLGVAPSAELYAVKVLGASGSGSVSSIAQGLEWAGNNGMHVANLSLGDPSPSATLEQAVNSATSRGVLVVAASGNSGAGSIDYPARYANAMAVGATDQNNNRASFSQYGAGLDIVAPGVNVQSTYPGSTYASLNGTSMATPHVAGAAALVKQKNPSWSNVQIRNHLKNTATSLGSTNLYGSGLVNAEAATR

SEQ ID NO: 55494 - protein, 269 aa, Unidentified
AQSVPWGIARVQAPAAHNRGLRGSGVKVAVLDTGISTHPDRNIRGGASFVPGEPSTQDGNGHGTHVAGTIAALNNRIGVLGVAPSAELYAVKVLGASGSGSVSSIAQGLEWAGNNGMHVANLSLGSPSPSATLEQAVNSATSRGVLVVAASGNSGAGSISYPARYANAMAVGATDQNNNRASFSQYGAGLDIVAPGVNVQSTYPGSTYASLNGTSMATPHVAGAAALVKQKNPSWSNVQIRNHLKNTATSLGSTNLYGSGLVNAEAATR

SEQ ID NO: 55495 - protein, 269 aa, Unidentified
AQSVPWGISRVQAPASHNRGLTGSGVKVAVLDTGISTHPDLNIRGGASFVPGEPSTQDGNGHGTHVAGTIAALNNSIGVLGVAPSAELYAVKVLGASGSGSLSSIAQGLEWAGNNGMHVANLSLGSPSPSATLEQAVNSATSRGVLVVAASGNSGAGSISYPARYANAMAVGATDQNNNRADFSQYGAGLDIVAPGVNVQSTYPGSTYASLNGTSMATPHVAGAAALVKQKNPSWSNVQIRNRLKNTATSLGSTNLYGSGLVNAEAATR

SEQ ID NO: 55496 - protein, 269 aa, Unidentified
AQSVPWGISRVQAPAAHRRGLTGSGVKVAVLDTGISTHPDLDIRGGASFVPGEPSTQDGNGHGTHVAGTIAALDNSIGVLGVAPSAELYAVKVLGASGSGSVSSIAQGLEWAGNNGMHVANLSLGSPSPSATLEQAVNSATSRGVLVVAASGNSGAGSISYPARYANAMAVGATDQNNNRASFSQYGAGLDIVAPGVNVQSTYPGSTYASLNGTSMATPHVAGAAALVKQKNPSWSNVQIRNRLKNTATSLGSTNLYGSGLVNAEAATR

SEQ ID NO: 55497 - protein, 269 aa, Unidentified
AQSVPWGISRVQAPAAHNRGLTGSGVKVAVLDTGISTHPDLNIRGGASFVPGEPSTQDGEGHGTHVAGTIAALNNNIGVLGVAPSAELYAVKVLGASGDGSVSSIAQGLEWAGNNGMHVANLSLGSPSPSATLEQAVNSATSRGVLVVAASGNSGAGSISYPARYANAMAVGATDQNNNRASFSQYGAGLDIVAPGVNVQSTYPGSTYASLNGTSMATPHVAGAAALVKQKNPRWSNVQIRNHLKNTATSLGSTNLYGSGLVNAEAATR

SEQ ID NO: 55498 - protein, 269 aa, Unidentified
AQSVPWGISRVQAPAAHNRRLTGRGVKVAVLDTGISTHPDLRITGGASFVPGEPSTQDGNGHGTHVAGTIAALNNSIGVLGVAPSAELYAVKVLGASGSGSVSSIAQGLEWAGNNGMHVANLSLGSPSPSATLEQAVNSATSRGVLVVAASGNSGAGSISYPARYANAMAVGATDQNNNRASFSQYGAGLDIVAPGVNVQSTYPGSTYASLNGTSMATPHVAGAAALVKQKNPSWSNVQIRNHLKNTATSLGSTNLYGSGLVNAEAATR

SEQ ID NO: 55499 - protein, 269 aa, Unidentified
AQSVPWGISRVQAPAAHNRGLLGSGVKVAVLDTGISTHPDLNIRGGASFVPGEPSTQDGNGHGTHVAGTIAALNNNIGVLGVAPSAELYAVKVLGASGSGSVSSIAQGLEWAGNNGMHVVNLSLGDPSPSATLEQAVNSATSRGVLVVAASGNSGAGSISYPARYANAMAVGATDQNNNRASFSQYGAGLDIVAPGVNVQSTYPGSTYASLNGTSMATPHVAGAAALVKQKNPSWSNVQIRNHLKNTATSLGSTNLYGSGLVNAEAATR

SEQ ID NO: 55500 - protein, 269 aa, Unidentified
AQSVPWGISRVQAPAAHNRGLTGSGVKVAVLDTGISTHPDLNIRGGASFVPGEPSTQDGNGHGTHVAGTIAALNNRIGVLGVAPSAELYAVKVLGASGSGSVSSIAQGLEWAGNNRMHVANLSLGSPSPSATLEQAVNSATSRGVLVVAASGNSGADSISYPARYANAMAVGATDQNNNRASFSQYGAGLDIVAPGVNVQSTYPGSTYASLNGTSMATPHVAGAAALVKQKNPSWSNVQIRDHLKNTATSLGSTNLYGSGLVNAEAATR

SEQ ID NO: 55501 - protein, 269 aa, Unidentified
AQSVPWGISRVQAPAAHNRKLLGSGVKVAVLDTGISTHPDLNIRGGASFVPGEPSTQDGNGHGTHVAGTIAALNNSIGVLGVAPSAELYAVKVLGASGSGSVSSIAQGLEWAGNNGMHVANLSLGSPSPSATLEQAVNSATSRGVLVVAASGNSGAGSIDYPARYANAMAVGATDQNNNRASFSQYGAGLDIVAPGVNVQSTYPGSTYASENGTSMATPHVAGAAALVKQKNPSWSNVQIRNHLKNTATSLGSTNLYGSGLVNAEAATR

SEQ ID NO: 55502 - protein, 269 aa, Unidentified
AQSVPWGISRVQAPAAHNRGLTGSGVKVAVLDTGISTHPDLNIRGGASFVPGEPSTQDGNGHGTHVAGTIAALNNSIGVLGVAPSAELYAVKVLPQAGSASVSSIAQGLEWAGNNGMHVANLSLGSPSPSATLEQAVNSATSRGVLVVAASGNSGAGSISYPARYANAMAVGATDQNNNRASFSQYGAGLDIVAPGVNVQSTYPGSTYASLNGTSMATPHVAGAAALVKQKNPSWSNVQIRNHLKNTATSLGSTNLYGSGLVNAEAATR

SEQ ID NO: 55503 - protein, 269 aa, Unidentified
AQSVPWGISRVQAPAAHNRGLTGSGVKVAVLDTGISTHPDLNIRGGASFVPGEPSTQDGEGHGTHVAGTIAALNNSIGVLGVAPSAELYAVKVLGASGAGSVSSIAQGLEWAGNNGMHVANLSLGSPSPSATLEQAVNSATSRGVLVVAASGNSGAGSISYPARYANAMAVGATDQNNNHASFSQYGAGLDIVAPGVNVQSTYPGSTYASLNGTSMATPHVAGAAALVKQKNPSWSNVQIRNRLKNTATSLGSTNLYGSGLVNAEAATR

SEQ ID NO: 55504 - protein, 269 aa, Unidentified
AQSVPWGIRRVQTPAAHNRGLTGSGVKVAVLDTGISTHPDLNIRGGASFVPGEPSTQDGNGHGTHAAGTIAALNNSIGVLGVAPSAELYAVKVLGASGSGSVSSIAQGLEWAGNNGMHVANLSLGSPSPSATLEQAVNSATSRGVLVVAASGNSGAGSISYPARYANAMAVGATDQNNNRASFSQYGAGLDIVAPGVNVQSTYPGSTYASLDGTSMATPHVAGAAALVKQKNPSWSNVQIRNHLKNTATSLGSTNLYGSGLVNAEAATR

SEQ ID NO: 55505 - protein, 269 aa, Unidentified
AQSVPWGISRVQAPAAHNRGLTGSGVKVAVLDTGISTHPDLNIRGGASFVPGEPSTQDGNGHGTHVAGTIAALNNDIGVLGVAPSAELYAVKVLGASGSGSVSSIAQGLEWAGNNGMHVANLSMGSPSPSATLEQAVNSATSRGVLVVAASGNSGAGSISYPARYANAMAVGATDQNNNRASFSQYGAGLDIVAPGVNVQSTYPGSTYASLNGTSMLTPHVAGAAALVKQKNPSWSNVQIRNHLKNTDTSLGSTNLYGSGLVNAEAATR

SEQ ID NO: 55506 - protein, 269 aa, Bacillus lentus
AQSVPWGISRVQAPAAHNRGLTGSGVKVAVLDTGISTHPDLNIRGGASFVPGEPSTQDGNGHGTHVAGTIAALNNSIGVLGVAPSAELYAVKVLGASGSGSVSSIAQGLEWAGNNGMHVANLSLGSPSPSATLEQAVNSATSRGVLVVAASGNSGAGSISAPASYANVFAVGATDQNNNRASFSQYGAGLDIVAPGVNVQSTYPGSTYASLNGTSMATPHVAGAAALVKQKNPSWSNVQIRNHLKNTATSLGSTNLYGSGLVNAEAATR

SEQ ID NO: 55507 - protein, 269 aa, Unidentified
AQSVPWGISRVQAPAAHNRGLTGSGVKVAVLDTGISTHPDLNIRGGASFVPGEPSTQDGNGHGTHVAGTIAALNNSIGVLGVAPSAELYAVKVLPATGSAAVSSIAQGLEWAGNNGMHVANLSLGSPSPSATLEQAVNSATSRGVLVVAASGNSGAGSISYPARYANAMAVGATDQNNNRASFSQYGAGLDIVAPGVNVQSTYPGSTYASLNGTSMATPHVAGAAALVKQKNPSWSNVQIRNHLKNTATSLGSTNLYGSGLVNAEAATR

SEQ ID NO: 55508 - protein, 269 aa, Unidentified
AQSVPWGISRVQAPAAHRRGLTGRGVKVAVLDTGISTHPDLDIRGGASFVPGEPSTQDGNGHGTHVAGTIAALNNSIGVLGVAPSAELYAVKVLGASGSGSVSSIAQGLEWAGNNGMHVANLSLGSPSPSATLEQAVNSATSRGVLVVAASGNSGAGSISYPARYANAMAVGATDQNNNRASFSQYGAGLDIVAPGVNVQSTYPGSTYASLNGTSMATPHVAGEAALVKQKNPSWSNVQIRNHLKNTATSLGSTNLYGSGLVNAEAATR

SEQ ID NO: 55509 - protein, 269 aa, Unidentified
AQSVPWGISRVQAPAAHNRGLTGSGVKVAVLDTGISTHPDLNIRGGASFVPGEPSTQDGNGHGTHVAGTIAALNNSIGVLGVAPSAELYAVKVLGQTGGASVSSIAQGLEWAGNNGMHVANLSLGSPSPSATLEQAVNSATSRGVLVVAASGNSGAGSISYPARYANAMAVGATDQNNNRASFSQYGAGLDIVAPGVNVQSTYPGSTYASLNGTSMATPHVAGAAALVKQKNPSWSNVQIRNHLKNTATSLGSTNLYGSGLVNAEAATR

SEQ ID NO: 55510 - protein, 269 aa, Unidentified
AQSVPWGISRVQAPAAHRRGLTGRGVKVAVLDTGISTHPDLNIRGGASFVPGEPSTQDGNGHGTHVAGTIAALDNSIGVLGVAPSAELYAVKVLGASGSGSISSIAQGLEWAGNNGMHVANLSLGSPSPSATLEQAVNSATSRGVLVVAASGNSGAGSISYPARYANAMAVGATDQNNNRASFSQYGAGLDIVAPGVNVQSTYPGSTYASLNGTSMATPHVAGAAALVKQKNPSWSNVQIRNHLKNTATSLGSTNLYGSGLVNAEAATR

SEQ ID NO: 55511 - protein, 269 aa, Unidentified
AQSVPWGISRVQAPAAHNRGLTGRGVKVAVLDTGISTHPDLNIRGGASFVPGEPSTQDGEGHGTHVAGTIAALNNSIGVLGVAPSAELYAVKVLGASGSGSVSSIAQGLEWAGNNRMHVANLSLGSPSPSATLEQAVNSATSRGVLVVAASGNSGAGSISYPARYANAMAVGATDQNNNRADFSQYGAGLDIVAPGVNVQSTYPGSTYASLNGTSMATPHVAGAAALVKQKNPSWSNVQIRNHLKNTATSLGSTNLYGSGLVNAEAATR

SEQ ID NO: 55512 - protein, 269 aa, Unidentified
AQSVPWGISRVQAPAAHNRKLTGSGVKVAVLDTGISTHPDLRIRGGASFVPGEPSTQDGNGHGTHVAGTIAALNNNIGVLGVAPSAELYAVKVLGASGSGSVSSIAQGLEWAGNNGMHVANLSLGLPSPSATLEQAVNSATSRGVLVVAASGNSGAGSISYPARYANAMAVGATDQNNNRASFSQYGAGLDIVAPGVNVQSTYPGSTYASLNGTSMATPHVAGAAALVKQKNPSWSNVQIRNHLKNTATSLGSTNLYGSGLVNAEAATR

SEQ ID NO: 55513 - protein, 269 aa, Unidentified
AQSVPWGISRVQAPAAHNRGLTGSGVKVAVLDSGISTHPDLNIRGGASFVPGEPSTQDGEGHGTHVAGTIAALNNSIGVLGVAPSAELYAVKVLGASGSGSVSSIAQGLEWAGLNGMHVANLSLGIPSPSATLEQAVNSATSRGVLVVAASGNSGAGSISYPARYANAMAVGATDQNNNRASFSQYGAGLDIVAPGVNVQSTYPGSTYASLNGTSMATPHVAGAAALVKQKNPSWSNVQIRNHLKNTATSLGSTNLYGSGLVNAEAATR

SEQ ID NO: 55514 - protein, 269 aa, Unidentified
AQSVPWGISRVQAPAAHNRGLTGSGVKVAVLDTGISTHPDLNIRGGASFVPGEPSTQDGNGHGTHVAGTIAALDNSIGVLGVAPSAELYAVKVLGASGSGAISSIAQGLEWAGNNGMHVANLSLGSPSPSATLEQAVNSATSRGVLVVAASGNSGAGSISYPARYANAMAVGATDQNNNRASFSQYGAGLDIVAPGVNVQSTYPGSTYASLNGTSMATPHVAGAAALVKQKNPSWSNVQIRNHLKNTATSLGSTNLYGSGLVNAQAATR

SEQ ID NO: 55515 - protein, 269 aa, Unidentified
AQSVPWGISRVQAPAAHNRGLAGSGVKVAVLDTGISTHPDLNIRGGASFVPGEPSTQDGEGHGTHVAGTIAALNNSIGVLGVAPSAELYAVKVLGASGSGSVSSIAQGLEWAGNNRMHVANLSLGSPSPSATLEQAVNSATSRGVLVVAASGNSGEGSISYPARYANAMAVGATDQNNNRASFSQYGAGLDIVAPGVNVQSTYPGSTYASLNGTSMATPHVAGAAALVKQKNPSWSNVQIRNHLKNTATSLGSTNLYGSGLVNAEAATR

SEQ ID NO: 55516 - protein, 269 aa, Unidentified
AQSVPWGISRVQAPAAHNRGLTGRGVKVAVLDTGISTHPDLRITGGASFVPGEPSTQDGNGHGTHVAGTIAALNNSIGVLGVAPSAELYAVKVLGASGAGSVSSIAQGLEWAGNNGMHVANLSLGSPSPSATLEQAVNSATSRGVLVVAASGNSGAGSISYPARYANAMAVGATDQNNNRASFSQYGAGLDIVAPGVNVQSTYPGSTYASLNGTSMATPHVAGAAALVKQKNPSWSNVQIRNHLKNTATSLGSTNLYGSGLVNAEAATR

SEQ ID NO: 55517 - protein, 269 aa, Synthetic construct
AQSVPWGISRVQAPAAHNRGLTGSGVKVAVLDTGISTHPDLNIRGGASFVPGEPSTQDGNGHGTHVAGTIAALDNSIGVLGVAPSAELYAVKVLGASGSGAISSIAQGLEWAGNNGMHVANLSLGSPSPSATLEQAVNSATSRGVLVVAASGNSGAGSISYPARYANAMAVGATDQNNNRASFSQYGAGLDIVAPGVNVQSTYPGSTYASHNGTSMATPHVAGAAALVKQKNPSWSNVQIRNHLKNTATSLGSTNLYGSGLVNAEAATR

SEQ ID NO: 55518 - protein, 269 aa, Unidentified
AQSVPWGISRVQAPAAHNRGLTGSGFKVAVLDTGISTHPDLNIRGGASWVPGEPSTQDGNGHGTHVAGTIAALNNSIGVLGVAPSAELYAVKVLGASGSGSLSEIAQGLEWAGNNGMHVANLSLGSPSPSATLEQAVNSATSRGVLVVAASGNSGAGSISYPARYANAMAVGATDQNNNRASFSQYGAGLDIVAPGVNVQSTYPGSTYASLNGTSMATPHVAGAAALVKQKNPSWSNVQIRNHLKNTATSLGSTNLYGSGLVNAEAATR

SEQ ID NO: 55519 - protein, 269 aa, Unidentified
AQSVPWGISRVQAPAAHNRGLTGSGVKVAVLDTGISTHPDLNIRGGASFVPGEPSTQDGNGHGTHVAGTIAALNNSIGVLGVAPSAELYAVKVLGFTGSGAISSIAQGLEWAGNNGMHVANLSLGSPSPSATLEQAVNSATSRGVLVVAASGNSGAGSISYPARYANAMAVGATDQNNNRASFSQYGAGLDIVAPGVNVQSTYPGSTYASLNGTSMATPHVAGAAALVKQKNPSWSNVQIRNHLKNTATSLGSTNLYGSGLVNAEAATR

SEQ ID NO: 55520 - protein, 269 aa, Bacillus sp.
AQSVPWGISRVQAPAAHNRGLTGSGVKVAVLDTGISTHPDLNIRGGASFVPGEPSTQDGNGHGTHVAGTIAALNNSIGVLGVAPNAELYAVKVLGASGSGSVSSIAQGLEWAGNNVMHVANLSLGVNSPSATLEQAVNSATSRGVLVVAASGNSGAGSISYPARYANAMAVGATDQNNNRASFSQYGAGLDIVAPGVNVQSTYPGSTYASLNGTSMATPHVAGAAALVKQKNPSWSNVQIRNHLKNTATSLGSTNLYGSGLVNAEAATR

SEQ ID NO: 55521 - protein, 269 aa, Unidentified
AQSVPWGISRVQAPAAHNRGLTGSGVKVAVLDTGISTHPDLNIRGGASFVPGEPSTQDGNGHGTHVAGTIAALNNSIGVLGVAPSAELYAVKVLGASGSGSVSSIAQGLEWAGNNGMHVANLSLGSPSPSATLEQAVNSATSRGVLVVAASGNSGAGSISYPARYANAMAVGALTKTNNRASFSQYGAGLDIVAPGVNVQSTYPGSTYASLNGTSMATPHVAGAAALVKQKNPSWSNVQIRNHLKNTATSLGSTNLYGSGLVNAEAATR

SEQ ID NO: 55522 - protein, 269 aa, Synthetic construct
AQSVPWGISRVQAPAAHNRGLTGSGVKVAVLDTGISTHPDLNIRGGASFVPGEPSTQDGNGHGTHVAGTIAALDNSIGVLGVAPSAELYAVKVLGASGSGAISSIAQGLEWAGNNGMHVANLSLGSPSPSATVEQAVNSATSRGVLVVAASGNSGAGSISYPARYANAMAVGATDQNNNRASFSQYGAGLDIVAPGVNVQSTYPGSTYASLNGTSMATPHVAGAAALVKQKNPSWSNVQIRNHLKNTATSLGSTNLYGSGLVNAEAATR

SEQ ID NO: 55523 - protein, 269 aa, Unidentified
AQSVPWGISRVQAPAAHNRGLTGSGVKVAVLDTGISTHPELNIRGGASFVPGEPSTQDGNGHGTHVAGTIAALNNDIGVLGVAPSAELYAVKVLGASGSGSVSSIAQGLEWAGNNGMHVANLSMGSPSPSATLEQAVNSATSRGVLVVAASGNSGAGSISYPARYQNAMAVGATDQNNNRASFSQYGAGLDIVAPGVNVQSTYPGSTYASLNGTSMATPHVAGAAALVKQKNPSWSNVQIRNHLKNTATSLGSTNLYGSGLVNAEAATR

SEQ ID NO: 55524 - protein, 269 aa, Unidentified
AQSVPWGISRVQAPAAHNRGLTGSGVKVAVLDTGISTHPDLNIRGGASFVPGEPSTQDGNGHGTHVAGTIAALNNGIGVLGVAPSAELYAVKVLGASGSGSVSSIAQGLEWAGNNSMHVANLSLGSPSPSATLEQAVNSATSRGVLVVAASGNSGADSISYPARYANAMAVGATDQNNNRADFSQYGAGLDIVAPGVNVQSTYPGSTYASLNGTSMATPHVAGAAALVKQKNPSWSNVQIRNHLKNTATSLGSTNLYGSGLVNAEAATR

SEQ ID NO: 55525 - protein, 269 aa, Bacillus lentus
AQSVPWGISRVQAPAAHNRGLTGSGVKVAVLDTGVSTHPDLNIRGGASFVPGEPSTQDGDGHGTHVAGTIAALNNSIGVLGVAPSAELYAVKVLGASGSGSVSSIAQGLEWAGNNGMHVANLSLGSPSPSATLEQAVNSATSRGVLVVAASGNSGAGSISYPARYANAMAVGATDQDNNRASFSQYGAGLDIVAPGVNVQSTYPGSTYASLNGTSMASPHVAGAAALVKQKNPSWSNVQIRNHLKNTATSLGSTNLYGSGLVNAEAATR

SEQ ID NO: 55526 - protein, 269 aa, Synthetic construct
AQSVPWGISRVQAPAAHNRGLTGSGVKVAVLDTGISTHPDLNIRGGASFVPGEPSTQDGNGHGTHVAGTIAALDNSIGVLGVAPSAELYAVKVLGASGSGAISSIAQGLEWAGNNGMHVANLSLGSPSPSATLEQAVNSATSRGVLVVAASGNSGAGSISYPARYANAMAVGATDQNNNRASFSQYGAGLDIVAPGVNVQSTYIGSTYASLNGTSMATPHVAGAAALVKQKNPSWSNVQIRNHLKNTATSLGSTNLYGSGLVNAEAATR

SEQ ID NO: 55527 - protein, 269 aa, Unidentified
AQSVPWGISRVQAPAAHNRGLTGRGVKVAVLDTGISTHPDLNIRGGASFVPGEPSTQDGNGHGTHVAGTIAALDNNIGVLGVAPSAELYAVKVLGASGSGSVSSIAQGLEWAGNNGMHVANLSLGSPSPSATLEQAVNSATSRGVLVVAASGNSGAGSISYPARYANAMAVGATDQNNNRASFSQYGAGLDIVAPGVNVQSTYPGSTYASLNGTSMATPHVAGAAALVKQKNPSWSNVQIRNRLKNTATSLGSTNLYGSGLVNAEAATR

SEQ ID NO: 55528 - protein, 269 aa, Unidentified
AQSVPWGISRVQAPAAHNRGLTGSGVKVAVLDTGISTHPDLNIRGGASFVPGEPSTQDGNGHGTHVAGTIAALNNSIGVLGVAPNAELYAVKVLGASGSGSVSSIAQGLEWAGNNGMHVANLSLGSPSPSATLEQAVNSATSRGVLVVAASGNSGAGSIDYPARYDNAIAVGATDQNNNRASFSQYGAGLDIVAPGVNVQSTYPGSTYASLNGTSMATPHVAGAAALVKQKNPSWSNVQIRNHLKNTATSLGSTNLYGSGLVNAEAATR

SEQ ID NO: 55529 - protein, 269 aa, Unidentified
AQSVPWGISRVQAPAAHNRGLTGSGVKVAVLDTGISTHPDLNIRGGASFVPGEPSTQDGNGHGTHVAGTIAALNNSIGVLGVAPSAELYAVKVLGQTSSGSLSSIAQGLEWAGNNGMHVANLSLGSPSPSATLEQAVNSATSRGVLVVAASGNSGAGSISYPARYANAMAVGATDQNNNRASFSQYGAGLDIVAPGVNVQSTYPGSTYASLNGTSMATPHVAGAAALVKQKNPSWSNVQIRNHLKNTATSLGSTNLYGSGLVNAEAATR

SEQ ID NO: 55530 - protein, 269 aa, Unidentified
AQSVPWGISRVQAPAAHNRGLAGSGVKVAVLDSGISTHPDLNIRGGASFVPGEPSTQDGNGHGTHVAGTIAALNNSIGVLGVAPSAELYAVKVLGASGSGSVSSIAQGLEWAGLNGMHVANLSLGSPSPSATLEQAVNSATSRGVLVVAASGNSGAGSISYPARYANAMAVGATDQNNNRADFSQYGAGLDIVAPGVNVQSTYPGSTYASLNGTSMATPHVAGAAALVKQKNPSWSNVQIRNHLKNTATSLGSTNLYGSGLVNAEAATR

SEQ ID NO: 55531 - protein, 269 aa, Unidentified
AQSVPWGISRVQAPAAHNRGLTGSGVKVAVLDTGISTHPDLNIRGGASFVPGEPSTQDGEGHGTHVAGTIAALNNSIGVLGVAPSAELYAVKVLGASGSGSVSSIAQGLEWAGNNRMHVANLSLGIPSPSATLEQAVNSATSRGVLVVAASGNSGAGSISYPARYANAMAVGATDQNNNRADFSQYGAGLDIVAPGVNVQSTYPGSTYASLNGTSMATPHVAGAAALVKQKNPSWSNVQIRNHLKNTATSLGSTNLYGSGLVNAEAATR

SEQ ID NO: 55532 - protein, 269 aa, Unidentified
AQSVPWGISRVQAPAAHNRGLTGFGVKVAVLDTGISTHPDLWIRGGASFVPGEPSTQDGNGHGTHVAGTIAALNNSIGVLGVAPSAELYAVKVLGASGSGSVSSIAQGLEWAGNNRMHVANLSLGSPSPSATLEQAVNSATSRGVLVVAASGNSGAGSISYPARYANAMAVGATDQNNNRADFSQYGAGLDIVAPGVNVQSTYPGSTYASLNGTSMATPHVAGAAALVKQKNPSWSNVQIRNHLKNTATSLGSTNLYGSGLVNAEAATR

SEQ ID NO: 55533 - protein, 269 aa, Bacillus sp.
AQSVPWGISRVQAPAAHNRGLTGSGVKVAVLDTGISTHPDLNIRGGASFVPGEPSTQDGNGHGTHVAGTIAALNNSIGVLGVAPNAELYAVKVLGASGSGSVSSIAQGLEWAGNNVMHVANLSLGFQSPSATLEQAVNSATSRGVLVVAASGNSGAGSISYPARYANAMAVGATDQNNNRASFSQYGAGLDIVAPGVNVQSTYPGSTYASLNGTSMATPHVAGAAALVKQKNPSWSNVQIRNHLKNTATSLGSTNLYGSGLVNAEAATR

SEQ ID NO: 55534 - protein, 269 aa, Unidentified
AQSVPWGISRVQAPAAHNRGLTGSGVKVAVLDTGISTHPDLNIRGGASFVPGEPSTQDGEGHGTHVAGTIAALNNGIGVLGVAPSAELYAVKVLGASGSGSVSSIAQGLEWAGNNDMHVANLSLGSPSPSATLEQAVNSATSRGVLVVAASGNSGAGSISYPARYANAMAVGATDQNNNRADFSQYGAGLDIVAPGVNVQSTYPGSTYASLNGTSMATPHVAGAAALVKQKNPSWSNVQIRNHLKNTATSLGSTNLYGSGLVNAEAATR

SEQ ID NO: 55535 - protein, 269 aa, Unidentified
AQSVPWGISRVQAPAAHNRKLLGSGVKVAVLDTGISTHPDLNIRGGASFVPGEPSTQDGNGHGTHVAGTIAALNNNIGVLGVAPSAELYAVKVLGASGSGSVSSIAQGLEWAGNNGMHVANLSLGSPSPSATLEQAVNSATSRGVLVVAASGNSGAGSISYPARYANAMAVGATDQNNNRASFSQYGAGLDIVAPGVNVQSTYPGSTYASENGTSMATPHVAGAAALVKQKNPSWSNVQIRNHLKNTATSLGSTNLYGSGLVNAEAATR

SEQ ID NO: 55536 - protein, 269 aa, Unidentified
AQSVPWGISRVQAPAAHNRGLTGRGVKVAVLDTGISTHPDLNIRGGASFVPGEPSTQDGNGHGTHVAGTIAALNNSIGVLGVAPSAELYAVKVLGASGAGSVSSIAQGLEWAGNNGMHVANLSLGSPSPSATLEQAVNSATSRGVLVVAASGNSGAGSISYPARYANAMAVGATDQNNNRASFSQYGAGLDIVAPGVNVQSTYIGSAYASLNGTSMATPHVAGAAALVKQKNPSWSNVQIRNHLKNTATSLGSTNLYGSGLVNAEAATR

SEQ ID NO: 55537 - protein, 269 aa, Unidentified
AQSVPWGISRVQAPAAHNRGLTGSGVKVAVLDTGISTHPDLNIRGGASFVPGEPSTQDGNGHGTHVAGTIAALNNSIGVLGVAPSAELYAVKVLGASGSGSVSSIAQGLEWAGNNGMHVANLSLGMAGPSATLEQAVNSATSRGVLVVAASGNSGAGSIDYPARYANAMAVGATDQNNNRASFSQYGAGLDIVAPGVNVQSTYPGSTYASLNGTSMATPHVAGAAALVKQKNPSWSNVQIRNHLKNTATSLGSTNLYGSGLVNAEAATR

SEQ ID NO: 55538 - protein, 269 aa, Unidentified
AQSVPWGISRVQAPAAHNRGLTGSGVKVAVLDTGISTHPDLNIRGGASFVPGEPSTQDGNGHGTHVAGTIAALNNSIGVLGVAPNAELYAVKVLGASGSGSVSSIAQGLEWAGNNVMHVANLSLGLQAPSATLEQAVNSATSRGVLVVAASGNSGAGSISYPARYANAMAVGATDQNNNRASFSQYGAGLDIVAPGVNVQSTYPGSTYASLNGTSSATPHVAGAAALVKQKNPSWSNVQIRNHLKNTATSLGSTNLYGSGLVNAEAATR

SEQ ID NO: 55539 - protein, 269 aa, Unidentified
AQSVPWGISRVQAPAAHNRGLTGRGVKVAVLDTGISTHPDLNIRGGASFVPGEPSTQDGNGHGTHVAGTIAALNNSIGVLGVAPSAELYAVKVLGASGSGSVSSIAQGLEWAGNNRMHVANLSLGSPSPSATLEQAVNSATSRGVLVVAASGNSGADSISYPARYANAMAVGATDQNNNRADFSQYGAGLDIVAPGVNVQSTYPGSTYASLNGTSMATPHVAGAAALVKQKNPSWSNVQIRNHLKNTATSLGSTNLYGSGLVNAEAATR

SEQ ID NO: 55540 - protein, 269 aa, Unidentified
AQSVPWGISRVQAPAAHNRGLAGRGVKVAVLDSGISTHPDLNIRGGASFVPGEPSTQDGNGHGTHVAGTIAALNNSIGVLGVAPSAELYAVKVLGASGSGSVSSIAQGLEWAGLNGMHVANLSLGSPSPSATLEQAVNSATSRGVLVVAASGNSGAGSISYPARYANAMAVGATDQNNNRASFSQYGAGLDIVAPGVNVQSTYPGSTYASLNGTSMATPHVAGAAALVKQKNPSWSNVQIRNHLKNTATSLGSTNLYGSGLVNAEAATR

SEQ ID NO: 55541 - protein, 269 aa, Unidentified
AQSVPWGISRVQAPAAHNRGLTGSGVKVAVLDTGISTHPDLNIRGGASFVPGEPSTQDGEGHGTHVAGTIAALNNGIGVLGVAPSAELYAVKVLGASGSGSVSSIAQGLEWAGNNDMHVANLSLGSPSPSATLEQAVNSATSRGVLVVAASGNSGADSISYPARYANAMAVGATDQNNNRASFSQYGAGLDIVAPGVNVQSTYPGSTYASLNGTSMATPHVAGAAALVKQKNPSWSNVQIRNHLKNTATSLGSTNLYGSGLVNAEAATR

SEQ ID NO: 55542 - protein, 269 aa, Unidentified
AQSVPWGISRVQAPAAHNRGLTGSGVKVAVLDTGISTHPDLNIRGGASFVPGEPSTQDGNGHGTHVAGTIAALNNGIGVLGVAPSAELYAVKVLGASGSGSVSSIAQGLEWAGNNDMHVANLSLGSESPSATLEQAVNSATSRGVLVVAASGNSGAGSISYPARYANAMAVGATDQNNNRADFSQYGAGLDIVAPGVNVQSTYPGSTYASLNGTSMATPHVAGAAALVKQKNPSWSNVQIRNHLKNTATSLGSTNLYGSGLVNAEAATR

SEQ ID NO: 55543 - protein, 269 aa, Unidentified
AQSVPWGISRVQAPAAHNRGLTGSGVKVAVLDTGISTHPDLNIRGGASFVPGEPSTQDGNGHGTHVAGTIAALNNSIGVLGVAPSAELYAVKVLGASGSANVTSIAQGLEWAGNNGMHVANLSLGSPSPSATLEQAVNSATSRGVLVVAASGNSGAGSISYPARYANAMAVGATDQNNNRASFSQYGEGLDIVAPGVNVQSTYPGSTYASLNGTSMATPHVAGAAALVKQKNPSWSNVQIRNHLKNTATSLGSTNLYGSGLVNAEAATR

SEQ ID NO: 55544 - protein, 269 aa, Unidentified
AQSVPWGISRVQAPAAHNRGLTGSGVKVAVLDTGISTHPDLNIRGGASFVPGEPSTQDGNGHGTHVAGTIAALNNSIGVLGVAPSAELYAVKVLGASGAGSVSSIAQGLEWAGLNGMHVANLSLGSPSPSATLEQAVNSATSRGVLVVAASGNSGAGSISYPARYANAMAVGATDQNNNRASFSQYGAGLDIVAPGVNVQSTYIGSAYASLNGTSMATPHVAGAAALVKQKNPSWSNVQIRNHLKNTATSLGSTNLYGSGLVNAEAATR

SEQ ID NO: 55545 - protein, 269 aa, Unidentified
AQSVPWGISRVQAPAAHNRGLTGSGVKVAVLDSGISTHPDLNIRGGASFVPGEPSTQDGEGHGTHVAGTIAALNNSIGVLGVAPSAELYAVKVLGASGSGSVSSIAQGLEWAGLNGMHVANLSLGSPSPSATLEQAVNSATSRGVLVVAASGNSGEGSISYPARYANAMAVGATDQNNNRASFSQYGAGLDIVAPGVNVQSTYPGSTYASLNGTSMATPHVAGAAALVKQKNPSWSNVQIRNHLKNTATSLGSTNLYGSGLVNAEAATR

SEQ ID NO: 55546 - protein, 269 aa, Unidentified
AQSVPWGISRVQAPAAHRRGLTGSGVKVAVLDTGISTHPDLNIRGGASFVPGEPSTQDGNGHGTHVAGTIAALDNSIGVLGVAPSAELYAVKVLGASGGGAVSSIAQGLEWAGNNGMHVANLSLGSPSPSATLEQAVNSATSRGVLVVAASGNSGAGSISYPARYANAMAVGATDQNNNRASFSQYGAGLDIVAPGVNVQSTYPGSTYASLNGTSMATPHVAGAAALVKQKNPSWSNVQIRNHLKNTATSLGSTNLYGSGLVNAEAATR

SEQ ID NO: 55547 - protein, 269 aa, Unidentified
AQSVPWGISRVQAPAAHNRRLTGSGVKVAVLDTGISTHPDLNIRGGASFVPGEPSTQDGNGHGTHVAGTIAALNNGIGVLGVAPSAELYAVKVLGASGSGSVSSIAQGLEWAGNNSMHVANLSLGSPSPSATLEQAVNSATSRGVLVVAASGNSGAGSISYPARYANAMAVGATDQNNNRASFSQYGAGLDIVAPGVNVQSTYPGSTYASLNGTSMATPHVAGAAALVKQKNPSWSNVQIRNRLKNTATSLGSTNLYGSGLVNAEAATR

SEQ ID NO: 55548 - protein, 269 aa, Unidentified
AQSVPWGISRVQAPAAHNRGLTGFGVKVAVLDTGISTHPDLNIRGGASFVPGEPSTQDGNGHGTHVAGTIAALNNSIGVLGVAPSAELYAVKVLGASGSGSVSSIAQGLEWAGNNRMHVANLSLGDPSPSATLEQAVNSATSRGVLVVAASGNSGAGSISYPARYANAMAVGATDQNNNRASFSQYGAGLDIVAPGVNVQSTYPGSAYASLNGTSMATPHVAGAAALVKQKNPSWSNVQIRNHLKNTATSLGSTNLYGSGLVNAEAATR

SEQ ID NO: 55549 - protein, 269 aa, Unidentified
AQSVPWGISRVQAPAAHNRGLTGSGVKVAVLDTGISTHPDLNIRGGASFVPGEPSTQDGNGHGTHVAGTIAALNNSIGVLGVAPSAELYAVKVLGQTGSAAVSSIAQGLEWAGNNGMHVANLSLGSPSPSATLEQAVNSATSRGVLVVAASGNSGAGSISYPARYANAMAVGATDQNNNRASFSQYGAGLDIVAPGVNVQSTYPGSTYASLNGTSMATPHVAGAAALVKQKNPSWSNVQIRNHLKNTATSLGSTNLYGSGLVNAEAATR

SEQ ID NO: 55550 - protein, 269 aa, Synthetic construct
AQSVPWGISRVQAPAAHNRGLTGSGVKVAVLDTGISTHPDLNIRGGASFVPGEPSTQDQDPHPTHVAGTIAALNNSIGVLGVAPSAELYAVKVLGASGSGSVSSIAQGLEWAGNNGMHVANLSLGSPSPSATLEQAVNSATSRGVLVVAASGNSGAGSISYPARYANAMAVGATDQNNNRASFSQYGAGLDIVAPGVNVQSTYPGSTYASLNGTSMATPHVAGAAALVKQKNPSWSNVQIRNHLKNTATSLGSTNLYGSGLVNAEAATR

SEQ ID NO: 55551 - protein, 269 aa, Alkalihalobacillus clausii
AQSVPWGISRIQAPAAHNRGLTGSGVKVAVLDTGISTHPDLNIRGGASFVPGEPSTQDGNGHGTHVAGTIAALNNSIGVLGVAPSAELYAVKVLVASGSGSVSSIAQGLEWAGNNGMHVANLSLGSPSPSATLEQAVNSATSRGLLVVAASGNSGAGSISYPARYANAMAVGATDQNNNRASFSQYGAGLDIVAPGVNVQSTYPGSTYASLSGTSMATPHVAGAAALVKQKNPSWSNVQIRNHLKNTATSLGSTNLYGSGLVNAEAATR

SEQ ID NO: 55552 - protein, 269 aa, Unidentified
AQSVPWGISRVQAPAAHNRGLTGSGVKVAVLDTGISTHPDLNIRGGASFVPGEPSTQDGNGHGTHVAGTIAALNNSIGVLGVAPSAELYAVKVLGASGAGSVSSIAQGLEWAGNNGMHVANLSLGNPSPSATLEQAVNSATSRGVLVVAASGNSGEGSISYPARYANAMAVGATDQNNNRASFSQYGAGLDIVAPGVNVQSTEPGSTYASLNGTSMATPHVAGAAALVKQKNPSWSNVQIRNHLKNTATSLGSTNLYGSGLVNAEAATR

SEQ ID NO: 55553 - protein, 269 aa, Unidentified
AQSVPWGISRVQAPAAHNRGLTGSGVKVAVLDTGISTHPDLNIRGGASFVPGEPSTQDGNGHGTHVAGTIAALNNSIGVLGVAPSAELYAVKVLPQSGAASVSSIAQGLEWAGNNGMHVANLSLGSPSPSATLEQAVNSATSRGVLVVAASGNSGAGSISYPARYANAMAVGATDQNNNRASFSQYGAGLDIVAPGVNVQSTYPGSTYASLNGTSMATPHVAGAAALVKQKNPSWSNVQIRNHLKNTATSLGSTNLYGSGLVNAEAATR

SEQ ID NO: 55554 - protein, 269 aa, Unidentified
AQSVPWGISRVQAPAAHNRRLTGSGVKVAVLDTGISTHPDLNIRGGASFVPGEPSTQDGNGHGTHVAGTIAALNNSIGVLGVAPSAELYAVKVLGASGSGSVSSIAQGLEWAGANGMHVANLSLGSPSPSATLEQAVNSATSRGVLVVAASGNSGAGSISYPARYANAMAVGATDQNNNRASFSQYGAGLDIVAPGVNVQSTYPGSTYFSLNGTSMATPHVAGAAALVKQKNPSWSNVQIRNHLKNTATSLGSTNLYGSGLVRAEAATR

SEQ ID NO: 55555 - protein, 269 aa, Unidentified
AQSVPWGISRVQAPAAHNRGLLGSGVKVAVLDTGISTHPDLNIRGGASFVPGEPSTQDGNGHGTHVAGTIAALNNSIGVLGVAPSAELYAVKVLGASGSGSVSSIAQGLEWAGNNRMHVANLSLGSPSPSATLEQAVNSATSRGVLVVAASGNSGAGSIDYPARYANAMAVGATDQNNNRASFSQYGAGLDIVAPGVNVQSTYPGSAYASLNGTSMATPHVAGAAALVKQKNPSWSNVQIRNHLKNTATSLGSTNLYGSGLVNAEAATR

SEQ ID NO: 55556 - protein, 269 aa, Unidentified
AQSVPWGISRVQAPAAHNRGLTGRGVKVAVLDTGISTHPDLNIRGGASFVPGEPSTQDGNGHGTHVAGTIAALNNSIGVLGVAPSAELYAVKVLGASGSGSVSSIAQGLEWAGNNRMHVANLSLGIPSPSATLEQAVNSATSRGVLVVAASGNSGAGSISYPARYANAMAVGATDQNNNRADFSQYGAGLDIVAPGVNVQSTYPGSTYASLNGTSMATPHVAGAAALVKQKNPSWSNVQIRNHLKNTATSLGSTNLYGSGLVNAEAATR

SEQ ID NO: 55557 - protein, 269 aa, Unidentified
AQSVPWGISRVQAPAAHRRGLTGRGVKVAVLDTGISTHPDLDIRGGASFVPGEPSTQDGNGHGTHVAGTIAALNNSIGVLGVAPSAELYAVKVLGASGSGSVSSIAQGLEWAGNNGMHVANLSLGSPSPSATLEQAVNSATSRGVLVVAASGNSGAGSISYPARYANAMAVGATDQNNNRASFSQYGAGLDIVAPGVNVQSTYPGSTYASLNGTSMATPHVAGAAALVKQKNPSWRNVQIRNHLKNTATSLGSTNLYGSGLVNAEAATR

SEQ ID NO: 55558 - protein, 269 aa, Unidentified
AQSVPWGISRVQAPAAHNRKLLGSGVKVAVLDTGISTHPDLNIRGGASFVPGEPSTQDGNGHGTHVAGTIAALNNNIGVLGVAPSAELYAVKVLGASGSGSVSSIAQGLEWAGNNGMHVANLSLGSPSPSATLEQAVNSATSRGVLVVAASGNSGAGSIDYPARYANAMAVGATDQNNNRASFSQYGAGLDIVAPGVNVQSTYPGSTYASLNGTSMATPHVAGAAALVKQKNPSWSNVQIRNHLKNTATSLGSTNLYGSGLVNAEAATR

SEQ ID NO: 55559 - protein, 269 aa, Unidentified
AQSVPWGISRVQAPAAHNRGLWGSGVKVAVLDTGISTHPDLNITGGASFVPGEPSTQDGNGHGTHVAGTIAALNNSIGVLGVAPSAELYAVKVLGASGAGSVSSIAQGLEWAGNNGMHVANLSLGSPSPSATLEQAVNSATSRGVLVVAASGNSGAGSISYPARYANAMAVGATDQNNNRASFSQYGAGLDIVAPGVNVQSTYPGSAYASLNGTSMATPHVAGAAALVKQKNPSWSNVQIRNHLKNTATSLGSTNLYGSGLVNAEAATR

SEQ ID NO: 55560 - protein, 269 aa, Unidentified
AQSVPWGISRVQAPAAHNRGLTGSGVKVAVLDTGISTHPDLNIRGGASFVPGEPSTQDGEGHGTHVAGTIAALNNDIGVLGVAPSAELYAVKVLGASGSGSVSSIAQGLEWAGNNDMHVANLSLGSESPSATLEQAVNSATSRGVLVVAASGNSGAGSISYPARYANAMAVGATDQNNNRASFSQYGAGLDIVAPGVNVQSTYPGSTYASLNGTSMATPHVAGAAALVKQKNPSWSNVQIRNHLKNTATSLGSTNLYGSGLVNAEAATR

SEQ ID NO: 55561 - protein, 269 aa, Unidentified
AQSVPWGISRVQAPAAHNRGLTGSGVKVAVLDTGISTHPDLNIRGGASFVPGEPSTQDGNGHGTHVAGTIAALNNSIGVLGVAPSDELYAVKVLSASGQGSVSSIAGGLEWAGNNGMHVANLSLGSPSPSATLEQAVNSATSRGVLVVAASGNSGAGSISYPARYANAMAVGATDQNNNRASFSQYGAGLDIVAPGVNVQSTYPGSTYASLNGTSMATPHVAGAAALVKQKNPSWSNVQIRNHLKNTATSLGSTNLYGSGLVNAEAATR

SEQ ID NO: 55562 - protein, 270 aa, Aspergillus oryzae
AQSVPWGISRVQAPAAHNRGLTGSGVKVAVLDTGISTHPDLNIRGGASFVPGEPSTQDGNGHGTHVAGTIAALNNSIGVLGVAPSAELYAVKVLGASEGSGSVSSIAQGLEWAGNNGMHVANLSLGSPSPSATLEQAVNSATSRGVLVVAASGNSGASSISYPARYANAMAVGATDQNNNRASFSQYGAPLDIVAPGVNVQSTYPSSTYASLNGTSMATPHVAGAAALVKQKNPSWSNVQIRNHLKNTATSLGSNNLYGSGLVNAEAATR

SEQ ID NO: 55563 - protein, 269 aa, Synthetic construct
AQSVPWGISRVQAPAAHNRGLTGSGVKVAVLDTGISTHPDLNIRGGASFVPGEPSTQDGNGHGTHVAGTIAALDNSIGVLGVAPSAELYAVKVLGASGSGAISSIAQGLEWAGNNGMHVANLSVGSPSPSATLEQAVNSATSRGVLVVAASGNSGAGSISYPARYANAMAVGATDQNNNRASFSQYGAGLDIVAPGVNVQSTYPGSTYASLNGTSMATPHVAGAAALVKQKNPSWSNVQIRNHLKNTATSLGSTNLYGSGLVNAEAATR

SEQ ID NO: 55564 - protein, 269 aa, Alkalihalobacillus clausii
AQSVPWGISRIQAPAAHNRGLTGSGVKVAVLDTGISTHPDLNIRGGASFVPGEPSTQDGNGHGTHVAGTIAALNNSIGVLGVAPSAELYAVKVLPASGSGSVSSIAQGLEWAGNNGMHVANLSLGSPSPSATLEQAVNSATSRGILVVAASGNSGAGSISYPARYANAMAVGATDQNNNRASFSQYGAGLDIVAPGVNVQSTYPGSTYASLTGTSMATPHVAGAAALVKQKNPSWSNVQIRNHLKNTATSLGSTNLYGSGLVNAEAATR

SEQ ID NO: 55565 - protein, 269 aa, Unidentified
AQSVPWGISRVQAPAAHNRGLTGSGVKVAVLDTGISTHPDLNIRGGASFVPGEPSTQDGNGHGTHVAGTIAALNNSIGVLGVAPSAELYAVKVLPAASAGSVSSIAQGLEWAGNNGMHVANLSLGSPSPSATLEQAVNSATSRGVLVVAASGNSGAGSISYPARYANAMAVGATDQNNNRASFSQYGAGLDIVAPGVNVQSTYPGSTYASLNGTSMATPHVAGAAALVKQKNPSWSNVQIRNHLKNTATSLGSTNLYGSGLVNAEAATR

SEQ ID NO: 55566 - protein, 269 aa, Unidentified
AQSVPWGISRVQAPAAHNRRLTGSGVKVAVLDTGISTHPDLNITGGASFVPGEPSTQDGNGHGTHVAGTIAALNNSIGVLGVAPSAELYAVKVLGASGAGSVSSIAQGLEWAGNNGMHVANLSLGSPSPSATLEQAVNSATSRGVLVVAASGNSGAGSISYPARYANAMAVGATDQNNNRASFSQYGAGLDIVAPGVNVQSTYIGSTYASLNGTSMATPHVAGAAALVKQKNPSWSNVQIRNHLKNTATSLGSTNLYGSGLVNAEAATR

SEQ ID NO: 55567 - protein, 269 aa, Unidentified
AQSVPWGISRVQAPAAHRRGLTGSGVKVAVLDTGISTHPDLRITGGASFVPGEPSTQDGNGHGTHVAGTIAALNNSIGVLGVAPSAELYAVKVLGASGSGSVSSIAQGLEWAGNNGMHVANLSLGSPSPSATLEQAVNSATSRGVLVVAASGNSGAGSISYPARYANAMAVGATDQNNNRASFSQYGAGLDIVAPGVNVQSTYPGSTYASLNGTSMATPHVAGAAALVKQKNPSWSNVQIRNRLKNTATSLGSTNLYGSGLVNAEAATR

SEQ ID NO: 55568 - protein, 269 aa, Unidentified
AQSVPWGISRVQAPAAHNRKLTGSGVKVAVLDTGISTHPDLNIRGGASFVPGEPSTQDGEGHGTHVAGTIAALNNSIGVLGVAPSAELYAVKVLGASGSGSVSSIAQGLEWAGNNGMHVAGLSLGSPSPSATLEQAVNSATSRGVLVVAASGNSGAGSISYPARYANAMAVGATDQNNNRASFSQYGAGLDIVAPGVNVQSTYPGSAYASLNGTSMATPHVAGAAALVKQKNPSWSNVQIRNHLKNTATSLGSTNLYGSGLVNAEAATR

SEQ ID NO: 55569 - protein, 269 aa, Unidentified
AQSVPWGISRVQAPAAHNRGLTGSGVKVAVLDTGISTHPDLDITGGASFVPGEPSTQDGNGHGTHVAGTIAALDNSIGVLGVAPSAELYAVKVLGASGSGSVSSIAQGLEWAGNNGMHVANLSLGSPSPSATLEQAVNSATSRGVLVVAASGNSGAGSISYPARYANAMAVGATDQNNNRASFSQYGAGLDIVAPGVNVQSTYPGSTYASLNGTSMATPHVAGAAALVKQKNPSWSNVQIRNRLKNTATSLGSTNLYGSGLVNAEAATR

SEQ ID NO: 55570 - protein, 269 aa, Unidentified
AQSVPWGISRVQAPAAHNRGLTGSGVKVAVLDTGISTHPDLNIRGGASFVPGEPSTQDGNGHGTHVAGTIAALDNSIGVLGVAPSAELYAVKVLGASGSGAISSIAQGLEWAGNNGMHVANLSLGSPSPSATLEQAVNSATSRGVLVVAASGNSGAGSISYPARYANAMAVGATDQNNNRASFSQYGAGLDIVAPGVNVQSTYPGSTYASLNGTSMATPHVAGAAALVKQKNPSWSNVQIRNHLKNTATSLGSTDLYGSGLVNAEAATR

SEQ ID NO: 55571 - protein, 269 aa, Unidentified
AQSVPWGISRVQAPAAHNRGLTGSGVKVAVLDTGISTHPDLNIRGGASFVPGEPSTQDGNGHGTHVAGTIAALDNSIGVLGVAPSAELYAVKVLGASGSGAISSIAQGLEWAGNNGMHVANLSLGSPSPSATLEQAVNSATSRGVLVVAASGNSGAGSISYPARYANAMAVGATDQNNNRASFSQYGAGLDIVAPGVNVESTYPGSTYASLNGTSMATPHVAGAAALVKQKNPSWSNVQIRNHLKNTATSLGSTNLYGSGLVNAEAATR

SEQ ID NO: 55572 - protein, 269 aa, Alkalihalobacillus clausii
AQSVPWGISRIQAPAAHNRGLTGSGVKVAVLDTGISTHPDLNIRGGASFVPGEPSTQDGNGHGTHVAGTIAALNNSIGVLGVAPSAELYAVKVLVASGSGSVSSIAQGLEWAGNNGMHVANLSLGSPSPSATLEQAVNSATSRGILVVAASGNSGAGSISYPARYANAMAVGATDQNNNRASFSQYGAGLDIVAPGVNVQSTYPGSTYASLTGTSMATPHVAGAAALVKQKNPSWSNVQIRNHLKNTATSLGSTNLYGSGLVNAEAATR

SEQ ID NO: 55573 - protein, 269 aa, Unidentified
AQSVPWGISRVQAPAAHNRGLAGRGVKVAVLDTGISTHPDLNIRGGASFVPGEPSTQDGEGHGTHVAGTIAALNNSIGVLGVAPSAELYAVKVLGASGSGSVSSIAQGLEWAGNNGMHVANLSLGIPSPSATLEQAVNSATSRGVLVVAASGNSGAGSISYPARYANAMAVGATDQNNNRASFSQYGAGLDIVAPGVNVQSTYPGSTYASLNGTSMATPHVAGAAALVKQKNPSWSNVQIRNHLKNTATSLGSTNLYGSGLVNAEAATR

SEQ ID NO: 55574 - protein, 269 aa, Alkalihalobacillus clausii
AQSVPWGISRIQAPAAHNRGLTGSGVKVAVLDTGISTHPDLNIRGGASFVPGEPSTQDGNGHGTHVAGTIAALNNSIGVLGVAPSAELYAVKVLPASGSGSVSSIAQGLEWAGNNGMHVANLSLGSPSPSATLEQAVNSATSRGILVVAASGNSGAGSISYPARYANAMAVGATDQNNNRASFSQYGAGLDIVAPGVNVQSTYPGSTYASLSGTSMATPHVAGAAALVKQKNPSWSNVQIRNHLKNTATSLGSTNLYGSGLVNAEAATR

SEQ ID NO: 55575 - protein, 269 aa, Unidentified
AQSVPWGISRVQAPAAHNRGLTGRGVKVAVLDTGISTHPDLNIRGGASFVPGEPSTQDGNGHGTHVAGTIAALNNSIGVLGVAWSAELYAVKVLGASGSGSVSSIAQGLEWAGNNGMHVANLSLGSPSPSATLEQAVNSATSRGVLVVAASGNSGAGSISYPARYANAMAVGATDQNNNRASFSQYGAGLDIVAPGVNVQSTAPGSTYASLNGTSMATPHVAGAAALVFQKNPSWSNVQIRNHLKNTATSLGSTNLYGSGLVNAEAATR

SEQ ID NO: 55576 - protein, 269 aa, Bacillus lentus
AQSVPWGISRVQAPAAHNRGLTGSGVKVAVLDTGISTHPDLNIRGGASFVPGEPSTQDGNGHGTHVAGTIAALNNSIGVLGVAPSAELYAVKVLGASGSGSVSSIAQGLEWAGNNGMHVANLSLGSPSPSATLEQAVNSATSRGVLVVAASGNSGAGSISAPASYANAMAVGATDQNNNRASFSQYGPGLDIVAPGVNVQSTYPGSTYASLNGTSMATPHVAGAAALVKQKNPSWSNVQIRNHLRNTATSLGSTNLYGSGLVNAEAATR

SEQ ID NO: 55577 - protein, 269 aa, Unidentified
AQSVPWGISRVQAPAAHNRKLTGSGVKVAVLDTGISTHPDLNIRGGASFVPGEPSTQDGNGHGTHVAGTIAALNNNIGVLGVAPSAELYAVKVLGASGSGSVSSIAQGLEWAGNNGMHVANLSLGLPSPSATLEQAVNSATSRGVLVVAASGNSGAGSISYPARYANAMAVGATDQNNNRASFSQYGAGLDIVAPGVNVQSTYPGSTYASENGTSMATPHVAGAAALVKQKNPSWSNVQIRNHLKNTATSLGSTNLYGSGLVNAEAATR

SEQ ID NO: 55578 - protein, 269 aa, Unidentified
AQSVPWGISRVQAPASHNRGLTGSGVKVAVLDTGISTHPDLNIRGGASFVPGEPSTQDGNGHGTHVAGTIAALNNSIGVLGVAPSAELYAVKVLGASGSGGVSSIAQGLEWAGNNGMHVANLSLGNPSPSATLEQAVNSATSRGVIVVAASGNSGAGSISYPARYANAMAVGATDQNNNRASFSQYGAGLDIVAPGVNVQSTYPGSTYASLNGTSMATPHVAGAAALVKQKNPSWSNVQIRNHLKNTATSLGSTNLYGSGLVNAEAATR

SEQ ID NO: 55579 - protein, 269 aa, Bacillus sp
AQSVPWGISRVQAPAAHNRGLTGSGVKVAVLDTGISTHPDLNIRGGASFVPGEPSTQDGNGHGTHVAGTIAALNNSIGVLGVAPNAELYAVKVLGASGSGSVSSIAQGLEWAGNNGMHVANLSLGMASPSATLEQAVNSATSRGVLVVAASGNSGAGSIDYPARYANAMAVGATDQNNNRASFSQYGAGLDIVAPGVNVQSTYPGSTYASLNGTSMATPHVAGAAALVKQKNPSWSNVQIRNHLKNTATSLGSTNLYGSGLVNAEAATR

SEQ ID NO: 55580 - protein, 269 aa, Unidentified
AQSVPWGISRVQAPAAHNRGLTGRGVKVAVLDTGISTHPDLNIRGGASFVPGEPSTQDGEGHGTHVAGTIAALNNSIGVLGVAPSAELYAVKVLGASGSGSVSSIAQGLEWAGNNGMHVANLSLGSPSPSATLEQAVNSATSRGVLVVAASGNSGEGSISYPARYANAMAVGATDQNNNRADFSQYGAGLDIVAPGVNVQSTYPGSTYASLNGTSMATPHVAGAAALVKQKNPSWSNVQIRNHLKNTATSLGSTNLYGSGLVNAEAATR

SEQ ID NO: 55581 - protein, 269 aa, Unidentified
AQSVPWGISRVQAPAAHNRGLTGSGVKVAVLDTGISTHPDLNIRGGASFVPGEPSTQDGNGHGTHVAGTIAALNNSIGVLGVAPNAELYAVKVLGASGSGSNSSIAQGLEWAGNNGMHVANLSLGSPSPSATLEQAVNSATSRGVLVVAASGNSGAGSISYPARYANAMAVGATDQNNNRASFSQYGAGLDIVAPGVGVQSTWPGSTYASLNGTSMATPHVAGAAALVKQKNPSWSNVQIRNHLKNTATSLGSTNLYGSGLVNAEAATR

SEQ ID NO: 55582 - protein, 269 aa, Unidentified
AQSVPWGISRVQAPAAHNRGLTGSGVKVAVLDTGISTHPDLNIRGGASFVPGEPSTQDGNGHGTHVAGTIAALNNSIGVLGVAPSAELYAVKVLPQSGAGSISSIAQGLEWAGNNGMHVANLSLGSPSPSATLEQAVNSATSRGVLVVAASGNSGAGSISYPARYANAMAVGATDQNNNRASFSQYGAGLDIVAPGVNVQSTYPGSTYASLNGTSMATPHVAGAAALVKQKNPSWSNVQIRNHLKNTATSLGSTNLYGSGLVNAEAATR

SEQ ID NO: 55583 - protein, 269 aa, Unidentified
AQSVPWGISRVQAPAAHNRGLTGSGVKVAVLDTGISTHPDLNIRGGASFVPGEPSTQDGNGHGTHVAGTIAALNNSIGVLGVAPSAELYAVKVLSASGQGSVSSIANGLEWAGNNGMHVANLSLGSPSPSATLEQAVNSATSRGVLVVAASGNSGAGSISYPARYANAMAVGATDQNNNRADFSQYGAGLDIVAPGVNVQSTYPGSTYASLNGTSMATPHVAGAAALVKQKNPSWSNVQIRNHLKNTATSLGSTNLYGSGLVNAEAATR

SEQ ID NO: 55584 - protein, 269 aa, Synthetic construct
AQSVPWGISRVQAPAAHNRGLTGSGVKVAVLDTGISTHPDLNIRGGASFVPGEPSTQDGNGHGTHVAGTIAALNNSIGVLGVAPSAELYAVKVLGASGSGSVSSIAQGLEWAGNNGMHVANLSLGSPSPSATLEQAVNSATSRGVLVVAASGNSGPGSPETPARYANAMAVGATDQNNNRASFSQYGAGLDIVAPGVNVQSTYPGSTYASLNGTSMATPHVAGAAALVKQKNPSWSNVQIRNHLKNTATSLGSTNLYGSGLVNAEAATR

SEQ ID NO: 55585 - protein, 269 aa, Unidentified
AQSVPWGISRVQAPAAHNRGLRGRGVKVAVLDTGISTHPDLNIRGGASFVPGEPSTQDGNGHGTHVAGTIAALNNRIGVLGVAPSAELYAVKVLGASGSGSVSSIAQGLEWAGNNGMHVANLSLGSPSPSATLEQAVNSATSRGVLVVAASGNSGAGSISYPARYANAMAVGATDQNNNRASFSQYGAGLDIVAPGVNVQSTYPGFTYASLNGTSMATPHVAGAAALVKQKNPSWSNVQIRNHLKNTATSLGSTNLYGSGLVNAEAATR

SEQ ID NO: 55586 - protein, 269 aa, Unidentified
AQSVPWGISRVQAPAAHNRGLTGSGVKVAVLDTGISTHPDLNIRGGASFVPGEPSTQDGNGHGTHVAGTIAALNNSIGVLGVAPSAELYAVKVLGASGSGSVSSIAQGLEWAGLNGMHVANLSLGSPSPSATLEQAVNSATSRGVLVVAASGNSGEGSIDYPARYANAMAVGATDQNNNRADFSQYGAGLDIVAPGVNVQSTYPGSTYASLNGTSMATPHVAGAAALVKQKNPSWSNVQIRNHLKNTATSLGSTNLYGSGLVNAEAATR

SEQ ID NO: 55587 - protein, 269 aa, Unidentified
AQSVPWGISRVQAPAAHNRGLTGSGVKVAVLDTGISTHPDLNIRGGASFVPGEPSTQDGNGHGTHVAGTIAALNNSIGVLGVAPSAELYAVKVLGASGSGSVSSIAQGLEWAGNNRMHVANLSLGIPSPSATLEQAVNSATSRGVLVVAASGNSGAGSIDYPARYANAMAVGATDQNNNRADFSQYGAGLDIVAPGVNVQSTYPGSTYASLNGTSMATPHVAGAAALVKQKNPSWSNVQIRNHLKNTATSLGSTNLYGSGLVNAEAATR

SEQ ID NO: 55588 - protein, 269 aa, Unidentified
AQSVPWGISRVQAPAAHNRGLTGSGVKVAVLDTGISTHPDLNIRGGASFVPGEPSTQDGNGHGTHVAGTIAALNNSIGVLGVAPSAELYAVKVLGASGSGSVSSIAQGLEWAGNNGMHVANLSLGQPSPSATLEQAVNSATSRGVLVVAASGNSGAGSISYPARYANAMAVGATDQNNNRASFSQYGAGLDIVAPGVNVQSTYPGSTYASENGTSMATPHVAGAAALVKQKNPRWSNVQIRNHLKNTATSLGSTNLYGSGLVNALAATR

SEQ ID NO: 55589 - protein, 269 aa, Bacillus lentus
AQSVPWGISRVQAPAAHNRGLTGSGVKVAVLDTGISTHPDLNIRGGASFVPGEPSTQDGNGHGTHVAGTIAALNNSIGVLGVAPDAELYAVKVLGASGSGSVSSIADGLEWAGNNGMHVANLSLGSPSPSATLEQAVNSATSRGVLVVAASGNSGAGSISYPARYANAMAVGATDQNNNRADFSQYGAGLDIVAPGVNVQSTYPGSTYASLNGTSMATPHVAGAAALVKQKNPSWSNVQIRRHLKNTATSLGSTNLYGSGLVNAEAATR

SEQ ID NO: 55590 - protein, 269 aa, Unidentified
AQSVPWGISRVQAPAAHNRRLTGRGVKVAVLDTGISTHPDLNIRGGASFVPGEPSTQDGNGHGTHVAGTIAALNNSIGVLGVAPSAELYAVKVLGASGSGSVSSIAQGLEWAGNNGMHVANLSLGSESPSATLEQAVNSATSRGVLVVAASGNSGADSISYPARYANAMAVGATDQNNNRASFSQYGAGLDIVAPGVNVQSTYPGSTYASLNGTSMATPHVAGAAALVKQKNPSWSNVQIRNHLKNTATSLGSTNLYGSGLVNAEAATR

SEQ ID NO: 55591 - protein, 269 aa, Unidentified
AQSVPWGISRVQAPAAHNRGLTGSGVKVAVLDTGISTHPDLRITGGASFVPGEPSTQDGNGHGTHVAGTIAALNNSIGVLGVAPSAELYAVKVLGASGAGSVSSIAQGLEWAGNNGMHVANLSLGSPSPSATLEQAVNSATSRGVLVVAASGNSGAGSISYPARYANAMAVGATDQNNNRASFSQYGAGLDIVAPGVNVQSTYPQSTYASLNGTSMATPHVAGAAALVKQKNPSWSNVQIRNHLKNTATSLGSTNLYGSGLVNAEAATR

SEQ ID NO: 55592 - protein, 269 aa, Unidentified
AQSVPWGISRVQAPAAHNRGLTGRGVKVAVLDTGISTHPDLNIRGGASFVPGEPSTQDGNGHGTHVAGTIAALNNSIGVLGVAPSAELYAVKVLGASGSGSVSSIAQGLEWAGNNGMHVANLSLGSPSPSATLEQAVNSATSRGVLVVAASGNSGAGSISWPARYANAMAVGATDQNNNRASFSQYGAGLDIVAPGVNVQSTYPGSTYASLNGTSMAAPHVAGAAALVKQKNPSWSNVQIRNRLKNTATSLGSTNLYGSGLVNAEAATR

SEQ ID NO: 55593 - protein, 268 aa, Unidentified
AQSVPWGISRVQAPAAHNRGLTGRGVKVAVLDTGISTHPDLNIRGGASFVPGEPSTQDGNGHGTHVAGTIAALNNSIGVLGVAPSAELYAVKVLGASGSGSVSSIAQGLEWAGLNGMHVANLSLGPSPSATLEQAVNSATSRGVLVVAASGNSGEGSIDYPARYANAMAVGATDQNNNRASFSQYGAGLDIVAPGVNVQSTYPGSTYASLNGTSMATPHVAGAAALVKQKNPSWSNVQIRNHLKNTATSLGSTNLYGSGLVNAEAATR

SEQ ID NO: 55594 - protein, 268 aa, Unidentified
AQSVPWGISRVQAPAAHNRGLTGSGVKVAVLDTGISTHPDLNIRGGASFVPGEPSTQDGNGHGTHVAGTIAALNNSIGVLGVAPSAELYAVKVLGQTAGSVSSIAQGLEWAGNNGMHVANLSLGSPSPSATLEQAVNSATSRGVLVVVASGNSGAGSISYPARYANAMAVGATDQNNNRASFSQYGAGLDIVAPGVNVQSTYPGSTYASLNGTSMATPHVAGAAALVKQKNPSWSNVQIRNHLKNTATSLGSTNLYGSGLVNAEAATR

SEQ ID NO: 55595 - protein, 268 aa, Unidentified
AQSVPWGISRVQAPAAHNRGLTGRGVKVAVLDGISTHPDLNIRGGASFVPGEPSTQDGNGHGTHVAGTIAALNNSIGVLGVAPSAELYAVKVLGASGSGSVSSIAQGLEWAGNNGMHVANLSLGIPSPSATLEQAVNSATSRGVLVVAASGNSGEGSISYPARYANAMAVGATDQNNNRADFSQYGAGLDIVAPGVNVQSTYPGSTYASLNGTSMATPHVAGAAALVKQKNPSWSNVQIRNHLKNTATSLGSTNLYGSGLVNAEAATR

SEQ ID NO: 55596 - protein, 268 aa, Unidentified
AQSVPWGISRVQAPAAHNRGLTGRGVKVAVLDTGISTHPDLNIRGGASFVPGEPSTQDGEGHGTHVAGTIAALNNGIGVLGVAPSAELYAVKVLGASGSGSVSSIAQGLEWAGNNMHVANLSLGSPSPSATLEQAVNSATSRGVLVVAASGNSGAGSISYPARYANAMAVGATDQNNNRASFSQYGAGLDIVAPGVNVQSTYPGSTYASLNGTSMATPHVAGAAALVKQKNPSWSNVQIRNRLKNTATSLGSTNLYGSGLVNAEAATR

SEQ ID NO: 55597 - protein, 268 aa, Unidentified
AQSVPWGISRVQAPAAHNRGLTGSGVKVAVLDTGISTHPDLNIRGGASFVPGEPSTQDGNGHGTHVAGTIAALNNIGVLGVAPSAELYAVKVLGASGSGSVSSIAQGLEWAGNNSMHVANLSLGSESPSATLEQAVNSATSRGVLVVAASGNSGAGSISYPARYANAMAVGATDQNNNRASFSQYGAGLDIVAPGVNVQSTYPGSTYASLNGTSMATPHVAGAAALVKQKNPSWSNVRIRDHLKNTATSLGSTNLYGSGLVNAEAATR

SEQ ID NO: 55598 - protein, 268 aa, Bacillus Lentus
AQSVPWGIRRVQAPTAHNRGLTGSGVKVAVLDTGISTHPDLNIRGGASFVPGEPSTQDGNGHGTHVAGTIAALNNSIGVLGVAPSAELYAVKVLGASGSGSVSSIAQGLEWAGNNGMNVANLSLGSPSSATLEQAVNSATSRGVLVVAASGNSGAGSISYPARYANAMAVGATDQNNNRASFSQYGAGLDIVAPGVNVESTYPGSTYASLNGTSMATPHVAGAAALVKQKNPSWSNVQIRNHLKNTATSLGSTNLYGSGLVNAEAATR

SEQ ID NO: 55599 - protein, 268 aa, Unidentified
AQSVPWGISRVQAPAAHNRGLTGSGVKVAVLDTGISTHPDLNIRGGASFVPGEPSTQDGEGHGTHVAGTIAALNNSIGVLGVAPSAELYAVKVLGASGSGSVSSIAQGLEWAGLNRMHVANLSLGPSPSATLEQAVNSATSRGVLVVAASGNSGAGSIDYPARYANAMAVGATDQNNNRASFSQYGAGLDIVAPGVNVQSTYPGSTYASLNGTSMATPHVAGAAALVKQKNPSWSNVQIRNHLKNTATSLGSTNLYGSGLVNAEAATR

SEQ ID NO: 55600 - protein, 268 aa, Unidentified
AQSVPWGISRVQAPAAHNRGLAGSGVKVAVLDTGISTHPDLNIRGGASFVPGEPSTQDGNGHGTHVAGTIAALNNSIGVLGVAPSAELYAVKVLGASGGSLSSIAQGVEWAGNNGMHVANLSLGNPSPSATLEQAVNSATSRGVLVVAASGNSGAGSISYPARYANAMAVGATDQNNNRASFSQYGAGLDIVAPGVNVQSTYPGSTYASLNGTSMATPHVAGAAALVKQKNPSWSNVQIRNHLKNTATSLGSTNLYGSGLVNAEAATR

SEQ ID NO: 55601 - protein, 268 aa, Bacillus Lentus
AQVVPWGIRRVQAPTAHNRGLTGSGVKVAVLDTGISTHPDLNIRGGASFVPGEPSTQDGNGHGTHVAGTIAALNNSIGVLGVAPSAELYAVKVLGASGSGSVSSIAQGLEWAGNNGMNVANLSLGSPSSATLEQAVNSATSRGVLVVAASGNSGAGSISYPARYANAMAVGATDQNNNRASFSQYGAGLDIVAPGVNVQSTYPGSTYASLNGTSMATPHVAGAAALVKQKNPSWSNVQIRNHLKNTATSLGSTNLYGSGLVNAEAATR

SEQ ID NO: 55602 - protein, 268 aa, Unidentified
AQSVPWGISRVQAPAAHNRGLTGSGVKVAVLDTGISTHPDLNIRGGASFVPGEPSTQDGNGHGTHVAGTIAALNNSIGVLGVAPSAELYAVKVLGADGGAISSIAQGLEWAGNNGMHVANLSLGSPSPSATLEQAVNSATSRGVLVVAASGNSGASSISYPARYANAMAVGATDQNNNRASFSQYGAGLDIVAPGVNVQSTYPGSTYASLNGTSMATPHVAGAAALVKQKNPSWSNVQIRNHLKNTATSLGSTNLYGSGLVNAEAATR

SEQ ID NO: 55603 - protein, 268 aa, Bacillus lentus
AQSVPWGIRRVQAPAAHNLGLTGSGVKVAVLDTGISTHPDLNIRGGASFVPGEPSTQDGDGHGTHVAGTIAALNNSIGVLGVAPSAELYAVKVLGASGSGSVSSIAQGLEWAGNNGMHVANLSLGSPSSATLEQAVNSATSRGVLVVAASGNSGAGSISYPARYANAMAVGATDQNNNRASFSQYGPGLDIVAPGVNVQSTYPGSTYASLNGTSMATPHVAGAAALVKQKNPSWSNVQIRNHLKNTATSLGSTNLYGSGLVNAEAATR

SEQ ID NO: 55604 - protein, 268 aa, Unidentified
AQSVPWGISRVQAPAAHNRGLTGRGVKVAVLDTGISTHPDLRITGGASFVPGEPSTQDGNGHGTHVAGTIAALNNSIGVLGVAPSAELYAVKVLGASGAGSVSSIAQGLEWAGNNGMHVANLSLGSPSPSATLEQAVNSATSRGVLVVAASGNSGAGSISYPARYANAMAVGATDQNNNRASFSQYGAGLDIVAPGVNVQSTYGSTYASLNGTSMATPHVAGAAALVKQKNPSWSNVQIRNHLKNTATSLGSTNLYGSGLVNAEAATR

SEQ ID NO: 55605 - protein, 268 aa, Bacillus lentus
AQTVPWGIRRVQAPAAHNLGLTGSGVKVAVLDTGISTHPDLNIRGGASFVPGEPSTQDGDGHGTHVAGTIAALNNSIGVLGVAPSAELYAVKVLGASGSGSVSSIAQGLEWAGNNGMHVANLSLGSPSSATLEQAVNSATSRGVLVVAASGNSGAGSISYPARYANAMAVGATDQNNNRASFSQYGAGLDIVAPGVNVQSTYPGSTYASLNGTSMATPHVAGAAALVKQKNPSWSNVQIRNHLKNTATSLGSTNLYGSGLVNAEAATR

SEQ ID NO: 55606 - protein, 268 aa, Unidentified
AQSVPWGISRVQAPAAHNRGLTGSGVKVAVLDTGISTHPDLNIRGGASFVPGEPSTQDGNGHGTHVAGTIAALDNSIGVLGVAPSAELYAVKVLGASGSGAISSIAQGLEWAGNNGMHVANLSLGSPSPSATLEQAVNSATSRGVLVVAASGNSGAGSISYPARYANAMAVGATDQNNNRASFSQYGAGLDIVAPGVNVQSTYPGSTYASLNGTSMATPHVAGAAALVKQKNPSWSNVQIRNHLKNTATSVGSTNLYGSGLVNAEAAT

SEQ ID NO: 55607 - protein, 160 aa, Unidentified
AQSVPWGISRVQAPAAHNRGLTGSGVKVAVLDTGISTHPDLNIRGGASFVPGEPSTQDGNGHGTHVAGTIAALNNSIGVLGVAPSAELYAVKVLGASGSGSVSSIAQGLEWAGNNGMHVANLSLGSPSPSATLEQAVNSATSRGVLVVAASGNSGAGCLA

SEQ ID NO: 55608 - protein, 212 aa, Unidentified
AQSVPWGISRVQAPAAHNRGLTGSGVKVAVLDTGISTHPDLNIRGGASFVPGEPSTQDGNGHGTHVAGTIAALNNSIGVLGVAPSAELYAVKVLGASGSGSVSSIAQGLEWAGNNGMHVANLSLGSPSPSATLEQAVNSATSRGVLVVAASGNSGAGSISYPARYANAMAVGATDQNNNRASFSQYGAGLDIVAPGVNVQSTYPGCAAYDTL

SEQ ID NO: 55609 - protein, 210 aa, Unidentified
AQSVPWGISRVQAPAAHNRGLTGSGVKVAVLDTGISTHPDLNIRGGASFVPGEPSTQDGNGHGTHVAGTIAALNNSIGVLGVAPSAELYAVKVLGASGSGSVSSIAQGLEWAGNNGMHVANLSLGSPSPSATLEQAVNSATSRGVLVVAASGNSGAGSISYPARYANAMAVGATDQNNNRASFSQYGAGLDIVAPGVNVQSTYPGCLNAN

SEQ ID NO: 55610 - protein, 210 aa, Bacillus licheniformis
AQSVPWGISRVQAPAAHNRGLTGSGVKVAVLDTGISTHPDLNIRGGASFVPGEPSTQDGNGHGTHVAGTIAALNNSIGVLGVAPSAELYAVKVLGASGSGSVSSIAQGLEWAGNNGMHVANLSLGSPSPSATLEQAVNSATSRGVLVVAASGNSGAGSISYPARYANAMAVGATDQNNNRASFSQYGAGLDIVAPGVNVQSTYPGCLVGS

SEQ ID NO: 55611 - protein, 258 aa, Unidentified
AGRNRKFNWTGQSGVKVAVLDTGISTHPDLNIRGGASFVPGEPSTQDGNGHGTHVAGTIAALNNSIGVLGVAPSAELYAVKVLGASGSGSVSSIAQGLEWAGNNGMHVANLSLGSPSPSATLEQAVNSATSRGVLVVAASGNSGAGSISYPARYANAMAVGATDQNNNRASFSQYGAGLDIVAPGVNVQSTYPGSTYASLNGTSMATPHVAGAAALVKQKNPSWSNVQIRNHLKNTATSLGSTNLYGSGLVNAEAATR

SEQ ID NO: 55612 - protein, 259 aa, Unidentified
AHNFIANGIVVHNSGVKVAVLDTGISTHPDLNIRGGASFVPGEPSTQDGNGHGTHVAGTIAALNNSIGVLGVAPSAELYAVKVLGASGSGSVSSIAQGLEWAGNNGMHVANLSLGSPSPSATLEQAVNSATSRGVLVVAASGNSGAGSISYPARYANAMAVGATDQNNNRASFSQYGAGLDIVAPGVNVQSTYPGSTYASLNGTSMATPHVAGAAALVKQKNPSWSNVQIRNHLKNTATSLGSTNLYGSGLVNAEAATR

SEQ ID NO: 55613 - protein, 355 aa, Unidentified
SAAEEAKEKYLIGFNEQEAVSEFVEQIEANDDVAILSEEEEVEIELLHEFETIPVLSVELSPEDVDALELDPTISYIEEDAEVTTMAQSVPWGISRVQAPAAHNRGLTGSGVKVAVLDTGISTHPDLNIRGGASFVPGEPSTQDGNGHGTHVAGTIAALNNSIGVLGVAPSAELYAVKVLGASGSGSVSSIAQGLEWAGNNGMHVANLSLGSPSPSATLEQAVNSATSRGVLVVAASGNSGAGSISYPARYANAMAVGATDQNNNRASFSQYGAGLDIVAPGVNVQSTYPGSTYASLNGTSMATPHVAGVAALVKQKNPSWSNVQIRNHLKNTATGLGNTNLYGSGLVNAEAATR

SEQ ID NO: 55614 - protein, 353 aa, Unidentified
AEEAKEKYLIGFNEQEAVSEFVEQVEANDEVAILSEEEEVEIELLHEFETIPVLSVELSPEDVDALELDPAISYIEEDAEVTTMAQSVPWGISRVQAPAAHNRGLTGSGVKVAVLDTGISTHPDLNIRGGASFVPGEPSTQDGNGHGTHVAGTIAALDNSIGVLGVAPRAELYAVKVLGASGSGSVSSIAQGLEWAGNNRMHVANLSLGLQAPSATLEQAVNSATSRGVLVVAASGNSGAGSISYPARYANAMAVGATDQNNNRASFSQYGAGLDIVAPGVNVQSTYPGSTYASLNGTSMATPHVAGAAALVKQKNPSWSNVQIRNHLKNTATSLGSTNLYGSGLVNAEAATR

SEQ ID NO: 55615 - protein, 353 aa, Unidentified
AEEAKEKYLIGFNEQEAVSEFVEQVEANDEVAILSEEEEVEIELLHEFETIPVLSVELSPEDVDALELDPAISYIEEDAEVTTMAQSVPWGISRVQAPAAHNRGLTGSGVKVAVLDTGISTHPDLNIRGGASFVPGEPSTQDGNGHGTHVAGTIAALNNSIGVLGVAPNAELYAVKVLGASGMGSVSSIAQGLEWAGNNVMHVANLSLGLQAPSATLEQAVNSATSRGVLVVAASGNSGAGSISYPARYANAMAVGATDQNNNRASFSQYGAGLDIVAPGVNVQSTYPGSTYASLNGTSMATPHVAGAAALVKQKNPSWSNVQIRNHLKNTATSLGSTNLYGSGLVNAEAATR

SEQ ID NO: 55616 - protein, 300 aa, Unidentified
AEEAKEKYLIGFNEQEAVSEFVEQVEANDEVAILSEEEEVEIELLHEFETIPVLSVELSPEDVDALELDPAISYIEEDAEVTTMAQSVPWGISRVQAPAAHNRGLTGSGVKVAVLDTGISTHPDLNIRGGASFVPGEPSTQDGNGHGTHVAGTIAALNNSIGVLGVAPSAELYAVKVLGASGSGSVSSIAQGLEWAGNNGMHVANLSLGSPSPSATLEQAVNSATSRGVLVVAASGNSGAGSISYPARYANAMAVGATDQNNNRASFSQYGAGLDIVAPGVNVQSTYPGCFAAGTLIKTP

SEQ ID NO: 55617 - protein, 298 aa, Unidentified
AEEAKEKYLIGFNEQEAVSEFVEQVEANDEVAILSEEEEVEIELLHEFETIPVLSVELSPEDVDALELDPAISYIEEDAEVTTMAQSVPWGISRVQAPAAHNRGLTGSGVKVAVLDTGISTHPDLNIRGGASFVPGEPSTQDGNGHGTHVAGTIAALNNSIGVLGVAPSAELYAVKVLGASGSGSVSSIAQGLEWAGNNGMHVANLSLGSPSPSATLEQAVNSATSRGVLVVAASGNSGAGSISYPARYANAMAVGATDQNNNRASFSQYGAGLDIVAPGVNVQSTYPGCVDGDTSVT

SEQ ID NO: 55618 - protein, 190 aa, Unidentified
LVVHNSAELYAVKVLGASGSGSVSSIAQGLEWAGNNGMHVANLSLGSPSPSATLEQAVNSATSRGVLVVAASGNSGAGSISYPARYANAMAVGATDQNNNRASFSQYGAGLDIVAPGVNVQSTYPGSTYASLNGTSMATPHVAGAAALVKQKNPSWSNVQIRNHLKNTATSLGSTNLYGSGLVNAEAATR

SEQ ID NO: 55619 - protein, 327 aa, Unidentified
SEDLVVHNSEEEEVEIELLHEFETIPVLSVELSPEDVDALELDPAISYIEEDAEVTTMAQSVPWGISRVQAPAAHNRGLTGSGVKVAVLDTGISTHPDLNIRGGASFVPGEPSTQDGNGHGTHVAGTIAALNNSIGVLGVAPSAELYAVKVLGASGSGSVSSIAQGLEWAGNNGMHVANLSLGSPSPSATLEQAVNSATSRGVLVVAASGNSGAGSISYPARYANAMAVGATDQNNNRASFSQYGAGLDIVAPGVNVQSTYPGSTYASLNGTSMATPHVAGAAALVKQKNPSWSNVQIRNHLKNTATSLGSTNLYGSGLVNAEAATR

SEQ ID NO: 55620 - protein, 274 aa, Bacillus licheniformis
AQTVPYGIELIKADKVQAQGFKGANVKVAVLDTGIQASHPDLNVVGGASFVAGEAYNTDGNGHGTHVAGTVAALDNNTGVLGVAPSVSLYAVKVLSSSGSGSYSGIVSGIEWATTNGMDVINMSLGGASGSTAMKQAVDNAYARGVVVVAAAGNSGSSGNTNTIQYPAKYDSVIAVGAVDSNSNRASFSSVGAELEVMAPGAEVYSTYPTNTYATLNGTSMASPHVAGAAALILSKHPNLSASQVRNRLGSTATYLGSSFYYGKGLINVEAAAQ

SEQ ID NO: 55621 - protein, 274 aa, Bacillus licheniformis
AQTVPYGIPMIKADKVQAQGFKGANVKVAVLDTGAQASHPDLNVVGGASFVAGEAYNTDGNGHGTHVAGTVAALDNTIGVLGVAPSSSLYAVKVLNSSGSGSYSGIVSGIEWATTNGMDVINMSLGGASGSTAMKQAVDNAYARGVVVVAAAGNSGSSGNTNTIGYPAKYDSVIAVGAVDSNSNRAEFSSVGAELEVMAPGVGVYSTYPTNTYATLNGTSMASPHVAGAAALILSKHPNLSASQVRNRLSSTATYLGSSFYYGKGLINVEAAAQ

SEQ ID NO: 55622 - protein, 274 aa, Bacillus licheniformis
AQTVPYGIPLIKADKVQAQGFKGANVKVAVLDTGIQASHPDLNVVGGASFVAGEAYNADGNGHGTHVAGTVAALDNTTGVLGVAPSVSSYAVKVLNSSGSGTYSGIVSGIEWATTNGMDVINMSLGGPSGSTAMKQAVDNAYARGVVVVAAAGNSGSSGNTNTIGYPAKYDSVIAVGAVDSNSNRASFSSVGAELEVMAPGAGVYSTYPTSTYATWNGTSMASPHVAGAAALILSKHPNLSASQVRNRLSSTATYLGSSFYYGKGLINVEAAAQ

SEQ ID NO: 55623 - protein, 274 aa, Bacillus licheniformis
AQTVPYGIPLIKADIVQAQGFKGANVKVAVLDTGIQASHPDLNVVGGASFVAGEAYNTDGNGHGTHVAGTVAALDNTTGVLGVAPSVSLYAVKVLNSSGSGSYSGIVSGIEWATTNGMDVINISLGGASGSTAMKQAVDNAYARGSVVVAAAGNSGSSGNTNTISYPAKYDSVIAVGAVDSNSNRASFSSVGAELEVMAPGAGVYSTYPPNTYATLNGTSMASPHVAGAAALILSKHPSLSASQVRNRLSSTATYLGSSFYYGKGLINVEAAAQ

SEQ ID NO: 55624 - protein, 274 aa, Bacillus licheniformis
AQTVPYGIPLIKADIVQAQGFKGANVKVAVLDTGIQASHPDLNVVGGASFVAGEAYNTDGNGHGTHVAGTVAALDNTTGVLGVAPSVSLYAVKVQNSSGSGSYSGIVSGIEWATTNGMDVINISLGGASGSTAMKQAVDNAYARGVVVVAAAGNSGSSGNTNTISYPAKYDSVIAVGAVDSNSNRASFSSVGAELEVMAPGAGVYSTYPPNTYATLSGTSMASPHVAGAAALILSKHPNLSASQVRNRLSSTATYLGSSFYYGKGLINVEAAAQ

SEQ ID NO: 55625 - protein, 274 aa, Bacillus licheniformis
AQTVPYGIPHIKADKVQAQGYKGANVKVAVLDTGIQASHPDLNVVGGASFVAGEAYNTDGNGHGTHVAGTVAALDNTTGVLGVAPNVSLYAVKVLNSSGSGSYSGIVSGIEWATTNGMDVINMSLGGPSGSTAMKQAVDNAYARGVVVVAAAGNSGSSGNTNTIGYPAKYDSVIAVGAVDSNSNRASFSSVGAELEVMAPGAGVYSTYPTSTYATLNGTSMASPHVAGAAALILPKHPNLSASQVRNRLSSTATYLGSSFYYGKGLINVEAAAQ

SEQ ID NO: 55626 - protein, 274 aa, Bacillus licheniformis
AQTVPYGIPLIKADKVQAQGFKGANVKVAVLDTGIQASHPDLNVVGGASFVAGEAYNTDGNGHGTHVAGTVAALDNTTGVLGVAPSVSSYAVKVLNSSGSGTYSGIVSGIEWATTNGMDVINMSLGGPSGSTAMKQAVDNAYARGVVVVAAAGNSGSSGNTNTIGYPAKYDSVIAVGAVDSNSNRASFSSVGAELEVMAPGAGVYSTYPTSTYATWDGTSMASPHVAGAAALILSKHPNLSASQVRNRLSSTATYLGSSFYYGKGLINVEAAAQ

SEQ ID NO: 55627 - protein, 274 aa, Bacillus licheniformis
AQTVPYGIPLIKADKVQAQGFKGANVKVAVLDTGIQASHPDLNVVGGASFVAGEAYNTDGNGHGTHVSGTVAALDNNTGVLGVAPSVSLYAVKVLNSSGSGSYSGIVSGIEWATTNGMDVINMSLGGPSGSTAMKQAVDNAYARGVVVVAAAGNSGSSGNTNTIQYPAKYDSVIAVGAVDSNSQRASFSSVGAELEVMAPGAGVYSTYPTNTYATLSGTSMASPHVAGAAALILSKHPNLSASQVRNRLSSTATYLGSSFYYGKGLINVEAAAQ

SEQ ID NO: 55628 - protein, 274 aa, Bacillus licheniformis
AQTVPYGIPMIKADKVQAQGFKGANVKVAVLDTGAQASHPDLNVVGGASFVAGEAYNTDGNGHGTHVAGTVAALDNTIGVLGVAPSSSLYAVKVLNSSGSGSYSGIVSGIEWATTNGMDVINMSLGGASGSTAMKQAVDNAYARGVVVVAAAGNSGSSGNTNTIGYPAKYDSVIAVGAVDSNSNRASFSSVGAELEVMAPGVGVYSTYPTNTYATLNGTSMASPHVAGAAALILSKHPNLSASQVRNRLSSTATYLGDSFYYGKGLINVEAAAQ

SEQ ID NO: 55629 - protein, 274 aa, Bacillus licheniformis
AQTVPYGIPLIKADKVQAQGFKGANVKVAVLDTGIQASHPDLNVVGGASFVAGEAYNTDGNGHGTHVAGTVAALDNNTGVLGVAPSSSLYAVKVLNSSGSGSYSGIVSGIEWATTNGMDVINISLGGASGSTAMKQAVDNAYARGVLVVAAAGNGGSSGNTNTIQYPAKYDSVIAVGAVDSNSNRASFSSVGAELEVMAPGAGVYSTYPTNTYATLNGTSMASPHVAGAAALILSKHPNLSASQVRNRLSSTATYLGSSFYYGKGLINVEAAAQ

SEQ ID NO: 55630 - protein, 274 aa, Bacillus licheniformis
AQTVPYGIPLIKADKVQAQGFKGANVKVAVLDTGAQASHPDLNVVGGASFVAGEAYNTDGNGHGTHVSGTVAALDNNTGVLGVAPSSSLYAVKVLNSSGSGSYSGIVSGIEWATTNGMDVINMSLGGASGSTAMKQAVDNAYARGVLVVAAAGNSGSSGNTNTIQYPAKYDSVIAVGAVDSNSNRASFSSVGAELEVMAPGAGVYSTYPTNTYATLNGTSMASPHVAGAAALILSKHPNLSASQVRNRLSSTATYLGSSFYYGKGLINVEAAAQ

SEQ ID NO: 55631 - protein, 274 aa, Bacillus licheniformis
AQTVPYGIPLIKADKVQAQGFKGANVKVAVLDTGIQASHPDLNVVGGASFVAGEAYNTDGNGHGTHVAGTVAALDNTTGVLGVAPHVSLYAVKVLNSSGSGSYSGIVSGIEWATFNGMDVINMSLGGASGSTAMKQAVDNAYVRGVVVVAAAGNSGSSGNTNTIQYPAKYDSVIAVGAVDSNSNRASFSSVGAELEVMAPGVGVYSTYPTNTYATLNGTSMASPHVAGAAALILSKHPNLSASQVRNRLSSTATYLGPSFYYGKGLINVEAAAQ

SEQ ID NO: 55632 - protein, 274 aa, Bacillus licheniformis
AQTVPYGIPLIKADKVQAQGFKGANVKVAVLDTGIQASHPDLNVVGGASFVAGEAYNTDGNGHGTHVAGTVAALDNHTGVLGVAPSTSLYAVKVLNSSGSGSYSGIVSGIEWATTNGMDVINISLGGASGSTAMKRAVDNAYARGVVVVAAAGNSGSSGNTNTIGYPAKYDSVIAVGAVDSNSQRASFSSVGAELEVMAPGAGVYSTYPTNTYATLNGTSMASPHVAGAAALILSKHPSLSASQVRNRLSSTATYLGSSFYYGKGLINVEAAAQ

SEQ ID NO: 55633 - protein, 274 aa, Synthetic construct
AQTVPYGIPLIKADKVQAQGFKGANVKVAVLDTGIQASHPDLNVVGGASFVAGEAYNTEPNNHZTHVAGTVAALDNTTGVLGVAPSVSLYAVKVLNSSGSGSYSGIVSGIEWATTNGMDVINMSLGGASGSTAMKQAVDNAYARGVVVVAAAGNSGNSGSTNTIGYPAKYDSVIAVGAVDSNSNRASFSSVGAELEVMAPGAGVYSTYPTNTYATLNGTSMASPHVAGAAALILSKHPNLSASQVRNRLSSTATYLGSSFYYGKGLINVEAAAQ

SEQ ID NO: 55634 - protein, 274 aa, Synthetic construct
AQTVPYGIPLIKADKVQAQGFKGANVKVAVLDTGIQASHPDLNVVGGASFVAGEAYNSDGNGHGTHVAGTVAALDNTTGVLGVAPSVSLYAVKVLNSSGDGSYSGIVSGIEWATTNGMDVINMSLGGASGSTAMKQAVDNAYARGVVVVAAAGNSGNSGSTNTMGYPAKYDSVIAVGAVDSNSNRASFSSVGAELEVMAPGAGVASTYPTNTYATLNGTSMASPHVAGAAALILSKHPNLSASQVRNRLSSTATYLGSSFYYGKGLINVEAAAQ

SEQ ID NO: 55635 - protein, 274 aa, Bacillus licheniformis
AQTVPYGIPLIKADKVQAQGFKGANVKVAVLDTGIQASHPDLNVVGGASFVAGEAYNTDGNGHGTHVAGTVAALDNNTGVLGVAPSVSLYAVKVLNSSGSGSYSGIVSGIEWATTNGMDVINISLGGPSGSTAMKQAVDNAYARGVVVVAAAGNSGSSGNTNTIQYPAKYDSVIAVGAVDSNSQRASFSSVGAELEVMAPGAGVYSTYPTNTYATLSGTSMASPHVAGAAALILSKHPNLSASQVRNRLSSTATYLGSSFYYGKGLINVEAAAQ

SEQ ID NO: 55636 - protein, 274 aa, Bacillus licheniformis
AQTVPYGIELIKADIVQAQGFKGANVKVAVLDTGIQASHPDLNVVGGASFVAGEAYNTDGNGHGTHVAGTVAALDNTTGVLGVAPSVSLYAVKVLNSSGSGSYSGIVSGIEWATTNGMDVINMSLGGASGSTAMKQAVDNAYARGVVVVAAAGNSGSSGNTNTISYPAKYDSVIAVGAVDSNSNRASFSSVGDELEVMAPGAEVYSTYPPNTYATLNGTSMASPHVAGAAALILSKHPNLSASQVRNRLSSTATYLGSSFYYGKGLINVEAAAQ

SEQ ID NO: 55637 - protein, 274 aa, Bacillus licheniformis
AQTVPYGIPLIKADIVQAQGFKGANVKVAVLDTGIQASHPDLNVVGGASFVAGEAYNTDGNGHGTHVAGTVAALDNTTGVLGVAPSVSLYAVKVQNSSGSGSYSGIVKGIEWATTNGMDVINMSLGGASGSTAMKQAVDNAYARGVVVVAAAGNSGSSGNTNTISYPAKYDSVIAVGAVDSNSNRASFSSVGAELEVMAPGAEVYSTYPPNTYATLNGTSMASPHVAGAAALILSKHPNLSASQVRNRLSSTATYLGSSFYYGKGLINVEAAAQ

SEQ ID NO: 55638 - protein, 274 aa, Bacillus licheniformis
AQTVPYGIPLIKADKVQAQGFKGANVKVAVLDTGIQASHPDLNVVGGASFVAGEAYNTDGNGHGTHVSGTVAALDNNTGVLGVAPSVSLYAVKVLNSSGSGSYSGIVSGIEWATTNGMDVINISLGGASGSTAMKQAVDNAYARGVVVVAAAGNSGSSGNTNTIQYPAKYDSVIAVGAVDSNSQRASFSSVGAELEVMAPGAGVYSTYPTNTYATLSGTSMASPHVAGAAALILSKHPNLSASQVRNRLSSTATYLGSSFYYGKGLINVEAAAQ

SEQ ID NO: 55639 - protein, 274 aa, Bacillus licheniformis
AQVVPYGIPLIKADKVQAQGFKGANVKVAVLDTGIQASHPDLNVVGGASFVAGEAYNTDGNGHGTHVAGTVAALDNNTGVLGVAPSVSLYAVKVLNSSGSGSYSGIVSGIEWATTNGMDVINISLGGASGSTAMKQAVDNAYARGVVVVAAAGNSGSSGNTNTIQYPAKYDSVIAVGAVDSNSQRASFSSVGAELEVMAPGAGVYSTYPTNTYATLSGTSMASPHVAGAAALILSKHPNLSASQVRNRLSSTATYLGSSFYYGKGLINVEAAAQ

SEQ ID NO: 55640 - protein, 274 aa, Bacillus licheniformis
AQTVPYGIPHIKADKVQAQGYKGANVKVAVLDTGIQASHPDLNVVEGASFVAGEAYNTDGNGHGTHVAGTVAALDNTTGVLGVAPNVSLYAVKVLNSSGSGSYSGIVSGIEWATTNGMDVINMSLGGPSGSTAMKQAVDNAYARGVVVVAAAGNSGSSGNTNTIGYPAKYDSVIAVGAVDSNSNRASFSSVGAELEVMAPGAGVYSTYPTSTYATLNGTSMASPHVAGAAALILSKHPNLSASQVRNRLSSTATYLGSSFYYGKGLINVEAAAQ

SEQ ID NO: 55641 - protein, 274 aa, Bacillus licheniformis
AQTVPYGIPLIKADKVQAQGFKGANVKVAVLDTGIQASHPDLNVVGGASFVAGEAYNTDGNGHGTHVSGTVAALDNNTGVLGVAPSSSLYAVKVLNSSGSGSYSGIVSGIEWATTNGMDVINMSLGGASGSTAMKQAVDNAYARGVLVVAAAGNEGSSGNTNTIQYPAKYDSVIAVGAVDSNSNRASFSSVGAELEVMAPGAGVYSTYPTNTYATLNGTSMASPHVAGAAALILSKHPNLSASQVRNRLSSTATYLGSSFYYGKGLINVEAAAQ

SEQ ID NO: 55642 - protein, 274 aa, Bacillus licheniformis
AQTVPYGIPLIKADKVQAQGFKGANVKVAVLDTGIQASHPDLNVVGGASFVAGEAYNQDGNGHGTHVAGTVAALDNTTGVLGVAPSVSSYAVKVLNSSGSGTYSGIVSGIEWATTNGMDVINMSLGGPSGSTAMKQAVDNAYARGVVVVAAAGNSGSSGNTNTIGYPAKYDSVIAVGAVDSNSNRASFSSVGAELEVMAPGAGVYSTYPTSTYATWNGTSMASPHVAGAAALILSKHPNLSASQVRNRLSSTATYLGSSFYYGKGLINVEAAAQ

SEQ ID NO: 55643 - protein, 274 aa, Bacillus licheniformis
AQTVPYGIPLIKADKVQAQGFKGANVKVAVLDTGIQASHPDLNVVGGASFVAGEAYNTDGNGHGTHVSGTVAALDNNTGVLGVAPSSSLYAVKVLNSSGSGSYSGIVSGIEWATTNGMDVINMSLGGPSGSTAMKQAVDNAYARGVVVVAAAGNGGSSGNTNTIQYPAKYDSVIAVGAVDSNSNRASFSSVGAELEVMAPGAGVYSTYPTNTYATLNGTSMASPHVAGAAALILSKHPNLSASQVRNRLSSTATYLGSSFYYGKGLINVEAAAQ

SEQ ID NO: 55644 - protein, 274 aa, Bacillus licheniformis
AQTVPYGIPLIKADKVQAQGFKGANRKVAVLDTGIQASHPDLNVRGGASFVAGEAYNTDGNGHGTHVAGTVAALDNTTGVLGVAPSVSLYAVKVLNSRGSGSYSGIVSGIQWATTNGMDVINISLGGASGSTAMKRAVDNAYARGVVVVAAAGNSGSSGNTNTIGYPAKYDSVIAVGAVDSNSNRASFSSVGAELEVMAPGAGVYSTYPTNTYATLNGTSMASPHVAGAAALILSKHPNLSASQVRNRLSSTATYLGSSFYYGKGLINVEAAAQ

SEQ ID NO: 55645 - protein, 274 aa, Bacillus licheniformis
AQTVPYGIPLIKADKVQAQGFKGANVKVAVLDTGIQASHPDLNVVGGASFVAGEAYNTDGNGHGTHVAGTVAALDNTTGVLGVAPSVSLYAVKVLASSGSGSYSGIVSGIEWATTAGMDVIAMSLGGASGSTAMKQAVDAAYARGVVVVAAAGNSGSSGNTNTIGYPAKYDSVIAVGAVDSNSNRASFSSVGAELEVMAPGAGVYSTYPTNTYATLAGTSMASPHVAGAAALILSKHPNLSASQVRARLSSTATYLGSSFYYGKGLINVEAAAQ

SEQ ID NO: 55646 - protein, 274 aa, Bacillus licheniformis
AQTVPYGIPHIKADKVQAQGYKGANVKVAVLDTGIQASHPDLNVVGGASFVAGEAYNTDGNGHGTHVAGTVAALDNTTGVLGVAPNVSLYAVKVLNSSGSGSYSGIVSGIEWATTNGMDVINMSLGGPSGSTAMKQAVDNAYARGVVVVAAAGNSGSSGNTNTIGYPAKYDSVIAVGAVDSNSNRASFSSVGAELEVMAPGAGVYSTYPTSTYATLNGTSMASPHVAGAAALILSKHPNLSASQVRNRLSSTATYLGSSFYYGKGLVNVEAAAQ

SEQ ID NO: 55647 - protein, 274 aa, Bacillus licheniformis
AQTVPYGIPLIKADKVQAQGFKGANVKVAVLDTGIQASHPDLNVVGGASFVAGEAYNTDGNGHGTHVAGTVAALDNNTGVLGVAPSVSLYAVKVLNSSGSGSYSGIVSGIEWATTNGMDVINISLGGASGSTAMKQAVDNAYARGVVVVAAAGNSGSSGNTNTIGYPAKYDSVIAVGAVDSNSNRASFSSVGAELEVMAPGAGVYSTYPPNTYATLNGTSMASPHVAGAAALILSKHPSLSASQVRNRLGSTATYLGPSFYYGKGLINVEAAAQ

SEQ ID NO: 55648 - protein, 274 aa, Bacillus licheniformis
AQTVPYGIPLIKADKVQAQGFKGANVKVAVLDTGIQASHPDLNVVGGASFVAGEAYNTDGNGHGTHVAGTVAALDNNTGVLGVAPSSSLYAVKVLNSSGSGSYSGIVSGIEWATTNGMDVINISLGGASGSTAMKQAVDNAYARGVVVVAAAGNGGSSGNTNTIQYPAKYDSVIAVGAVDSNSNRASFSSVGAELEVMAPGAGVYSTYPTNTYATLSGTSMASPHVAGAAALILSKHPNLSASQVRNRLSSTATYLGSSFYYGKGLINVEAAAQ

SEQ ID NO: 55649 - protein, 273 aa, Bacillus licheniformis
QTVPYGIPLIKADKVQAQGFKGANVKVAVLDTGIQASHPDLNVVGGASFVAGEAYNTDGNGHGTHVAGTVAALDNTTGVLGVAPSVSLFAVKVLNSSGSGSYSGIVSGIEWATTNGMDVINMSLGGPSGSTAMKQAVDNAYSKGVVPVAAAGNSGSSGYTNTIGYPAKYDSVIAVGAVDSNSNRASFSSVGAELEVMAPGAGVYSTYPTNTYATLNGTSMASPHVAGAAALILSKHPNLSASQVRNRLSSTATYLGSSFYYGKGLINVEAAAQ

SEQ ID NO: 55650 - protein, 273 aa, Bacillus licheniformis
AQTVPYGIPLIKADKVQAQGFKGANVKVAVLDTGIQASHPDLNVVGGASFVAGEAYNTDGNGHGTHVAGTVAALDNTTGVLGVAPHVSLYAVKVLNSSGSGSYSGIVSGIEWATFNGMDVINMSLGGASGSTAMKQAVDNAYARGVVVVAAAGNGGSSGNTNTIQYPAKYDSVIAVGAVDSNSQRASFSSVGAELEVMAPGVGVYSTYPTNTYATLNGTSMASPHVAGAAALILSKHPNLSASQVRNRLSSTATYLGSSFYYGKGLINVEAAA

SEQ ID NO: 55651 - protein, 272 aa, Bacillus licheniformis
QTVPYGIPLIKADKVQAQGFKGANVKVAVLDTGIQASHPDLNVVGGASFVAGEAYNTDGNGHGTHVAGTVAALDNTTGLGVAPSVSLFAVKVLNSSGSGSYSGIVSGIEWATTNGMDVINMSLGGPSGSTAMKQAVDNAYSKGVVPVAAAGNSGSSGYTNTIGYPAKYDSVIAVGAVDSNSNRASFSSVGAELEVMAPGAGVYSTYPTNTYATLNGTSMASPHVAGAAALILSKHPNLSASQVRNRLSSTATYLGSSFYYGKGLINVEAAAQ

SEQ ID NO: 55652 - protein, 269 aa, Unidentified
AQSVPWGISRVQAPAAHNRGLTGSGVKVAVLDTGISTHPDLNIRGGASFVPGEPSTQDGNGHGTHVAGTIAALNNSIGVLGVAPSAELYAVKVLGAGGAAGISSIAQGLEWAGNNGMHVANLSLGSPSPSATLEQAVNSATSRGVLVVAASGNSGAGSISYPARYANAMAVGATDQNNNRASFSQYGAGLDIVAPGVNVQSTYPGSTYASLNGTSMATPHVAGAAALVKQKNPSWSNVQIRNHLKNTATSLGSTNLYGSGLVNAEAATR

SEQ ID NO: 55653 - protein, 269 aa, Unidentified
AQSVPWGISRVQAPAAHNRGLTGSGVKVAVLDTGISTHPDLAIRGGASFVPGEPSRQDGNGHGTHVAGTIAALNNSIGVLGVAPSAELYAVKVLGASGSGSVSSIAQGLEWAGNFGMHVANLSLGSPSPSATLEQAVNSATRRGVLVVAASGNSGAGSISYPARYANAMAVGATDQDNNRASFSQYGAGLDIVAPGVNVQSTYPGSTYASLNGTSMATPHVAGAAALVKQKNPSWSNVQIRNHLKNTATSLGSTNLYGSGLVNAEAATR

SEQ ID NO: 55654 - protein, 269 aa, Unidentified
AQSVPWGISRVQAPAAHNRRLTGSGVKVAVLDTGISTHPDLNIRGGASFVPGEPSTQDGNGHGTHVAGTIAALNNSIGVLGVAPSAELYAVKVLGASGSGSVSSIAQGLEWAGNNGMHVANLSLGSPSPSATLEQAVNSATRRGVLVVAASGNSGAGSISYPARYANAMAVGATDQNNIRASFSQYGAGLDIVAPGVNVQSTYPGSTYASLNGTSMATPHVAGAAACVKNKNPSWSNVQIRNHLKNTATSLGSTNLYGSGLVNAEAATR

SEQ ID NO: 55655 - protein, 269 aa, Bacillus lentus
AQSVPWGISRVQAPAAHNRGLTGSGVKVAVLDTGISTHPDLNIRGGASFVPGEPSTQDGNGHGTHVAGTIAALNNSIGVLGVAPSAELYAVKVLGASGSGSVSSIAQGLEWAGNNGMHVANLSLGSPSPSATLEQAVNSATSRGVLVVAASGNSGAGSISAPASYANAMAVGATDQNNNRASFSQYGPGLDIVAPGVNVQSTYPGSTYASLNGTSMATPHVAGAAALVKQKNPSWSNVQIRNHLRNTATSLGSTNLYGKGLVNAEAATR

SEQ ID NO: 55656 - protein, 269 aa, Unidentified
AQSVPWGISRVQAPAAHNRGLTGRGVKVAVLDTGISTHPDLNIRGGASFVPGEPSTQDGNGHGTHVAGTIAALNNDIGVLGVAPSAELYAVKVLGASGSGSVSSIAQGLEWAGNNDMHVANLSLGSPSPSATLEQAVNSATSRGVLVVAASGNSGADSISYPARYANAMAVGATDQNNNRADFSQYGAGLDIVAPGVNVQSTYPGSTYASLNGTSMATPHVAGAAALVKQKNPSWSNVQIRNHLKNTATSLGSTNLYGSGLVNAEAATR

SEQ ID NO: 55657 - protein, 269 aa, Unidentified
AQSVPWGISRVQAPAAHNRGLTGSGVKVAVLDTGISTHPDLNIRGGASFVPGEPSTQDGNGHGTHVAGTIAALNNDIGVLGVAPSAELYAVKVLGASGSGSVSSIAQGLEWAGNNDMHVANLSLGSPSPSATLEQAVNSATSRGVLVVAASGNSGAGSISYPARYANAMAVGATDQNNNRADFSQYGAGLDIVAPGVNVQSTYPGSTYASLNGTSMATPHVAGAAALVKQKNPSWSNVRIRDHLKNTATSLGSTNLYGSGLVNAEAATR

SEQ ID NO: 55658 - protein, 269 aa, Unidentified
AQSVPWGISRVQAPAAHNRGLLGFGVKVAVLDTGISTHPDLNIRGGASFVPGEPSTQDGNGHGTHVAGTIAALNNSIGVLGVAPSAELYAVKVLGASGSGSVSSIAQGLEWAGNNGMHVANLSLGSPSPSATLEQAVNSATSRGVLVVAASGNSGAGSIDYPARYANAMAVGATDQNNNRASFSQYGAGLDIVAPGVNVQSTYPGSAYASENGTSMATPHVAGAAALVKQKNPSWSNVQIRNHLKNTATSLGSTNLYGSGLVNAEAATR

SEQ ID NO: 55659 - protein, 269 aa, Unidentified
AQSVPWGISRVQAPAAHNRRLTGRGVKVAVLDTGISTHPDLNIRGGASFVPGEPSTQDGNGHGTHVAGTIAALNNSIGVLGVAPSAELYAVKVLGASGAGSVSSIAQGLEWAGLNGMHVANLSLGSPSPSATLEQAVNSATSRGVLVVAASGNSGAGSISYPARYANAMAVGATDQNNNRASFSQYGAGLDIVAPGVNVQSTYPGSTYASLNGTSMATPHVAGAAALVKQKNPSWSNVQIRNHLKNTATSLRSTNLYGSGLVNAEAATR

SEQ ID NO: 55660 - protein, 269 aa, Unidentified
AQSVPWGISRVQAPAAHSRRLTGSGVKVAVLDTGISTHPDLNIRGGASFVPGEPSTQDGNGHGTHVAGTIAALNNSIGVLGVAPSAELYAVKVLGASGAGSVSSIAQGLEWAGNNGMHVANLSLGSPSPSATLEQAVNSATSRGVLVVAASGNSGAGSISYPARYANAMAVGATDQNNNRASFSQYGAGLDIVAPGVNVQSTYIQSTYASLNGTSMATPHVAGAAALVKQKNPSWSNVQIRNHLKNTATSLGSTNLYGSGLVNAEAATR

SEQ ID NO: 55661 - protein, 269 aa, Unidentified
AQSVPWGISRVQAPAAHNRGLTGSGVKVAVLDTGISTHPDLNIRGGASFVPGEPSTQDGNGHGTHVAGTIAALNNSIGVLGVAPSAELYAVKVLGASGSGSVSSIAQGLEWAGLNRMHVANLSLGIPSPSATLEQAVNSATSRGVLVVAASGNSGEGSIDYPARYANAMAVGATDQNNNRASFSQYGAGLDIVAPGVNVQSTYPGSTYASLNGTSMATPHVAGAAALVKQKNPSWSNVQIRNHLKNTATSLGSTNLYGSGLVNAEAATR

SEQ ID NO: 55662 - protein, 269 aa, Unidentified
AQSVPWGISRVQAPAAHRRGLTGRGVKVAVLDTGISTHPDLNIRGGASFVPGEPSTQDGNGHGTHVAGTIAALDNSIGVLGVAPSAELYAVKVLGASGSGSVSSIAQGLEWAGNNGMHVANLSLGSPSPSATLEQAVNSATSRGVLVVAASGNSGAGSISYPARYANAMAVGATDQNNNRASFSQYGAGLDIVAPGVNVQSTYPGSTYASLNGTSMATPHVAGAAALVKQKNPSWRNVQIRNRLKNTATSLGSTNLYGSGLVNAEAATR

SEQ ID NO: 55663 - protein, 269 aa, Unidentified
AQSVPWGISRVQAPAAHNRRLTGRGVKVAVLDTGISTHPDLNIRGGASFVPGEPSTQDGNGHGTHVAGTIAALNNDIGVLGVAPSAELYAVKVLGASGSGSVSSIAQGLEWAGNNSMHVANLSLGSPSPSATLEQAVNSATSRGVLVVAASGNSGAGSISYPARYANAMAVGATDQNNNRASFSQYGAGLDIVAPGVNVQSTYPGSTYASLNGTSMATPHVAGAAALVKQKNPSWSNVRIRNHLKNTATSLGSTNLYGSGLVNAEAATR

SEQ ID NO: 55664 - protein, 269 aa, Unidentified
AQSVPWGIARVQAPAAHNRRLTGRGVKVAVLDTGISTHPDRNIRGGASFVPGEPSTQDGNGHGTHVAGTIAALNNSIGVLGVAPSAELYAVKVLGASGSGSVSSIAQGLEWAGNNGMHVANLSLGSPSPSATLEQAVNSATSRGVLVVAASGNSGAGSISYPARYANAMAVGATDQNNNRASFSQYGAGLDIVAPGVNVQSTYPGSTYASLNGTSMATPHVAGAAALVKQKNPSWRNVQIRNHLKNTATSLGSTNLYGSGLVNAEAATR

SEQ ID NO: 55665 - protein, 269 aa, Unidentified
AQSVPWGISRVQAPAAHNRGLTGSGVKVAVLDTGISTHPDLNIRGGASFVPGEPSTQDGNGHGTHVAGTIAALNNSIGVLGVAPSAELYAVKVLGASGSGSVTSIAQGLEWAGNNGMHVANLSLGNPSPSATLEQAVNSATRRGVIVVAASGNSGAGSISYPARYANAMAVGATDQNNNRASFSQYGAGLDIVAPGVNVQSTYPMSTYASLNGTSMATPHVAGAAALVKQKNPSWSNVQIRNHLKNTATSLGSTNLYGSGLVNAEAATR

SEQ ID NO: 55666 - protein, 269 aa, Unidentified
AQSVPWGISRVQAPAAHNRKLTGSGVKVAVLDTGISTHPDLWIRGGASFVPGEPSTQDGEGHGTHVAGTIAALNNSIGVLGVAPSAELYAVKVLGASGSGSVSSIAQGLEWAGLNGMHVANLSLGSPSPSATLEQAVNSATSRGVLVVAASGNSGAGSISYPARYANAMAVGATDQNNNRASFSQYGAGLDIVAPGVNVQSTYPGSTYASLNGTSMATPHVAGAAALVKQKNGSWSNVQIRNHLKNTATSLGSTNLYGSGLVNAEAATR

SEQ ID NO: 55667 - protein, 269 aa, Bacillus subtilis
AQSVPWGISRVQAPAAHNRGLTGSGVKVAVLDTGISTHPDLNIRGGASFVPGEPSTQDGNGHGTHVAGTIAALNNSIGVLGVAPSAELYAVKVLGASGSGSVSSIAQGLEWAGNNGMDVANLSLGSPSPSATLEQAVNSATSRGVLVVAASGNSGAGSISYPAYYANAMAVGATDQNNNRASFSQYGAELDIVAPGVNVQSTYPGSTYASLNGTSMATPHVAGAAALVLQKNPSWSNVQIRNHLENTATSLGSTNLYGSGLVNAEAATR

SEQ ID NO: 55668 - protein, 269 aa, Unidentified
AQSVPWGISRVQAPAAHNRGLTGRGVKVAVLDTGISTHPDLNIRGGASFVPGEPSTQDGNGHGTHVAGTIAALDNSIGVLGVAPSAELYAVKVLGASGSGSISSIAQGLEWAGNNGMHVANLSLGSPSPSATLEQAVNSATSRGVLVVAASGNSGAGSISYPARYANAMAVGATDQNNNRASFSQYGAGLDIVAPGVNVQSTYPGSTYASLNGTSMATPHVAGAAVLVKQKNPSWSNVRIRNHLKNTATSLGSTNLYGSGLVNAEAATR

SEQ ID NO: 55669 - protein, 269 aa, Unidentified
AQSVPWGISRVQAPAAHNRGLTGSRVKVAVLDTGISTHPDLNIRGGASFVPGEPSTQDGQGHGTHVAGTIAALNNSIGVLGVAPSAELYAVKVLGASGSGSVSSIAQGLEWAGNNGMHVANLSLGNPSPSATLEQAVNSATRRGVLVVAASGNSGAGSISYPARYANAMAVGATDQNNIRASFSQYGAGLDIVAPGVNVQSTYPGSTYASLNGTSMATPHVAGAAALVKQKNPSWSNVQIRNHLKNTATSLGSTNLYGSGLVNAEAATR

SEQ ID NO: 55670 - protein, 269 aa, Unidentified
AQSVPWGISRVQAPAAHNRGLTGSGVKVAVLDSGISTHPDLNIRGGASFVPGEPSTQDGNGHGTHVAGTIAALNNSIGVLGVAPSAELYAVKVLGASGSGSVSSIAQGLEWAGLNRMHVANLSLGSPSPSATLEQAVNSATSRGVLVVAASGNSGEGSISYPARYANAMAVGATDQNNNRADFSQYGAGLDIVAPGVNVQSTYPGSTYASLNGTSMATPHVAGAAALVKQKNPSWSNVQIRNHLKNTATSLGSTNLYGSGLVNAEAATR

SEQ ID NO: 55671 - protein, 269 aa, Unidentified
AQSVPWGISRVQAPAAHNRGLTGSGVKVAVLDTGISTHPDLNIRGGASFVPGEPSTQDGNGHGTHVAGTIAALNNSIGVLGVAPSAELYAVKVLGASGSGSVSSIAQGLEWAGNNVMHVANLSLGREKPSATLEQAVNSATSRGVLVVAASGNSGAGSIDYPARYANAMAVGATDQNNNRASFSQYGAGLDIVAPGVNVQSTYPGSTYASLNGTSMATPHVAGAAALVKQKNPSWSNVQIRNHLKNTATSLGSTNLYGSGLVNAEAATR

SEQ ID NO: 55672 - protein, 269 aa, Unidentified
AQSVPWGISRVQAPAAHNRKLTGFGVKVAVLDTGISTHPDLNIRGGASFVPGEPSTQDGNGHGTHVAGTIAALNNNIGVLGVAPSAELYAVKVLGASGSGSVSSIAQGLEWAGNNRMHVANLSLGSPSPSATLEQAVNSATSRGVLVVAASGNSGAGSISYPARYANAMAVGATDQNNNRASFSQYGAGLDIVAPGVNVQSTYPGSTYASENGTSMATPHVAGAAALVKQKNPSWSNVQIRNHLKNTATSLGSTNLYGSGLVNAEAATR

SEQ ID NO: 55673 - protein, 269 aa, Unidentified
AQSVPWGISRVQAPAAHNRGLAGSGVKVAVLDTGISTHPDLNIRGGASFVPGEPSTQDGNGHGTHVAGTIAALNNSIGVLGVAPSAELYAVKVLGASGSGALSSIAQGLEWAGNNGMHVANLSLGNPSPSATLEQAVNSATSRGVIVVAASGNSGAGSISYPARYANAMAVGATDQNNNRASFSQYGAGLDIVAPGVNVQSTYPGSTYASLNGTSMATPHVAGAAALVKQKNPSWSNVQIRNHLKNTATSLGSTNLYGSGLVNAEAATR

SEQ ID NO: 55674 - protein, 269 aa, Unidentified
AQSVPWGISRVQAPAAHNRGLTGSGVKVAVLDTGISTHPDLNIRGGASFVPGEPSTQDGNGHGTHVAGTIAALNNSIGVLGVAPSAELYAVKVLGASGSGSVSSIAQGLEWAGNNRMHVANLSLGSESPSATLEQAVNSATSRGVLVVAASGNSGADSISYPARYANAMAVGATDQNNNRASFSQYGAGLDIVAPGVNVQSTYPGSTYASLNGTSMATPHVAGAAALVKQKNPSWSNVRIRDHLKNTATSLGSTNLYGSGLVNAEAATR

SEQ ID NO: 55675 - protein, 269 aa, Unidentified
AQSVPWGISRVQAPAAHNRGLAGSGVKVAVLDTGISTHPDLNIRGGASFVPGEPSTQDGNGHGTHVAGTIAALNNSIGVLGVAPSAELYAVKVLGASGAGALSSIAQGLEWAGNNGMHVANLSLGNPSPSATLEQAVNSATSRGVLVVAASGNSGAGSISYPARYANAMAVGATDQNNNRASFSQYGAGLDIVAPGVNVQSTYPGSTYASLNGTSMATPHVAGAAALVKQKNPSWSNVQIRNHLKNTATSLGSTNLYGSGLVNAEAATR

SEQ ID NO: 55676 - protein, 269 aa, Unidentified
AQSVPWGISRVQAPAAHNRGLTGSGVKVAVLDTGISTHPDLNIRGGASFVPGEPSTQDGEGHGTHVAGTIAALNNGIGVLGVAPSAELYAVKVLGASGSGSVSSIAQGLEWAGNNSMHVANLSLGSESPSATLEQAVNSATSRGVLVVAASGNSGADSISYPARYANAMAVGATDQNNNRASFSQYGAGLDIVAPGVNVQSTYPGSTYASLNGTSMATPHVAGAAALVKQKNPSWSNVQIRNHLKNTATSLGSTNLYGSGLVNAEAATR

SEQ ID NO: 55677 - protein, 269 aa, Unidentified
AQSVPWGISRVQAPAAHNRGLTGSGVKVAVLDTGISTHPDLNIRGGASFVPGEPSTQDGNGHGTHVAGTIAALNNSIGVLGVAPSAELYAVKVLGASGSGSVSSIAQGLEWAGNNGMHVANLSLGSPSPSATLEQAVNSATSRGVLVVAASGNSGEGSISYPARYANAMAVGATDQNNNHADFSQYGAGLDIVAPGVNVQSTYPGSTYASLNGTSMATPHVAGAAALVKQKNPSWSNVQIRNRLKNTATSLGSTNLYGSGLVNAFAATR

SEQ ID NO: 55678 - protein, 269 aa, Synthetic construct
AQSVPWGISRVQAPAAHNRGLTGSGVRVAVLDTGISTHPDLNIRGGASFVPGEPSTQDGNGHGTHVAGTIAALDNSIGVLGVAPSAELYAVKVLGASGSGSYSSIAQGLEWAGNNGMHVASLSLGSPSPSATLEQAVNSATSRGVLVVAASGNSGAGSISYPARYANAMAVGATDQNNNRASFSQYGAGLDIVAPGVNVLSTYPGSTYASLNGTSMATPHVAGAAALVKQKNPSWSNVQIRNHLKNTATSLGSTNLYGSGLVNAEAATR

SEQ ID NO: 55679 - protein, 269 aa, Unidentified
AQSVPWGISRVQAPAAHNRGLAGRGVKVAVLDSGISTHPDLNIRGGASFVPGEPSTQDGNGHGTHVAGTIAALNNSIGVLGVAPSAELYAVKVLGASGSGSVSSIAQGLEWAGNNRMHVANLSLGSPSPSATLEQAVNSATSRGVLVVAASGNSGAGSIDYPARYANAMAVGATDQNNNRASFSQYGAGLDIVAPGVNVQSTYPGSTYASLNGTSMATPHVAGAAALVKQKNPSWSNVQIRNHLKNTATSLGSTNLYGSGLVNAEAATR

SEQ ID NO: 55680 - protein, 269 aa, Unidentified
AQSVPWGISRVQAPAAHNRGLTGRGVKVAVLDTGISTHPDLNIRGGASFVPGEPSTQDGNGHGTHVAGTIAALNNDIGVLGVAPSAELYAVKVLGASGSGSVSSIAQGLEWAGNNSMHVANLSLGSESPSATLEQAVNSATSRGVLVVAASGNSGAGSISYPARYANAMAVGATDQNNNRADFSQYGAGLDIVAPGVNVQSTYPGSTYASLNGTSMATPHVAGAAALVKQKNPSWSNVQIRNHLKNTATSLGSTNLYGSGLVNAEAATR

SEQ ID NO: 55681 - protein, 269 aa, Unidentified
AQSVPWGISRVQAPAAHNRGLTGRGVKVAVLDTGISTHPDLNIRGGASFVPGEPSTQDGNGHGTHVAGTIAALDNSIGVLGVAPSAELYAVKVLGASGGGSVSSIAQGLEWAGNNGMHVANLSLGSPSPSATLEQAVNSATSRGVLVVAASGNSGAGSISYPARYANAMAVGATDQNNNRASFSQYGAGLDIVAPGVNVQSTYPGSTYASLNGTSMATPHVAGAAVLVKQKNPSWSNVQIRNRLKNTATSLGSTNLYGSGLVNAEAATR

SEQ ID NO: 55682 - protein, 269 aa, Unidentified
AQSVPWGISRVQAPAAHNRKLTGSGVKVAVLDTGISTHPDLNIRGGASFVPGELSTQDGEGHGTHVAGTIAALNNSIGVLGVAPSAELYAVKVLGASGSGSVSSIAQGLEWAGLNGMHVANLSLGIPSPSATLEQAVNSATSRGVLVVAASGNSGAGSISYPARYANAMAVGATDQNNNRASFSQYGAGLDIVAPGVNVQSTYPGSTYASLNGTSMATPHVAGAAALVKQKNPSWSNVQIRNHLKNTATSLGSTNLYGSGLVNAEAATR

SEQ ID NO: 55683 - protein, 269 aa, Unidentified
AQSVPWGISRVQAPAAHNRGLTGRGVKVAVLDSGISTHPDLNIRGGASFVPGEPSTQDGNGHGTHVAGTIAALNNSIGVLGVAPSAELYAVKVLGASGSGSVSSIAQGLEWAGLNRMHVANLSLGSPSPSATLEQAVNSATSRGVLVVAASGNSGEGSISYPARYANAMAVGATDQNNNRASFSQYGAGLDIVAPGVNVQSTYPGSTYASLNGTSMATPHVAGAAALVKQKNPSWSNVQIRNHLKNTATSLGSTNLYGSGLVNAEAATR

SEQ ID NO: 55684 - protein, 269 aa, Unidentified
AQSVPWGISRVQAPAAHNRKLTGSGVKVAVLDTGISTHPDLNIRGGASFVPGEPSTQDGNGHGTHVAGTIAALNNNIGVLGVAPSAELYAVKVLGASGDGSVSSIAQGLEWAGNNGMHVANLSLGSPSPSATLEQAVNSATSRGVLVVAASGNSGAGSISYPARYANAMAVGATDQNNNRASFSQYGAGLDIVAPGVNVQSTYPGSTYASENGTSMATPHVAGAAALVKQKNPRWSNVQIRNHLKNTATSLGSTNLYGSGLVNAEAATR

SEQ ID NO: 55685 - protein, 269 aa, Unidentified
AQSVPWGISRVQAPAAHNRGLTGSGVKVAVLDTGISTHPDLNVRGGVSFVPGEPSYQDGNGHGTHVAGTIAALNNSIGVLGVAPSAELYAVKVLGASGSGSVSSIAQGLEWAGQNGMHVANLSLGSPSPSATLEQAVNSATSRGVLVVAASGNSGAGSISYPARYANAMAVGATDQNNNRASFSQYGAGLDIVAPGVNVQSTYPGSTYASLNGTSMATPHVAGAAALVKQKNPSWSNVQIRDHLKNTATSLGSTNLYGSGLVNAEAATR

SEQ ID NO: 55686 - protein, 269 aa, Unidentified
AQSVPWGISRVQAPAAHNRGLTGGGVKVAVLDTGISTHPDLNIRGGASFVPGEPSTQDGNGHGTHVAGTIAALNNNIGVLGVAPSAELYAVKVLAASGGGSVSSIAQGLEWAGNNGMHVANLSLGSPSPSATLEQAVNSATSRGVLVVAASGNSGAGSISYPARYANAMAVGATDQNNNRADFSQYGAGLDIVAPGVNVQSTYPGSTYASLNGTSMATPHVAGAAALVKQKNPSWSNVQIRNHLKNTATSLGSTNLYGSGLVNAEAATR

SEQ ID NO: 55687 - protein, 269 aa, Unidentified
AQSVPWGISRVQAPAAHNRGLLGFGVKVAVLDTGISTHPDLNIRGGASFVPGEPSTQDGNGHGTHVAGTIAALNNSIGVLGVAPSAELYAVKVLGASGSGSVSSIAQGLEWAGNNRMHVANLSLGSPSPSATLEQAVNSATSRGVLVVAASGNSGAGSISYPARYANAMAVGATDQNNNRASFSQYGAGLDIVAPGVNVQSTYPGSAYASENGTSMATPHVAGAAALVKQKNPSWSNVQIRNHLKNTATSLGSTNLYGSGLVNAEAATR

SEQ ID NO: 55688 - protein, 269 aa, Unidentified
AQSVPWGISRVQAPAAHNRGLTGSGVKVAVLDTGISTHPDLNIRGGASFVPGEPSTQDGNGHGTHVAGTIAALDNSIGVLGVAPSAELYAVKVLGASGSGAISSIAQGLEWAGNNGMHVANLSLGSPSPSATLEQAVNSATSRGVLVVAASGNSGAGSISYPARYANAMAVGATDQNNNRASFSQYGAGLDIVAPGVNVQSTYPGSTYASLNGTSMATPHVAGAAVLVKQKNPSWSNVRIRNHLKNTATSLGSTNLYGSGLVNAEAATR

SEQ ID NO: 55689 - protein, 269 aa, Unidentified
AQSVPWGISRVQAPAAHNRKLTGFGVKVAVLDTGISTHPDLNIRGGASFVPGEPSTQDGNGHGTHVAGTIAALNNNIGVLGVAPSAELYAVKVLGASGSGSVSSIAQGLEWAGNNRMHVANLSLGSPSPSATLEQAVNSATSRGVLVVAASGNSGAGSIDYPARYANAMAVGATDQNNNRASFSQYGAGLDIVAPGVNVQSTYPGSTYASLNGTSMATPHVAGAAALVKQKNPSWSNVQIRNHLKNTATSLGSTNLYGSGLVNAEAATR

SEQ ID NO: 55690 - protein, 269 aa, Unidentified
AQSVPWGISRVQAPAAHNRGLLGSGVKVAVLDTGISTHPDLNIRGGASFVPGEPSTQDGNGHGTHVAGTIAALNNSIGVLGVAPSAELYAVKVLGASGSGSVSSIAQGLEWAGNNRMHVANLSLGDPSPSATLEQAVNSATSRGVLVVAASGNSGAGSISYPARYANAMAVGATDQNNNRASFSQYGAGLDIVAPGVNVQSTYPGSAYASENGTSMATPHVAGAAALVKQKNPSWSNVQIRNHLKNTATSLGSTNLYGSGLVNAEAATR

SEQ ID NO: 55691 - protein, 269 aa, Unidentified
AQSVPWGISRVQAPAAHNRRLTGSGVKVAVLDTGISTHPDLNIRGGASFVPGEPSTQDGNGHGTHVAGTIAALNNDIGVLGVAPSAELYAVKVLGASGSGSVSSIAQGLEWAGNNSMHVANLSLGSPSPSATLEQAVNSATSRGVLVVAASGNSGAGSISYPARYANAMAVGATDQNNNRASFSQYGAGLDIVAPGVNVQSTYPGSTYASLNGTSMATPHVAGAAALVKQKNPSWSNVRIRNRLKNTATSLGSTNLYGSGLVNAEAATR

SEQ ID NO: 55692 - protein, 269 aa, Unidentified
AQSVPWGISRVQAPAAHNRRLTGSGVKVAVLDTGISTHPDLNIRGGASFVPGEPSTQDGEGHGTHVAGTIAALNNDIGVLGVAPSAELYAVKVLGASGSGSVSSIAQGLEWAGNNDMHVANLSLGSPSPSATLEQAVNSATSRGVLVVAASGNSGAGSISYPARYANAMAVGATDQNNNRADFSQYGAGLDIVAPGVNVQSTYPGSTYASLNGTSMATPHVAGAAALVKQKNPSWSNVQIRNHLKNTATSLGSTNLYGSGLVNAEAATR

SEQ ID NO: 55693 - protein, 269 aa, Unidentified
AQSVPWGISRVQAPAAHNRGLTGSGVKVAVLDTGISTHPDLNIRGGASFVPGEPSTQDGNGHGTHVAGTIAALNNGIGVLGVAPSAELYAVKVLGASGSGSVSSIAQGLEWAGNNSMHVANLSLGSPSPSATLEQAVNSATSRGVLVVAASGNSGADSISYPARYANAMAVGATDQNNNRADFSQYGAGLDIVAPGVNVQSTYPGSTYASLNGTSMATPHVAGAAALVKQKNPSWSNVQIRNRLKNTATSLGSTNLYGSGLVNAEAATR

SEQ ID NO: 55694 - protein, 269 aa, Unidentified
AQSVPWGISRVQAPAAHNRRLTGRGVKVAVLDTGISTHPDLNIRGGASFVPGEPSTQDGNGHGTHVAGTIAALNNSIGVLGVAPSAELYAVKVLGASGAGSVSSIAQGLEWAGLNGMHVANLSLGSPSPSATLEQAVNSATSRGVLVVAASGNSGAGSISYPARYANAMAVGATDQNNNRASFSQYGAGLDIVAPGVNVQSTYPGSTYASLNGTSMATPHVAGAAALVKQKNPSWSNVQIRNHLKNTATSLGSTNLYGSGLVNAIAATR

SEQ ID NO: 55695 - protein, 269 aa, Unidentified
AQSVPWGISRVQAPAAHNRRLTGSGVKVAVLDTGISTHPDLNIRGGASFVPGEPSTQDGNGHGTHVAGTIAALNNSIGVLGVAPSAELYAVKVLGASGSGSVSSIAQGLEWAGNNGMHVANLSLGSESPSATLEQAVNSATSRGVLVVAASGNSGADSISYPARYANAMAVGATDQNNNRASFSQYGAGLDIVAPGVNVQSTYPGSTYASLNGTSMATPHVAGAAALVKQKNPSWSNVRIRDHLKNTATSLGSTNLYGSGLVNAEAATR

SEQ ID NO: 55696 - protein, 269 aa, Unidentified
AQSVPWGISRVQAPAAHNRGLTGSGVKVAVLDTGISTHPDLNIRGGASFVPGEPSTQDGEGHGTHVAGTIAALNNGIGVLGVAPSAELYAVKVLGASGSGSVSSIAQGLEWAGNNSMHVANLSLGSPSPSATLEQAVNSATSRGVLVVAASGNSGAGSISYPARYANAMAVGATDQNNNRASFSQYGAGLDIVAPGVNVQSTYPGSTYASLNGTSMATPHVAGAAALVKQKNPSWSNVQIRDRLKNTATSLGSTNLYGSGLVNAEAATR

SEQ ID NO: 55697 - protein, 269 aa, Unidentified
AQSVPWGISRVQAPAAHNRRLTGSGVKVAVLDTGISTHPDLNIRGGASFVPGEPSTQDGNGHGTHVAGTIAALNNDIGVLGVAPSAELYAVKVLGASGSGSVSSIAQGLEWAGNNDMHVANLSLGSPSPSATLEQAVNSATSRGVLVVAASGNSGADSISYPARYANAMAVGATDQNNNRADFSQYGAGLDIVAPGVNVQSTYPGSTYASLNGTSMATPHVAGAAALVKQKNPSWSNVQIRNHLKNTATSLGSTNLYGSGLVNAEAATR

SEQ ID NO: 55698 - protein, 269 aa, Unidentified
AQSVPWGISRVQAPAAHNRKLLGSGVKVAVLDTGISTHPDLNIRGGASFVPGEPSTQDGNGHGTHVAGTIAALNNSIGVLGVAPSAELYAVKVLGASGSGSVSSIAQGLEWAGNNGMHVANLSLGSPSPSATLEQAVNSATSRGVLVVAASGNSGAGSIDYPARYANAMAVGATDQNNNRASFSQYGAGLDIVAPGVNVQSTYPGSAYASENGTSMATPHVAGAAALVKQKNPSWSNVQIRNHLKNTATSLGSTNLYGSGLVNAEAATR

SEQ ID NO: 55699 - protein, 269 aa, Unidentified
AQSVPWGISRVQAPAAHNRGMTGSGVKVAVLDTGISTHPDLNIRGGASFVPGEPSTQDGNGHGTHVAGTIAALDNSIGVLGVAPSAELYAVKVLGASGSGAISSIAQGLEWAGNNGMHVANLSLGSPSPSATLEQAVNSATSRGVLVVAASGNSGAGSISYPARYANAMAVGATDRNNNRASFSQYGAGLDIVAPGVNVQSTYPGSTYASLNGTSMATPHVAGAAALVKQKNPSWSNVQIRNHLKNTATSLGSTNLYGSGLVNAEAATR

SEQ ID NO: 55700 - protein, 269 aa, Unidentified
AQSVPWGISRVQAPAAHNRKLTGSGVKVAVLDTGISTHPDLNIRGGASFVPGEPSTQDGEGHGTHVAGTIAALNNSIGVLGVAPSAELYAVKVLGASGQGSVSSIAGGLEWAGLNGMHVANLSLGAPSPSATLEQAVNSATSRGVLVVAASGNSGAGSISYPARYANAMAVGATDQNNNRASFSQYGAGLDIVAPGVNVQSTYPGSTYASLNGTSSATPHVAGAAALVKQKNPSWSNVQIRNHLKNTATSLGSTNLYGSGLVNAEAATR

SEQ ID NO: 55701 - protein, 269 aa, Unidentified
AQSVPWGISRVQAPAAHNRGLTGFGVKVAVLDTGISTHPDLNIRGGASFVPGEPSTQDGNGHGTHVAGTIAALNNNIGVLGVAPSAELYAVKVLGASGSGSVSSIAQGLEWAGNNRMHVANLSLGDPSPSATLEQAVNSATSRGVLVVAASGNSGAGSISYPARYANAMAVGATDQNNNRASFSQYGAGLDIVAPGVNVQSTYPGSTYASENGTSMATPHVAGAAALVKQKNPSWSNVQIRNHLKNTATSLGSTNLYGSGLVNAEAATR

SEQ ID NO: 55702 - protein, 269 aa, Unidentified
AQSVPWGISRVQAPAAHRRGLRGRGVKVAVLDTGISTHPDLNIRGGASFVPGEPSTQDGNGHGTHVAGTIAALDNSIGVLGVAPSAELYAVKVLGASGSGSVSSIAQGLEWAGNNGMHVANLSLGSPSPSATLEQAVNSATSRGVLVVAASGNSGAGSISYPARYANAMAVGATDQNNNRASFSQYGAGLDIVAPGVNVQSTYPGSTYASLNGTSMATPHVAGAAALVKQKNPSWSNVQIRNRLKNTATSLGSTNLYGSGLVNAEAATR

SEQ ID NO: 55703 - protein, 269 aa, Unidentified
AQSVPWGISRVQAPAAHNRGLTGSGVKVAVLDTGISTHPDLNIRGGASFVPGEPSTQDGNGHGTHVAGTIAALNNSIGVLGVAPRAELYAVKVLGASGSGSVSSIAQGLEWAGNNVMHVANLSLGLQAPSATLEQAVNSATSRGVLVVAASGNSGAGSISYPARYANAMAVGATDQNNNRASFSQYGAGLDIVAPGVNVQSTYPGSTYASLNGTSMATPHVAGAAALVKQKNPSWSNVQIRNHLKNTATSLGSTNLYGSGLVNAEAATR

SEQ ID NO: 55704 - protein, 269 aa, Unidentified
AQSVPWGISRVQAPAAHNRGLAGSGVKVAVLDTGISTHPDLNIRGGASFVPGEPSTQDGNGHGTHVAGTIAALNNSIGVLGVAPSAELYAVKVLGASGAGGISSIAQGLEWAGNNGMHVANLSLGNPSPSATLEQAVNSATSRGVLVVAASGNSGAGSISYPARYANAMAVGATDQNNNRASFSQYGAGLDIVAPGVNVQSTYPGSTYASLNGTSMATPHVAGAAALVKQKNPSWSNVQIRNHLKNTATSLGSTNLYGSGLVNAEAATR

SEQ ID NO: 55705 - protein, 269 aa, Synthetic construct
AQSVPWGISRVQAPAAHNRGLTGSGVRVAVLDTGISTHPDLNIRGGASFVPGEPSTQDGNGHGTHVAGTIAALDNSIGVLGVAPSAELYAVKVLGASGSGSYSSVAQGLEWAGNNGMHVASLSLGSPSPSATLEQAVNSATSRGVLVVAASGNSGAGSISYPARYANAMAVGATDQNNNRASFSQYGAGLDIVAPGVNVQSTYPGSTYASLNGTSMATPHVAGAAALVKQKNPSWSNVQIRNHLKNTATSLGSTNLYGSGLVNAEAATR

SEQ ID NO: 55706 - protein, 269 aa, Unidentified
AQSVPWGISRVQAPAAHNRGLTGSGVKVAVLDTGISTHPDLNIRGGASFVPGEPSTQDGNGHGTHVAGTIAALNNSIGVLGVAPSAELYAVKVLGASGDGNVSSIAQGLEWAGLNGMHVANLSLGSPSPSATLEQAVNSATRRGVLVVAASGNSGAGSISYPARYANAMAVGATDQNNNRASFSQYGAGLDIVAPGVNVQSTYPGSTYDSLNGTSMATPHVAGAAALVKQKNPSWSNVQIRNHLKNTATSLGSTNLYGSGLVNAEAATR

SEQ ID NO: 55707 - protein, 269 aa, Unidentified
AQSVPWGISRVQAPAAHNRGLTGSGVKVAVLDTGISTHPDLNIRGGASFVPGEPSTQDGEGHGTHVAGTIAALNNDIGVLGVAPSAELYAVKVLGASGSGSVSSIAQGLEWAGNNSMHVANLSLGSPSPSATLEQAVNSATSRGVLVVAASGNSGAGSISYPARYANAMAVGATDQNNNRADFSQYGAGLDIVAPGVNVQSTYPGSTYASLNGTSMATPHVAGAAALVKQKNPSWSNVRIRNHLKNTATSLGSTNLYGSGLVNAEAATR

SEQ ID NO: 55708 - protein, 269 aa, Unidentified
AQSVPWGISRVQAPAAHNRKLLGFGVKVAVLDTGISTHPDLNIRGGASFVPGEPSTQDGNGHGTHVAGTIAALNNSIGVLGVAPSAELYAVKVLGASGSGSVSSIAQGLEWAGNNGMHVANLSLGDPSPSATLEQAVNSATSRGVLVVAASGNSGAGSISYPARYANAMAVGATDQNNNRASFSQYGAGLDIVAPGVNVQSTYPGSTYASENGTSMATPHVAGAAALVKQKNPSWSNVQIRNHLKNTATSLGSTNLYGSGLVNAEAATR

SEQ ID NO: 55709 - protein, 269 aa, Unidentified
AQSVPWGISRVQAPAAHNRGLTGSGVKVAVLDTGISTHPDLNIRGGASFVPGEPSTQDGNGHGTHVAGTIAALNNSIGVLGVAPSAELYAVKVLGASGSGSLSSIAQGLEWAGNNGMHVANLSLGNPSPSATLEQAVNSATSRGVLVVAASGNSGEGSISYPARYANAMAVGATDQNNNRADFSQYGAGLDIVAPGVNVQSTYPGSTYASLNGTSMATPHVAGAAALVKQKNPSWSNVQIRNRLKNTATSLGSTNLYGSGLVNAEAATR

SEQ ID NO: 55710 - protein, 269 aa, Unidentified
AQSVPWGISRVQAPAAHNRGLTGRGVKVAVLDTGISTHPDLNIRGGASFVPGEPSTQDGNGHGTHVAGTIAALNNSIGVLGVAPSAELYAVKVLGASGSGSVSSIAQGLEWAGLNRMHVANLSLGSPSPSATLEQAVNSATSRGVLVVAASGNSGAGSIDYPARYANAMAVGATDQNNNRADFSQYGAGLDIVAPGVNVQSTYPGSTYASLNGTSMATPHVAGAAALVKQKNPSWSNVQIRNHLKNTATSLGSTNLYGSGLVNAEAATR

SEQ ID NO: 55711 - protein, 269 aa, Unidentified
AQSVPWGISRVQAPAAHNRRLTGSGVKVAVLDTGISTHPDLNIRGGASFVPGEPSTQDGNGHGTHVAGTIAALNNSIGVLGVAPSAELYAVKVLGASGGGSISSIAQGLEWAGNNGMHVANLSLGSPSPSATLEQAVNSATSRGVLVVAASGNSGAGSISYPARYANAMAVGATDQNNNRASFSQYGAGLDIVAPGVNVQSTYPGSTYASLNGTSMATPHVAGAAVLVKQKNPSWRNVQIRNHLKNTATSLGSTNLYGSGLVNAEAATR

SEQ ID NO: 55712 - protein, 269 aa, Unidentified
AQSVPWGISRVQAPAAHNRRLTGRGVKVAVLDTGISTHPDLNIRGGASFVPGEPSTQDGNGHGTHVAGTIAALNNSIGVLGVAPSAELYAVKVLGASGAGSVSSIAQGLEWAGNNGMHVANLSLGSPSPSATLEQAVNSATSRGVLVVAASGNSGAGSISYPARYANAMAVGATDQNNNRASFSQYGAGLDIVAPGVNVQSTYIQSTYASLNGTSMATPHVAGAAALVKQKNPSWSNVQIRNHLKNTATSLGSTNLYGSGLVNAEAATR

SEQ ID NO: 55713 - protein, 269 aa, Unidentified
AQSVPWGISRVQAPAAHNRGLTGSGVKVAVLDTGISTHPDLNIRGGASFVPGEPSTQDGNGHGTHVAGTIAALNNDIGVLGVAPSAELYAVKVLGASGSGSVSSIAQGLEWAGNNDMHVANLSLGSPSPSATLEQAVNSATSRGVLVVAASGNSGADSISYPARYANAMAVGATDQNNNRASFSQYGAGLDIVAPGVNVQSTYPGSTYASLNGTSMATPHVAGAAALVKQKNPSWSNVRIRDHLKNTATSLGSTNLYGSGLVNAEAATR

SEQ ID NO: 55714 - protein, 269 aa, Unidentified
AQSRPWGIARVQAPAAHNRRLTGRGVKVAVLDTGISTHPDLNIRGGASFVPGEPSTQDGNGHGTHVAGTIAALNNSIGVLGVAPSAELYAVKVLGASGSGSVSSIAQGLEWAGNNGMHVANLSLGSPSPSATLEQAVNSATSRGVLVVAASGNSGAGSISYPARYANAMAVGATDQNNNRASFSQYGAGLDIVAPGVNVQSTYPGSTYASLNGTSMATPHVAGAAALVKQKNPSWRNVQIRNHLKNTATSLGSTNLYGSGLVNAEAATR

SEQ ID NO: 55715 - protein, 269 aa, Unidentified
AQSVPWGISRVQAPAAHNRRLTGSGVKVAVLDTGISTHPDLNIRGGASFVPGEPSTQDGNGHGTHVAGTIAALNNGIGVLGVAPSAELYAVKVLGASGSGSVSSIAQGLEWAGNNDMHVANLSLGSPSPSATLEQAVNSATSRGVLVVAASGNSGAGSISYPARYANAMAVGATDQNNNRADFSQYGAGLDIVAPGVNVQSTYPGSTYASLNGTSMATPHVAGAAALVKQKNPSWSNVQIRDHLKNTATSLGSTNLYGSGLVNAEAATR

SEQ ID NO: 55716 - protein, 269 aa, Unidentified
AQSVPWGISRVQAPAAHNRGLTGSGVKVAVLDTGISTHPDLNIRGGASFVPGEPSTQDGQGHGTHVAGTIAALNNSIGVLGVAPSAELYAVKVLGASGAGSVSSIAQGLEWAGNNGMHVANLSLGSPSPSATLEQAVNSATSRGVLVVAASGNSGAGSISYPARYANAMAVGATDQNNNRASFSQYGAGLDIVAPGVNVQSTYPGSTYASLNGTSMATPHVAGAAALVKNKNPSWSNVQIRNHLKRTATSLGSTNLYGSGLVNCEAATR

SEQ ID NO: 55717 - protein, 269 aa, Unidentified
AQSVPWGISRVQAPAAHNRGLTGSGVKVAVLDTGISTHPDLNIRGGASFVPGEPSTQDGNGHGTHVAGTIAALNNSIGVLGVAPSAELYAVKVLPQSGAGGLSSIAQGLEWAGNNGMHVANLSLGSPSPSATLEQAVNSATSRGVLVVAASGNSGAGSISYPARYANAMAVGATDQNNNRASFSQYGAGLDIVAPGVNVQSTYPGSTYASLNGTSMATPHVAGAAALVKQKNPSWSNVQIRNHLKNTATSLGSTNLYGSGLVNAEAATR

SEQ ID NO: 55718 - protein, 269 aa, Unidentified
AQSVPWGISRVQAPAAHNRGLTGSGVKVAVLDTGISTHPDLNIRGGASFVPGEPSTQDGNGHGTHVAGTIAALDNSIGVLGVAPSAELYAVKVLGASGGGAISSIAQGLEWAGNNGMHVANLSLGSPSPSATLEQAVNSATSRGVLVVAASGNSGAGSISYPARYANAMAVGATDQNNNRASFSQYGAGLDIVAPGVNVQSTYPGSTYASLNGTSSATPHVAGAAVLVKQKNPSWSNVRIRNHLKNTATSLGSTNLYGSGLVNAEAATR

SEQ ID NO: 55719 - protein, 269 aa, Unidentified
AQSVPWGISRVQAPAAHNRGLRGSGVKVAVLDTGISTHPDLNIRGGASFVPGEPSTQDGNGHGTHVAGTIAALNNSIGVLGVAPSAELYAVKVLGASGGGSISSIAQGLEWAGNNGMHVANLSLGSPSPSATLEQAVNSATSRGVLVVAASGNSGAGSISYPARYANAMAVGATDQNNNRASFSQYGAGLDIVAPGVNVQSTYPGSTYASLNGTSMATPHVAGAAVLVKQKNPSWSNVRIRNHLKNTATSLGSTNLYGSGLVNAEAATR

SEQ ID NO: 55720 - protein, 269 aa, Unidentified
AQSVPWGISRVQAPAAHNRGLTGSGVKVAVLDTGISTHPDLNIRGGASFVPGEPSTQDGNGHGTHVAGTIAALNNSIGVLGVAPSAELYAVKVLPATGSAAISSIAQGLEWAGNNGMHVANLSLGSPSPSATLEQAVNSATSRGVLVVAASGNSGAGSISYPARYANAMAVGATDQNNNRASFSQYGAGLDIVAPGVNVQSTYPGSTYASLNGTSMATPHVAGAAALVKQKNPSWSNVQIRNHLKNTATSLGSTNLYGSGLVNAEAATR

SEQ ID NO: 55721 - protein, 269 aa, Unidentified
AQSVPWGISRVQAPAAHNRGLTGSGVKVAVLDSGISTHPDLNIRGGASFVPGEPSTQDGNGHGTHVAGTIAALNNSIGVLGVAPSAELYAVKVLGASGSGSVSSIAQGLEWAGLNRMHVANLSLGSPSPSATLEQAVNSATSRGVLVVAASGNSGAGSIDYPARYANAMAVGATDQNNNRADFSQYGAGLDIVAPGVNVQSTYPGSTYASLNGTSMATPHVAGAAALVKQKNPSWSNVQIRNHLKNTATSLGSTNLYGSGLVNAEAATR

SEQ ID NO: 55722 - protein, 269 aa, Unidentified
AQSVPWGISRVQAPAAHNRGLAGSGVKVAVLDSGISTHPDLNIRGGASFVPGEPSTQDGNGHGTHVAGTIAALNNSIGVLGVAPSAELYAVKVLGASGSGSVSSIAQGLEWAGLNGMHVANLSLGIPSPSATLEQAVNSATSRGVLVVAASGNSGEGSISYPARYANAMAVGATDQNNNRASFSQYGAGLDIVAPGVNVQSTYPGSTYASLNGTSMATPHVAGAAALVKQKNPSWSNVQIRNHLKNTATSLGSTNLYGSGLVNAEAATR

SEQ ID NO: 55723 - protein, 269 aa, Unidentified
AQSVPWGISRVQAPAAHNRGLTGSGVKVAVLDTGISTHPDLNIRGGASFVPGEPSTQDGNGHGTHVAGTIAALNNSIGVLGVAPNAELYAVKVLGASGSGSVSSIAQGLEWAGNNVMHVANLSLGNSAPSATLEQAVNSATSRGVLVVAASGNSGAGSISYPARYANAMAVGATDQNNNRASFSQYGAGLDIVAPGVNVQSTYPGSTYASLNGTSMATPHVAGAAALVKQKNPSWSNVQIRNHLKNTATSLGSTNLYGSGLVNAEAATR

SEQ ID NO: 55724 - protein, 269 aa, Unidentified
AQSVPWGISRVQAPAAHNRGLAGSGVKVAVLDTGISTHPDLNIRGGASFVPGEPSTQDGNGHGTHVAGTIAALNNSIGVLGVAPSAELYAVKVLGASGAGSVSSIAQGLEWAGNNGMHVANLSLGSPSPSATLEQAVNSATSRGVLVVAASGNSGEGSISYPARYANAMAVGATDQNNNHASFSQYGAGLDIVAPGVNVQSTYPGSTYASLNGTSMATPHVAGAAALVKQKNPSWSNVQIRNRLKNTATSLGSTNLYGSGLVNAEAATR

SEQ ID NO: 55725 - protein, 269 aa, Unidentified
AQSVPWGISRVQAPASHNRGLTGSGVKVAVLDTGISTHPDLNIRGGASFVPGEPSTQDGEGHGTHVAGTIAALNNSIGVLGVAPSAELYAVKVLGASGSGSVSSIAQGLEWAGNNGMHVANLSLGSPSPSATLEQAVNSATSRGVLVVAASGNSGEGSISYPARYANAMAVGATDQNNNHASFSQYGAGLDIVAPGVNVQSTYPGSTYASLNGTSMATPHVAGAAALVKQKNPSWSNVQIRNRLKNTATSLGSTNLYGSGLVNAEAATR

SEQ ID NO: 55726 - protein, 269 aa, Unidentified
AQSVPWGISRVQAPAAHNRGLTGSGVKVAVLDTGISTHPDLNIRGGASFVPGEPSTQDGNGHGTHVAGTIAALNNSIGVLGVAPSAELFAVKVLGAFGAGSVTSIAQGLEWAGNNGMHVANLSLGSPSPSATLEQAVNSATSRGVLVVAASGNSGAGSISYPARYANAMAVGATDQNNNRASFSQYGAGLWIVAPGVNVQSTYPGSTYASLNGTSMATPHVAGAAALVKQKNPSWSNVQIRNHLKNTATSLGSTNLYGSGLVNAEAATR

SEQ ID NO: 55727 - protein, 269 aa, Unidentified
AQSVPWGISRVQAPASHNRGLAGSGVKVAVLDTGISTHPDLNIRGGASFVPGEPSTQDGNGHGTHVAGTIAALNNSIGVLGVAPSAELYAVKVLGASGSGSLSSIAQGVEWAGNNGMHVANLSLGSPSPSATLEQAVNSATSRGVIVVAASGNSGAGSISYPARYANAMAVGATDQNNNRASFSQYGAGLDIVAPGVNVQSTYPGSTYASLNGTSMATPHVAGAAALVKQKNPSWSNVQIRNHLKNTATSLGSTNLYGSGLVNAEAATR

SEQ ID NO: 55728 - protein, 269 aa, Unidentified
AQSVPWGISRVQAPAAHNRRLTGRGVKVAVLDTGISTHPDLNIRGGASFVPGEPSTQDGNGHGTHVAGTIAALNNGIGVLGVAPSAELYAVKVLGASGSGSVSSIAQGLEWAGNNSMHVANLSLGSPSPSATLEQAVNSATSRGVLVVAASGNSGADSISYPARYANAMAVGATDQNNNRASFSQYGAGLDIVAPGVNVQSTYPGSTYASLNGTSMATPHVAGAAALVKQKNPSWSNVQIRNHLKNTATSLGSTNLYGSGLVNAEAATR

SEQ ID NO: 55729 - protein, 269 aa, Unidentified
AQSVPWGISRVQAPAAHNRGLTGRGVKVAVLDTGISTHPDLRIRGGASFVPGEPSTQDGNGHGTHVAGTIAALNNSIGVLGVAPSAELYAVKVLGASGSGSVSSIAQGLEWAGANGMHVANLSLGSPSPSATLEQAVNSATSRGVLVVAASGNSGAGSISYPARYANAMAVGATDQNNNRASFSQYGAGLDIVAPGVNVQSTYPGSAYASLNGTSMATPHVAGAAALVKQKNPSWSNVQIRNHLKNTATSLGSTNLYGSGLVRAEAATR

SEQ ID NO: 55730 - protein, 269 aa, Unidentified
AQSVPWGISRVQAPAAHNRRLTGSGVKVAVLDTGISTHPDLNIRGGASFVPGEPSTQDGEGHGTHVAGTIAALNNGIGVLGVAPSAELYAVKVLGASGSGSVSSIAQGLEWAGNNDMHVANLSLGSPSPSATLEQAVNSATSRGVLVVAASGNSGAGSISYPARYANAMAVGATDQNNNRASFSQYGAGLDIVAPGVNVQSTYPGSTYASLNGTSMATPHVAGAAALVKQKNPSWSNVRIRNHLKNTATSLGSTNLYGSGLVNAEAATR

SEQ ID NO: 55731 - protein, 269 aa, Unidentified
AQSVPWGISRVQAPAAHNRGLTGSGVKVAVLDTGISTHPDLNIRGGASFVPGEPSTQDGNGHGTHVAGTIAALNNDIGVLGVAPSAELYAVKVLGASGSGSVSSIAQGLEWAGNNSMHVANLSLGSESPSATLEQAVNSATSRGVLVVAASGNSGADSISYPARYANAMAVGATDQNNNRASFSQYGAGLDIVAPGVNVQSTYPGSTYASLNGTSMATPHVAGAAALVKQKNPSWSNVQIRDHLKNTATSLGSTNLYGSGLVNAEAATR

SEQ ID NO: 55732 - protein, 269 aa, Unidentified
AQSVPWGISRVQAPAAHNRGLTGRGVKVAVLDTGISTHPDLNIRGGASFVPGEPSTQDGNGHGTHVAGTIAALNNDIGVLGVAPSAELYAVKVLGASGSGSVSSIAQGLEWAGNNDMHVANLSLGSPSPSATLEQAVNSATSRGVLVVAASGNSGAGSISYPARYANAMAVGATDQNNNRASFSQYGAGLDIVAPGVNVQSTYPGSTYASLNGTSMATPHVAGAAALVKQKNPSWSNVRIRNRLKNTATSLGSTNLYGSGLVNAEAATR

SEQ ID NO: 55733 - protein, 269 aa, Unidentified
AQSVPWGISRVQAPAAHNRGLTGGGVKVAVLDTGISTHPDLNIRGGASFVPGEPSTQDGNGHGTHVAGTIAALNNNIGVLGVAPSAELYAVKVLGASGNGSVSSIAQGLEWAGNNGMHVANLSLGAPSPSATLEQAVNSATSRGVLVVAASGNSGAGSISYPARYANAMAVGATDQNNNRASFSQYGAGLDIVAPGVNVQSTYPGSTYASQNGTSMATPHVAGAAALVKQKNPSWSNVQIRNHLKNTATSLGSTNLYGSGLVNAEAATR

SEQ ID NO: 55734 - protein, 269 aa, Unidentified
AQSVPWGISRVQAPAAHRRGLTGRGVKVAVLDTGISTHPDLNIRGGASFVPGEPSTQDGNGHGTHVAGTIAALNNSIGVLGVAPSAELYAVKVLGASGGGSISSIAQGLEWAGNNGMHVANLSLGSPSPSATLEQAVNSATSRGVLVVAASGNSGAGSISYPARYANAMAVGATDQNNNRASFSQYGAGLDIVAPGVNVQSTYPGSTYASLNGTSMATPHVAGAAVLVKQKNPSWSNVQIRNHLKNTATSLGSTNLYGSGLVNAEAATR

SEQ ID NO: 55735 - protein, 269 aa, Unidentified
AQSVPWGISRVQAPAAHNRGLTGGGVKVAVLDTGISTHPDLNIRGGASFVPGEPSTQDGNGHGTHVAGTIAALNNSIGVLGVAPSAELYAVKVLSASGNGSVSSIAQGLEWAGNNGMHVANLSLGAPSPSATLEQAVNSATSRGVLVVAASGNSGAGSISYPARYANAMAVGATDQNNNRADFSQYGAGLDIVAPGVNVQSTYPGSTYASLNGTSMATPHVAGAAALVKQKNPSWSNVQIRNHLKNTATSLGSTNLYGSGLVNAEAATR

SEQ ID NO: 55736 - protein, 269 aa, Unidentified
AQSVPWGISRVQAPAAHNRGLTGSGVKVAVLDTGISTHPDLNIRGGASFVPGEPSTQDGNGHGTHVAGTIAALNNSIGVLGVAPSAELYAVKVLGASGGGAISSIAQGLEWAGNNGMHVANLSLGSPSPSATLEQAVNSATSRGVLVVAASGNSGAGSISYPARYANAMAVGATDQNNNRASFSQYGAGLDIVAPGVNVQSTYPGSTYASLNGTSQATPHVAGAAVLVKQKNPSWSNVRIRNHLKNTATSLGSTNLYGSGLVNAEAATR

SEQ ID NO: 55737 - protein, 269 aa, Unidentified
AQSVPWGISRVQAPAAHNRGLTGSGVKVAVLDTGISTHPDLAIRGGASFVPGEPSTADGNGHGTHVAGTIAALNNSIGVLGVAPSAELYAVKVLGASGAGSVSSIAQGLEWAGNNGMHVANLSLGSPSPSATLEQAVNSATSRGVLVVAASGNSGAGSISYPARYANAMAVGATDQNNNRASFSQYGAGLDIVAPGVNVQSTYPGSTYAFLNGTSMAAPHVAGAAALVKQKNPSWSNVQIRNHLKNTATSLGSTNLYGSGLVNAEAATR

SEQ ID NO: 55738 - protein, 269 aa, Unidentified
AQSVPWGISRVQAPAAHNRGLTGRGVKVAVLDSGISTHPDLNIRGGASFVPGEPSTQDGEGHGTHVAGTIAALNNSIGVLGVAPSAELYAVKVLGASGSGSVSSIAQGLEWAGLNGMHVANLSLGSPSPSATLEQAVNSATSRGVLVVAASGNSGAGSIDYPARYANAMAVGATDQNNNRASFSQYGAGLDIVAPGVNVQSTYPGSTYASLNGTSMATPHVAGAAALVKQKNPSWSNVQIRNHLKNTATSLGSTNLYGSGLVNAEAATR

SEQ ID NO: 55739 - protein, 269 aa, Unidentified
AQSVPWGISRVQAPAAHNRGLTGSGVKVAVLDTGISTHPDLNIRGGASFVPGEPSTQDGNGHGTHVAGTIAALNNSIGVLGVAPSAELYAVKVLGADGXGAISSIAQGLEWAGNNGMHVANLSLGSPSPSATLEQAVNSATSRGVLVVAASGNSGASSISYPARYANAMAVGATDQNNNRASFSQYGAGLDIVAPGVNVQSTYPGSTYASLNGTSMATPHVAGAAALVKQKNPSWSNVQIRNHLKNTATSLGSTNLYGSGLVNAEAATR

SEQ ID NO: 55740 - protein, 269 aa, Unidentified
AQSVPWGISRVQAPAAHNRRLTGRGVKVAVLDTGISTHPDLRITGGASFVPGEPSTQDGNGHGTHVAGTIAALNNSIGVLGVAPSAELYAVKVLGASGSGSVSSIAQGLEWAGANGMHVANLSLGSPSPSATLEQAVNSATSRGVLVVAASGNSGAGSISYPARYANAMAVGATDQNNNRASFSQYGAGLDIVAPGVNVQSTYPGSTYASLNGTSMATPHVAGAAALVKQKNPSWSNVQIRNHLKNTATSLGSTNLYGSGLVNAEAATR

SEQ ID NO: 55741 - protein, 269 aa, Unidentified
AQSVPWGISRVQAPAAHNRGLAGSGVKVAVLDSGISTHPDLNIRGGASFVPGEPSTQDGNGHGTHVAGTIAALNNSIGVLGVAPSAELYAVKVLGASGSGSVSSIAQGLEWAGNNGMHVANLSLGIPSPSATLEQAVNSATSRGVLVVAASGNSGEGSISYPARYANAMAVGATDQNNNRADFSQYGAGLDIVAPGVNVQSTYPGSTYASLNGTSMATPHVAGAAALVKQKNPSWSNVQIRNHLKNTATSLGSTNLYGSGLVNAEAATR

SEQ ID NO: 55742 - protein, 269 aa, Unidentified
AQSVPWGISRVQAPAAHNRKLTGFGVKVAVLDTGISTHPDLNIRGGASFVPGEPSTQDGNGHGTHVAGTIAALNNNIGVLGVAPSAELYAVKVLGASGSGSVSSIAQGLEWAGNNGMHVANLSLGDPSPSATLEQAVNSATSRGVLVVAASGNSGAGSIDYPARYANAMAVGATDQNNNRASFSQYGAGLDIVAPGVNVQSTYPGSTYASLNGTSMATPHVAGAAALVKQKNPSWSNVQIRNHLKNTATSLGSTNLYGSGLVNAEAATR

SEQ ID NO: 55743 - protein, 269 aa, Unidentified
AQSVPWGISRVQAPAAHNRGLTGRGVKVAVLDTGISTHPDLNIRGGASFVPGEPSTQDGNGHGTHVAGTIAALNNDIGVLGVAPSAELYAVKVLGASGSGSVSSIAQGLEWAGNNDMHVANLSLGSPSPSATLEQAVNSATSRGVLVVAASGNSGAGSISYPARYANAMAVGATDQNNNRASFSQYGAGLDIVAPGVNVQSTYPGSTYASLNGTSMATPHVAGAAALVKQKNPSWSNVRIRDHLKNTATSLGSTNLYGSGLVNAEAATR

SEQ ID NO: 55744 - protein, 269 aa, Unidentified
AQSVPWGISRVQAPAAHNRKLTGFGVKVAVLDTGISTHPDLNIRGGASFVPGEPSTQDGEGHGTHVAGTIAALNNSIGVLGVAPSAELYAVKVLGASGSGSVSSIAQGLEWAGNNGMHVANLSLGSPSPSATLEQAVNSATSRGVLVVAASGNSGAGSISYPARYANAMAVGATDQNNNRADFSQYGAGLDIVAPGVNVQSTYPGSAYASLNGTSMATPHVAGAAALVKQKNPSWSNVQIRNHLKNTATSLGSTNLYGSGLVNAEAATR

SEQ ID NO: 55745 - protein, 269 aa, Unidentified
AQSVPWGISRVQAPAAHNRGLTGRGVKVAVLDTGISTHPDLNIRGGASFVPGEPSTQDGNGHGTHVAGTIAALNNGIGVLGVAPSAELYAVKVLGASGSGSVSSIAQGLEWAGNNSMHVANLSLGSPSPSATLEQAVNSATSRGVLVVAASGNSGADSISYPARYANAMAVGATDQNNNRASFSQYGAGLDIVAPGVNVQSTYPGSTYASLNGTSMATPHVAGAAALVKQKNPSWSNVRIRNHLKNTATSLGSTNLYGSGLVNAEAATR

SEQ ID NO: 55746 - protein, 269 aa, Unidentified
AQSVPWGISRVQAPASHNRGLAGSGVKVAVLDTGISTHPDLNIRGGASFVPGEPSTQDGNGHGTHVAGTIAALNNSIGVLGVAPSAELYAVKVLGASGSGGISSIAQGLEWAGNNGMHVANLSLGSPSPSATLEQAVNSATSRGVIVVAASGNSGAGSISYPARYANAMAVGATDQNNNRASFSQYGAGLDIVAPGVNVQSTYPGSTYASLNGTSMATPHVAGAAALVKQKNPSWSNVQIRNHLKNTATSLGSTNLYGSGLVNAEAATR

SEQ ID NO: 55747 - protein, 269 aa, Unidentified
AQSVPWGISRVQAPAAHNRGLTASGVKVAVLDTGISTHPDLWIRGGASFVPGEPSTQDGNGHGTHVAGTIAALNNSIGVLGVAPSAELYAVKVLGASGSGSVSSIAQGLEWAGLNRMHVANLSLGSPSPSATLEQAVNSATSRGVLVVAASGNSGAGSISYPARYANAMAVGATDQNNNRADFSQYGAGLDIVAPGVNVQSTYPGSTYASLNGTSMATPHVAGAAALVKQKNPSWSNVQIRNHLKNTATSLGSTNLYGSGLVNAEAATR

SEQ ID NO: 55748 - protein, 269 aa, Unidentified
AQSVPWGISRVQAPAAHNRGLTGRGVKVAVLDTGISTHPDLNIRGGASFVPGEPSTQDGEGHGTHVAGTIAALNNGIGVLGVAPSAELYAVKVLGASGSGSVSSIAQGLEWAGNNDMHVANLSLGSPSPSATLEQAVNSATSRGVLVVAASGNSGAGSISYPARYANAMAVGATDQNNNRASFSQYGAGLDIVAPGVNVQSTYPGSTYASLNGTSMATPHVAGAAALVKQKNPSWSNVQIRNRLKNTATSLGSTNLYGSGLVNAEAATR

SEQ ID NO: 55749 - protein, 269 aa, Unidentified
AQSVPWGISRVQAPAAHNRGLTGSGVKVAVLDTGISTHPDLNIRGGASFVPGEPSTQDGEGHGTHVAGTIAALNNSIGVLGVAPSAELYAVKVLGASGAGSVSSIAQGLEWAGNNGMHVANLSLGSPSPSATLEQAVNSATSRGVLVVAASGNSGAGSISYPARYANAMAVGATDQNNNRADFSQYGAGLDIVAPGVNVQSTYPGSTYASLNGTSMATPHVAGAAALVKQKNPSWSNVQIRNRLKNTATSLGSTNLYGSGLVNAFAATR

SEQ ID NO: 55750 - protein, 269 aa, Synthetic construct
AQSVPWGISRVQAPAAHNRGLTGSGVKVAVLDTGISTHPDLNIRGGASFVPGEPSTQDGNGHGTHVAGTIAALDNSIGVLGVAPSAELYAVKVLGADGRGAISSIAQGLEWAGNNGMHVANLSLGSPSPSATLEQAVNSATSRGVLVVAASGNSGAGSISYPARYANAMAVGATDQNNNRASFSQYGAGLDIVAPGVNVQSTYPGSTYASLNGTSMATPHVAGAAALVKQKNPSWSNVQIRNHLKNTATSLGSTNLYGSGLVNAEAATR

SEQ ID NO: 55751 - protein, 269 aa, Unidentified
AQSVPWGISRVQAPAAHNRGLTGSGVKVAVLDTGISTHPDLNIRGGASFVPGEPSTQDGNGHGTHVAGTIAALNNSIGVLGVAPSAELYAVKVLGASGSGNVSSIAQGLEWAGNNGMEVANLSLGSPSPSATLEQAVNSATSRGVLVVAASGNSGAGSISWPARYANAMAVGATDQNNNRASFSQYGAGLDLVAPGVNVQSTYPGSTYASLNGTSMATPHVAGAAACVKQKNPSWSNVQIRNHLKNTATSLGSTNLYGSGLVNAEAATR

SEQ ID NO: 55752 - protein, 269 aa, Unidentified
AQSVPWGISRVQAPAAHNRGLTGRGVKVAVLDTGISTHPDLNIRGGASFVPGEPSTQDGNGHGTHVAGTIAALNNGIGVLGVAPSAELYAVKVLGASGSGSVSSIAQGLEWAGNNDMHVANLSLGSPSPSATLEQAVNSATSRGVLVVAASGNSGAGSISYPARYANAMAVGATDQNNNRASFSQYGAGLDIVAPGVNVQSTYPGSTYASLNGTSMATPHVAGAAALVKQKNPSWSNVQIRDRLKNTATSLGSTNLYGSGLVNAEAATR

SEQ ID NO: 55753 - protein, 269 aa, Unidentified
AQSVPWGISRVQAPAAHNRGLTGRGVKVAVLDTGISTHPDLDIRGGASFVPGEPSTQDGNGHGTHVAGTIAALDNSIGVLGVAPSAELYAVKVLGASGSGSVSSIAQGLEWAGNNGMHVANLSLGSPSPSATLEQAVNSATSRGVLVVAASGNSGAGSISYPARYANAMAVGATDQNNNRASFSQYGAGLDIVAPGVNVQSTYPGSTYASLNGTSMATPHVAGAAALVKQKNPSWRNVQIRNRLKNTATSLGSTNLYGSGLVNAEAATR

SEQ ID NO: 55754 - protein, 269 aa, Unidentified
AQSVPWGISRVQAPAAHNRGLWGRGVKVAVLDTGISTHPDLNIRGGASFVPGEPSTQDGNGHGTHVAGTIAALNNSIGVLGVAPSAELYAVKVLGASGAGSVSSIAQGLEWAGNNGMHVANLSLGSPSPSATLEQAVNSATSRGVLVVAASGNSGAGSISYPARYANAMAVGATDQNNNRASFSQYGAGLDIVAPGVNVQSTYIGSAYASLNGTSMATPHVAGAAALVKQKNPSWSNVQIRNHLKNTATSLGSTNLYGSGLVNAEAATR

SEQ ID NO: 55755 - protein, 269 aa, Unidentified
AQSVPWGISRVQAPAAHNRGLAGSGVKVAVLDTGISTHPDLNIRGGASFVPGEPSTQDGNGHGTHVAGTIAALNNSIGVLGVAPSAELYAVKVLGASGSGSVSSIAQGLEWAGLNRMHVANLSLGSPSPSATLEQAVNSATSRGVLVVAASGNSGEGSIDYPARYANAMAVGATDQNNNRASFSQYGAGLDIVAPGVNVQSTYPGSTYASLNGTSMATPHVAGAAALVKQKNPSWSNVQIRNHLKNTATSLGSTNLYGSGLVNAEAATR

SEQ ID NO: 55756 - protein, 269 aa, Unidentified
AQSVPWGISRVQAPAAHRRGLTGRGVKVAVLDTGISTHPDLNITGGASFVPGEPSTQDGNGHGTHVAGTIAALNNSIGVLGVAPSAELYAVKVLGASGSGSVSSIAQGLEWAGNNGMHVANLSLGSPSPSATLEQAVNSATSRGVLVVAASGNSGAGSISYPARYANAMAVGATDQNNNRASFSQYGAGLDIVAPGVNVQSTYPGSTYASLNGTSMATPHVAGEAALVKQKNPSWRNVQIRNHLKNTATSLGSTNLYGSGLVNAEAATR

SEQ ID NO: 55757 - protein, 269 aa, Unidentified
AQSVPWGISRVQAPAAHNRGLTGSGVKVAVLDTGISTHPDLNIRGGASFVPGEPSTQDGNGHGTHVAGTIAALNNRIGVLGVAPSAELYAVKVLGASGSGSVSSIAQGIEWAGNNGMHVANLSLGSPSPSATLEQAVNSATSRGVLVVAASGNSGAGSISYPARYANAMAVGATDQNNIRASFSQYGAGLDLVAPGVNVQSTYPGSTYASENGTSMATPHVAGAAALVKQKNPSWSNVQIRNHLKNTATSLGSTNLYGSGLVNAEAATR

SEQ ID NO: 55758 - protein, 269 aa, Unidentified
AQSVPWGISRVQAPAAHNRGLTASGVKVAVLDTGISTHPDLNIRGGASFVPGEPSTQDGNGHGTHVAGTIAALNNSIGVLGVAPSAELFAVKVLGASGSGSVSSIAQGLEWAGNNGMHFANLSLGSPSPSATLEQAVNSATSRGVLVVAASGNSGAGSISYPARYANAMAVGATDQNNNRASFSQWGAGLDIVAPGVNVQSTYPGSTYASLNGTSMATPHVAGAAALVKNKNPSWSNVQIRNHLKNTATSLGSTNLYGSGLVNAEAATR

SEQ ID NO: 55759 - protein, 269 aa, Unidentified
AQSVPWGISRVQAPAAHNRGLTGSGVKVAVLDTGISTHPDLNIRGGASFVPGEPSTQDGNGHGTHVAGTIAALDNSIGVLGVAPSAELYAVKVLGASGSGAISSIAQGLEWAGNNGMHVANLSLGSPSPSATLEQAVNSATSRSVLVVAASGNSGADSISYPARYANAMAVGATDQNNNRASFSQYGAGLDIVAPGVNVQSTYPGSTYASLNGTSMATPHVAGAAALVKQKNPSWSNVQIRNHLKNTATSLGSTNLYGSGLVNAEAATR

SEQ ID NO: 55760 - protein, 269 aa, Unidentified
AQSVPWGISRVQAPAAHNRRLTASGVKVAVLDTGISTHPDLNIRGGASFVPGEPSTQDGNGHGTHVAGTIAALNNSIGVLGVAPSAELYAVKVLGASGSGSLSSIAQGLEWAGNNGMHVANLSLGSPSPSATLEQAVNSATSRGVLVVAASGNSGAGSISYPARYANAMAVGATDQNNNRASFSQWGAGLDIVAPGVNVQSTYPGSTYASLNGTSMATPHVAGAAACVKQKNPSWSNVQIRNHLKNTATSLGSTNLYGSGLVNAEAATR

SEQ ID NO: 55761 - protein, 269 aa, Unidentified
AQSVPWGISRVQAPAAHNRGLTGSGVKVAVLDTGISTHPDLNIRGGASFVPGEPSTQDGNGHGTHVAGTIAALNNSIGVLGVAPSAELYAVKVLGADGGGAISSIAQGLEWAGNNGMHVANLSLGSPSPSATLEQAVNSATSRGVLVVAASGNSGASSISYPARYANAMAVGATDQNNNRASFSQYGAGLDIVAPGVNVQSTYPGSTYASLNGTSMATPHVAGAAALVKQKNPSWSNVQIRNHLKNTATSLGSTNLYGSGLVNAEAATR

SEQ ID NO: 55762 - protein, 269 aa, Unidentified
AQSVPWGISRVQAPAAHNRKLTGSGVKVAVLDTGISTHPDLNIRGGASFVPGEPSTQDGEGHGTHVAGTIAALNNSIGVLGVAPSAELYAVKVLGASGSGSVSSIAQGLEWAGLNGMHVANLSLGLPSPSATLEQAVNSATSRGVLVVAASGNSGAGSISYPARYANAMAVGATDQNNNRASFSQYGAGLDIVAPGVNVQSTYPGSAYASLNGTSMATPHVAGAAALVKQKNPSWSNVQIRNHLKNTATSLGSTNLYGSGLVNAEAATR

SEQ ID NO: 55763 - protein, 269 aa, Unidentified
AQSVPWGISRVQAPAAHNRGLAGRGVKVAVLDTGISTHPDLNIRGGASFVPGEPSTQDGEGHGTHVAGTIAALNNSIGVLGVAPSAELYAVKVLGASGSGSVSSIAQGLEWAGNNGMHVANLSLGIPSPSATLEQAVNSATSRGVLVVAASGNSGAGSISYPARYANAMAVGATDQNNNRADFSQYGAGLDIVAPGVNVQSTYPGSTYASLNGTSMATPHVAGAAALVKQKNPSWSNVQIRNHLKNTATSLGSTNLYGSGLVNAEAATR

SEQ ID NO: 55764 - protein, 269 aa, Unidentified
AQSVPWGISRVQAPAAHNRRLTGSGVKVAVLDTGISTHPDLRIRGGASFVPGEPSTQDGNGHGTHVAGTIAALNNSIGVLGVAPSAELYAVKVLGASGQGSVSSIAQGLEWAGNNGMHVANLSLGAPSPSATLEQAVNSATSRGVLVVAASGNSGAGSISYPARYANAMAVGATDQNNNRASFSQYGAGLDIVAPGVNVQSTYPGSTYASQNGTSMATPHVAGAAALVKQKNPSWSNVQIRNHLKNTATSLGSTNLYGSGLVNAEAATR

SEQ ID NO: 55765 - protein, 269 aa, Unidentified
AQSVPWGISRVQAPAAHNRGLAGSGVKVAVLDTGISTHPDLNIRGGASFVPGEPSTQDGNGHGTHVAGTIAALNNSIGVLGVAPSAELYAVKVLGASGSGSVSSIAQGLEWAGNNRMHVANLSLGIPSPSATLEQAVNSATSRGVLVVAASGNSGEGSISYPARYANAMAVGATDQNNNRADFSQYGAGLDIVAPGVNVQSTYPGSTYASLNGTSMATPHVAGAAALVKQKNPSWSNVQIRNHLKNTATSLGSTNLYGSGLVNAEAATR

SEQ ID NO: 55766 - protein, 269 aa, Unidentified
AQSVPWGISRVQAPAAHRRGLTGRGVKVAVLDTGISTHPDLNIRGGASFVPGEPSTQDGNGHGTHVAGTIAALDNSIGVLGVAPSAELYAVKVLGASGSGSVSSIAQGLEWAGNNGMHVANLSLGSPSPSATLEQAVNSATSRGVLVVAASGNSGAGSISYPARYANAMAVGATDQDNNRASFSQYGAGLDIVAPGVNVQSTYPGSTYASLNGTSMATPHVAGAAALVKQKNPSWSNVQIRNRLKNTATSLGSTNLYGSGLVNAEAATR

SEQ ID NO: 55767 - protein, 269 aa, Unidentified
AQSVPWGISRVQAPAAHNRGLWGSGVKVAVLDTGISTHPDLRITGGASFVPGEPSTQDGNGHGTHVAGTIAALNNSIGVLGVAPSAELYAVKVLGASGAGSVSSIAQGLEWAGNNGMHVANLSLGSPSPSATLEQAVNSATSRGVLVVAASGNSGAGSISYPARYANAMAVGATDQNNNRASFSQYGAGLDIVAPGVNVQSTYIGSTYASLNGTSMATPHVAGAAALVKQKNPSWSNVQIRNHLKNTATSLGSTNLYGSGLVNAEAATR

SEQ ID NO: 55768 - protein, 269 aa, Unidentified
AQSVPWGISRVQAPAAHNRKLLGSGVKVAVLDTGISTHPDLNIRGGASFVPGEPSTQDGNGHGTHVAGTIAALNNSIGVLGVAPSAELYAVKVLGASGSGSVSSIAQGLEWAGNNRMHVANLSLGSESPSATLEQAVNSATSRGVLVVAASGNSGAGSISYPARYANAMAVGATDQNNNRADFSQYGAGLDIVAPGVNVQSTYPGSTYASLNGTSMATPHVAGAAALVKQKNPSWSNVQIRNHLKNTATSLGSTNLYGSGLVNAEAATR

SEQ ID NO: 55769 - protein, 269 aa, Unidentified
AQSVPWGISRVQAPAAHNRGLTGRGVKVAVLDTGISTHPDLNIRGGASFVPGEPSTQDGNGHGTHVAGTIAALNNGIGVLGVAPSAELYAVKVLGASGSGSVSSIAQGLEWAGNNSMHVANLSLGSESPSATLEQAVNSATSRGVLVVAASGNSGAGSISYPARYANAMAVGATDQNNNRASFSQYGAGLDIVAPGVNVQSTYPGSTYASLNGTSMATPHVAGAAALVKQKNPSWSNVQIRNRLKNTATSLGSTNLYGSGLVNAEAATR

SEQ ID NO: 55770 - protein, 269 aa, Unidentified
AQSVPWGISRVQAPAAHNRKLLGSGVKVAVLDTGISTHPDLNIRGGASFVPGEPSTQDGNGHGTHVAGTIAALNNSIGVLGVAPSAELYAVKVLGASGSGSVSSIAQGLEWAGNNRMHVANLSLGDPSPSATLEQAVNSATSRGVLVVAASGNSGAGSIDYPARYANAMAVGATDQNNNRASFSQYGAGLDIVAPGVNVQSTYPGSTYASLNGTSMATPHVAGAAALVKQKNPSWSNVQIRNHLKNTATSLGSTNLYGSGLVNAEAATR

SEQ ID NO: 55771 - protein, 269 aa, Unidentified
AQSVPWGISRVQAPAAHRRGLTGRGVKVAVLDTGISTHPDLNITGGASFVPGEPSTQDGNGHGTHVAGTIAALNNSIGVLGVAPSAELYAVKVLGASGSGSVSSIAQGLEWAGNNGMHVANLSLGSPSPSATLEQAVNSATSRGVLVVAASGNSGAGSISYPARYANAMAVGATDQNNNRASFSQYGAGLDIVAPGVNVQSTYPGSTYASLNGTSMATPHVAGEAALVKQKNPSWSNVQIRNRLKNTATSLGSTNLYGSGLVNAEAATR

SEQ ID NO: 55772 - protein, 269 aa, Unidentified
AQSVPWGISRVQAPAAHNRGLTGRGVKVAVLDTGISTHPDLNIRGGASFVPGEPSTQDGNGHGTHVAGTIAALNNSIGVLGVAPSAELYAVKVLGASGAGSVSSIAQGLEWAGNNGMHVANLSLGSPSPSATLEQAVNSATSRGVLVVAASGNSGAGSISYPARYANAMAVGATDQNNNRASFSQYGAGLDIVAPGVNVQSTYIQSAYASLNGTSMATPHVAGAAALVKQKNPSWSNVQIRNHLKNTATSLGSTNLYGSGLVNAEAATR

SEQ ID NO: 55773 - protein, 269 aa, Unidentified
AQSVPWGISRVQAPAAHNRRLTGRGVKVAVLDTGISTHPDRNIRGGASFVPGEPSTQDGNGHGTHVAGTIAALNNRIGVLGVAPSAELYAVKVLGASGSGSVSSIAQGLEWAGNNGMHVANLSLGSPSPSATLEQAVNSATSRGVLVVAASGNSGAGSISYPARYANAMAVGATDQNNNRASFSQYGAGLDIVAPGVNVQSTYPGSTYASLNGTSMATPHVAGAAALVKQKNPSWRNVQIRNHLKNTATSLGSTNLYGSGLVNAEAATR

SEQ ID NO: 55774 - protein, 269 aa, Unidentified
AQSVPWGISRVQAPAAHNRGLTGSGVKVAVLDTGISTHPDLRIRGGASFVPGEPSTQDGNGHGTHVAGTIAALNNSIGVLGVAPSAELYAVKVLGASGAGSVSSIAQGLEWAGANGMHVANLSLGSPSPSATLEQAVNSATSRGVLVVAASGNSGAGSISYPARYANAMAVGATDQNNNRASFSQYGAGLDIVAPGVNVQSTYPGSTYFSLNGTSMATPHVAGAAALVKQKNPSWSNVQIRNHLKNTATSLGSTNLYGSGLVRAEAATR

SEQ ID NO: 55775 - protein, 269 aa, Unidentified
AQSVPWGISRVQAPAAHNRGLTGSGVKVAVLDTGISTHEDLNVRGGVSFVPGEPSTQDGNGHGTHVAGTIAALNNSIGVLGVAPSADLYAVKVLGASGSGSVSSIAQGLEWAGNNGMHVANLSLGSPSPSATLEQAVNSATSRGVLVVAASGNSGAGSISYPARYANAMAVGATDQNNNRASFSQYGAGLDIVAPGVNVQSTYPGSTYASLNGTSMATPHVAGAAALVKQKNPSWSNVQIRDHLKNTATSLGSTNLYGSGLVNAEAATR

SEQ ID NO: 55776 - protein, 269 aa, Unidentified
AQSVPWGISRVQAPAAHNRRLTGSGVKVAVLDTGISTHPDLNIRGGASFVPGEPSTQDGEGHGTHVAGTIAALNNGIGVLGVAPSAELYAVKVLGASGSGSVSSIAQGLEWAGNNSMHVANLSLGSPSPSATLEQAVNSATSRGVLVVAASGNSGAGSISYPARYANAMAVGATDQNNNRASFSQYGAGLDIVAPGVNVQSTYPGSTYASLNGTSMATPHVAGAAALVKQKNPSWSNVQIRDHLKNTATSLGSTNLYGSGLVNAEAATR

SEQ ID NO: 55777 - protein, 269 aa, Unidentified
AQSVPWGISRVQAPAAHNRGLTGRGVKVAVLDTGISTHPDLNIRGGASFVPGEPSTQDGNGHGTHVAGTIAALNNSIGVLGVAPSAELYAVKVLGASGSGSVSSIAQGLEWAGLNGMHVANLSLGIPSPSATLEQAVNSATSRGVLVVAASGNSGEGSISYPARYANAMAVGATDQNNNRADFSQYGAGLDIVAPGVNVQSTYPGSTYASLNGTSMATPHVAGAAALVKQKNPSWSNVQIRNHLKNTATSLGSTNLYGSGLVNAEAATR

SEQ ID NO: 55778 - protein, 269 aa, Unidentified
AQSVPWGISRVQAPAAHNRRLTGSGVKVAVLDTGISTHPDLRITGGASFVPGEPSTQDGNGHGTHVAGTIAALNNSIGVLGVAPSAELYAVKVLGASGAGSVSSIAQGLEWAGNNGMHVANLSLGSPSPSATLEQAVNSATSRGVLVVAASGNSGAGSISYPARYANAMAVGATDQNNNRASFSQYGAGLDIVAPGVNVQSTYPGSAYASLNGTSMATPHVAGAAALVKQKNPSWSNVQIRNHLKNTATSLGSTNLYGSGLVNAEAATR

SEQ ID NO: 55779 - protein, 269 aa, Unidentified
AQSVPWGISRVQAPAAHNRGLLGSGVKVAVLDTGISTHPDLNIRGGASFVPGEPSTQDGNGHGTHVAGTIAALNNNIGVLGVAPSAELYAVKVLGASGSGSVSSIAQGLEWAGNNRMHVANLSLGDPSPSATLEQAVNSATSRGVLVVAASGNSGAGSIDYPARYANAMAVGATDQNNNRASFSQYGAGLDIVAPGVNVQSTYPGSTYASLNGTSMATPHVAGAAALVKQKNPSWSNVQIRNHLKNTATSLGSTNLYGSGLVNAEAATR

SEQ ID NO: 55780 - protein, 269 aa, Unidentified
AQSVPWGISRVQAPAAHNRKLTGSGVKVAVLDTGISTHPDLNIRGGASFVPGEPSTQDGEGHGTHVAGTIAALNNSIGVLGVAPSAELYAVKVLGASGDGSVSSIAQGLEWAGLNGMHVANLSLGLPSPSATLEQAVNSATSRGVLVVAASGNSGAGSISYPARYANAMAVGATDQNNNRASFSQYGAGLDIVAPGVNVQSTYPGSTYASLNGTSMATPHVAGAAALVKQKNPSWSNVQIRNHLKNTATSLGSTNLYGSGLVNAEAATR

SEQ ID NO: 55781 - protein, 269 aa, Unidentified
AQSVPWGISRVQAPAAHNRKLLGSGVKVAVLDTGISTHPDLNIRGGASFVPGEPSTQDGNGHGTHVAGTIAALNNNIGVLGVAPSAELYAVKVLGASGSGSVSSIAQGLEWAGNNRMHVANLSLGDPSPSATLEQAVNSATSRGVLVVAASGNSGAGSISYPARYANAMAVGATDQNNNRASFSQYGAGLDIVAPGVNVQSTYPGSTYASLNGTSMATPHVAGAAALVKQKNPSWSNVQIRNHLKNTATSLGSTNLYGSGLVNAEAATR

SEQ ID NO: 55782 - protein, 269 aa, Unidentified
AQSVPWGISRVQAPAAHNRKLLGFGVKVAVLDTGISTHPDLNIRGGASFVPGEPSTQDGNGHGTHVAGTIAALNNSIGVLGVAPSAELYAVKVLGASGSGSVSSIAQGLEWAGNNRMHVANLSLGSPSPSATLEQAVNSATSRGVLVVAASGNSGAGSISYPARYANAMAVGATDQNNNRASFSQYGAGLDIVAPGVNVQSTYPGSAYASLNGTSMATPHVAGAAALVKQKNPSWSNVQIRNHLKNTATSLGSTNLYGSGLVNAEAATR

SEQ ID NO: 55783 - protein, 269 aa, Unidentified
AQSVPWGISRVQAPAAHNRRLTGRGVKVAVLDTGISTHPDLNIRGGASFVPGEPSTQDGNGHGTHVAGTIAALNNSIGVLGVAPSAELYAVKVLGASGAGSVSSIAQGLEWAGLNGMHVANLSLGSPSPSATLEQAVNSATSRGVLVVAASGNSGAGSISYPARYANAMAVGATDQNNNRASFSQYGAGLDIVAPGVNVQSTYPGSTYASLNGTSMATPHVAGAAALVKQKNPSWSNVQIRNHLKNTATSLGSTNLYGSGLVNAFAATR

SEQ ID NO: 55784 - protein, 269 aa, Unidentified
AQSVPWGISRVQAPAAHNRGLTGSGVKVAVLDTGISTHPDLNIRGGASFVPGEPSTQDGEGHGTHVAGTIAALNNSIGVLGVAPSAELYAVKVLGASGSGSVSSIAQGLEWAGNNRMHVANLSLGIPSPSATLEQAVNSATSRGVLVVAASGNSGEGSISYPARYANAMAVGATDQNNNRADFSQYGAGLDIVAPGVNVQSTYPGSTYASLNGTSMATPHVAGAAALVKQKNPSWSNVQIRNHLKNTATSLGSTNLYGSGLVNAEAATR

SEQ ID NO: 55785 - protein, 269 aa, Unidentified
AQSVPWGISRVQAPAAHRRGLTGSGVKVAVLDTGISTHPDLRITGGASFVPGEPSTQDGNGHGTHVAGTIAALDNSIGVLGVAPSAELYAVKVLGASGSGSVSSIAQGLEWAGNNGMHVANLSLGSPSPSATLEQAVNSATSRGVLVVAASGNSGAGSISYPARYANAMAVGATDQNNNRASFSQYGAGLDIVAPGVNVQSTYPGSTYASLNGTSMATPHVAGAAALVKQKNPSWRNVQIRNHLKNTATSLGSTNLYGSGLVNAEAATR

SEQ ID NO: 55786 - protein, 269 aa, Unidentified
AQSVPWGISRVQAPAAHNRGLTGSGVKVAVLDTGISTHPDLNIRGGASFVPGEPSTQDGEGHGTHVAGTIAALNNGIGVLGVAPSAELYAVKVLGASGSGSVSSIAQGLEWAGNNDMHVANLSLGSESPSATLEQAVNSATSRGVLVVAASGNSGAGSISYPARYANAMAVGATDQNNNRASFSQYGAGLDIVAPGVNVQSTYPGSTYASLNGTSMATPHVAGAAALVKQKNPSWSNVQIRNRLKNTATSLGSTNLYGSGLVNAEAATR

SEQ ID NO: 55787 - protein, 269 aa, Synthetic construct
AQSVPWGISRVQAPAAHNRGLTGSGVRVAVLDTGISTHPDLNIRGGASFVPGEPSTQDGNGHGTHVAGTIAALDNSIGVLGVAPSAELYAVKVLGASGSGSYSSIAQGLEWAGNNGMHVASLSLGSPSPSATLEQAVNSATSRGVLVVAASGNSGAGSISYPARYANAMAVGATDQNNNRASFSQYGAGLDIVAPGVCVQSTYPGSTYASLNGTSMATPHVAGAAALVKQKNPSWSNVQIRNHLKNTATSLGSTNLYGSGLVNAEAATR

SEQ ID NO: 55788 - protein, 269 aa, Unidentified
AQSVPWGISRVQAPAAHNRGLAGSGVKVAVLDTGISTHPDLNIRGGASFVPGEPSTQDGEGHGTHVAGTIAALNNSIGVLGVAPSAELYAVKVLGASGSGSVSSIAQGLEWAGLNGMHVANLSLGIPSPSATLEQAVNSATSRGVLVVAASGNSGAGSISYPARYANAMAVGATDQNNNRADFSQYGAGLDIVAPGVNVQSTYPGSTYASLNGTSMATPHVAGAAALVKQKNPSWSNVQIRNHLKNTATSLGSTNLYGSGLVNAEAATR

SEQ ID NO: 55789 - protein, 269 aa, Unidentified
AQSVPWGISRVQAPAAHNRGLTGFGVKVAVLDTGISTHPDLNIRGGASFVPGEPSTQDGNGHGTHVAGTIAALNNSIGVLGVAPSAELYAVKVLGASGSGSVSSIAQGLEWAGLNRMHVANLSLGSPSPSATLEQAVNSATSRGVLVVAASGNSGAGSISYPARYANAMAVGATDQNNNRADFSQYGAGLDIVAPGVNVQSTYPGSTYASLNGTSMATPHVAGAAALVKQKNGSWSNVQIRNHLKNTATSLGSTNLYGSGLVNAEAATR

SEQ ID NO: 55790 - protein, 269 aa, Unidentified
AQSVPWGISRVQAPAAHNRGLTGSGVKVAVLDTGISTHPDLNIRGGASFVPGEPSTQDGNGHGTHVAGTIAALNNSIGVLGVATSAELYAVKVLPATGSGAISSIAQGLEWAGNNGMHVANLSLGSPSPSATLEQAVNSATSRGVLVVAASGNSGAGSISYPARYANAMAVGATDQNNNRASFSQYGAGLDIVAPGVNVQSTYPGSTYASLNGTSMATPHVAGAAALVKQKNPSWSNVQIRNHLKNTATSLGSTNLYGSGLVNAEAATR

SEQ ID NO: 55791 - protein, 269 aa, Unidentified
AQSVPWGISRVQAPAAHNRGLTGSGVKVAVLDTGISTHPDLNIRGGASFVPGEPSTQDGNGHGTHVAGTIAALNNSIGVLGVAPSAELYAVKVLGASGGGAISSIAQGLEWAGNNGMHVANLSLGSPSPSATLEQAVNSATSRGVLVVAASGNSGAGSISYPARYANAMAVGATDQNNNRASFSQYGAGLDIVAPGVNVQSTYPGSTYASLNGTSMATPHVAGAAVLVKQKNPSWSNVQIRNRLKNTATSLGSTNLYGSGLVNAEAATR

SEQ ID NO: 55792 - protein, 269 aa, Unidentified
AQSVPWGISRVQAPAAQNRGLTGSGVKVAVLDTGISTHPDLNIRGGASFVPGEPSTQDGNGHGTHAAGTIAALDNSIGVLGVAPSAELYAVKVLGASGSGAISSIAQGLEWAGNNGMHVANLSLGSPSPSATLEQAVNSATSRGVLVVAASGNSGAGSISYPARYANAMAVGATDQNNNRASFSQYGAGLDIVAPGVNVQSTYPGSTYASLNGTSMATPHVAGAAALVKQKNPSWSNVQIRNHLKNTATSLGSTNLYGSGLVNAEAATR

SEQ ID NO: 55793 - protein, 269 aa, Unidentified
AQSVPWGISRVQAPAAHNRRLTGSGVKVAVLDTGISTHPDLNITGGASFVPGEPSTQDGNGHGTHVAGTIAALNNSIGVLGVAPSAELYAVKVLGASGAGSVSSIAQGLEWAGNNGMHVANLSLGSPSPSATLEQAVNSATSRGVLVVAASGNSGAGSISYPARYANAMAVGATDQNNNRASFSQYGAGLDIVAPGVNVQSTYPQSAYASLNGTSMATPHVAGAAALVKQKNPSWSNVQIRNHLKNTATSLGSTNLYGSGLVNAEAATR

SEQ ID NO: 55794 - protein, 269 aa, Unidentified
AQSVPWGISRVQAPAAHNRGLTGSGVKVAVLDTGISTHPDLNIRGGASFVPGEPSTQDGNGHGTHVAGTIAALNNDIGVLGVAPSAELYAVKVLGASGSGSVSSIAQGLEWAGNNSMHVANLSLGSESPSATLEQAVNSATSRGVLVVAASGNSGAGSISYPARYANAMAVGATDQNNNRASFSQYGAGLDIVAPGVNVQSTYPGSTYASLNGTSMATPHVAGAAALVKQKNPSWSNVRIRNRLKNTATSLGSTNLYGSGLVNAEAATR

SEQ ID NO: 55795 - protein, 269 aa, Unidentified
AQSVPWGISRVQAPAAHNRGLTGRGVKVAVLDTGISTHPDLNIRGGASFVPGEPSTQDGNGHGTHVAGTIAALNNSIGVLGVAPSAELYAVKVLGASGAGSVSSIAQGLEWAGNNGMEVANLSLGSPSPSATLEQAVNSATSRGVLVVAASGNSGAGSISYPARYANAMAVGATDQNNNRASFSQYGFGLDIVAPGVNVQSTYPGSTYASLNGTSMATPHVAGAAALVKQKNPSWSNVQIRNRLKNTATSLGSTNLYGSGLVNAEAATR

SEQ ID NO: 55796 - protein, 269 aa, Unidentified
AQSVPWGISRVQAPAAHNRGLAGSGVKVAVLDTGISTHPDLNIRGGASFVPGEPSTQDGNGHGTHVAGTIAALNNSIGVLGVAPSAELYAVKVLGASGAGSLSSIAQGVEWAGNNGMHVANLSLGNPSPSATLEQAVNSATSRGVLVVAASGNSGAGSISYPARYANAMAVGATDQNNNRASFSQYGAGLDIVAPGVNVQSTYPGSTYASLNGTSMATPHVAGAAALVKQKNPSWSNVQIRNHLKNTATSLGSTNLYGSGLVNAEAATR

SEQ ID NO: 55797 - protein, 269 aa, Unidentified
AQSVPWGISRVQAPAAHNRGLTGSGVKVAVLDTGISTHPDLRIRGGASFVPGEPSTQDGEGHGTHVAGTIAALNNSIGVLGVAPSAELYAVKVLGASGDGSVSSIAQGLEWAGNNGMHVANLSLGLPSPSATLEQAVNSATSRGVLVVAASGNSGAGSISYPARYANAMAVGATDQNNNRASFSQYGAGLDIVAPGVNVQSTYPGSTYASLNGTSMATPHVAGAAALVKQKNPRWSNVQIRNHLKNTATSLGSTNLYGSGLVNAEAATR

SEQ ID NO: 55798 - protein, 269 aa, Unidentified
AQSVPWGISRVQAPAAHNRGLTGSGVKVAVLDTGISTHPDLNIRGGASFVPGEPSTQDGNGHGTHVAGTIAALNNSIGVLGVAPSAELYAVKVLAASGQGSVSSIAQGLEWAGNNGMHVANLSLGAPSPSATLEQAVNSATSRGVLVVAASGNSGAGSISYPARYANAMAVGATDQNNNRADFSQYGAGLDIVAPGVNVQSTYPGSTYASQNGTSMATPHVAGAAALVKQKNPSWSNVQIRNHLKNTATSLGSTNLYGSGLVNAEAATR

SEQ ID NO: 55799 - protein, 269 aa, Unidentified
AQSVPWGISRVQAPAAHNRGLTAFGVKVAVLDTGISTHPDLNIRGGASFVPGEPSTQDGNGHGTHVAGTIAALNNSIGVLGVAPSAELYAVKVLGASGSGSVSSIAQGLEWAGNNRMHVANLSLGSPSPSATLEQAVNSATSRGVLVVAASGNSGAGSISYPARYANAMAVGATDQNNNRADFSQYGAGLDIVAPGVNVQSTYPGSTYASLNGTSMATPHVAGAAALVKQKNGSWSNVQIRNHLKNTATSLGSTNLYGSGLVNAEAATR

SEQ ID NO: 55800 - protein, 269 aa, Unidentified
AQSVPWGISRVQAPAAHNRGLTGRGVKVAVLDTGISTHPDLNIRGGASFVPGEPSTQDGNGHGTHVAGTIAALDNSIGVLGVAPSAELYAVKVLGASGGGAVSSIAQGLEWAGNNGMHVANLSLGSPSPSATLEQAVNSATSRGVLVVAASGNSGAGSISYPARYANAMAVGATDQNNNRASFSQYGAGLDIVAPGVNVQSTYPGSTYASLNGTSMATPHVAGAAVLVKQKNPSWSNVQIRNHLKNTATSLGSTNLYGSGLVNAEAATR

SEQ ID NO: 55801 - protein, 269 aa, Unidentified
AQSVPWGISRVQAPAAHNRGLTGSGVKVAVLDTGISTHPDLNIRGGASFVPGEPSTQDGNGHGTHVAGTIAALNNSIGVLGVAPSAELYAVKVLPFAGAGSISSIAQGLEWAGNNGMHVANLSLGSPSPSATLEQAVNSATSRGVLVVAASGNSGAGSISYPARYANAMAVGATDQNNNRASFSQYGAGLDIVAPGVNVQSTYPGSTYASLNGTSMATPHVAGAAALVKQKNPSWSNVQIRNHLKNTATSLGSTNLYGSGLVNAEAATR

SEQ ID NO: 55802 - protein, 269 aa, Unidentified
AQSVPWGISRVQAPAAHNRGLLGFGVKVAVLDTGISTHPDLNIRGGASFVPGEPSTQDGNGHGTHVAGTIAALNNSIGVLGVAPSAELYAVKVLGASGSGSVSSIAQGLEWAGNNRMHVANLSLGSPSPSATLEQAVNSATSRGVLVVAASGNSGAGSIDYPARYANAMAVGATDQNNNRASFSQYGAGLDIVAPGVNVQSTYPGSAYASLNGTSMATPHVAGAAALVKQKNPSWSNVQIRNHLKNTATSLGSTNLYGSGLVNAEAATR

SEQ ID NO: 55803 - protein, 269 aa, Unidentified
AQSVPWGISRVQAPAAHNRKLTGSGVKVAVLDTGISTHPDLNIRGGASFVPGEPSTQDGNGHGTHVAGTIAALNNSIGVLGVAPSAELYAVKVLGASSDGSVSSIAQGLEWAGNNGMHVANLSLGLPSPSATLEQAVNSATSRGVLVVAASGNSGAGSISYPARYANAMAVGATDQNNNRASFSQYGAGLDIVAPGVNVQSTYPGSTYASLNGTSMATPHVAGAAALVKQKNPRWSNVQIRNHLKNTATSLGSTNLYGSGLVNAEAATR

SEQ ID NO: 55804 - protein, 269 aa, Unidentified
AQSVPWGIARVQAPAAHNRRLRGSGVKVAVLDTGISTHPDLNIRGGASFVPGEPSTQDGNGHGTHVAGTIAALNNRIGVLGVAPSAELYAVKVLGASGSGSVSSIAQGLEWAGNNGMHVANLSLGSPSPSATLEQAVNSATSRGVLVVAASGNSGAGSISYPARYANAMAVGATDQNNNRASFSQYGAGLDIVAPGVNVQSTYPGFTYASLNGTSMATPHVAGAAALVKQKNPSWSNVQIRNHLKNTATSLGSTNLYGSGLVNAEAATR

SEQ ID NO: 55805 - protein, 269 aa, Synthetic construct
AQSVPWGISRVQAPAAHNRGLTGSGVRVAVLDTGISTHPDLNIRGGASFVPGEPSTQDGNGHGTHVAGTIAALDNSIGVLGVAPSAELYAVKVLGASGSGSYSSIAQGLEWAGNNGMHVASLSLGSPSPSATLEQAVNSATSRGVLVVAASGNSGAGSISYPARYANAMAVGATDQNNNRASFSQYGAGLDIVAPGVNVQSTYPGSTYASLSGTSMATPHVAGAAALVKQKNPSWSNVQIRNHLKNTATSLGSTNLYGSGLVNAEAATR

SEQ ID NO: 55806 - protein, 269 aa, Unidentified
AQSVPWGISRVQAPAAHNRGLTGRGVKVAVLDSGISTHPDLNIRGGASFVPGEPSTQDGNGHGTHVAGTIAALNNSIGVLGVASNAELYAVKVLGASGSGSVSSIAQGLEWAGNNGMHVANLSLGSPSPSATLEQAVNSATSRGVLVVAASGNSGAGSISYPARYANAMAVGATDQNNNRASFSQYGAGLDIVAPGVNVQSTAPGSTYASLNGTSMATPHVAGAAALVKQKNPSWSNVQIRNHLKNTATSLGSTNLYGSGLVNAEAATR

SEQ ID NO: 55807 - protein, 269 aa, Unidentified
AQSVPWGISRVQAPAAHNRGLTARGVKVAVLDTGISTHPDLNIRGGASFVPGEPSTQDGNGHGTHVAGTIAALNNSIGVLGVAPSAELYAVKVLGASGSGSVSSIAQGLEWAGNFGMHVANLSLGSPSPSATLEQAVNSATSRGVLVVAASGNSGAGSISYPARYANAMAVGATDQNNNRASFSQYGAGLDIVAPGVNVQSTYPGMTYAFLNGTSMATPHVAGAAALVKQKNPSWSNVQIRNHLKNTATSLGSTNLYGSGLVNAEAATR

SEQ ID NO: 55808 - protein, 269 aa, Unidentified
AQSVPWGISRVQAPAAHNRGLTGRGVKVAVLDTGISTHPDLNIRGGASFVPGEPSTQDGNGHGTHVAGTIAALNNGIGVLGVAPSAELYAVKVLGASGSGSVSSIAQGLEWAGNNSMHVANLSLGSPSPSATLEQAVNSATSRGVLVVAASGNSGAGSISYPARYANAMAVGATDQNNNRADFSQYGAGLDIVAPGVNVQSTYPGSTYASLNGTSMATPHVAGAAALVKQKNPSWSNVQIRDHLKNTATSLGSTNLYGSGLVNAEAATR

SEQ ID NO: 55809 - protein, 269 aa, Unidentified
AQSVPWGISRVQAPAAHNRGLTGRGVKVAVLDTGISTHPDLNIRGGASFVPGEPSTQDGNGHGTHVAGTIAALNNRIGVLGVAPSAELYAVKVLGASGSGSLSSIAQGLEWAGANGMHVANLSLGSPSPSATLEQAVNSATSRGVLVVAASGNSGAGSISYPARYANAMAVGATDQDNNRASFSQYGAGLDIVAPGVNVQSTYPGSTYASLNGTSMATPHVAGAAALVKQKNPSWSNVQIRNHLKNTATSLGSTNLYGSGLVNAEAATR

SEQ ID NO: 55810 - protein, 269 aa, Unidentified
AQSVPWGISRVQAPAAHNRGLTGSGVKVAVLDTGISTHPDLNIRGGASFVPGEPSTQDGNGHGTHVAGTIAALNNSIGVLGVAPSAELYAVKVLGQSGGAAISSIAQGLEWAGNNGMHVANLSLGSPSPSATLEQAVNSATSRGVLVVAASGNSGAGSISYPARYANAMAVGATDQNNNRASFSQYGAGLDIVAPGVNVQSTYPGSTYASLNGTSMATPHVAGAAALVKQKNPSWSNVQIRNHLKNTATSLGSTNLYGSGLVNAEAATR

SEQ ID NO: 55811 - protein, 269 aa, Unidentified
AQSVPWGISRVQAPAAHNRGLAGSGVKVAVLDTGISTHPDLNIRGGASFVPGEPSTQDGNGHGTHVAGTIAALNNSIGVLGVAPSAELYAVKVLGASGGGGLSSIAQGLEWAGNNGMHVANLSLGSPSPSATLEQAVNSATSRGVIVVAASGNSGAGSISYPARYANAMAVGATDQNNNRASFSQYGAGLDIVAPGVNVQSTYPGSTYASLNGTSMATPHVAGAAALVKQKNPSWSNVQIRNHLKNTATSLGSTNLYGSGLVNAEAATR

SEQ ID NO: 55812 - protein, 269 aa, Unidentified
AQSVPWGISRVQAPAAHNRKLTGSGVKVAVLDTGISTHPDLNIRGGASFVPGEPSTQDGEGHGTHVAGTIAALNNNIGVLGVAPSAELYAVKVLGASGSGSVSSIAQGLEWAGLNGMHVANLSLGQPSPSATLEQAVNSATSRGVLVVAASGNSGAGSISYPARYANAMAVGATDQNNNRASFSQYGAGLDIVAPGVNVQSTYPGSAYASLNGTSSATPHVAGAAALVKQKNPSWSNVQIRNHLKNTATSLGSTNLYGSGLVNAEAATR

SEQ ID NO: 55813 - protein, 269 aa, Unidentified
AQSVPWGISRVQAPAAHNRKLLGSGVKVAVLDTGISTHPDLNIRGGASFVPGEPSTQDGNGHGTHVAGTIAALNNNIGVLGVAPSAELYAVKVLGASGSGSVSSIAQGLEWAGNNRMHVANLSLGSPSPSATLEQAVNSATSRGVLVVAASGNSGAGSISYPARYANAMAVGATDQNNNRASFSQYGAGLDIVAPGVNVQSTYPGSAYASLNGTSMATPHVAGAAALVKQKNPSWSNVQIRNHLKNTATSLGSTNLYGSGLVNAEAATR

SEQ ID NO: 55814 - protein, 269 aa, Unidentified
AQSVPWGISRVQAPAAHRRGLTGSGVKVAVLDTGISTHPDLNIRGGASFVPGEPSTQDGNGHGTHVAGTIAALDNSIGVLGVAPSAELYAVKVLGASGGGSVSSIAQGLEWAGNNGMHVANLSLGSPSPSATLEQAVNSATSRGVLVVAASGNSGAGSISYPARYANAMAVGATDQNNNRASFSQYGAGLDTVAPGVNVQSTYPGSTYASLNGTSMATPHVAGAAVLVKQKNPSWSNVQIRNHLKNTATSLGSTNLYGSGLVNAEAATR

SEQ ID NO: 55815 - protein, 269 aa, Unidentified
AQSVPWGISRVQAPAAHNRGLTGSGVKVAVLDTGISTHPDLNIRGGASFVNGEPSTQDGNGHGTHVAGTIAALNNSIGVLGVAPSAELYAVKVLGASGSGNVSSIAQGLEWAGANGMHVANLSLGSPSPSATLEQAVNSATSRGVIVVAASGNSGAGSISYPARYANAMAVGATDQNNNRASFSQWGAGLDIVAPGVNVQSTYPGSTYASLNGTSMATPHVAGAAALVKQKNPSWSNVQIRNHLKNTATSLGSTNLYGSGLVNAEAATR

SEQ ID NO: 55816 - protein, 269 aa, Unidentified
AQSVPWGISRMQAPAAHNRGLTGRGVKVAVLDSGISTHPDLNIRGGASFVPGEPSTQDGNGHGTHVAGTIAALNNSIGVLGVAPSAELYAVKVLGASGSGSVSSIAQGLEWAGNNGMHVANLSLGIPSPSATLEQAVNSATSRGVLVVAASGNSGAGSIDYPARYANAMAVGATDQNNNRASFSQYGAGLDIVAPGVNVQSTYPGSTYASLNGTSMATPHVAGAAALVKQKNPSWSNVQIRNHLKNTATSLGSTNLYGSGLVNAEAATR

SEQ ID NO: 55817 - protein, 269 aa, Unidentified
AQSVPWGISRVQAPAAHNRRLTGSGVKVAVLDTGISTHPDLRIRGGASFVPGEPSTQDGNGHGTHVAGTIAALNNSIGVLGVAPSAELYAVKVLGASGAGSVSSIAQGLEWAGNNGMHVANLSLGSPSPSATLEQAVNSATSRGVLVVAASGNSGAGSISYPARYANAMAVGATDQNNNRASFSQYGAGLDIVAPGVNVQSTYIQSTYASLNGTSMATPHVAGAAALVKQKNPSWSNVQIRNHLKNTATSLGSTNLYGSGLVNAEAATR

SEQ ID NO: 55818 - protein, 269 aa, Unidentified
AQSVPWGISRVQAPAAHNRGLTGSGVKVAILDTGISTHPDLRIRGGASFVPGEPSTQDGNGHGTHVAGTIAALNNSIGVLGVAPSAELYAVKVLGASGAGSVSSIAQGLEWAGNNGMHVANLSLGSPSPSATLEQAVNSATSRGVLVVAASGNSGAGSISYPARYANAMAVGATDQNNNRASFSQYGAGLDIVAPGVNVQSTYPQSAYASLNGTSMATPHVAGAAALVKQKNPSWSNVQIRNHLKNTATSLGSTNLYGSGLVNAEAATR

SEQ ID NO: 55819 - protein, 269 aa, Unidentified
AQSVPWGISRVQAPAAHNRGLTGSGVKVAVLDTGISTHPDLNIRGGASFVPGEPSTQDGNGHGTHVAGTIAALNNGIGVLGVAPSAELYAVKVLGASGSGSVSSIAQGLEWAGNNSMHVANLSLGSESPSATLEQAVNSATSRGVLVVAASGNSGAGSISYPARYANAMAVGATDQNNNRADFSQYGAGLDIVAPGVNVQSTYPGSTYASLNGTSMATPHVAGAAALVKQKNPSWSNVQIRDHLKNTATSLGSTNLYGSGLVNAEAATR

SEQ ID NO: 55820 - protein, 269 aa, Bacillus lentus
AQTVPWGIRRVQAPAAHNLGLTGSGVKVAVLDTGISTHPDLNIRGGASFVPGEPSTQDGDGHGTHVAGTIAALNNSIGVLGVAPSAELYAVKVLGASGSGSVSSIAQGLEWAGNNGMHVANLSLGSPSPSATLEQAVNSATSRGVLVVAASGNSGAGSISYPARYANAMAVGATDQNNNRASFSQYGPGLDIVAPGVNVQSTYPGSTYASLNGTSMATPHVAGAAALVKQKNPSWSNVQIRNHLKNTATSLGSTNLYGSGLVNAEAATR

SEQ ID NO: 55821 - protein, 269 aa, Unidentified
AQSVPWGISRVQAPAAHNRRLWGSGVKVAVLDTGISTHPDLRIRGGASFVPGEPSTQDGNGHGTHVAGTIAALNNSIGVLGVAPSAELYAVKVLGASGAGSVSSIAQGLEWAGLNGMHVANLSLGSPSPSATLEQAVNSATSRGVLVVAASGNSGAGSISYPARYANAMAVGATDQNNNRASFSQYGAGLDIVAPGVNVQSTYPGSTYASLNGTSMATPHVAGAAALVKQKNPSWSNVQIRNHLKNTATSLGSTNLYGSGLVNAEAATR

SEQ ID NO: 55822 - protein, 269 aa, Unidentified
AQSVPWGISRVQAPASHNRGLTGSGVKVAVLDTGISTHPDLNIRGGASFVPGEPSTQDGNGHGTHVAGTIAALNNSIGVLGVAPSAELYAVKVLGASGGGGISSIAQGLEWAGNNGMHVANLSLGSPSPSATLEQAVNSATSRGVIVVAASGNSGAGSISYPARYANAMAVGATDQNNNRASFSQYGAGLDIVAPGVNVQSTYPGSTYASLNGTSMATPHVAGAAALVKQKNPSWSNVQIRNHLKNTATSLGSTNLYGSGLVNAEAATR

SEQ ID NO: 55823 - protein, 269 aa, Unidentified
AQSVPWGISRVQAPAAHNRGLTGGGVKVAVLDTGISTHPDLNIRGGASFVPGEPSTQDGNGHGTHVAGTIAALNNSIGVLGVAPSAELYAVKVLAASGGGSVSSIAQGLEWAGNNGMHVANLSLGSPSPSATLEQAVNSATSRGVLVVAASGNSGAGSISYPARYANAMAVGATDQNNNRADFSQYGAGLDIVAPGVNVQSTYPGSTYASQNGTSMATPHVAGAAALVKQKNPSWSNVQIRNHLKNTATSLGSTNLYGSGLVNAEAATR

SEQ ID NO: 55824 - protein, 269 aa, Unidentified
AQSVPWGISRVQAPAAHNRRLTGRGVKVAVLDTGISTHPDLRITGGASFVPGEPSTQDGNGHGTHVAGTIAALNNSIGVLGVAPSAELYAVKVLGASGSGSVSSIAQGLEWAGNNGMHVANLSLGSPSPSATLEQAVNSATSRGVLVVAASGNSGAGSISYPARYANAMAVGATDQNNNRASFSQYGAGLDIVAPGVNVQSTYPGSTYFSLNGTSMATPHVAGAAALVKQKNPSWSNVQIRNHLKNTATSLGSTNLYGSGLVNAEAATR

SEQ ID NO: 55825 - protein, 269 aa, Unidentified
AQSVPWGISRVQAPAAHNRGLTGSGVKVAVLDTGISTHPDLNIRGGASFVPGEPSTQDGNGHGTHVAGTIAALDNSIGVLGVAPSAELYAVKVLGASGSGAISSIAQGLEWAGNNGMHVANLSLGSPSPSATLEQAVNSATSRGVLVVAASGNSGADSISYPARYANAMAVGATDQNNNRASFSQYGAGLDIVAPGVNVQSTYPGSTYASLNGTSMATPHVAGAAALVKQKSPSWSNVQIRNHLKNTATSLGSTNLYGSGLVNAEAATR

SEQ ID NO: 55826 - protein, 269 aa, Unidentified
AQSVPWGISRVQAPAAHRRRLTGSGVKVAVLDTGISTHPDLRITGGASFVPGEPSTQDGNGHGTHVAGTIAALNNSIGVLGVAPSAELYAVKVLGASGSGSVSSIAQGLEWAGNNGMHVANLSLGSPSPSATLEQAVNSATSRGVLVVAASGNSGAGSISYPARYANAMAVGATDQNNNRASFSQYGAGLDIVAPGVNVQSTYPGSTYASLNGTSMATPHVAGAAALVKQKNPSWRNVQIRNHLKNTATSLGSTNLYGSGLVNAEAATR

SEQ ID NO: 55827 - protein, 269 aa, Unidentified
AQSVPWGISRVQAPAAHNRRLTGSGVKVAVLDTGISTHPDLNIRGGASFVPGEPSTQDGNGHGTHVAGTIAALNNSIGVLGVAPSAELYAVKVLGASGGGSLSSIAQGLEWAGNNGMHVANLSLGSPSPSATLEQAVNSATSRGVLVVAASGNSGAGSISYPARYANAMAVGATDQNNNRASFSQYGAGLDIVAPGVNVQSTYPGSTYASLNGTSMATPHVAGAAVLVKQKNPSWRNVQIRNHLKNTATSLGSTNLYGSGLVNAEAATR

SEQ ID NO: 55828 - protein, 269 aa, Unidentified
AQVVPWGISRVQAPAAHNRGLTGSGVKVAVLDTGISTHEDLNIRGGASFVPGEPSTQDGNGHGTHVAGTIAALDNSIGVLGVAPSAELYAVKVLGASGSGSVSSIAQGLEWAGNNRMHVANLSLGRPSPSATLEQAVNSATSRGVLVVAASGNSGAGSISYPARYANAMAVGATDQNNNRASFSQYGAGLDIVAPGVNVQSTYPGSTYASLNGTSMATPHVAGAAALVKQKNPSWSNVQIRNHLKNTATSLGSTNLYGSGLVNAEAATR

SEQ ID NO: 55829 - protein, 269 aa, Unidentified
AQSVPWGISRVQAPAAHNRRLTGSGVKVAVLDTGISTHPDLNITGGASFVPGEPSTQDGNGHGTHVAGTIAALNNSIGVLGVAPSAELYAVKVLGASGAGSVSSIAQGLEWAGNNGMHVANLSLGSPSPSATLEQAVNSATSRGVLVVAASGNSGAGSISYPARYANAMAVGATDQNNNRASFSQYGAGLDIVAPGVNVQSTYIGSAYASLNGTSMATPHVAGAAALVKQKNPSWSNVQIRNHLKNTATSLGSTNLYGSGLVNAEAATR

SEQ ID NO: 55830 - protein, 269 aa, Unidentified
AQSVPWGISRVQAPAAHNRGLTGSGVKVAVLDTGISTHPDLNIRGGASFVPGEPSTQDGNGHGTHVAGTIAALNNDIGVLGVAPSAELYAVKVLGASGSGSVSSIAQGLEWAGNNSMHVANLSLGSPSPSATLEQAVNSATSRGVLVVAASGNSGAGSISYPARYANAMAVGATDQNNNRADFSQYGAGLDIVAPGVNVQSTYPGSTYASLNGTSMATPHVAGAAALVKQKNPSWSNVRIRDHLKNTATSLGSTNLYGSGLVNAEAATR

SEQ ID NO: 55831 - protein, 269 aa, Unidentified
AQSVPWGISRVQAPAAHNRKLTGSGVKVAVLDTGISTHPDLNIRGGASFVPGEPSTQDGNGHGTHVAGTIAALNNNIGVLGVAPSAELYAVKVLGASSSGSVSSIAQGLEWAGNNGMHVANLSLGSPSPSATLEQAVNSATSRGVLVVAASGNSGAGSISYPARYANAMAVGATDQNNNRASFSQYGAGLDIVAPGVNVQSTYPGSTYASEDGTSMATPHVAGAAALVKQKNPSWSNVQIRNHLKNTATSLGSTNLYGSGLVNAEAATR

SEQ ID NO: 55832 - protein, 269 aa, Unidentified
AQSVPWGISRVQAPAAHNRRLTGSGVKVAVLDTGISTHPDLNIRGGASFVPGEPSTQDGNGHGTHVAGTIAALNNGIGVLGVAPSAELYAVKVLGASGSGSVSSIAQGLEWAGNNSMHVANLSLGSESPSATLEQAVNSATSRGVLVVAASGNSGADSISYPARYANAMAVGATDQNNNRASFSQYGAGLDIVAPGVNVQSTYPGSTYASLNGTSMATPHVAGAAALVKQKNPSWSNVQIRNHLKNTATSLGSTNLYGSGLVNAEAATR

SEQ ID NO: 55833 - protein, 269 aa, Unidentified
AQSVPWGISRVQAPAAHNRKLTGSGVKVAVLDTGISTHPDLNIRGGASFVPGEPSTQDGNGHGTHVAGTIAALNNNIGVLGVAPSAELYAVKVLGASGSGSVSSIAQGLEWAGNNGMHVANLSLGQPSPSATLEQAVNSATSRGVLVVAASGNSGAGSISYPARYANAMAVGATDQNNNRASFSQYGAGLDIVAPGVNVQSTYPGSTYASENGTSMATPHVAGAAALVKQKNPRWSNVQIRNHLKNTATSLGSTNLYGSGLVNAEAATR

SEQ ID NO: 55834 - protein, 269 aa, Unidentified
AQSVPWGISRVQAPAAHNRRLTGSGVKVAVLDTGISTHPDLNIRGGASFVNGEPSTQDGNGHGTHVAGTIAALNNSIGVLGVAPSAELYAVKVLGASGAGSVSSIAQGLEWAGNNGMHVANLSLGSPSPSATLEQAVNSATSRGVLVVAASGNSGAGSISYPARYANAMAVGATDQNNNRASFSQYGAGLDLVAPGVNVQSTYPGSTYASLNGTSMATPHVAGAAACVKQKNPSWSNVQIRNHLKNTATSLGSTNLYGSGLVNAEAATR

SEQ ID NO: 55835 - protein, 270 aa, unidentified
AQSVPWGISRVQAPAAHNRGLTGSGVKVAVLDTGIDSTHPDLNIRGGASFVPGEPSTQDGNGHGTHVAGTIAALNNSIGVLGVAPSAELYAVKVLGASGSGSVSSIAQGLEWAGNNGMDVANLSLGSPSPSATLEQAVNSATSRGVLVVAASGNSGAGSISYPAYYANAMAVGATDQNNNRASFSQYGAELDIVAPGVNVQSTYPGSTYASLNGTSMATPHVAGAAALVLQKNPSWSNVQIRNHLENTATSLGSTNLYGSGLVNAEAATR

SEQ ID NO: 55836 - protein, 269 aa, Unidentified
AQSVPWGISRVQAPAAHNRGLTGSGVKVAVLDTGISTHPDLNIRGGASFVPGEPSTQDGEGHGTHVAGTIAALNNDIGVLGVAPSAELYAVKVLGASGSGSVSSIAQGLEWAGNNSMHVANLSLGSPSPSATLEQAVNSATSRGVLVVAASGNSGAGSISYPARYANAMAVGATDQNNNRASFSQYGAGLDIVAPGVNVQSTYPGSTYASLNGTSMATPHVAGAAALVKQKNPSWSNVQIRDRLKNTATSLGSTNLYGSGLVNAEAATR

SEQ ID NO: 55837 - protein, 269 aa, Unidentified
AQSVPWGISRVQAPAAHNRRLTGRGVKVAVLDTGISTHPDLNIRGGASFVPGEPSTQDGEGHGTHVAGTIAALNNGIGVLGVAPSAELYAVKVLGASGSGSVSSIAQGLEWAGNNDMHVANLSLGSPSPSATLEQAVNSATSRGVLVVAASGNSGAGSISYPARYANAMAVGATDQNNNRASFSQYGAGLDIVAPGVNVQSTYPGSTYASLNGTSMATPHVAGAAALVKQKNPSWSNVQIRNHLKNTATSLGSTNLYGSGLVNAEAATR

SEQ ID NO: 55838 - protein, 269 aa, Unidentified
AQSVPWGISRVQAPAAHNRGLTGRGVKVAVLDTGISTHPDLNIRGGASFVPGEPSTQDGNGHGTHVAGTIAALNNSIGVLGVAPSAELYAVKVLGASGSGSVSSIAQGLEWAGLNRMHVANLSLGIPSPSATLEQAVNSATSRGVLVVAASGNSGAGSISYPARYANAMAVGATDQNNNRADFSQYGAGLDIVAPGVNVQSTYPGSTYASLNGTSMATPHVAGAAALVKQKNPSWSNVQIRNHLKNTATSLGSTNLYGSGLVNAEAATR

SEQ ID NO: 55839 - protein, 269 aa, Unidentified
AQSVPWGISRVQAPAAHNRGLTGRGVKVAVLDTGISTHPDLNIRGGASFVPGEPSTQDGEGHGTHVAGTIAALNNRIGVLGVAPSAELYAVKVLGASGSGSVSSIAQGLEWAGNNGMHVANLSLGSESPSATLEQAVNSATSRGVLVVAASGNSGAGSISYPARYANAMAVGATDQNNNRASFSQYGAGLDIVAPGVNVQSTYPGSTYASLNGTSMATPHVAGAAALVKQKNPSWSNVQIRNRLKNTATSLGSTNLYGSGLVNAEAATR

SEQ ID NO: 55840 - protein, 269 aa, Unidentified
AQSVPWGISRVQAPAAHNRGLTGSGVKVAVLDTGISTHPDLRIRGGASFVPGEPSTQDGNGHGTHVAGTIAALNNNIGVLGVAPSAELYAVKVLGASGDASVSSIAQGLEWAGNNGMHVANLSLGSPSPSATLEQAVNSATSRGVLVVAASGNSGAGSISYPARYANAMAVGATDQNNNRASFSQYGAGLDIVAPGVNVQSTYPGSTYASENGTSMATPHVAGAAALVKQKNPSWSNVQIRNHLKNTATSLGSTNLYGSGLVNAEAATR

SEQ ID NO: 55841 - protein, 269 aa, Unidentified
AQSVPWGISRVQAPAAHNRGLAGRGVKVAVLDTGISTHPDLNIRGGASFVPGEPSTQDGEGHGTHVAGTIAALNNSIGVLGVAPSAELYAVKVLGASGSGSVSSIAQGLEWAGNNGMHVANLSLGIPSPSATLEQAVNSATSRGVLVVAASGNSGAGSIDYPARYANAMAVGATDQNNNRASFSQYGAGLDIVAPGVNVQSTYPGSTYASLNGTSMATPHVAGAAALVKQKNPSWSNVQIRNHLKNTATSLGSTNLYGSGLVNAEAATR

SEQ ID NO: 55842 - protein, 269 aa, Unidentified
AQSVPWGISRVQAPASHNRGLAGSGVKVAVLDTGISTHPDLNIRGGASFVPGEPSTQDGNGHGTHVAGTIAALNNSIGVLGVAPSAELYAVKVLGASGAGAISSIAQGLEWAGNNGMHVANLSLGSPSPSATLEQAVNSATSRGVLVVAASGNSGAGSISYPARYANAMAVGATDQNNNRASFSQYGAGLDIVAPGVNVQSTYPGSTYASLNGTSMATPHVAGAAALVKQKNPSWSNVQIRNHLKNTATSLGSTNLYGSGLVNAEAATR

SEQ ID NO: 55843 - protein, 269 aa, Unidentified
AQSVPWGISRVQAPAAHNRKLTGSGVKVAVLDTGISTHPDLNIRGGASFVPGEPSTQDGNGHGTHVAGTIAALNNNIGVLGVAPSAELYAVKVLGASGDASVSSIAQGLEWAGNNGMHVANLSLGSPSPSATLEQAVNSATSRGVLVVAASGNSGAGSISYPARYANAMAVGATDQNNNRASFSQYGAGLDIVAPGVNVQSTYLGSTYASLNGTSMATPHVAGAAALVKQKNPSWSNVQIRNHLKNTATSLGSTNLYGSGLVNAEAATR

SEQ ID NO: 55844 - protein, 270 aa, Synthetic construct
AQSVPWGISRVQAPAAHNRGLTGSGVKVAVLDTGIDSTHPDLNIRGGASFVPGEPSTQDGNGHGTHVAGTIAALNNSIGVLGVAPSAELYAVKVLNASGSGSYSSIAQGLEWAGNNGMDVANLSLGSPSPSATLEQAVNSATSRGVLVVAASGNSGAGSISYPARYANAMAVGATDQNNNRASFSQYGPELDIVAPGVNVQSTYPGSTYASLNGTSMATPHVAGAAALVKQKNPSWSNVQIRNHLKNTATSLGSTNLYGSGLVNAEAATR

SEQ ID NO: 55845 - protein, 269 aa, Unidentified
AQSVPWGISRVQAPAAHNRGLTGSGVKVAVLDTGISTHPDLNIRGGASFVPGEPSTQDGNGHGTHVAGTIAALNNNIGVLGVAPSAELYAVKVLAASGQGSVSSIAGGLEWAGNNGMHVANLSLGAPSPSATLEQAVNSATSRGVLVVAASGNSGAGSISYPARYANAMAVGATDQNNNRASFSQYGAGLDIVAPGVNVQSTYPGSTYASLNGTSMATPHVAGAAALVKQKNPSWSNVQIRNHLKNTATSLGSTNLYGSGLVNAEAATR

SEQ ID NO: 55846 - protein, 269 aa, Unidentified
AQSVPWGISRVQAPAAHNRGLTGSGVKVAVLDTGISTHPDLNIRGGASFVPGEPSTQDGNGHGTHVAGTIAALNNNIGVLGVAPSAELYAVKVLSASGNGSVSSIAGGLEWAGNNGMHVANLSLGAPSPSATLEQAVNSATSRGVLVVAASGNSGAGSISYPARYANAMAVGATDQNNNRASFSQYGAGLDIVAPGVNVQSTYPGSTYASQNGTSSATPHVAGAAALVKQKNPSWSNVQIRNHLKNTATSLGSTNLYGSGLVNAEAATR

SEQ ID NO: 55847 - protein, 269 aa, Unidentified
AQSVPWGISRVQAPAAHNRGLTGSGVKVAVLDTGISTHPDLNIRGGASFVPGEPSTQDGEGHGTHVAGTIAALNNSIGVLGVAPSAELYAVKVLGASGSGSVSSIAQGLEWAGNNRMHVANLSLGSESPSATLEQAVNSATSRGVLVVAASGNSGAGSISYPARYANAMAVGATDQNNNRADFSQYGAGLDIVAPGVNVQSTYPGSTYASLNGTSMATPHVAGAAALVKQKNPSWSNVRIRNHLKNTATSLGSTNLYGSGLVNAEAATR

SEQ ID NO: 55848 - protein, 269 aa, Unidentified
AQSVPWGISRVQAPAAHNRRLTGRGVKVAVLDTGISTHPDLNIRGGASFVPGEPSTQDGNGHGTHVAGTIAALNNDIGVLGVAPSAELYAVKVLGASGSGSVSSIAQGLEWAGNNDMHVANLSLGSPSPSATLEQAVNSATSRGVLVVAASGNSGAGSISYPARYANAMAVGATDQNNNRASFSQYGAGLDIVAPGVNVQSTYPGSTYASLNGTSMATPHVAGAAALVKQKNPSWSNVQIRDHLKNTATSLGSTNLYGSGLVNAEAATR

SEQ ID NO: 55849 - protein, 269 aa, Unidentified
AQSVPWGISRVQAPAAHRRGLTGRGVKVAVLDTGISTHPDLNIRGGASFVPGEPSTQDGNGHGTHVAGTIAALDNSIGVLGVAPSAELYAVKVLGASGGGSVSSIAQGLEWAGNNGMHVANLSLGSPSPSATLEQAVNSATSRGVLVVAASGNSGAGSISYPARYANAMAVGATDQNNNRASFSQYGAGLDIVAPGVNVQSTYPGSTYASLNGTSMATPHVAGAAVLVKQKNPSWSNVQIRNHLKNTATSLGSTNLYGSGLVNAEAATR

SEQ ID NO: 55850 - protein, 269 aa, Unidentified
AQSVPWGISRVQAPAAHNRGLTGSGVKVAVLDTGISTHPDLNIRGGASFVPGEPSTQDGNGHGTHVAGTIAALNNNIGVLGVAPSAELYAVKVLGASGSGSVSSIAQGLEWAGNNRMHVANLSLGDPSPSATLEQAVNSATSRGVLVVAASGNSGAGSIDYPARYANAMAVGATDQNNNRASFSQYGAGLDIVAPGVNVQSTYPGSAYASLNGTSMATPHVAGAAALVKQKNPSWSNVQIRNHLKNTATSLGSTNLYGSGLVNAEAATR

SEQ ID NO: 55851 - protein, 269 aa, Unidentified
AQSVPWGISRVQAPAAHNRGLTGRGVKVAVLDTGISTHPDLNIRGGASFVPGEPSTQDGEGHGTHVAGTIAALNNDIGVLGVAPSAELYAVKVLGASGSGSVSSIAQGLEWAGNNDMHVANLSLGSPSPSATLEQAVNSATSRGVLVVAASGNSGADSISYPARYANAMAVGATDQNNNRASFSQYGAGLDIVAPGVNVQSTYPGSTYASLNGTSMATPHVAGAAALVKQKNPSWSNVQIRNHLKNTATSLGSTNLYGSGLVNAEAATR

SEQ ID NO: 55852 - protein, 269 aa, Unidentified
AQSVPWGISRVQAPAAHNRGLTGSGVKVAVLDTGISTHPDLNIRGGASFVPGEPSTQDGNGHGTHVAGTIAALNNSIGVLGVAPSAELYAVKVLGASGDGSVSSIAQGLEWAGNNGMHVANLSLGQPSPSATLEQAVNSATSRGVLVVAASGNSGAGSISYPARYANAMAVGATDQNNNRASFSQYGAGLDIVAPGVNVQSTYPGSTYASENGTSMATPHVAGAAALVKQKNPRWSNVQIRNHLKNTATSLGSTNLYGSGLVNALAATR

SEQ ID NO: 55853 - protein, 269 aa, Unidentified
AQSVPWGISRVQAPAAHNRRLTGRGVKVAVLDTGTSTHPDLNIRGGASFVPGEPSTQDGNGHGTHVAGTIAALNNSIGVLGVAPSAELYAVKVLGASGAGSVSSIAQGLEWAGLNGMHVANLSLGSPSPSATLEQAVNSATSRGVLVVAASGNSGAGSISYPARYANAMAVGATDQNNNRASFSQYGAGLDIVAPGVNVQSTYPGSTYASLNGTSMATPHVAGAAALVKQKNPSWSNVQIRNHLKNTATSLGSTNLYGSGLVNAEAATR

SEQ ID NO: 55854 - protein, 269 aa, Unidentified
AQSVPWGISRVQAPAAHRRGLTGRGVKVAVLDTGISTHPDLNIRGGASFVPGEPSTQDGNGHGTHVAGTIAALNNSIGVLGVAPSAELYAVKVLGASGSGSVSSIAQGLEWAGNNRMHVANLSLTSPSPSATLEQAVNSATSRGVLVVAASGNSGAGSISYPARYANAMAVGATDQNNNRASFSQYGAGLDIVAPGVNVQSTWPGSTYASLNGTSMATPHVAGAAALVKQKNPSWSNVQIRNHLKNTATSLGSTNLYGSGLVNAEAATR

SEQ ID NO: 55855 - protein, 269 aa, Unidentified
AQSVPWGISRVQAPAAHNRGLTGSGVKVAVLDTGISTHPDLNIRGGASFVPGEPSTQDGNGHGTHVAGTIAALNNSIGVLGVAPSAELYAVKVLGASGSGSVSSIAQGLEWAGNNGMHVANLSLGSPSPSATLEQAVNSATRRGVLVVAASGNSGAGSISYPARYANAMAVGATDQNNNRASFSQYGAGLDIVAPGVNVQSTYPQSTYASLNGTSMATPHVAGAAALVKQKLSSWSNVQIRNRLKNTATSLGSTNLYGSGLVNAEAATR

SEQ ID NO: 55856 - protein, 269 aa, Unidentified
AQSVPWGISRVQAPAAHNRRLTGSGVKVAVLDTGISTHPDLNIRGGASFVPGEPSTQDGNGHGTHVAGTIAALNNSIGVLGVAPSAELYAVKVLGASGGGSISSIAQGLEWAGNNGMHVANLSLGSPSPSATLEQAVNSATSRGVLVVAASGNSGAGSISYPARYANAMAVGATDQNNNRASFSQYGAGLDIVAPGVNVQSTYPGSTYASLNGTSMATPHVAGAAVLVKQKNPSWSNVRIRNHLKNTATSLGSTNLYGSGLVNAEAATR

SEQ ID NO: 55857 - protein, 269 aa, Unidentified
AQSVPWGISRVQAPAAHNRGLTGGGVKVAVLDTGISTHPDLNIRGGASFVPGEPSTQDGNGHGTHVAGTIAALNNNIGVLGVAPSAELYAVKVLGASGNGSVSSIAGGLEWAGNNGMHVANLSLGAPSPSATLEQAVNSATSRGVLVVAASGNSGAGSISYPARYANAMAVGATDQNNNRASFSQYGAGLDIVAPGVNVQSTYPGSTYASQNGTSSATPHVAGAAALVKQKNPSWSNVQIRNHLKNTATSLGSTNLYGSGLVNAEAATR

SEQ ID NO: 55858 - protein, 269 aa, Unidentified
AQSVPWGISRVQAPAAHNRGLTGRGVKVAVLDTGISTHPDLNIRGGASFVPGEPSTQDGNGHGTHVAGTIAALDNNIGVLGVAPSAELYAVKVLGASGSGSVSSIAQGLEWAGNNGMHVANLSLGSPSPSATLEQAVNSATSRGVLVVAASGNSGAGSISYPARYANAMAVGATDQNNNRASFSQYGAGLDIVAPGVNVLSTYPGSTYASLNGTSMATPHVAGAAALVKQKNPSWSNVQIRNRLKNTATSLGSTNLYGSGLVNAEAATR

SEQ ID NO: 55859 - protein, 269 aa, Unidentified
AQSVPWGISRVQAPAAHNRGLTGRGVKVAVLDTGISTHPDLNIRGGASFVPGEPSTQDGEGHGTHVAGTIAALNNSIGVLGVAPSAELYAVKVLGASGSGSVSSIAQGLEWAGLNRMHVANLSLGIPSPSATLEQAVNSATSRGVLVVAASGNSGAGSISYPARYANAMAVGATDQNNNRASFSQYGAGLDIVAPGVNVQSTYPGSTYASLNGTSMATPHVAGAAALVKQKNPSWSNVQIRNHLKNTATSLGSTNLYGSGLVNAEAATR

SEQ ID NO: 55860 - protein, 269 aa, Unidentified
AQSVPWGISRVQAPAAHNRGLTGFGVKVAVLDTGISTHPDLNIRGGASFVPGEPSTQDGEGHGTHVAGTIAALNNSIGVLGVAPSAELYAVKVLGASGSGSVSSIAQGLEWAGLNGMHVANLSLGSPSPSATLEQAVNSATSRGVLVVAASGNSGAGSISYPARYANAMAVGATDQNNNRASFSQYGAGLDIVAPGVNVQSTYPGSAYASLNGTSMATPHVAGAAALVKQKNGSWSNVQIRNHLKNTATSLGSTNLYGSGLVNAEAATR

SEQ ID NO: 55861 - protein, 269 aa, Unidentified
AQSVPWGISRVQAPAAHNRRLRGSGVKVAVLDTGISTHPDLNIRGGASFVPGEPSTQDGNGHGTHVAGTIAALNNRIGVLGVAPSAELYAVKVLGASGSGSVSSIAQGLEWAGNNGMHVANLSLGSPSPSATLEQAVNSATSRGVLVVAASGNSGAGSISYPARYANAMAVGATDQNNNRASFSQYGAGLDIVAPGVNVQSTYPGFTYASLNGTSMATPHVAGAAALVKQKNPSRSNVQIRNHLKNTATSLGSTNLYGSGLVNAEAATR

SEQ ID NO: 55862 - protein, 269 aa, Synthetic construct
AQSVPWGISRVQAPAAHNRGLTGSGVKVAVLDTGISTHPDLNIRGGASFVPGEPSTQDGDGHGTHVAGTIAALNNSIGVLGVAPSAELYAVKVMGASGSGSPSSIAQGLEWAGNNGMHVANLSLGSPSPSATLEQAVNSATSRGVLVVAASNNSGAGSISYPARYANAMAVGATDQNNNRASFSQYGAGLDIVAPGVNVQSTYPGSQYASLNGTSMATPHVAGAAALVKQKNPSWSNVQIRNHLKNTATSLGSTNLYGSGLVNAEAATR

SEQ ID NO: 55863 - protein, 269 aa, Unidentified
AQSRPWGIARVQAPAAHNRRLTGSGVKVAVLDTGISTHPDLRIRGGASFVPGEPSTQDGNGHGTHVAGTIAALNNSIGVLGVAPSAELYAVKVLGASGSGSVSSIAQGLEWAGNNGMHVANLSLGSPSPSATLEQAVNSATSRGVLVVAASGNSGAGSISYPARYANAMAVGATDQNNNRASFSQYGAGLDIVAPGVNVQSTYPGSTYASLNGTSMATPHVAGAAALVKQKNPSWRNVQIRNHLKNTATSLGSTNLYGSGLVNAEAATR

SEQ ID NO: 55864 - protein, 269 aa, Unidentified
AQSVPWGISRVQAPAAHNRKLTGSGVKVAVLDTGISTHPDLNIRGGASFVPGEPSTQDGNGHGTHVAGTIAALNNNIGVLGVAPSAELYAVKVLGASGDGSVSSIAQGLEWAGNNGMHVANLSLGQPSPSATLEQAVNSATSRGVLVVAASGNSGAGSISYPARYANAMAVGATDQNNNRASFSQYGAGLDIVAPGVNVQSTYPGSTYASENGTSMATPHVAGAAALVKQKNPSWSNVQIRNHLKNTATSLGSTNLYGSGLVNAEAATR

SEQ ID NO: 55865 - protein, 269 aa, Unidentified
AQSVPWGISRVQAPASHNRGLTGSGVKVAVLDTGISTHPDLNIRGGASFVPGEPSTQDGNGHGTHVAGTIAALNNSIGVLGVAPSAELYAVKVLGASGAGSISSIAQGVEWAGNNGMHVANLSLGNPSPSATLEQAVNSATSRGVLVVAASGNSGAGSISYPARYANAMAVGATDQNNNRASFSQYGAGLDIVAPGVNVQSTYPGSTYASLNGTSMATPHVAGAAALVKQKNPSWSNVQIRNHLKNTATSLGSTNLYGSGLVNAEAATR

SEQ ID NO: 55866 - protein, 269 aa, Unidentified
AQSVPWGISRVQAPAAHNRGLTGSGVKVAVLDTGISTHPDLNIRGGASFVPGEPSTQDGEGHGTHVAGTIAALNNDIGVLGVAPSAELYAVKVLGASGSGSVSSIAQGLEWAGNNSMHVANLSLGSPSPSATLEQAVNSATSRGVLVVAASGNSGAGSISYPARYANAMAVGATDQNNNRADFSQYGAGLDIVAPGVNVQSTYPGSTYASLNGTSMATPHVAGAAALVKQKNPSWSNVQIRNRLKNTATSLGSTNLYGSGLVNAEAATR

SEQ ID NO: 55867 - protein, 269 aa, Unidentified
AQSVPWGISRVQAPAAHKRGLTGSGVKVAVLDTGISTHPDLNIRGGASFVPGEPSTQDGNGHGTHVAGTIAALNNSIGVLGVAPRAELYAVKVLGASGSGSVSSIAQGLEWAGNNGMHVANLSLGSPSPSATLEQAVNSATSRGVLVVAASGNSGAGSISYPARYANAMAVGATDQNNNRASFSQYGAGLDIVAPGVNVQSTWPGSAYASLNGTSQATPHVAGAAALVKQKNPSWSNVQIRNRLKNTATSLGSTNLYGSGLVNAEAATR

SEQ ID NO: 55868 - protein, 269 aa, Unidentified
AQSVPWGISRVQAPAAHNRGLTGFGVKVAVLDTGISTHPDLNIRGGASFVPGEPSTQDGNGHGTHVAGTIAALNNSIGVLGVAPSAELYAVKVLGASGSGNLSSIAQGLEWAGNNRMHVANLSLGSPSPSATLEQAVNSATSRGVLVVAASGNSGAGSISYPARYANAMAVGATDQNNNRADFSQYGAGLDIVAPGVNVQSTYPGSTYASLNGTSMATPHVAGAAALVKQKNPSWSNVQIRNHLKNTATSLGSTNLYGSGLVNAEAATR

SEQ ID NO: 55869 - protein, 269 aa, Unidentified
AQSVPWGISRVQAPAAHNRGLTGSGVKVAVLDTGISTHPDLNIRGGASFVPGEPSTQDGEGHGTHVAGTIAALNNSIGVLGVAPSAELYAVKVLGASGAGSVSSIAQGLEWAGNNGMHVANLSLGSPSPSATLEQAVNSATSRGVLVVAASGNSGEGSISYPARYANAMAVGATDQNNNHASFSQYGAGLDIVAPGVNVQSTYPGSTYASLNGTSMATPHVAGAAALVKQKNPSWSNVQIRNHLKNTATSLGSTNLYGSGLVNAFAATR

SEQ ID NO: 55870 - protein, 269 aa, Bacillus lentus
AQSVPWGIRRVQAPTAHNRGLTGSGVKVAVLDTGISTHPDLNIRGGASFVPGEPSTQDGNGHGTHAAGTIAALNNSIGVLGVAPSAELYAVKVLGASGSGSVSSIAQGLEWAGNNGMNVANLSLGSPSPSATLEQAVNSATSRGVLVVAASGNSGAGSISYPARYANAMAVGATDQNNNRASFSQYGAGLDIVAPGVNVQSTYPGSTYASLNGTSMATPHVAGAAALVKQKNPSWSNVRIRNHLKNTATSLGSTNLYGSGLVNAEAATR

SEQ ID NO: 55871 - protein, 269 aa, Unidentified
AQSVPWGISRVQAPAAHNRKLTGSGVKVAVLDTGISTHPDLRIRGGASFVPGEPSTQDGNGHGTHVAGTIAALNNNIGVLGVAPSAELYAVKVLGASGSGSVSSIAQGLEWAGNNGMHVANLSLGLPSPSATLEQAVNSATSRGVLVVAASGNSGAGSISYPARYANAMAVGATDQNNNRASFSQYGAGLDIVAPGVNVQSTYPGSTYASLNGTSMATPHVAGAAALVKQKNPRWSNVQIRNHLKNTATSLGSTNLYGSGLVNAEAATR

SEQ ID NO: 55872 - protein, 269 aa, Unidentified
AQSVPWGISRVRAPAAHNRGLTGSGVKVAVLDTGISTHPDLNIRGGASFVPGEPSTQDGNGHGTHVAGTIAALDNSIGVLGVAPSAELYAVKVLGASGSGAISSIAQGLEWAGNNGMHVANLSLGSPSPSATLEQAVNSATSRGVLVVAASGNSGAGSISYPARYANAMAVGATDQNNNRASFSQYGAGLDIVAPGVNVQSTYPGSTYASLNGTSMATPHVAGAAALVKQKNPSWTNVQIRNHLKNTATSLGSTNLYGSGLVNAEAATR

SEQ ID NO: 55873 - protein, 269 aa, Unidentified
AQSVPWGISRVQAPAAHNRKLTGFGVKVAVLDTGISTHPDLNIRGGASFVPGEPSTQDGEGHGTHVAGTIAALNNSIGVLGVAPSAELYAVKVLGASGSGSVSSIAQGLEWAGLNGMHVANLSLGSPSPSATLEQAVNSATSRGVLVVAASGNSGAGSISYPARYANAMAVGATDQNNNRADFSQYGAGLDIVAPGVNVQSTYPGSTYASLNGTSMATPHVAGAAALVKQKNPSWSNVQIRNHLKNTATSLGSTNLYGSGLVNAEAATR

SEQ ID NO: 55874 - protein, 269 aa, Unidentified
AQSVPWGISRVQAPAAHNRGLTGSGVKVAVLDTGISTHPDLNIRGGASFVPGEPSTQDGNGHGTHVAGTIAALNNSIGVLGVAPSAELFAVKVLGAFGAGSVTSIAQGLEWAGNNGMHVANLSLGSPSPSATLEQAVNSATSRGVLVVAASGNSGAGSISWPARYANAMAVGATDQNNNRASFSQYGAGLDIVAPGVNVQSTYPGSTYASLNGTSMATPHVAGAAALVKQKNPSWSNVQIRNHLKNTATSLGSTNLYGSGLVNAEAATR

SEQ ID NO: 55875 - protein, 269 aa, Unidentified
AQSVPWGISRVQAPAAHNRGLTGSGVKVAVLDTGISTHPDLNIRGGASFVPGEPSTQDGNGHGTHVAGTIAALNNSIGVLGVAPSAELYAVKVLGASGSGSVSSIAQGLEWAGNNGMHVANLSLGNPSPSATLEQAVNSATSRGVLVVAASGNSGEGSISYPARYANAMAVGATDQNNNHADFSQYGAGLDIVAPGVNVQSTYPGSTYASLNGTSMATPHVAGAAALVKQKNPSWSNVQIRNHLKNTATSLGSTNLYGSGLVNAFAATR

SEQ ID NO: 55876 - protein, 269 aa, Unidentified
AQSVPWGISRVQAPAAHNRGLLGSGVKVAVLDTGISTHPDLNIRGGASFVPGEPSTQDGNGHGTHVAGTIAALNNSIGVLGVAPSAELYAVKVLGASGSGSVSSIAQGLEWAGNNRMHVANLSLGSPSPSATLEQAVNSATSRGVLVVAASGNSGAGSIDYPARYANAMAVGATDQNNNRASFSQYGAGLDIVAPGVNVQSTYPGSAYASENGTSMATPHVAGAAALVKQKNPSWSNVQIRNHLKNTATSLGSTNLYGSGLVNAEAATR

SEQ ID NO: 55877 - protein, 269 aa, Unidentified
AQSVPWGISRVQAPAAHNRGLTGSGVKVAVLDTGISTHPDLNIRGGASFVNGEPSTQDGNGHGTHVAGTIAALNNSIGVLGVAPSAELYAVKVLGASGSGSLSSIAQGLEWAGNNGMHVANLSLGSPSPSATLEQAVNSATSRGVLVVAASGNSGAGSISYPARYANAMAVGATDQDNNRASFSQYGAGLDIVAPGVNVQSTYPGSTYAFLNGTSMATPHVAGAAALVKQKNPSWSNVQIRNRLKNTATSLGSTNLYGSGLVNAEAATR

SEQ ID NO: 55878 - protein, 269 aa, Unidentified
AQSVPWGISRVQAPAAHNRRLTGSGVKVAVLDTGISTHPDLNIRGGASFVPGEPSTQDGNGHGTHVAGTIAALNNDIGVLGVAPSAELYAVKVLGASGSGSVSSIAQGLEWAGNNDMHVANLSLGSPSPSATLEQAVNSATSRGVLVVAASGNSGAGSISYPARYANAMAVGATDQNNNRADFSQYGAGLDIVAPGVNVQSTYPGSTYASLNGTSMATPHVAGAAALVKQKNPSWSNVQIRNRLKNTATSLGSTNLYGSGLVNAEAATR

SEQ ID NO: 55879 - protein, 269 aa, Unidentified
AQSVPWGISRVQAPAAHNRGLTGSGVKVAVLDTGISTHPDLNIRGGASFVPGEPSTQDGNGHGTHVAGTIAALNNSIGVLGVAPSAELYAVKVLGADGAGAISSIAQGLEWAGNNGMHVANLSLGSPSPSATLEQAVNSATSRGVLVVAASGNSGASSISYPARYANAMAVGATDQNNNRASFSQYGAGLDIVAPGVNVQSTYPGSTYASLNGTSMATPHVAGAAALVKQKNPSWSNVQIRNHLKNTATSLGSTNLYGSGLVNAEAATR

SEQ ID NO: 55880 - protein, 269 aa, Unidentified
AQSVPWGISRVQAPAAHNRGLAGSGVKVAVLDSGISTHPDLNIRGGASFVPGEPSTQDGNGHGTHVAGTIAALNNSIGVLGVAPSAELYAVKVLGASGSGSVSSIAQGLEWAGLNGMHVANLSLGSPSPSATLEQAVNSATSRGVLVVAASGNSGAGSIDYPARYANAMAVGATDQNNNRADFSQYGAGLDIVAPGVNVQSTYPGSTYASLNGTSMATPHVAGAAALVKQKNPSWSNVQIRNHLKNTATSLGSTNLYGSGLVNAEAATR

SEQ ID NO: 55881 - protein, 269 aa, Unidentified
AQSVPWGISRVQAPAAHNRGLTGRGVKVAVLDTGISTHPDLNIRGGASFVPGEPSTQDGNGHGTHVAGTIAALNNDIGVLGVAPSAELYAVKVLGASGSGSVSSIAQGLEWAGNNSMHVANLSLGSESPSATLEQAVNSATSRGVLVVAASGNSGAGSISYPARYANAMAVGATDQNNNRASFSQYGAGLDIVAPGVNVQSTYPGSTYASLNGTSMATPHVAGAAALVKQKNPSWSNVQIRNRLKNTATSLGSTNLYGSGLVNAEAATR

SEQ ID NO: 55882 - protein, 269 aa, Unidentified
AQSVPWGISRVQAPAAHNRRLTGSGVKVAVLDTGISTHPDLNIRGGASFVPGEPSTQDGNGHGTHVAGTIAALNNDIGVLGVAPSAELYAVKVLGASGSGSVSSIAQGLEWAGNNDMHVANLSLGSPSPSATLEQAVNSATSRGVLVVAASGNSGADSISYPARYANAMAVGATDQNNNRASFSQYGAGLDIVAPGVNVQSTYPGSTYASLNGTSMATPHVAGAAALVKQKNPSWSNVRIRNHLKNTATSLGSTNLYGSGLVNAEAATR

SEQ ID NO: 55883 - protein, 269 aa, Unidentified
AQSVPWGISRVQAPAAHNRKLTGSGVKVAVLDTGISTHPDLNIRGGASFVPGEPSTQDGNGHGTHVAGTIAALNNNIGVLGVAPSAELYAVKVLGASGDGSVSSIAQGLEWAGNNGMHVANLSLGSPSPSATLEQAVNSATSRGVLVVAASGNSGAGSISYPARYANAMAVGATDQNNNRASFSQYGAGLDIVAPGVNVQSTYPGSTYASENGTSMATPHVAGAAALVKQKNPSWSNVQIRNHLKNTATSLGSTNLYGSGLVNALAATR

SEQ ID NO: 55884 - protein, 269 aa, Unidentified
AQSVPWGISRVQAPAAHNRGLTGSGVKVAVLDTGISTHPDLNIRGGASFVPGEPSTQDGNGHGTHVAGTIAALNNSIGVLGVAPSAELYAVKVLGASGSGSVSSIAQGLEWAGNNGMHVANLSLGNPSPSATLEQAVNSATSRGVLVVAASGNSGEGSISYPARYANAMAVGATDQNNNRADFSQYGAGLDIVAPGVNVQSTEPGSTYASLNGTSMATPHVAGAAALVKQKNPSWSNVQIRNHLKNTATSLGSTNLYGSGLVNAFAATR

SEQ ID NO: 55885 - protein, 269 aa, Unidentified
AQSVPWGISRVQAPAAHNRGLTGFGVKVAVLDTGISTHPDLNIRGGRSFVPGEPSTQDGNGHGTHVAGTIAALNNSIGVLGVAPSAELYAVKVLGASGSGSVSSIAQGLEWAGNNRMHVANLSLGSPSPSATLEQAVNSATSRGVLVVAASGNSGAGSIDYPARYANAMAVGATDQNNNRASFSQYGAGLDIVAPGVNVQSTYPGSTYASENGTSMATPHVAGAAALVKQKNPSWSNVQIRNHLKNTATSLGSTNLYGSGLVNAEAATR

SEQ ID NO: 55886 - protein, 269 aa, Bacillus sp.
AQSVPWGISRVQAPAAHNRGLTGSGVKVAVLDTGISTHPDLNIRGGASFVPGEPSTQDGNGHGTHVAGTIAALNNSIGVLGVAPNAELYAVKVLGASGSGSVSSIAQGLEWAGNNVMHVANLSLGVEKPSATLEQAVNSATSRGVLVVAASGNSGAGSISYPARYANAMAVGATDQNNNRASFSQYGAGLDIVAPGVNVQSTYPGSTYASLNGTSMATPHVAGAAALVKQKNPSWSNVQIRNHLKNTATSLGSTNLYGSGLVNAEAATR

SEQ ID NO: 55887 - protein, 269 aa, Unidentified
AQSVPWGISRVQAPAAHNRGLTGSGVKVAVLDSGISTHPDLNIRGGASFVPGEPSTQDGEGHGTHVAGTIAALNNSIGVLGVAPSAELYAVKVLGASGSGSVSSIAQGLEWAGNNRMHVANLSLGSPSPSATLEQAVNSATSRGVLVVAASGNSGAGSIDYPARYANAMAVGATDQNNNRADFSQYGAGLDIVAPGVNVQSTYPGSTYASLNGTSMATPHVAGAAALVKQKNPSWSNVQIRNHLKNTATSLGSTNLYGSGLVNAEAATR

SEQ ID NO: 55888 - protein, 269 aa, Unidentified
AQSVPWGISRVQAPAAHNRRLTGRGVKVAVLDTGISTHPDLNIRGGASFVPGEPSTQDGNGHGTHVAGTIAALNNSIGVLGVAPSAELYAVKVLGASGSGSVSSIAQGLEWAGNNRMHVANLSLGSPSPSATLEQAVNSATSRGVLVVAASGNSGAGSISYPARYANAMAVGATDQNNNRADFSQYGAGLDIVAPGVNVQSTYPGSTYASLNGTSMATPHVAGAAALVKQKNPSWSNVQIRDHLKNTATSLGSTNLYGSGLVNAEAATR

SEQ ID NO: 55889 - protein, 269 aa, Unidentified
AQSVPWGISRVQAPAAHNRGLTGGGVKVAVLDTGISTHPDLNIRGGASFVPGEPSTQDGNGHGTHVAGTIAALNNSIGVLGVAPSAELYAVKVLAASGNGSVSSIANGLEWAGNNGMHVANLSLGSPSPSATLEQAVNSATSRGVLVVAASGNSGAGSISYPARYANAMAVGATDQNNNRADFSQYGAGLDIVAPGVNVQSTYPGSTYASQNGTSSATPHVAGAAALVKQKNPSWSNVQIRNHLKNTATSLGSTNLYGSGLVNAEAATR

SEQ ID NO: 55890 - protein, 269 aa, Unidentified
AQSVPWGISRVQAPAAHNRGLTGRGVKVAVLDTGISTHPDLNIRGGASFVPGEPSTQDGEGHGTHVAGTIAALNNGIGVLGVAPSAELYAVKVLGASGSGSVSSIAQGLEWAGNNSMHVANLSLGSPSPSATLEQAVNSATSRGVLVVAASGNSGAGSISYPARYANAMAVGATDQNNNRASFSQYGAGLDIVAPGVNVQSTYPGSTYASLNGTSMATPHVAGAAALVKQKNPSWSNVRIRNHLKNTATSLGSTNLYGSGLVNAEAATR

SEQ ID NO: 55891 - protein, 269 aa, Unidentified
AQSVPWGISRVQAPAAHNRKLTGSGVKVAVLDTGISTHPDLNIRGGASFVPGETSTQDGEGHGTHVAGTIAALNNSIGVLGVAPSAELYAVKVLGASGSGSVSSIAQGLEWAGLNGMHVANLSLGSPSPSATLEQAVNSATSRGVLVVAASGNSGAGSISYPARYANAMAVGATDQNNNRASFSQYGAGLDIVAPGVNVQSTYPGSTYASNNGTSMATPHVAGAAALVKQKNPSWSNVQIRNHLKNTATSLGSTNLYGSGLVNAEAATR

SEQ ID NO: 55892 - protein, 269 aa, Unidentified
AQSVPWGIARVQAPAAHNRRLTGRGVKVAVLDTGISTHPDLRIRGGASFVPGEPSTQDGNGHGTHVAGTIAALNNSIGVLGVAPSAELYAVKVLGASGSGSVSSIAQGLEWAGNNGMHVANLSLGSPSPSATLEQAVNSATSRGVLVVAASGNSGAGSISYPARYANAMAVGATDQNNNRASFSQYGAGLDIVAPGVNVQSTYPGSTYASLNGTSMATPHVAGAAALVKQKNPSWRNVQIRNHLKNTATSLGSTNLYGSGLVNAEAATR

SEQ ID NO: 55893 - protein, 269 aa, Unidentified
AQSVPWGISRVQAPAAHNRKLTGFGVKVAVLDTGISTHPDLNIRGGASFVPGEPSTQDGNGHGTHVAGTIAALNNNIGVLGVAPSAELYAVKVLGASGSGSVSSIAQGLEWAGNNGMHVANLSLGSPSPSATLEQAVNSATSRGVLVVAASGNSGAGSIDYPARYANAMAVGATDQNNNRASFSQYGAGLDIVAPGVNVQSTYPGSTYASENGTSMATPHVAGAAALVKQKNPSWSNVQIRNHLKNTATSLGSTNLYGSGLVNAEAATR

SEQ ID NO: 55894 - protein, 269 aa, Unidentified
AQSVPWGISRVQAPAAHNRGLAGSGVKVAVLDSGISTHPDLNIRGGASFVPGEPSTQDGNGHGTHVAGTIAALNNSIGVLGVAPSAELYAVKVLGASGSGSVSSIAQGLEWAGNNRMHVANLSLGSPSPSATLEQAVNSATSRGVLVVAASGNSGEGSISYPARYANAMAVGATDQNNNRADFSQYGAGLDIVAPGVNVQSTYPGSTYASLNGTSMATPHVAGAAALVKQKNPSWSNVQIRNHLKNTATSLGSTNLYGSGLVNAEAATR

SEQ ID NO: 55895 - protein, 269 aa, Unidentified
AQSVPWGISRVQAPAAHNRGLTGSGVKVAVLDTGISTHPDLNIRGGASFVPGEPSTQDGNGHGTHVAGTIAALNNSIGVLGVAPSAELYAVKVLPQGSSGSISSIAQGLEWAGNNGMHVANLSLGSPSPSATLEQAVNSATSRGVLVVAASGNSGAGSISYPARYANAMAVGATDQNNNRASFSQYGAGLDIVAPGVNVQSTYPGSTYASLNGTSMATPHVAGAAALVKQKNPSWSNVQIRNHLKNTATSLGSTNLYGSGLVNAEAATR

SEQ ID NO: 55896 - protein, 269 aa, Unidentified
AQSVPWGISRVQAPAAHNRRLTGSGVKVAVLDTGISTHPDLNIRGGASFVPGEPSTQDGNGHGTHVAGTIAALNNSIGVLGVAPSAELYAVKVLGASGGGAVSSIAQGLEWAGNNGMHVANLSLGSPSPSATLEQAVNSATSRGVLVVAASGNSGAGSISYPARYANAMAVGATDQNNNRASFSQYGAGLDIVAPGVNVQSTYPGSTYASLNGTSMATPHVAGAAVLVKQKNPSWSNVRIRNHLKNTATSLGSTNLYGSGLVNAEAATR

SEQ ID NO: 55897 - protein, 269 aa, Unidentified
AQSVPWGISRVQAPAAHNRGLAGSGVKVAVLDTGISTHPDLNIRGGASFVPGEPSTQDGNGHGTHVAGTIAALNNSIGVLGVAPSAELYAVKVLGASGSGGISSIAQGLEWAGNNGMHVANLSLGNPSPSATLEQAVNSATSRGVIVVAASGNSGAGSISYPARYANAMAVGATDQNNNRASFSQYGAGLDIVAPGVNVQSTYPGSTYASLNGTSMATPHVAGAAALVKQKNPSWSNVQIRNHLKNTATSLGSTNLYGSGLVNAEAATR

SEQ ID NO: 55898 - protein, 269 aa, Synthetic construct
AQSVPWGISRVQAPAAHNRGLTGSGVKVAVLDTGISTHPDLNIRGGASFVPGEPSTQDGNGHGTHVAGTIAALNNSIGVLGVAPSAELYAVKVLGASGSGSVSSIAQGLEWAGNNGMHVANLSLGSPSPSATLEQAVNSATSRGVLVVAASGNSGAGSISYPARYANAMAVGATDQNNNRASFSQYGAGLDIVAPGVNVDSSSSGSTYASLSGTSMATPHVAGAAALVKQKNPSWSNVQIRNHLKNTATSLGSTNLYGSGLVNAEAATR

SEQ ID NO: 55899 - protein, 269 aa, Unidentified
AQSVPWGISRVQAPAAHNRGLTGSGVKVAVLDTGISTHPDLNIRGGASFVPGEPSTQDGNGHGTHVAGTIAALNNSIGVLGVAPSAELYAVKVLPATGAGGISSIAQGLEWAGNNGMHVANLSLGSPSPSATLEQAVNSATSRGVLVVAASGNSGAGSISYPARYANAMAVGATDQNNNRASFSQYGAGLDIVAPGVNVQSTYPGSTYASLNGTSMATPHVAGAAALVKQKNPSWSNVQIRNHLKNTATSLGSTNLYGSGLVNAEAATR

SEQ ID NO: 55900 - protein, 269 aa, Unidentified
AQSVPWGISRVQAPAAHRRGLTGRGVKVAVLDTGISTHPDLDIRGGASFVPGEPSTQDGNGHGTHVAGTIAALNNSIGVLGVAPSAELYAVKVLGASGSGSVSSIAQGLEWAGNNGMHVANLSLGSPSPSATLEQAVNSATSRGVLVVAASGNSGAGSISYPARYANAMAVGATDQNNNRASFSQYGAGLDIVAPGVNVQSTYPGSTYASLNGTSMATPHVAGEAALVKQKNPSWRNVQIRNHLKNTATSLGSTNLYGSGLVNAEAATR

SEQ ID NO: 55901 - protein, 269 aa, Unidentified
AQSVPWGISRVQAPAAHNRGLAGSGVKVAVLDTGISTHPDLNIRGGASFVPGEPSTQDGEGHGTHVAGTIAALNNSIGVLGVAPSAELYAVKVLGASGSGSVSSIAQGLEWAGNNGMHVANLSLGIPSPSATLEQAVNSATSRGVLVVAASGNSGEGSIDYPARYANAMAVGATDQNNNRASFSQYGAGLDIVAPGVNVQSTYPGSTYASLNGTSMATPHVAGAAALVKQKNPSWSNVQIRNHLKNTATSLGSTNLYGSGLVNAEAATR

SEQ ID NO: 55902 - protein, 269 aa, Unidentified
AQSVPWGISRVQAPAAHNRGLTGGGVKVAVLDTGISTHPDLNIRGGASFVPGEPSTQDGNGHGTHVAGTIAALNNNIGVLGVAPSAELYAVKVLAASGNGSVSSIANGLEWAGNNGMHVANLSLGAPSPSATLEQAVNSATSRGVLVVAASGNSGAGSISYPARYANAMAVGATDQNNNRASFSQYGAGLDIVAPGVNVQSTYPGSTYASLNGTSSATPHVAGAAALVKQKNPSWSNVQIRNHLKNTATSLGSTNLYGSGLVNAEAATR

SEQ ID NO: 55903 - protein, 269 aa, Unidentified
AQSVPWGISRVQAPAAHNRGLTGSGVRVAVLDTGISTHPDLNIRGGASFVPGEPSTQDGNGHGTHVAGTIAALNNSIGVLGVAPSAELYAVKVLGASGDGNVTSIAQGLEWAGNNGMHVANLSLGSPSPSATLEQAVNSATSRGVLVVAASGNSGAGSISYPARYANAMAVGATDQNNNRASFSQYGAGLDIVAPGVNVQSTYPGSTYASLNGTSMATPHVAGAAALVKQKNPSWSNVQIRNHLKNTATSLGSTNLYGSGLVNAEFATR

SEQ ID NO: 55904 - protein, 269 aa, Unidentified
AQSVPWGISRVQAPAAHNRGLTGSGVKVAVLDTGISTHPDLNIRGGASFVPGEPSTQDGNGHGTHVAGTIAALNNSIGVLGVAPSAELYAVKVLGASGSGSVSSIAQGLEWAGNNRMHVANLSLGIPSPSATLEQAVNSATSRGVLVVAASGNSGEGSIDYPARYANAMAVGATDQNNNRADFSQYGAGLDIVAPGVNVQSTYPGSTYASLNGTSMATPHVAGAAALVKQKNPSWSNVQIRNHLKNTATSLGSTNLYGSGLVNAEAATR

SEQ ID NO: 55905 - protein, 269 aa, Unidentified
AQSVPWGISRVQAPAAHNRGLWGRGVKVAVLDTGISTHPDLNIRGGASFVPGEPSTQDGNGHGTHVAGTIAALNNSIGVLGVAPSAELYAVKVLGASGAGSVSSIAQGLEWAGLNGMHVANLSLGSPSPSATLEQAVNSATSRGVLVVAASGNSGAGSISYPARYANAMAVGATDQNNNRASFSQYGAGLDIVAPGVNVQSTYPQSTYASLNGTSMATPHVAGAAALVKQKNPSWSNVQIRNHLKNTATSLGSTNLYGSGLVNAEAATR

SEQ ID NO: 55906 - protein, 269 aa, Unidentified
AQSVPWGISRVQAPAAHNRGLAGSGVKVAVLDSGISTHPDLNIRGGASFVPGEPSTQDGNGHGTHVAGTIAALNNSIGVLGVAPSAELYAVKVLGASGSGSVSSIAQGLEWAGLNGMHVANLSLGIPSPSATLEQAVNSATSRGVLVVAASGNSGAGSISYPARYANAMAVGATDQNNNRADFSQYGAGLDIVAPGVNVQSTYPGSTYASLNGTSMATPHVAGAAALVKQKNPSWSNVQIRNHLKNTATSLGSTNLYGSGLVNAEAATR

SEQ ID NO: 55907 - protein, 269 aa, Unidentified
AQSVPWGISRVQAPAAHRRRLTGRGVKVAVLDTGISTHPDLRIRGGASFVPGEPSTQDGNGHGTHVAGTIAALDNSIGVLGVAPSAELYAVKVLGASGSGSVSSIAQGLEWAGNNGMHVANLSLGSPSPSATLEQAVNSATSRGVLVVAASGNSGAGSISYPARYANAMAVGATDQNNNRASFSQYGAGLDIVAPGVNVQSTYPGSTYASLNGTSMATPHVAGAAALVKQKNPSWSNVQIRNHLKNTATSLGSTNLYGSGLVNAEAATR

SEQ ID NO: 55908 - protein, 269 aa, Bacillus sp.
AQSVPWGISRVQAPAAHNRGLTGSGVKVAVLDTGISTHPDLNIRGGASFVPGEPSTQDGNGHGTHVAGTIAALNNSIGVLGVAPNAELYAVKVLGASGSGSVSSIAQGLEWAGNNVMHVANLSLGFLTPSATLEQAVNSATSRGVLVVAASGNSGAGSISYPARYANAMAVGATDQNNNRASFSQYGAGLDIVAPGVNVQSTYPGSTYASLNGTSMATPHVAGAAALVKQKNPSWSNVQIRNHLKNTATSLGSTNLYGSGLVNAEAATR

SEQ ID NO: 55909 - protein, 269 aa, Unidentified
AQSVPWGISRVQAPAAHNRKLTGSGVKVAVLDTGISTHPDLNIRGGASFVPGEPSTQDGEGHGTHVAGTIAALNNSIGVLGVAPSAELYAVKVLGASGDGSVSSIAQGLEWAGLNGMHVANLSLGSPSPSATLEQAVNSATSRGVLVVAASGNSGAGSISYPARYANAMAVGATDQNNNRASFSQYGAGLDIVAPGVNVQSTYPGSAYASLNGTSMATPHVAGAAALVKQKNPSWSNVQIRNHLKNTATSLGSTNLYGSGLVNAEAATR

SEQ ID NO: 55910 - protein, 269 aa, Unidentified
AQSVPWGISRVQAPAAHNRGLTGRGVKVAVLDTGISTHPDLNIRGGASFVPGEPSTQDGNGHGTHVAGTIAALNNSIGVLGVAPSAELYAVKVLGASGSGSVSSIAQGLEWAGNNGMHVANLSLGSPSPSATLEQAVNSATSRGVLVVAASGNSGAGSISYPARYANAMAVGATDQNNNRASFSQYGAGLDIVAPGVNVLSTWPGSAYASLNGTSQATPHVAGAAALVKQKNPSWSNVQIRNRLKNTATSLGSTNLYGSGLVNAEAATR

SEQ ID NO: 55911 - protein, 269 aa, Unidentified
AQSVPWGISRVQAPAAHNRGLTGSGVKVAVLDTGISTHPDLNIRGGASFVPGEPSTQDGNGHGTHVAGTIAALDNNIGVLGVAPRAELYAVKVLGASGSGSVSSIAQGLEWAGNNRMHVANLSLGSPSPSATLEQAVNSATSRGVLVVAASGNSGAGSISYPARYANAMAVGATDQNNNRASFSQYGAGLDIVAPGVNVLSTYPGSTYASLNGTSMATPHVAGAAALVKQKNPSWSNVQIRNHLKNTATSLGSTNLYGSGLVNAEAATR

SEQ ID NO: 55912 - protein, 269 aa, Unidentified
AQSVPWGISRVQAPAAHNRGLLGSGVKVAVLDTGISTHPDLNIRGGASFVPGEPSTQDGNGHGTHVAGTIAALNNNIGVLGVAPSAELYAVKVLGASGSGSVSSIAQGLEWAGNNRMHVANLSLGSPSPSATLEQAVNSATSRGVLVVAASGNSGAGSIDYPARYANAMAVGATDQNNNRASFSQYGAGLDIVAPGVNVQSTYPGSTYASENGTSMATPHVAGAAALVKQKNPSWSNVQIRNHLKNTATSLGSTNLYGSGLVNAEAATR

SEQ ID NO: 55913 - protein, 269 aa, Unidentified
AQSVPWGISRVQAPAAHNRGLTGGGVKVAVLDTGISTHPDLNIRGGASFVPGEPSTQDGNGHGTHVAGTIAALNNNIGVLGVAPSAELYAVKVLGASGQGSVSSIAQGLEWAGNNGMHVANLSLGAPSPSATLEQAVNSATSRGVLVVAASGNSGAGSISYPARYANAMAVGATDQNNNRASFSQYGAGLDIVAPGVNVQSTYPGSTYASQNGTSMATPHVAGAAALVKQKNPSWSNVQIRNHLKNTATSLGSTNLYGSGLVNAEAATR

SEQ ID NO: 55914 - protein, 269 aa, Unidentified
AQSVPWGISRVQAPAAHNRGLAGRGVKVAVLDTGISTHPDLNIRGGASFVPGEPSTQDGEGHGTHVAGTIAALNNSIGVLGVAPSAELYAVKVLGASGSGSVSSIAQGLEWAGNNGMHVANLSLGIPSPSATLEQAVNSATSRGVLVVAASGNSGEGSISYPARYANAMAVGATDQNNNRASFSQYGAGLDIVAPGVNVQSTYPGSTYASLNGTSMATPHVAGAAALVKQKNPSWSNVQIRNHLKNTATSLGSTNLYGSGLVNAEAATR

SEQ ID NO: 55915 - protein, 269 aa, Unidentified
AQSVPWGISRVQAPAAHNRRLTGSGVKVAVLDTGISTHPDLNIRGGASFVPGEPSTQDGNGHGTHVAGTIAALNNGIGVLGVAPSAELYAVKVLGASGSGSVSSIAQGLEWAGNNSMHVANLSLGSPSPSATLEQAVNSATSRGVLVVAASGNSGAGSISYPARYANAMAVGATDQNNNRADFSQYGAGLDIVAPGVNVQSTYPGSTYASLNGTSMATPHVAGAAALVKQKNPSWSNVQIRNRLKNTATSLGSTNLYGSGLVNAEAATR

SEQ ID NO: 55916 - protein, 269 aa, Unidentified
AQSVPWGISRVQAPAAHNRGLTGRGVKVAVLDTGISTHPDLNIRGGASFVPGEPSTQDGNGHGTHVAGTIAALNNDIGVLGVAPSAELYAVKVLGASGSGSVSSIAQGLEWAGNNDMHVANLSLGSESPSATLEQAVNSATSRGVLVVAASGNSGAGSISYPARYANAMAVGATDQNNNRASFSQYGAGLDIVAPGVNVQSTYPGSTYASLNGTSMATPHVAGAAALVKQKNPSWSNVRIRNHLKNTATSLGSTNLYGSGLVNAEAATR

SEQ ID NO: 55917 - protein, 269 aa, Unidentified
AQSVPWGISRVQAPAAHNRKLTGGGVKVAVLDTGISTHPDLNIRGGASFVPGEPSTQDGEGHGTHVAGTIAALNNNIGVLGVAPSAELYAVKVLGASGNGSVSSIAQGLEWAGLNGMHVANLSLGSPSPSATLEQAVNSATSRGVLVVAASGNSGAGSISYPARYANAMAVGATDQNNNRASFSQYGAGLDIVAPGVNVQSTYPGSTYASLNGTSSATPHVAGAAALVKQKNPSWSNVQIRNHLKNTATSLGSTNLYGSGLVNAEAATR

SEQ ID NO: 55918 - protein, 269 aa, Unidentified
AQSVPWGISRVQAPAAHNRKLLGSGVKVAVLDTGISTHPDLNIRGGASFVPGEPSTQDGNGHGTHVAGTIAALNNNIGVLGVAPSAELYAVKVLGASGSGSVSSIAQGLEWAGNNGMHVANLSLGDPSPSATLEQAVNSATSRGVLVVAASGNSGAGSISYPARYANAMAVGATDQNNNRASFSQYGAGLDIVAPGVNVQSTYPGSTYASENGTSMATPHVAGAAALVKQKNPSWSNVQIRNHLKNTATSLGSTNLYGSGLVNAEAATR

SEQ ID NO: 55919 - protein, 269 aa, Unidentified
AQSVPWGISRVQAPAAHNRGLAGSGVKVAVLDTGISTHPDLNIRGGASFVPGEPSTQDGNGHGTHVAGTIAALNNSIGVLGVAPSAELYAVKVLGASGAGSISSIAQGVEWAGNNGMHVANLSLGNPSPSATLEQAVNSATSRGVLVVAASGNSGAGSISYPARYANAMAVGATDQNNNRASFSQYGAGLDIVAPGVNVQSTYPGSTYASLNGTSMATPHVAGAAALVKQKNPSWSNVQIRNHLKNTATSLGSTNLYGSGLVNAEAATR

SEQ ID NO: 55920 - protein, 269 aa, Unidentified
AQSVPWGISRVQAPAAHNRRLTGSGVKVAVLDTGISTHPDLDIRGGASFVPGEPSTQDGNGHGTHVAGTIAALDNSIGVLGVAPSAELYAVKVLGASGSGSVSSIAQGLEWAGNNGMHVANLSLGSPSPSATLEQAVNSATSRGVLVVAASGNSGAGSISYPARYANAMAVGATDQNNNRASFSQYGAGLDIVAPGVNVQSTYPGSTYASLNGTSMATPHVAGEAALVKQKNPSWSNVQIRNRLKNTATSLGSTNLYGSGLVNAEAATR

SEQ ID NO: 55921 - protein, 269 aa, Unidentified
AQSVPWGISRVQAPASHNRGLTGSGVKVAVLDTGISTHPDLNIRGGASFVPGEPSTQDGNGHGTHVAGTIAALNNSIGVLGVAPSAELYAVKVLGASGSGSLSSIAQGLEWAGNNGMHVANLSLGSPSPSATLEQAVNSATSRGVLVVAASGNSGEGSISYPARYANAMAVGATDQNNNHASFSQYGAGLDIVAPGVNVQSTYPGSTYASLNGTSMATPHVAGAAALVKQKNPSWSNVQIRNHLKNTATSLGSTNLYGSGLVNAFAATR

SEQ ID NO: 55922 - protein, 269 aa, Unidentified
AQSVPWGISRVQAPAAHNRGLAGSGVKVAVLDTGISTHPDLNIRGGASFVPGEPSTQDGNGHGTHVAGTIAALNNSIGVLGVAPSAELYAVKVLGASGSGSVSSIAQGLEWAGNNRMHVANLSLGSPSPSATLEQAVNSATSRGVLVVAASGNSGEGSIDYPARYANAMAVGATDQNNNRADFSQYGAGLDIVAPGVNVQSTYPGSTYASLNGTSMATPHVAGAAALVKQKNPSWSNVQIRNHLKNTATSLGSTNLYGSGLVNAEAATR

SEQ ID NO: 55923 - protein, 269 aa, Unidentified
AQSVPWGIRRVQAPTAHNRGLTGSGVKVAVLDTGISTHPDLNIRGGASFVPGEPSTQDGNGHGTHAAGTIAALNNSIGVLGVAPSAELYAVKVLGASGSGSVSSIAQGLEWAGNNGMHVANLSLGSPSPSATLEQAVNSATSRGVLVVAASGNSGAGSISYPARYANAMAVGATDQNNNRASFSQYGAGLDIVAPGVNVQSTYPGSTYASLDGTSMATPHVAGAAALVKQKNPSWSNVRIRNHLKNTATSLGSTNLYGSGLVNAEAATR

SEQ ID NO: 55924 - protein, 269 aa, Unidentified
AQSVPWGISRVQAPAAHNRGLTGRGVKVAVLDTGISTHPDLDITGGASFVPGEPSTQDGNGHGTHVAGTIAALNNSIGVLGVAPSAELYAVKVLGASGSGSVSSIAQGLEWAGNNGMHVANLSLGSPSPSATLEQAVNSATSRGVLVVAASGNSGAGSISYPARYANAMAVGATDQNNNRASFSQYGAGLDIVAPGVNVQSTYPGSTYASLNGTSMATPHVAGAAALVKQKNPSWRNVQIRNRLKNTATSLGSTNLYGSGLVNAEAATR

SEQ ID NO: 55925 - protein, 269 aa, Unidentified
AQSVPWGISRVQAPAAHNRGLTGSGVKVAVLDTGISTHPDLNIRGGASFVPGEPSTQDGEGHGTHVAGTIAALNNSIGVLGVAPSAELYAVKVLGASGSGSVSSIAQGLEWAGNNGMHVANLSLGNPSPSATLEQAVNSATSRGVLVVAASGNSGEESISYPARYANAMAVGATDQNNNRASFSQYGAGLDIVAPGVNVQSTYPGSTYASLNGTSMATPHVAGAAALVKQKNPSWSNVQIRNHLKNTATSLGSTNLYGSGLVNAFAATR

SEQ ID NO: 55926 - protein, 269 aa, Unidentified
AQSVPWGISRVQAPAAHNRGLTGRGVKVAVLDTGISTHPDLRITGGASFVPGEPSTQDGNGHGTHVAGTIAALNNSIGVLGVAPSAELYAVKVLGASGSGSVSSIAQGLEWAGNNGMHVANLSLGSPSPSATLEQAVNSATSRGVLVVAASGNSGAGSISYPARYANAMAVGATDQNNNRASFSQYGAGLDIVAPGVNVQSTYPGSTYASLNGTSMATPHVAGAAALVKQKNPSWRNVQIRNRLKNTATSLGSTNLYGSGLVNAEAATR

SEQ ID NO: 55927 - protein, 269 aa, Unidentified
AQSVPWGISRVQAPAAHRRRLTGSGVKVAVLDTGISTHPDLDITGGASFVPGEPSTQDGNGHGTHVAGTIAALNNSIGVLGVAPSAELYAVKVLGASGSGSVSSIAQGLEWAGNNGMHVANLSLGSPSPSATLEQAVNSATSRGVLVVAASGNSGAGSISYPARYANAMAVGATDQNNNRASFSQYGAGLDIVAPGVNVQSTYPGSTYASLNGTSMATPHVAGAAALVKQKNPPWSNVQIRNHLKNTATSLGSTNLYGSGLVNAEAATR

SEQ ID NO: 55928 - protein, 269 aa, Synthetic construct
AQSVPWGISRVQAPAAHNRGLTGSGVKVAVLDTGISTHPDLNIRGGASFVPGEPSTQDGNGHGTHVAGTIAALDNSIGVLGVAPSAELYAVKVLGADGSGAISSIAQGLEWAGNNGMHVASLSLGSPSPSATLEQAVNSATSRGVLVVAASGNSGAGSISYPARYANAMAVGATDQNNNRASFSQYGAGLDIVAPGVNVQSTYPGSTYASLNGTSMATPHVAGAAALVKQKNPSWSNVQIRNHLKNTATSLGSTNLYGSGLVNAEAATR

SEQ ID NO: 55929 - protein, 269 aa, Unidentified
AQSVPWGISRVQAPAAHNRGLRGSGVKVAVLDTGISTHPDLNIRGGASFVPGEPSTQDGNGHGTHVAGTIAALNNSIGVLGVAPSAELYAVKVLGASGGGAISSIAQGLEWAGNNGMHVANLSLGSPSPSATLEQAVNSATSRGVLVVAASGNSGAGSISYPARYANAMAVGATDQNNNRASFSQYGAGLDIVAPGVNVQSTYPGSTYASLNGTSMATPHVAGAAALVKQKNPSWSNVRIRNHLKNTATSLGSTNLYGSGLVNAEAATR

SEQ ID NO: 55930 - protein, 269 aa, Unidentified
AQSVPWGISRVQAPAAHNRRLTGSGVKVAVLDTGISTHPDLRIRGGASFVPGEPSTQDGNGHGTHVAGTIAALNNSIGVLGVAPSAELYAVKVLGASGAGSVSSIAQGLEWAGNNGMHVANLSLGSPSPSATLEQAVNSATSRGVLVVAASGNSGAGSISYPARYANAMAVGATDQNNNRASFSQYGAGLDIVAPGVNVQSTYPQSAYASLNGTSMATPHVAGAAALVKQKNPSWSNVQIRNHLKNTATSLGSTNLYGSGLVNAEAATR

SEQ ID NO: 55931 - protein, 269 aa, Unidentified
AQSVPWGISRVQAPAAHNRGLAGRGVKVAVLDTGISTHPDLNIRGGASFVPGEPSTQDGNGHGTHVAGTIAALNNSIGVLGVAPSAELYAVKVLGASGSGSVSSIAQGLEWAGNNRMHVANLSLGSPSPSATLEQAVNSATSRGVLVVAASGNSGAGSIDYPARYANAMAVGATDQNNNRADFSQYGAGLDIVAPGVNVQSTYPGSTYASLNGTSMATPHVAGAAALVKQKNPSWSNVQIRNHLKNTATSLGSTNLYGSGLVNAEAATR

SEQ ID NO: 55932 - protein, 269 aa, Unidentified
AQSVPWGISRVQAPAAHNRGLTGFGVKVAVLDTGISTHPDLNIRGGASFVPGEPSTQDGNGHGTHVAGTIAALNNSIGVLGVAPSAELYAVKVLGASGSGSVSSIAQGLEWAGNNRMHVANLSLGSPSPSATLEQAVNSATSRGVLVVAASGNSGAGSIDYPARYANAMAVGATDQNNNRASFSQYGAGLDIVAPGVNVQSTYPGSAYASENGTSMATPHVAGAAALVKQKNPSWSNVQIRNHLKNTATSLGSTNLYGSGLVNAEAATR

SEQ ID NO: 55933 - protein, 269 aa, Unidentified
AQSVPWGISRVQAPAAHNRGLTAFGVKVAVLDTGISTHPDLNIRGGASFVPGEPSTQDGEGHGTHVAGTIAALNNSIGVLGVAPSAELYAVKVLGASGSGSVSSIAQGLEWAGLNGMHVANLSLGSPSPSATLEQAVNSATSRGVLVVAASGNSGAGSISYPARYANAMAVGATDQNNNRASFSQYGAGLDIVAPGVNVQSTYPGSAYASLNGTSMATPHVAGAAALVKQKNPSWSNVQIRNHLKNTATSLGSTNLYGSGLVNAEAATR

SEQ ID NO: 55934 - protein, 269 aa, Bacillus sp.
AQSVPWGISRVQAPAAHNRGLTGSGVKVAVLDTGISTHPDLNIRGGASFVPGEPSTQDGNGHGTHVAGTIAALNNSIGVLGVAPNAELYAVKVLGASGSGSVSSIAQGLEWAGNNGMHVANLSLGMAGPSATLEQAVNSATSRGVLVVAASGNSGAGSIDYPARYANAMAVGATDQNNNRASFSQYGAGLDIVAPGVNVQSTYPGSTYASLNGTSMATPHVAGAAALVKQKNPSWSNVQIRNHLKNTATSLGSTNLYGSGLVNAEAATR

SEQ ID NO: 55935 - protein, 269 aa, Unidentified
AQSVPWGISRVQAPAAHNRGLTGRGVKVAVLDTGISTHPDLNIRGGASFVPGEPSTQDGNGHGTHVAGTIAALNNDIGVLGVAPSAELYAVKVLGASGSGSVSSIAQGLEWAGNNDMHVANLSLGSPSPSATLEQAVNSATSRGVLVVAASGNSGAGSISYPARYANAMAVGATDQNNNRADFSQYGAGLDIVAPGVNVQSTYPGSTYASLNGTSMATPHVAGAAALVKQKNPSWSNVRIRNHLKNTATSLGSTNLYGSGLVNAEAATR

SEQ ID NO: 55936 - protein, 269 aa, Unidentified
AQSVPWGISRVQAPAAHNRGLTGRGVKVAVLDTGISTHPDLNIRGGASFVPGEPSTQDGNGHGTHVAGTIAALNNRIGVLGVAWSAELYAVKVLGASGSGSVSSIAQGLEWAGNNRMHVANLSLGSPSPSATLEQAVNSATSRGVLVVAASGNSGAGSISYPARYANAMAVGATDQNNNRASFSQYGAGLDIVAPGVNVQSTYPGSTYASLNGTSMATPHVAGAAALVKQKNPSWSNVQIRNHLKNTATSLGSTNLYGSGLVNTEAATR

SEQ ID NO: 55937 - protein, 269 aa, Unidentified
AQSVPWGISRVQAPAAHNRRLTGRGVKVAVLDTGISTHPDLNIRGGASFVPGEPSTQDGNGHGTHVAGTIAALNNDIGVLGVAPSAELYAVKVLGASGSGSVSSIAQGLEWAGNNSMHVANLSLGSPSPSATLEQAVNSATSRGVLVVAASGNSGAGSISYPARYANAMAVGATDQNNNRASFSQYGAGLDIVAPGVNVQSTYPGSTYASLNGTSMATPHVAGAAALVKQKNPSWSNVQIRDHLKNTATSLGSTNLYGSGLVNAEAATR

SEQ ID NO: 55938 - protein, 269 aa, Unidentified
AQSVPWGISRVQAPASHNRGLAGSGVKVAVLDTGISTHPDLNIRGGASFVPGEPSTQDGNGHGTHVAGTIAALNNSIGVLGVAPSAELYAVKVLGASGSGAISSIAQGLEWAGNNGMHVANLSLGSPSPSATLEQAVNSATSRGVIVVAASGNSGAGSISYPARYANAMAVGATDQNNNRASFSQYGAGLDIVAPGVNVQSTYPGSTYASLNGTSMATPHVAGAAALVKQKNPSWSNVQIRNHLKNTATSLGSTNLYGSGLVNAEAATR

SEQ ID NO: 55939 - protein, 269 aa, Unidentified
AQSVPWGISRVQAPAAHNRGLTGRGVKVAVLDTGISTHPDLRIRGGASFVPGEPSTQDGNGHGTHVAGTIAALNNSIGVLGVAPSAELYAVKVLGASGAGSVSSIAQGLEWAGNNGMHVANLSLGSPSPSATLEQAVNSATSRGVLVVAASGNSGAGSISYPARYANAMAVGATDQNNNRASFSQYGAGLDIVAPGVNVQSTYPQSAYASLNGTSMATPHVAGAAALVKQKNPSWSNVQIRNHLKNTATSLGSTNLYGSGLVNAEAATR

SEQ ID NO: 55940 - protein, 269 aa, Unidentified
AQSVPWGISRVQAPAAHNRKLLGSGVKVAVLDTGISTHPDLNIRGGASFVPGEPSTQDGNGHGTHVAGTIAALNNNIGVLGVAPSAELYAVKVLGASGSGSVSSIAQGLEWAGNNRMHVANLSLGSPSPSATLEQAVNSATSRGVLVVAASGNSGAGSIDYPARYANAMAVGATDQNNNRASFSQYGAGLDIVAPGVNVQSTYPGSTYASLNGTSMATPHVAGAAALVKQKNPSWSNVQIRNHLKNTATSLGSTNLYGSGLVNAEAATR

SEQ ID NO: 55941 - protein, 269 aa, Unidentified
AQSVPWGISRVQAPAAHRRGLTGRGVKVAVLDTGISTHPDLNIRGGASFVPGEPSTQDGNGHGTHVAGTIAALDNSIGVLGVAPSAELYAVKVLGASGSGSVSSIAQGLEWAGNNGMHVANLSLGSPSPSATLEQAVNSATSRGVLVLAASGNSGAGSISYPARYANAMAVGATDQNNNRASFSQYGAGLDIVAPGVNVQSTYPGSTYASLNGTSMATPHVAGAAALVKQKNPSWSNVQIRNRLKNTATSLGSTNLYGSGLVNAEAATR

SEQ ID NO: 55942 - protein, 269 aa, Unidentified
AQSVPWGISRVQAPAAHNRGLTGSGVKVAVLDTGISTHPDLNIRGGASFVPGEPSTQDGEGHGTHVAGTIAALNNSIGVLGVAPSAELYAVKVLGASGAGSVSSIAQGLEWAGNNGMHVANLSLGSPSPSATLEQAVNSATSRGVLVVAASGNSGAGSISYPARYANAMAVGATDQNNNHADFSQYGAGLDIVAPGVNVQSTYPGSTYASLNGTSMATPHVAGAAALVKQKNPSWSNVQIRNHLKNTATSLGSTNLYGSGLVNAFAATR

SEQ ID NO: 55943 - protein, 269 aa, Unidentified
AQSVPWGISRVQAPAAHNRGLTGRGVKVAVLDTGISTHPDLNIRGGASFVPGEPSTQDGNGHGTHVAGTIAALNNDIGVLGVAPSAELYAVKVLGASGSGSVSSIAQGLEWAGNNSMHVANLSLGSPSPSATLEQAVNSATSRGVLVVAASGNSGADSISYPARYANAMAVGATDQNNNRASFSQYGAGLDIVAPGVNVQSTYPGSTYASLNGTSMATPHVAGAAALVKQKNPSWSNVQIRNRLKNTATSLGSTNLYGSGLVNAEAATR

SEQ ID NO: 55944 - protein, 269 aa, Unidentified
AQSVPWGISRVQAPAAHNRKLTGSGVKVAVLDTGVSTHPDLNIRGGASFVPGEPSTQDGNGHGTHVAGTIAALNNSIGVLGVAPSAELYAVKVLGASSSGSVSSIAQGLEWAGNNGMHVANLSLGLPSPSATLEQAVNSATSRGVLVVAASGNSGAGSISYPARYANAMAVGATDQNNNRASFSQYGAGLDIVAPGVNVQSTYPGSTYASENGTSMATPHVAGAAALVKQKNPSWSNVQIRNHLKNTATSLGSTNLYGSGLVNAEAATR

SEQ ID NO: 55945 - protein, 269 aa, Unidentified
AQSVPWGISRVQAPAAHNRGLTGSGVKVAVLDTGISTHPDLNIRGGASFVPGEPSTQDGNGHGTHVAGTIAALDDSIGVLGVAPSAELYAVKVLGASGSGAISSIAQGLEWAGNNGMHVANLSLGSPSPSATLEQAVNSATSRGVLVVAASGNSGAGSISYPARYANAMAVGATDQNNNRASFSQYGAGLDIVAPGVNVESTYPGSTYASLNGTSMATPHVAGAAALVKQKNPSWSNVQIRNHLKNTATSLGSTNLYGSGLVNAEAATR

SEQ ID NO: 55946 - protein, 269 aa, Unidentified
AQSVPWGISRVQAPAAHRRRLTGSGVKVAVLDTGISTHPDLRIRGGASFVPGEPSTQDGNGHGTHVAGTIAALDNSIGVLGVAPSAELYAVKVLGASGSGSVSSIAQGLEWAGNNGMHVANLSLGSPSPSATLEQAVNSATSRGVLVVAASGNSGAGSISYPARYANAMAVGATDQNNNRASFSQYGAGLDIVAPGVNVQSTYPGSTYASLNGTSMATPHVAGAAALVKQKNPSWSNVQIRNRLKNTATSLGSTNLYGSGLVNAEAATR

SEQ ID NO: 55947 - protein, 269 aa, Unidentified
AQSVPWGISRVQAPAAHNRGLTGRGVKVAVLDTGISTHPDLNIRGGASFVPGEPSTQDGNGHGTHVAGTIAALNNGIGVLGVAPSAELYAVKVLGASGSGSVSSIAQGLEWAGNNSMHVANLSLGSPSPSATLEQAVNSATSRGVLVVAASGNSGADSISYPARYANAMAVGATDQNNNRADFSQYGAGLDIVAPGVNVQSTYPGSTYASLNGTSMATPHVAGAAALVKQKNPSWSNVQIRNHLKNTATSLGSTNLYGSGLVNAEAATR

SEQ ID NO: 55948 - protein, 269 aa, Unidentified
AQSVPWGISRVQAPAAHNRGLTGRGVKVAVLDTGISTHPDLNITGGASFVPGEPSTQDGNGHGTHVAGTIAALNNSIGVLGVAPSAELYAVKVLGASGAGSVSSIAQGLEWAGNNGMHVANLSLGSPSPSATLEQAVNSATSRGVLVVAASGNSGAGSISYPARYANAMAVGATDQNNNRASFSQYGAGLDIVAPGVNVQSTYIQSTYASLNGTSMATPHVAGAAALVKQKNPSWSNVQIRNHLKNTATSLGSTNLYGSGLVNAEAATR

SEQ ID NO: 55949 - protein, 269 aa, Unidentified
AQSVPWGISRVQAPAAHNRGLTGSGVKVAVLDTGISTHPDLNIRGGASFVPGEPSTQDGEGHGTHVAGTIAALNNGIGVLGVAPSAELYAVKVLGASGSGSVSSIAQGLEWAGNNSMHVANLSLGSPSPSATLEQAVNSATSRGVLVVAASGNSGADSISYPARYANAMAVGATDQNNNRADFSQYGAGLDIVAPGVNVQSTYPGSTYASLNGTSMATPHVAGAAALVKQKNPSWSNVQIRNHLKNTATSLGSTNLYGSGLVNAEAATR

SEQ ID NO: 55950 - protein, 269 aa, Unidentified
AQSVPWGISRVQAPAAHNRGLTGSGVKVAVLDSGISTHPDLNIRGGASFVPGEPSTQDGEGHGTHVAGTIAALNNSIGVLGVAPSAELYAVKVLGASGSGSVSSIAQGLEWAGNNRMHVANLSLGSPSPSATLEQAVNSATSRGVLVVAASGNSGEGSIDYPARYANAMAVGATDQNNNRASFSQYGAGLDIVAPGVNVQSTYPGSTYASLNGTSMATPHVAGAAALVKQKNPSWSNVQIRNHLKNTATSLGSTNLYGSGLVNAEAATR

SEQ ID NO: 55951 - protein, 269 aa, Unidentified
AQSVPWGISRVQAPASHNRGLAGSGVKVAVLDTGISTHPDLNIRGGASFVPGEPSTQDGNGHGTHVAGTIAALNNSIGVLGVAPSAELYAVKVLGASGSGSVSSIAQGLEWAGNNGMHVANLSLGSPSPSATLEQAVNSATSRGVLVVAASGNSGEGSISYPARYANAMAVGATDQNNNHASFSQYGAGLDIVAPGVNVQSTYPGSTYASLNGTSMATPHVAGAAALVKQKNPSWSNVQIRNHLKNTATSLGSTNLYGSGLVNAFAATR

SEQ ID NO: 55952 - protein, 269 aa, Unidentified
AQSVPWGISRVQAPAAHNRRLTGSGVKVAVLDTGISTHPDLNIRGGASFVPGEPSTQDGNGHGTHVAGTIAALNNGIGVLGVAPSAELYAVKVLGASGSGSVSSIAQGLEWAGNNDMHVANLSLGSPSPSATLEQAVNSATSRGVLVVAASGNSGAGSISYPARYANAMAVGATDQNNNRADFSQYGAGLDIVAPGVNVQSTYPGSTYASLNGTSMATPHVAGAAALVKQKNPSWSNVRIRNHLKNTATSLGSTNLYGSGLVNAEAATR

SEQ ID NO: 55953 - protein, 269 aa, Unidentified
AQSVPWGISRVQAPAAHNRGLTGSGVKVAVLDTGISTHPDLNIRGGASFVPGEPSTQDGEGHGTHVAGTIAALNNDIGVLGVAPSAELYAVKVLGASGSGSVSSIAQGLEWAGNNDMHVANLSLGSPSPSATLEQAVNSATSRGVLVVAASGNSGADSISYPARYANAMAVGATDQNNNRASFSQYGAGLDIVAPGVNVQSTYPGSTYASLNGTSMATPHVAGAAALVKQKNPSWSNVRIRNHLKNTATSLGSTNLYGSGLVNAEAATR

SEQ ID NO: 55954 - protein, 269 aa, Unidentified
AQSVPWGISRVQAPAAHRRGLTGRGVKVAVLDTGISTHPDLNIRGGASFVPGEPSTQDGNGHGTHVAGTIAALNNSIGVLGVAPSAELYAVKVLGASGSGSVSSIAQGLEWAGNNGMHVANLSLGSPSPSATLEQAVNSATSRGVLVVAASGNSGAGSISYPARYANAMAVGATDQNNNRASFSQYGAGLDIVAPGVNVQSTWPGSAYASLNGTSMATPHVAGAAALVKQKNPSWSNVQIRNRLKNTATSLGSTNLYGSGLVNAEAATR

SEQ ID NO: 55955 - protein, 269 aa, Unidentified
AQSVPWGISRVQAPAAHNRKLTGSGVKVAVLDTGISTHPDLNIRGGASFVPGEPSTQDGEGHGTHVAGTIAALNNNIGVLGVAPSAELYAVKVLGASGSGSVSSIAQGLEWAGNNGMHVANLSLGSPSPSATLEQAVNSATSRGVLVVAASGNSGAGSISYPARYANAMAVGATDQNNNRASFSQYGAGLDIVAPGVNVQSTYPGSTYASENGTSMATPHVAGAAALVKQKNPRWSNVQIRNHLKNTATSLGSTNLYGSGLVNAEAATR

SEQ ID NO: 55956 - protein, 269 aa, Synthetic construct
AQSVPWGISRVQAPAAHNRGLTGSGVKVAVLDTGISTHPDLNIRGGASFVPGEPSTQDGNGHGTHVAGTIAALNNSIGVLGVAPSAELYAVKVLGASGSGSVSSIAQGLEWAGNNGMHVANLSLGSPSPSATLEQAVNSATSRGVLVVAASGNSGAGSISYPARYANAMAVGATDQNNNRASFSQYGAGLDIVAPGVNVQSTYPGSTYASLNGTSMATPSVAGAAALVRQRNPSWSNVQIRNHLENTATSLGSTNLFGSGLVNAEAATR

SEQ ID NO: 55957 - protein, 269 aa, Unidentified
AQSVPWGISRVQAPAAHNRGLTGSGVKVAVLDTGISTHPDLNIRGGASFVPGEPSTQDGNGHGTHVAGTIAALNNSIGVLGVAPSAELYAVKVLPQAGSGGISSIAQGLEWAGNNGMHVANLSLGSPSPSATLEQAVNSATSRGVLVVAASGNSGAGSISYPARYANAMAVGATDQNNNRASFSQYGAGLDIVAPGVNVQSTYPGSTYASLNGTSMATPHVAGAAALVKQKNPSWSNVQIRNHLKNTATSLGSTNLYGSGLVNAEAATR

SEQ ID NO: 55958 - protein, 269 aa, Unidentified
AQSVPWGISRVQAPAAHNRRLTGSGVKVAVLDTGISTHPDLNIRGGASFVPGEPSTQDGNGHGTHVAGTIAALNNSIGVLGVAPSAELYAVKVLGASGSGSVSSIAQGLEWAGNNGMHVANLSLGSPSPSATLEQAVNSATSRGVLVVAASGNSGAGSISYPARYANAMAVGATDQNNNRADFSQYGAGLDIVAPGVNVQSTYPGSTYASLNGTSMATPHVAGAAALVKQKNPSWSNVRIRDRLKNTATSLGSTNLYGSGLVNAEAATR

SEQ ID NO: 55959 - protein, 269 aa, Unidentified
AQSVPWGISRVQAPAAHNRGLTGSRVKVAVLDTGISTHPDLNIRGGASFVPGEPSTQDGNGHGTHVAGTIAALNNSIGVLGVAPSAELYAVKVLGASGSGSVTSIAQGLEWAGNNGMHVANLSLGNPSPSATLEQAVNSATRRGVLVVAASGNSGAGSISYPARYANAMAVGATDQNNNRASFSQYGAGLDIVAPGVNVQSTYPGSTYASLNGTSMATPHVAGAAALVKQKNPSWSNVQIRNHLKNTATSLGSTNLYGSGLVNCEAATR

SEQ ID NO: 55960 - protein, 269 aa, Unidentified
AQSVPWGISRVQAPAAHNRRLTGSGVKVAVLDTGISTHPDLNIRGGASFVPGEPSTQDGNGHGTHVAGTIAALNNSIGVLGVAPSAELYAVKVLGASGSGSVSSIAQGLEWAGNNRMHVANLSLGSESPSATLEQAVNSATSRGVLVVAASGNSGADSISYPARYANAMAVGATDQNNNRADFSQYGAGLDIVAPGVNVQSTYPGSTYASLNGTSMATPHVAGAAALVKQKNPSWSNVQIRNHLKNTATSLGSTNLYGSGLVNAEAATR

SEQ ID NO: 55961 - protein, 269 aa, Unidentified
AQSEPWGISRVQAPAAHNRGLTGSGVKVAVLDTGISTHPDLNIRGGASFVPGEPSTQDGNGHGTHVAGTIAALDNSIGVLGVAPSAELYAVKVLGASGSGAISSIAQGLEWAGNNGMHVANLSLGSPSPSATLEQAVNSATSRGVLVVAASGNSGAGSISYPARYANAMAVGATDQNNNRASFSQYGAGLDIVAPGVNVESTYPGSTYASLNGTSMATPHVAGAAALVKQKNPSWSNVQIRNHLKNTATSLGSTNLYGSGLVNAEAATR

SEQ ID NO: 55962 - protein, 269 aa, Unidentified
AQSVPWGISRVQAPAAHNRRLTGSGVKVAVLDTGISTHPDLNIRGGASFVPGEPSTQDGNGHGTHVAGTIAALNNDIGVLGVAPSAELYAVKVLGASGSGSVSSIAQGLEWAGNNSMHVANLSLGSPSPSATLEQAVNSATSRGVLVVAASGNSGADSISYPARYANAMAVGATDQNNNRASFSQYGAGLDIVAPGVNVQSTYPGSTYASLNGTSMATPHVAGAAALVKQKNPSWSNVQIRDHLKNTATSLGSTNLYGSGLVNAEAATR

SEQ ID NO: 55963 - protein, 269 aa, Unidentified
AQSVPWGISRVQAPAAHNRGLTASGVKVAVLDTGISTHPDLNIRGGASFVNGEPSTQDGNGHGTHVAGTIAALNNSIGVLGVAPSAELYAVKVLGASGSGSVSSIAQGLEWAGNNGMHVANLSLGSPSPSATLEQAVNSATSRGVLVVAASGNSGAGSISYPARYANAMAVGATDQNNNRASFSQWGAGLDLVAPGVNVQSTYPGSTYASLNGTSMATPHVAGAAALVKQKNPSWSNVQIRNHLKRTATSLGSTNLYGSGLVNAEAATR

SEQ ID NO: 55964 - protein, 269 aa, Unidentified
AQSVPWGISRVQAPAAHNRGLAGRGVKVAVLDTGISTHPDLNIRGGASFVPGEPSTQDGNGHGTHVAGTIAALNNSIGVLGVAPSAELYAVKVLGASGSGSVSSIAQGLEWAGLNGMHVANLSLGIPSPSATLEQAVNSATSRGVLVVAASGNSGAGSIDYPARYANAMAVGATDQNNNRASFSQYGAGLDIVAPGVNVQSTYPGSTYASLNGTSMATPHVAGAAALVKQKNPSWSNVQIRNHLKNTATSLGSTNLYGSGLVNAEAATR

SEQ ID NO: 55965 - protein, 269 aa, Unidentified
AQSVPWGISRVQAPAAHNRRLTGRGVKVAVLDTGISTHPDLNIRGGASFVPGEPSTQDGNGHGTHVAGTIAALNNSIGVLGVAPSAELYAVKVLGASGAGSVSSIAQGLEWAGNNGMHVANLSLGSPSPSATLEQAVNSATSRGVLVVAASGNSGAGSISYPARYANAMAVGATDQNNNRASFSQYGAGLDIVAPGVNVQSTYPQSAYASLNGTSMATPHVAGAAALVKQKNPSWSNVQIRNHLKNTATSLGSTNLYGSGLVNAEAATR

SEQ ID NO: 55966 - protein, 269 aa, Unidentified
AQSVPWGISRVQAPAAHNRGLTGSGVKVAVLDTGISTHPDLNIRGGASFVPGEPSTQDGEGHGTHVAGTIAALNNSIGVLGVAPSAELYAVKVLGASGSGSVSSIAQGLEWAGNNGMHVANLSLGSPSPSATLEQAVNSATSRGVLVVAASGNSGEGSISYPARYANAMAVGATDQNNNHASFSQYGAGLDIVAPGVNVQSTYPGSTYASLNGTSMATPHVAGAAALVKQKNPSWSNVQIRNRLKNTATSLGSTNLYGSGLVNAFAATR

SEQ ID NO: 55967 - protein, 269 aa, Unidentified
AQSVPWGISRVQAPAAHNRGLTGSGVKVAVLDTGISTHPDLNIRRGASFVPGEPSTADGNGHGTHVAGTIAALNNSIGVLGVAPSAELYAVKVLGASGSGSVSGIAQGLEWAGNNGMHVANLSLGSPSPSATLEQAVNSATSRGVLVVAASGNSGAGSISYPARYANAMAVGATDQNNNRASFSQYGAGLDIVAPGVNVQSTYPGSTYASENGTSMATPHVAGAAALVKQKNPSWSNVQIRNRLKNTATSLGSTNLYGSGLVNAEAATR

SEQ ID NO: 55968 - protein, 269 aa, Unidentified
AQSVPWGISRVQAPAAHNRGLTGSGVKVAVLDTGISTHPDLNIRGGASFVPGEPSTQDGEGHGTHVAGTIAALNNNIGVLGVAPSAELYAVKVLGASGDGSVSSIAQGLEWAGNNGMHVANLSLGSPSPSATLEQAVNSATSRGVLVVAASGNSGAGSISYPARYANAMAVGATDQNNNRASFSQYGAGLDIVAPGVNVQSTYPGSTYASENGTSMATPHVAGAAALVKQKNPRWSNVQIRNHLKNTATSLGSTNLYGSGLVNAEAATR

SEQ ID NO: 55969 - protein, 269 aa, Unidentified
AQSVPWGISRVQAPAAHNRGLTGRGVKVAVLDTGISTHPDLNIRGGASFVPGEPSTQDGNGHGTHVAGTIAALNNGIGVLGVAPSAELYAVKVLGASGSGSVSSIAQGLEWAGNNDMHVANLSLGSPSPSATLEQAVNSATSRGVLVVAASGNSGADSISYPARYANAMAVGATDQNNNRADFSQYGAGLDIVAPGVNVQSTYPGSTYASLNGTSMATPHVAGAAALVKQKNPSWSNVQIRNHLKNTATSLGSTNLYGSGLVNAEAATR

SEQ ID NO: 55970 - protein, 269 aa, Bacillus lentus
AQSVPWGIRRVQAPAAHNRGLTGSGVKVAVLDTGISTHPDLNIRGGASFVPGEPSTQDGNGHGTHAAGTIAALNNSIGVLGVAPSAELYAVKVLGAGGSGSVSSIAQGLEWAGNNGMHVANLSLGSPSPSATLEQAVNSATSRGVLVVAASGNSGAGSISYPARYANAMAVGATDQNNNRASFSQYGAGLDIVAPGVNVQSTYPGSTYASLNGTSMATPHVAGAAALVKQKNPSWSNVRIRNHLKNTATSLGSTDLYGSGLVNAEAATR

SEQ ID NO: 55971 - protein, 269 aa, Unidentified
AQSVPWGISRVQAPAAHNRGLTASGVKVAVLDTGISTHPDLNIRGGASFVNGEPSTQDGNGHGTHVAGTIAALNNSIGVLGVAPSAELYAVKVLGASGSGSVSSIAQGLEWAGNNGMHVANLSLGSPSPSATLEQAVNSATRRGVLVVAASGNSGAGSISYPARYANAMAVGATDQNNNRASFSQWGAGLDIVAPGVNVQSTYPGSTYAFLNGTSMATPHVAGAAALVKQKNPSWSNVQIRNHLKNTATSLGSTNLYGSGLVNAEAATR

SEQ ID NO: 55972 - protein, 269 aa, Unidentified
AQSVPWGISRVQAPAAHNRRLTGSGVKVAVLDTGISTHPDLNIRGGASFVPGEPSTQDGEGHGTHVAGTIAALNNGIGVLGVAPSAELYAVKVLGASGSGSVSSIAQGLEWAGNNDMHVANLSLGSESPSATLEQAVNSATSRGVLVVAASGNSGAGSISYPARYANAMAVGATDQNNNRASFSQYGAGLDIVAPGVNVQSTYPGSTYASLNGTSMATPHVAGAAALVKQKNPSWSNVQIRNHLKNTATSLGSTNLYGSGLVNAEAATR

SEQ ID NO: 55973 - protein, 269 aa, Unidentified
AQSRPWGISRVQAPAAHNRRLTGRGVKVAVLDTGISTHPDLRIRGGASFVPGEPSTQDGNGHGTHVAGTIAALNNSIGVLGVAPSAELYAVKVLGASGSGSVSSIAQGLEWAGNNGMHVANLSLGSPSPSATLEQAVNSATSRGVLVVAASGNSGAGSISYPARYANAMAVGATDQNNNRASFSQYGAGLDIVAPGVNVQSTYPGSTYASLNGTSMATPHVAGAAALVKQKNPSWRNVQIRNHLKNTATSLGSTNLYGSGLVNAEAATR

SEQ ID NO: 55974 - protein, 269 aa, Unidentified
AQSVPWGISRVQAPAAHNRGLTGSGVKVAVLDTGISTHPDLNIRGGASFVPGEPSTQDGNGHGTHVAGTIAALNNNIGVLGVAPSAELYAVKVLGASGQGSVSSIANGLEWAGNNGMHVANLSLGSPSPSATLEQAVNSATSRGVLVVAASGNSGAGSISYPARYANAMAVGATDQNNNRADFSQYGAGLDIVAPGVNVQSTYPGSTYASQNGTSMATPHVAGAAALVKQKNPSWSNVQIRNHLKNTATSLGSTNLYGSGLVNAEAATR

SEQ ID NO: 55975 - protein, 269 aa, Unidentified
AQSVPWGISRVQAPAAHNRGLTGRGVKVAVLDTGISTHPDLAIRGGASFVPGEPSTQDGNGHGTHVAGTIAALNNSIGVLGVAPSAELYAVKVLGASGSGSVSSIAQGLEWAGNFGMHVANLSLGSPSPSATLEQAVNSATSRGVLVVAASGNSGAGSISYPARYANAMAVGATDQNNNRASFSQYGFGLDIVAPGVNVQSTYPQSTYASLNGTSMATPHVAGAAALVKQKNPSWSNVQIRNHLKNTATSLGSTNLYGSGLVNAEAATR

SEQ ID NO: 55976 - protein, 269 aa, Unidentified
AQSVPWGISRVQAPAAHRRGLTGRGVKVAVLDTGISTHPDLNIRGGASFVPGEPSTQDGNGHGTHVAGTIAALDNSIGVLGVAPSAELYAVKVLGASGSGSVSSIAQGLEWAGNNGMHVANLSLGSPSPSATLEQAVNSATSRGVLVVAASGNSGAGSISYPARYANAMAVGATDQNNNRASFSQYGAGLDLVAPGVNVQSTYPGSTYASLNGTSMATPHVAGAAALVKQKNPSWSNVQIRNRLKNTATSLGSTNLYGSGLVNAEAATR

SEQ ID NO: 55977 - protein, 269 aa, Unidentified
AQSVPWGISRVQAPAAHNRGLTGSGVKVAVLDTGISTHPDLNIRGGASFVPGEPSTQDGNGHGTHVAGTIAALNNSIGVLGVAPSAELYAVKVLGASGAGSLSSIAQGLEWAGNNGMHVANLSLGNPSPSATLEQAVNSATSRGVLVVAASGNSGEGSISYPARYANAMAVGATDQNNNHASFSQYGAGLDIVAPGVNVQSTYPGSTYASLNGTSMATPHVAGAAALVKQKNPSWSNVQIRNHLKNTATSLGSTNLYGSGLVNAEAATR

SEQ ID NO: 55978 - protein, 269 aa, Unidentified
AQSVPWGISRVQAPAAHNRGLTGSGVKVAVLDTGISTHPDLNIRGGASFVPGEPSTQDGNGHGTHVAGTIAALNNSIGVLGVAPSAELYAVKVLGASGSGSLTSIAQGLEWAGNNGMHVANLSLGSPSPSATLEQAVNSATSRGVLVVAASGNSGAGSISYPARYANAMAVGATDQNNNRASFSQYGAGLDIVAPGVNVQSTYPGSAYASENGTSMATPHVAGAAALVKQKNPSWSNVQIRNHLKNTATNLGSTNLYGSGLVNAEAATR

SEQ ID NO: 55979 - protein, 269 aa, Unidentified
AQSVPWGISRVQAPAAHNRKLTGSGVKVAVLDTGISTHPDLNIRGGASFVPGEPSTQDGEGHGTHVAGTIAALNNSIGVLGVAPSAELYAVKVLGASGQGSVSSIAGGLEWAGLNGMHVANLSLGSPSPSATLEQAVNSATSRGVLVVAASGNSGAGSISYPARYANAMAVGATDQNNNRASFSQYGAGLDIVAPGVNVQSTYPGSTYASLNGTSMATPHVAGAAALVKQKNPSWSNVQIRNHLKNTATSLGSTNLYGSGLVNAEAATR

SEQ ID NO: 55980 - protein, 269 aa, Bacillus sp.
AQSVPWGISRVQAPAAHNRGLTGSGVKVAVLDTGISTHPDLNIRGGASFVPGEPSTQDGNGHGTHVAGTIAALNNSIGVLGVAPNAELYAVKVLGASGSGSVSSIAQGLEWAGNNVMHVANLSLGGQIPSATLEQAVNSATSRGVLVVAASGNSGAGSISYPARYANAMAVGATDQNNNRASFSQYGAGLDIVAPGVNVQSTYPGSTYASLNGTSMATPHVAGAAALVKQKNPSWSNVQIRNHLKNTATSLGSTNLYGSGLVNAEAATR

SEQ ID NO: 55981 - protein, 269 aa, Unidentified
AQSVPWGISRVQAPAAHNRGLTGSGVKVAVLDSGISTHPDLNIRGGASFVPGEPSTQDGEGHGTHVAGTIAALNNSIGVLGVAPSAELYAVKVLGASGSGSVSSIAQGLEWAGNNRMHVANLSLGSPSPSATLEQAVNSATSRGVLVVAASGNSGEGSISYPARYANAMAVGATDQNNNRADFSQYGAGLDIVAPGVNVQSTYPGSTYASLNGTSMATPHVAGAAALVKQKNPSWSNVQIRNHLKNTATSLGSTNLYGSGLVNAEAATR

SEQ ID NO: 55982 - protein, 269 aa, Unidentified
AQSVPWGISRVQAPAAHNRGLAGRGVKVAVLDTGISTHPDLNIRGGASFVPGEPSTQDGNGHGTHVAGTIAALNNSIGVLGVAPSAELYAVKVLGASGSGSVSSIAQGLEWAGNNRMHVANLSLGIPSPSATLEQAVNSATSRGVLVVAASGNSGEGSISYPARYANAMAVGATDQNNNRASFSQYGAGLDIVAPGVNVQSTYPGSTYASLNGTSMATPHVAGAAALVKQKNPSWSNVQIRNHLKNTATSLGSTNLYGSGLVNAEAATR

SEQ ID NO: 55983 - protein, 269 aa, Unidentified
AQSVPWGISRVQAPAAHNRRLTGRGVKVAVLDTGISTHPDLNIRGGASFVPGEPSTQDGNGHGTHVAGTIAALNNGIGVLGVAPSAELYAVKVLGASGSGSVSSIAQGLEWAGNNSMHVANLSLGSPSPSATLEQAVNSATSRGVLVVAASGNSGAGSISYPARYANAMAVGATDQNNNRASFSQYGAGLDIVAPGVNVQSTYPGSTYASLNGTSMATPHVAGAAALVKQKNPSWSNVQIRDHLKNTATSLGSTNLYGSGLVNAEAATR

SEQ ID NO: 55984 - protein, 269 aa, Unidentified
AQSVPWGISRVQAPAAHNRRLTGSGVKVAVLDTGISTHPDLNIRGGASFVPGEPSTADGNGHGTHVAGTIAALNNSIGVLGVAPSAELYAVKVLGASGSGSVSSIAQGLEWAGNNGMHVANLSLGSPSPSATLEQAVNSATRRGVLVVAASGNSGAGSISYPARYANAMAVGATDQNNNRASFSQWGAGLDIVAPGVNVQSTYPGSTYASLNGTSMAAPHVAGAAALVKQKNPSWSNVQIRNHLKNTATSLGSTNLYGSGLVNAEAATR

SEQ ID NO: 55985 - protein, 269 aa, Unidentified
AQSVPWGISRVQAPAAHNRGLTGRGVKVAVLDTGISTHPDLNIRGGASFVPGEPSTQDGNGHGTHVAGTIAALNNSIGVLGVAPSAELYAVKVLGASGSGAVSSIAQGLEWAGNNGMHVANLSLGSPSPSATLEQAVNSATSRGVLVVAASGNSGAGSISYPARYANALAVGATDQNNNRASFSQYGAGLDIVAPGVNVQSTYPGSTYASLNGTSMATPHVAGAAVLVKQKNPSWSNVQIRNRLKNTATSLGSTNLYGSGLVNAEAATR

SEQ ID NO: 55986 - protein, 269 aa, Bacillus lentus
AQSVPWGIRRVQAPTAHNRGLTGSGVKVAVLDTGISTHPDLNIRGGASFVPGEPSTQDGNGHGTHAAGTIAALNNSIGVLGVAPSAELYAVKVLGAGGSGSVSSIAQGLEWAGNNGMHVANLSLGSPSPSATLEQAVNSATSRGVLVVAASGNSGAGSISYPARYANAMAVGATDQNNNRASFSQYGAGLDIVAPGVNVQSTYPGSTYASLNGTSMATPHVAGAAALVKQKNPSWSNVQIRNHLKNTATSLGSTDLYGSGLVNAEAATR

SEQ ID NO: 55987 - protein, 269 aa, Unidentified
AQSVPWGISRVQAPAAHNRRLTGSGVKVAVLDTGISTHPDLNIRGGASFVPGEPSTQDGNGHGTHVAGTIAALNNSIGVLGVAPSAELYAVKVLGASGSGAISSIAQGLEWAGNNGMHVANLSLGSPSPSATLEQAVNSATSRGVLVVAASGNSGAGSISYPARYANAMAVGATDQNNNRASFSQYGAGLDIVAPGVNVQSTYPGSTYASLNGTSMATPHVAGAAVLVKQKNPSWSNVRIRNHLKNTATSLGSTNLYGSGLVNAEAATR

SEQ ID NO: 55988 - protein, 269 aa, Unidentified
AQSVPWGISRVQAPAAHNRGLTGSGVKVAVLDTGISTHPDLNIRGGASFVPGEPSTQDGNGHGTHVAGTIAALNNGIGVLGVAPSAELYAVKVLGASGSGSVSSIAQGLEWAGNNDMHVANLSLGSPSPSATLEQAVNSATSRGVLVVAASGNSGAGSISYPARYANAMAVGATDQNNNRADFSQYGAGLDIVAPGVNVQSTYPGSTYASLNGTSMATPHVAGAAALVKQKNPSWSNVRIRDHLKNTATSLGSTNLYGSGLVNAEAATR

SEQ ID NO: 55989 - protein, 269 aa, Unidentified
AQSVPWGISRVQAPAAHRRGLTGRGVKVAVLDTGISTHPDLNIRGGASFVPGEPSTQDGNGHGTHVAGTIAALDNSIGVLGVAPSAELYAVKVLGASGSGSISSIAQGLEWAGNNGMHVANLSLGSPSPSATLEQAVNSATSRGVLVVAASGNSGAGSISYPARYANAMAVGATDQNNNRASFSQYGAGLDIVAPGVNVQSTYPGSTYASLNGTSMATPHVAGAAALVKQKNPSWSNVQIRNRLKNTATSLGSTNLYGSGLVNAEAATR

SEQ ID NO: 55990 - protein, 269 aa, Unidentified
AQSVPWGISRVQAPAAHNRGLTGSGVKVAVLDTGISTHPDLNIRGGASFVPGEPSTQDGNGHGTHVAGTIAALNNRIGVLGVAPSAELYAVKVLGASGSGSLSSIAQGLEWAGNNGMHVANLSLGSPSPSATLEQAVNSATSRGVLVVAASGNSGAGSISYPARYANAMAVGATDQNNNRASFSQYGAGLDIVAPGVNVQSTYPGSAYFSLNGTSMAAPHVAGAAALVKQKNPSWSNVQIRNHLKNTATSLGSTNLYGSGLVNAEAATR

SEQ ID NO: 55991 - protein, 269 aa, Unidentified
AQSVPWGISRVQAPAAHNRKLTGSGVKVAVLDTGISTHPDLNIRGGASFVPGEPSTQDGNGHGTHVAGTIAALNNNIGVLGVAPSAELYAVKVLGASGSGSVSSIAQGLEWAGNNGMHVANLSLGDPSPSATLEQAVNSATSRGVLVVAASGNSGAGSIDYPARYANAMAVGATDQNNNRASFSQYGAGLDIVAPGVNVQSTYPGSAYASLNGTSMATPHVAGAAALVKQKNPSWSNVQIRNHLKNTATSLGSTNLYGSGLVNAEAATR

SEQ ID NO: 55992 - protein, 269 aa, Unidentified
AQSVPWGISRVQAPAAHNRKLLGSGVKVAVLDTGISTHPDLNIRGGASFVPGEPSTQDGNGHGTHVAGTIAALNNSIGVLGVAPSAELYAVKVLGASGSGSVSSIAQGLEWAGNNRMHVANLSLGDPSPSATLEQAVNSATSRGVLVVAASGNSGAGSISYPARYANAMAVGATDQNNNRASFSQYGAGLDIVAPGVNVQSTYPGSTYASENGTSMATPHVAGAAALVKQKNPSWSNVQIRNHLKNTATSLGSTNLYGSGLVNAEAATR

SEQ ID NO: 55993 - protein, 269 aa, Unidentified
AQSVPWGISRVQAPAAHNRGLAGSGVKVAVLDSGISTHPDLNIRGGASFVPGEPSTQDGNGHGTHVAGTIAALNNSIGVLGVAPSAELYAVKVLGASGSGSVSSIAQGLEWAGNNRMHVANLSLGIPSPSATLEQAVNSATSRGVLVVAASGNSGAGSISYPARYANAMAVGATDQNNNRADFSQYGAGLDIVAPGVNVQSTYPGSTYASLNGTSMATPHVAGAAALVKQKNPSWSNVQIRNHLKNTATSLGSTNLYGSGLVNAEAATR

SEQ ID NO: 55994 - protein, 269 aa, Unidentified
AQSVPWGISRVQAPAAHNRGLTGSGVKVAVLDTGISTHPDLNIRGGASFVPGEPSTQDGEGHGTHVAGTIAALNNDIGVLGVAPSAELYAVKVLGASGSGSVSSIAQGLEWAGNNSMHVANLSLGSPSPSATLEQAVNSATSRGVLVVAASGNSGADSISYPARYANAMAVGATDQNNNRASFSQYGAGLDIVAPGVNVQSTYPGSTYASLNGTSMATPHVAGAAALVKQKNPSWSNVRIRNHLKNTATSLGSTNLYGSGLVNAEAATR

SEQ ID NO: 55995 - protein, 269 aa, Unidentified
AQSVPWGISRVQAPASHNRGLTGSGVKVAVLDTGISTHPDLNIRGGASFVPGEPSTQDGNGHGTHVAGTIAALNNSIGVLGVAPSAELYAVKVLGASGGGGLSSIAQGLEWAGNNGMHVANLSLGSPSPSATLEQAVNSATSRGVIVVAASGNSGAGSISYPARYANAMAVGATDQNNNRASFSQYGAGLDIVAPGVNVQSTYPGSTYASLNGTSMATPHVAGAAALVKQKNPSWSNVQIRNHLKNTATSLGSTNLYGSGLVNAEAATR

SEQ ID NO: 55996 - protein, 269 aa, Unidentified
AQSVPWGISRVQAPAAHNRGLTGSGVKVAVLDTGISTHPDLNIRGGASFVPGEPSTQDGEGHGTHVAGTIAALNNDIGVLGVAPSAELYAVKVLGASGSGSVSSIAQGLEWAGNNSMHVANLSLGSESPSATLEQAVNSATSRGVLVVAASGNSGADSISYPARYANAMAVGATDQNNNRASFSQYGAGLDIVAPGVNVQSTYPGSTYASLNGTSMATPHVAGAAALVKQKNPSWSNVQIRNHLKNTATSLGSTNLYGSGLVNAEAATR

SEQ ID NO: 55997 - protein, 269 aa, Unidentified
AQSVPWGISRVQAPAAHNRGLTGRGVKVAVLDTGISTHPDLNIRGGASFVPGEPSTQDGNGHGTHVAGTIAALNNSIGVLGVAPSAELYAVKVLGASGSGSVSSIAQGLEWAGNNGMHVANLSLGIPSPSATLEQAVNSATSRGVLVVAASGNSGEGSIDYPARYANAMAVGATDQNNNRASFSQYGTGLDIVAPGVNVQSTYPGSTYASLNGTSMATPHVAGAAALVKQKNPSWSNVQIRNHLKNTATSLGSTNLYGSGLVNAEAATR

SEQ ID NO: 55998 - protein, 269 aa, Unidentified
AQSVPWGISRVQAPAAHNRGLTGSGVKVAVLDTGISTHPDLNIRGGASFVPGEPSTQDGNGHGTHVAGTIAALNNSIGVLGVAPSAELYAVKVLGADGRGAISSIAQGLEWAGNNGMHVANLSLGSPSPSATLEQAVNSATSRGVLVVAASGNSGASSISYPARYANAMAVGATDQNNNRASFSQYGAGLDIVAPGVNVQSTYPGSTYASLNGTSMATPHVAGAAALVKQKNPSWSNVQIRNHLKNTATSLGSTNLYGSGLVNAEAATR

SEQ ID NO: 55999 - protein, 269 aa, Unidentified
AQSVPWGISRVQAPAAHNRGLTGSGVKVAVLDTGISTHPDLNIRGGASFVPGEPSTQDGNGHGTHVAGTIAALDNNIGVLGVAPRAELYAVKVLGASGSGSVSSIAQGLEWAGNNGMHVANLSLGSPSPSATLEQAVNSATSRGVLVVAASGNSGAGSISYPARYANAMAVGATDQNNNRASFSQYGAGLDIVAPGVNVLSTYPGSTYASLNGTSMATPHVAGAAALVKQKNPSWSNVQIRNRLKNTATSLGSTNLYGSGLVNAEAATR

SEQ ID NO: 56000 - protein, 269 aa, Unidentified
AQSVPWGISRVQAPAAHNRGLTGSGVKVAVLDTGISTHPDLNIRGGASFVPGEPSTQDGNGHGTHVAGTIAALNNGIGVLGVAPSAELYAVKVLGASGSGSVSSIAQGLEWAGNNDMHVANLSLGSESPSATLEQAVNSATSRGVLVVAASGNSGADSISYPARYANAMAVGATDQNNNRASFSQYGAGLDIVAPGVNVQSTYPGSTYASLNGTSMATPHVAGAAALVKQKNPSWSNVRIRNHLKNTATSLGSTNLYGSGLVNAEAATR

SEQ ID NO: 56001 - protein, 269 aa, Unidentified
AQSVPWGISRVQAPAAHNRGLTGSRVKVAVLDTGISTHPDLAIRGGASFVPGEPSTQDGNGHGTHVAGTIAALNNSIGVLGVAPSAELFAVKVLGASGSGSVSSIAQGLEWAGNNGMHVANLSLGSPSPSATLEQAVNSATSRGVLVVAASGNSGAGSISYPARYANAMAVGATDQNNNRASFSQYGAGLDLVAPGVNVQSTYPGSTYASLNGTSMATPHVAGAAALVKQKNPSWSNVQIRNHLKNTATSLGSTNLYGSGLVNCEAATR

SEQ ID NO: 56002 - protein, 269 aa, Unidentified
AQSVPWGISRVQAPAAHNRGLTGSGVKVAVLDTGISTHPDLNIRGGASFVPGEPSTQDGNGHGTHVAGTIAALNNNIGVLGVAPSAELYAVKVLGASGDGSVSSIAQGLEWAGNNGMHVANLSLGLPSPSATLEQAVNSATSRGVLVVAASGNSGAGSISYPARYANAMAVGATDQNNNRASFSQYGAGLDIVAPGVNVQSTYPGSTYASENGTSMATPHVAGAAALVKQKNPRWSNVQIRNHLKNTATSLGSTNLYGSGLVNAEAATR

SEQ ID NO: 56003 - protein, 269 aa, Unidentified
AQSVPWGISRVQAPAAHNRGLTGSGVKVAVLDTGISTHPDLNIRGGASFVPGEPSTQDGQGHGTHVAGTIAALNNSIGVLGVAPSAELYAVKVLGASGSGNVSSIAQGLEWAGNNGMHFANLSLGSPSPSATLEQAVNSATRRGVLVVAASGNSGAGSISYPARYANAMAVGATDQNNNRASFSQYGAGLDIVAPGVNVQSTYPGSTYASLNGTSMATPHVAGAAALVKQKNPSWSNVQIRNRLKNTATSLGSTNLYGSGLVNAEAATR

SEQ ID NO: 56004 - protein, 269 aa, Unidentified
AQSVPWGISRVQAPAAHNRKLTGSGVKVAVLDTGISTHPDLNIRGGASFVPGEPSTQDGNGHGTHVAGTIAALNNSIGVLGVAPSAELYAVKVLGASGDGSVSSIAQGLEWAGLNGMHVANLSLGLPSPSATLEQAVNSATSRGVLVVAASGNSGAGSISYPARYANAMAVGATDQNNNRASFSQYGAGLDIVAPGVNVQSTYPGSAYASLNGTSMATPHVAGAAALVKQKNPSWSNVQIRNHLKNTATSLGSTNLYGSGLVNAEAATR

SEQ ID NO: 56005 - protein, 269 aa, Unidentified
AQSVPWGISRVQAPAAHNRGLTGSGVKVAVLDTGISTHPDLNIRRGASFVPGEPSTQDGNGHGTHVAGTIAALNNSIGVLGVAPSAILYAVKVLGASGSGSVSSIAQGLEWAGNNGMHVANLSLGSPSPSATLEQAVNSATSRGVLVVAASGNSGAGSISYPARYANAMAVGATDQNNNRASFSQWGAGLDIVAPGVNVQSTYPGSTYASLNGTSMATPHVAGAAACVKQKNPSWSNVQIRNHLKNTATSLGSTNLYGSGLVNCEAATR

SEQ ID NO: 56006 - protein, 269 aa, Unidentified
AQSVPWGISRVQAPAAHNRRLTGRGVKVAVLDTGISTHPDLNIRGGASFVPGEPSTQDGNGHGTHVAGTIAALNNSIGVLGVAPSAELYAVKVLGASGAGSVSSIAQGLEWAGLNGMHVANLSLGSPSPSATLEQAVNSATSRGVLVVAASGNSGAGSISYPARYANAMAVGATDQNNNRASFSQYGAGLDIVAPGVNVQSTYPGSTYASLNGTSMATPHVAGAAALVKQKNPSWLNVQIRNHLKNTATSLGSTNLYGSGLVNAEAATR

SEQ ID NO: 56007 - protein, 269 aa, Unidentified
AQSVPWGISRVQAPAAHNRGLTGSGVKVAVLDTGISTHPDLNIRGGASFVPGEPSTQDGNGHGTHVAGTIAALNNSIGVLGVAPSAELYAVKVLGADGEGAISSIAQGLEWAGNNGMHVANLSLGSPSPSATLEQAVNSATSRGVLVVAASGNSGASSISYPARYANAMAVGATDQNNNRASFSQYGAGLDIVAPGVNVQSTYPGSTYASLNGTSMATPHVAGAAALVKQKNPSWSNVQIRNHLKNTATSLGSTNLYGSGLVNAEAATR

SEQ ID NO: 56008 - protein, 269 aa, Unidentified
AQSVPWGISRVQAPAAHRRGLTGRGVKVAVLDTGISTHPDLNIRGGASFVPGEPSTQDGNGHGTHVAGTIAALDNRIGVLGVAPSAELYAVKVLGASGSGSVSSIAQGLEWAGNNGMHVANLSLGSPSPSATLEQAVNSATSRGVLVVAASGNSGAGSISYPARYANAMAVGATDQNNNRASFSQYGAGLDIVAPGVNVQSTYPGSTYASLNGTSMATPHVAGAAALVKQKNPSWSNVQIRNRLKNTATSLGSTNLYGSGLVNAEAATR

SEQ ID NO: 56009 - protein, 269 aa, Unidentified
AQSVPWGISRVQAPAAHNRGLAGSGVKVAVLDTGISTHPDLNIRGGASFVPGEPSTQDGEGHGTHVAGTIAALNNSIGVLGVAPSAELYAVKVLGASGSGSVSSIAQGLEWAGNNRMHVANLSLGIPSPSATLEQAVNSATSRGVLVVAASGNSGAGSISYPARYANAMAVGATDQNNNRADFSQYGAGLDIVAPGVNVQSTYPGSTYASLNGTSMATPHVAGAAALVKQKNPSWSNVQIRNHLKNTATSLGSTNLYGSGLVNAEAATR

SEQ ID NO: 56010 - protein, 269 aa, Unidentified
AQSVPWGISRVQAPAAHNRRLTGSGVKVAVLDTGISTHPDLNIRGGASFVPGEPSTQDGNGHGTHVAGTIAALNNSIGVLGVAPSAELYAVKVLGASGSGNVSSIAQGLEWAGNNGMHVANLSLGSPSPSATLEQAVNSATSRGVLVVAASGNSGAGSISYPARYANAMAVGATDQNNNRASFSQYGAGLDIVAPGVNVQSTYPGSTYAFLNGTSMATPHVAGAAALVKNKNPSWSNVQIRNHLKRTATSLGSTNLYGSGLVNAEAATR

SEQ ID NO: 56011 - protein, 269 aa, Unidentified
AQSVPWGISRVQAPAAHNRGLTGGGVKVAVLDTGISTHPDLNIRGGASFVPGEPSTQDGNGHGTHVAGTIAALNNNIGVLGVAPSAELYAVKVLAASGQGSVSSIANGLEWAGNNGMHVANLSLGSPSPSATLEQAVNSATSRGVLVVAASGNSGAGSISYPARYANAMAVGATDQNNNRASFSQYGAGLDIVAPGVNVQSTYPGSTYASLNGTSMATPHVAGAAALVKQKNPSWSNVQIRNHLKNTATSLGSTNLYGSGLVNAEAATR

SEQ ID NO: 56012 - protein, 269 aa, Unidentified
AQSVPWGISRVQAPAAHNRGLTGSGVKVAVLDTGISTHPDLNIRGGASFVPGEPSTQDGNGHGTHVAGTIAALDNSIGVLGVAPSAELYAVKVLGASGSGAISSIAQGLEWAGNNGMHVANLSLGSPSPSATLEQAVNSATSRGVLVVAASGNSGAGSISYPARYANAMAVGATDQNNNRASFSQYGAGLDIVAPGVNVQSTYPGPTYASLNGTSMATPHVAGAAALVKQKNPSWSNVQIRNHLKNTATSLGSTNLYGSGLVNAVAATR

SEQ ID NO: 56013 - protein, 269 aa, Unidentified
AQSVPWGISRVQAPAAHNRKLTGFGVKVAVLDTGISTHPDLNIRGGASFVPGEPSTQDGNGHGTHVAGTIAALNNSIGVLGVAPSAELYAVKVLGASGSGSVSSIAQGLEWAGNNRMHVANLSLGSPSPSATLEQAVNSATSRGVLVVAASGNSGAGSISYPARYANAMAVGATDQNNNRASFSQYGAGLDIVAPGVNVQSTYPGSAYASENGTSMATPHVAGAAALVKQKNPSWSNVQIRNHLKNTATSLGSTNLYGSGLVNAEAATR

SEQ ID NO: 56014 - protein, 269 aa, Unidentified
AQSVPWGISRVQAPAAHNRRLTGRGVKVAVLDTGISTHPDLNITGGASFVPGEPSTQDGNGHGTHVAGTIAALNNSIGVLGVAPSAELYAVKVLGASGAGSVSSIAQGLEWAGNNGMHVANLSLGSPSPSATLEQAVNSATSRGVLVVAASGNSGAGSISYPARYANAMAVGATDQNNNRASFSQYGAGLDIVAPGVNVQSTYIGSTYASLNGTSMATPHVAGAAALVKQKNPSWSNVQIRNHLKNTATSLGSTNLYGSGLVNAEAATR

SEQ ID NO: 56015 - protein, 269 aa, Unidentified
AQSVPWGISRVQAPAAHNRRLTGRGVKVAVLDTGISTHPDLNIRGGASFVPGEPSTQDGNGHGTHVAGTIAALNNSIGVLGVAPSAELYAVKVLSASGAGSVSSIAQGLEWAGNNGMHVANLSLGAPSPSATLEQAVNSATSRGVLVVAASGNSGAGSISYPARYANAMAVGATDQNNNRASFSQYGAGLDIVAPGVNVQSTYPGSTYASLNGTSMATPHVAGAAALVKQKNPSWSNVQIRNHLKNTATSLGSTNLYGSGLVNAEAATR

SEQ ID NO: 56016 - protein, 269 aa, Unidentified
AQSVPWGISRVQAPAAHNRGLTAFGVKVAVLDTGISTHPDLNIRGGASFVPGEPSTQDGEGHGTHVAGTIAALNNSIGVLGVAPSAELYAVKVLGASGSGSVSSIAQGLEWAGLNRMHVANLSLGSPSPSATLEQAVNSATSRGVLVVAASGNSGAGSISYPARYANAMAVGATDQNNNRASFSQYGAGLDIVAPGVNVQSTYPGSTYASLNGTSMATPHVAGAAALVKQKNPSWSNVQIRNHLKNTATSLGSTNLYGSGLVNAEAATR

SEQ ID NO: 56017 - protein, 269 aa, Unidentified
AQSVPWGISRVQAPAAHNRGLTGSGVKVAVLDTGISTHEDLNIRGGASFVPGEPSYQDGNGHGTHVAGTIAALNNSIGVLGVAPSADLYAVKVLGASGSGSVSSIAQGLEWAGQNGMHVANLSLGSPSPSATLEQAVNSATSRGVLVVAASGNSGAGSISYPARYANAMAVGATDQNNNRASFSQYGAGLDIVAPGVNVQSTYPGSTYASLNGTSMATPHVAGAAALVKQKNPSWSNVQIRDHLKNTATSLGSTNLYGSGLVNAEAATR

SEQ ID NO: 56018 - protein, 269 aa, Unidentified
AQSVPWGISRVQAPAAHNRGLTGSGVKVAVLDTGISTHPDLNIRGGASFVPGEPSTQDGNGHGTHVAGTIAALNNSIGVLGVAPSAELYAVKVLPQSGSAGISSIAQGLEWAGNNGMHVANLSLGSPSPSATLEQAVNSATSRGVLVVAASGNSGAGSISYPARYANAMAVGATDQNNNRASFSQYGAGLDIVAPGVNVQSTYPGSTYASLNGTSMATPHVAGAAALVKQKNPSWSNVQIRNHLKNTATSLGSTNLYGSGLVNAEAATR

SEQ ID NO: 56019 - protein, 269 aa, Unidentified
AQSVPWGISRVQAPAAHNRKLTGSGVKVAVLDTGISTHPDLNIRGGASFVPGEPSTQDGEGHGTHVAGTIAALNNNIGVLGVAPSAELYAVKVLGASGNGSVSSIANGLEWAGLNGMHVANLSLGSPSPSATLEQAVNSATSRGVLVVAASGNSGAGSISYPARYANAMAVGATDQNNNRASFSQYGAGLDIVAPGVNVQSTYPGSTYASLNGTSSATPHVAGAAALVKQKNPSWSNVQIRNHLKNTATSLGSTNLYGSGLVNAEAATR

SEQ ID NO: 56020 - protein, 269 aa, Unidentified
AQSVPWGISRVQAPAAHNRGLTGSGVKVAVLDTGISTHPDLNIRGGASFVPGEPSTQDGEGHGTHVAGTIAALNNSIGVLGVAPSAELYAVKVLGASGAGSVSSIAQGLEWAGNNGMHVANLSLGSPSPSATLEQAVNSATSRGVLVVAASGNSGAGSISYPARYANAMAVGATDQNNNHASFSQYGAGLDIVAPGVNVQSTYPGSTYASLNGTSMATPHVAGAAALVKQKNPSWSNVQIRNRLKNTATSLGSTNLYGSGLVNAFAATR

SEQ ID NO: 56021 - protein, 269 aa, Unidentified
AQSVPWGISRVQAPAAHNRGLTGSGVKVAVLDTGISTHPDLNIRGGASFVPGEPSTQDGEGHGTHVAGTIAALNNGIGVLGVAPSAELYAVKVLGASGSGSVSSIAQGLEWAGNNDMHVANLSLGSESPSATLEQAVNSATSRGVLVVAASGNSGAGSISYPARYANAMAVGATDQNNNRASFSQYGAGLDIVAPGVNVQSTYPGSTYASLNGTSMATPHVAGAAALVKQKNPSWSNVRIRNHLKNTATSLGSTNLYGSGLVNAEAATR

SEQ ID NO: 56022 - protein, 269 aa, Unidentified
AQSVPWGISRVQAPAAHRRGLTGSGVKVAVLDTGISTHPDLNIRGGASFVPGEPSTQDGNGHGTHVAGTIAALDNSIGVLGVAPSAELYAVKVLGASGGGSISSIAQGLEWAGNNGMHVANLSLGSPSPSATLEQAVNSATSRGVLVVAASGNSGAGSISYPARYANAMAVGATDQNNNRASFSQYGAGLDIVAPGVNVQSTYPGSTYASLNGTSMATPHVAGAAALVKQKNPSWSNVQIRNRLKNTATSLGSTNLYGSGLVNAEAATR

SEQ ID NO: 56023 - protein, 269 aa, Unidentified
AQSVPWGISRVQAPASHNRGLAGSGVKVAVLDTGISTHPDLNIRGGASFVPGEPSTQDGNGHGTHVAGTIAALNNSIGVLGVAPSAELYAVKVLGASGAGGISSIAQGLEWAGNNGMHVANLSLGSPSPSATLEQAVNSATSRGVLVVAASGNSGAGSISYPARYANAMAVGATDQNNNRASFSQYGAGLDIVAPGVNVQSTYPGSTYASLNGTSMATPHVAGAAALVKQKNPSWSNVQIRNHLKNTATSLGSTNLYGSGLVNAEAATR

SEQ ID NO: 56024 - protein, 269 aa, Unidentified
AQSVPWGISRVQAPAAHNRGLTGSGVKVAVLDTGISTHPDLNIRGGTSFVPGEPSTQDGEGHGTHVAGTIAALNNSIGVLGVAPSAELYAVKVLGASGSGSVSSIAQGLEWAGNNRMHVANLSLGSPSPSATLEQAVNSATSRGVLVVAASGNSGEGSISYPARYANAMAVGATDQNNNRADFSQYGAGLDIVAPGVNVQSTYPGSTYASLNGTSMATPHVAGAAALVKQKNPSWSNVQIRNHLKNTATSLGSTNLYGSGLVNAEAATR

SEQ ID NO: 56025 - protein, 269 aa, Unidentified
AQSVPWGISRVQAPAAHRRGLTGSGVKVAVLDTGISTHPDLNIRGGASFVPGEPSTQDGNGHGTHVAGTIAALDNSIGVLGVAPSAELYAVKVLGASGGGSVSSIAQGLEWAGNNGMHVANLSLGSPSPSATLEQAVNSATSRGVLVVAASGNSGAGSISYPARYANAMAVGATDQNNNRASFSQYGAGLDIVAPGVNVQSTYPGSTYASLNGTSMATPHVAGAAVLVKQKNPSWSNVRIRNHLKNTATSLGSTNLYGSGLVNAEAATR

SEQ ID NO: 56026 - protein, 269 aa, Unidentified
AQSVPWGISRVQAPAAHNRGLTGSRVKVAVLDTGISTHPDLNIRGGASFVPGEPSTQDGNGHGTHVAGTIAALNNSIGVLGVAPSAILYAVKVLGASGSGSVSSIAQGLEWAGANGMHVANLSLGSPSPSATLEQAVNSATSRGVLVVAASGNSGAGSISYPARYANAMAVGATDQNNNRASFSQYGAGLDIVAPGVNVQSTYPGSTYASLNGTSMATPHVAGAAALVKQKNSSWSNVQIRNHLKNTATSLGSTNLYGSGLVNCEAATR

SEQ ID NO: 56027 - protein, 269 aa, Unidentified
AQSVPWGISRVQAPAAHNRKLTGFGVKVAVLDTGISTHPDLNIRGGASFVPGEPSTQDGNGHGTHVAGTIAALNNSIGVLGVAPSAELYAVKVLGASGSGSVSSIAQGLEWAGNNGMHVANLSLGSPSPSATLEQAVNSATSRGVLVVAASGNSGAGSIDYPARYANAMAVGATDQNNNRASFSQYGAGLDIVAPGVNVQSTYPGSAYASENGTSMATPHVAGAAALVKQKNPSWSNVQIRNHLKNTATSLGSTNLYGSGLVNAEAATR

SEQ ID NO: 56028 - protein, 269 aa, Unidentified
AQSVPWGISRVQAPAAHNRGLTGRGVKVAVLDTGISTHPDLNIRGGASFVPGEPSTQDGNGHGTHVAGTIAALNNSIGVLGVAPSAELYAVKVLGASGSGSVSGIAQGLEWAGANGMHVANLSLGSPSPSATLEQAVNSATSRGVLVVAASGNSGAGSISYPARYANAMAVGATDQNNNRASFSQYGAGLDIVAPGVNVQSTYPGMTYASLNGTSMAAPHVAGAAALVKQKNPSWSNVQIRNHLKNTATSLGSTNLYGSGLVNAEAATR

SEQ ID NO: 56029 - protein, 269 aa, Unidentified
AQSVPWGISRVQAPAAHNRGLTGSGVKVAVLDTGISTHPDLNIRGGASFVPGEPSTQDGNGHGTHVAGTIAALNNDIGVLGVAPSAELYAVKVLGASGSGSVSSIAQGLEWAGNNDMHVANLSLGSESPSATLEQAVNSATSRGVLVVAASGNSGADSISYPARYANAMAVGATDQNNNRASFSQYGAGLDIVAPGVNVQSTYPGSTYASLNGTSMATPHVAGAAALVKQKNPSWSNVQIRNRLKNTATSLGSTNLYGSGLVNAEAATR

SEQ ID NO: 56030 - protein, 269 aa, Unidentified
AQSVPWGISRVQAPAAHRRRLTGSGVKVAVLDTGISTHPDLDITGGASFVPGEPSTQDGNGHGTHVAGTIAALNNSIGVLGVAPSAELYAVKVLGASGSGSVSSIAQGLEWAGNNGMHVANLSLGSPSPSATLEQAVNSATSRGVLVVAASGNSGAGSISYPARYANAMAVGATDQNNNRASFSQYGAGLDIVAPGVNVQSTYPGSTYASLNGTSMATPHVAGEAALVKQKNPSWSNVQIRNHLKNTATSLGSTNLYGSGLVNAEAATR

SEQ ID NO: 56031 - protein, 269 aa, Unidentified
AQSVPWGISRVQAPAAHNRGLTGRGVKVAVLDTGISTHPDLRIRGGASFVPGEPSTQDGNGHGTHVAGTIAALNNSIGVLGVAPSAELYAVKVLGASGSGSVSSIAQGLEWAGANGMHVANLSLGSPSPSATLEQAVNSATSRGVLVVAASGNSGAGSISYPARYANAMAVGATDQNNNRASFSQYGAGLDIVAPGVNVQSTYPGSTYFSLNGTSMATPHVAGAAALVKQKNPSWSNVQIRNHLKNTATSLGSTNLYGSGLVRAEAATR

SEQ ID NO: 56032 - protein, 269 aa, Unidentified
AQSVPWGISRVQAPAAHNRKLTGSGVKVAVLDTGISTHPDLRIRGGASFVPGEPSTQDGNGHGTHVAGTIAALNNSIGVLGVAPSAELYAVKVLGASGDASVSSIAQGLEWAGNNGMHVANLSLGSPSPSATLEQAVNSATSRGVLVVAASGNSGAGSISYPARYANAMAVGATDQNNNRASFSQYGAGLDIVAPGVNVQSTYPGSTYASENGTSMATPHVAGAAALVKQKNPSWSNVQIRNHLKNTATSLGSTNLYGSGLVNAEAATR

SEQ ID NO: 56033 - protein, 269 aa, Unidentified
AQSVPWGISRVQAPAAHNRKLTGSGVKVAVLDTGISTHPDLNIRGGASFVPGEPSTQDGEGHGTHVAGTIAALNNSIGVLGVAPSAELYAVKVLGASGGGSVSSIAQGLEWAGLNGMHVANLSLGAPSPSATLEQAVNSATSRGVLVVAASGNSGAGSISYPARYANAMAVGATDQNNNRASFSQYGAGLDIVAPGVNVQSTYPGSTYASQNGTSSATPHVAGAAALVKQKNPSWSNVQIRNHLKNTATSLGSTNLYGSGLVNAEAATR

SEQ ID NO: 56034 - protein, 269 aa, Unidentified
AQSVPWGISRVQAPAAHNRRLTGSGVKVAVLDTGISTHPDLNIRGGASFVPGEPSTQDGEGHGTHVAGTIAALNNGIGVLGVAPSAELYAVKVLGASGSGSVSSIAQGLEWAGNNSMHVANLSLGSESPSATLEQAVNSATSRGVLVVAASGNSGAGSISYPARYANAMAVGATDQNNNRASFSQYGAGLDIVAPGVNVQSTYPGSTYASLNGTSMATPHVAGAAALVKQKNPSWSNVQIRNHLKNTATSLGSTNLYGSGLVNAEAATR

SEQ ID NO: 56035 - protein, 269 aa, Unidentified
AQSVPWGISRVQAPAAHNRGLTGSGVKVAVLDTGISTHPDLNIRGGASFVPGEPSTQDGNGHGTHVAGTIAALNNSIGVLGVAPSAELYAVKVLGASGSGAISSIAQGLEWAGNNGMHVANLSLGSPSPSATLEQAVNSATSRGVLVVAASGNSGADSISYPARYANAMAVGATDQNNNRASFSQYGAGLDIVAPGVNVQSTYPGSTYASLNGTSMATPHVAGVAALVKQKNPSWSNVRIRNHLKNTATSLGSTNLYGSGLVNAEAATR

SEQ ID NO: 56036 - protein, 269 aa, Unidentified
AQSVPWGISRVQAPAAHNRKLTGFGVKVAVLDTGISTHPDLNIRGGASFVPGEPSTQDGNGHGTHVAGTIAALNNNIGVLGVAPSAELYAVKVLGASGSGSVSSIAQGLEWAGNNGMHVANLSLGSPSPSATLEQAVNSATSRGVLVVAASGNSGAGSIDYPARYANAMAVGATDQNNNRASFSQYGAGLDIVAPGVNVQSTYPGSAYASLNGTSMATPHVAGAAALVKQKNPSWSNVQIRNHLKNTATSLGSTNLYGSGLVNAEAATR

SEQ ID NO: 56037 - protein, 269 aa, Unidentified
AQSVPWGISRVQAPAAHRRGLTGSGVKVAVLDTGISTHPDLNIRGGASFVPGEPSTQDGNGHGTHVAGTIAALNNSIGVLGVAPDAELYAVKVLGASGSGSVSSIAQGLEWAGNNGMHVANLSLGSPSPSATLEQAVNSATSRGVLVVAASGNSGAGSINYPARYANAMAVGATDQNNNRASFSQYGAGLDIVAPGVNVLSTWPGSTYASLNGTSMATPHVAGAAALVKQKNPSWSNVQIRNHLKNTATSLGSTNLYGSGLVNAEAATR

SEQ ID NO: 56038 - protein, 269 aa, Unidentified
AQSVPWGISRVQAPAAHNRGLTGSGVKVAVLDTGISTHPDLNIRGGASFVPGEPSTQDGNGHGTHVAGTIAALNNSIGVLGVAPSAELYAVKVLGASGSGSLSSIAQGLEWAGNNGMHVANLSLGSPSPSATLEQAVNSATSRGVLVVAASGNSGEGSISYPARYANAMAVGATDQNNNRADFSQYGAGLDIVAPGVNVQSTYPGSTYASLNGTSMATPHVAGAAALVKQKNPSWSNVQIRNRLKNTATSLGSTNLYGSGLVNAFAATR

SEQ ID NO: 56039 - protein, 269 aa, Unidentified
AQSVPWGISRVQAPAAHNRGLTGRGVKVAVLDTGISTHPDLNIRGGASFVPGEPSTQDGNGHGTHVAGTIAALNNGIGVLGVAPSAELYAVKVLGASGSGSVSSIAQGLEWAGNNSMHVANLSLGSPSPSATLEQAVNSATSRGVLVVAASGNSGAGSISYPARYANAMAVGATDQNNNRASFSQYGAGLDIVAPGVNVQSTYPGSTYASLNGTSMATPHVAGAAALVKQKNPSWSNVRIRDHLKNTATSLGSTNLYGSGLVNAEAATR

SEQ ID NO: 56040 - protein, 269 aa, Unidentified
AQSVPWGISRVQAPAAHNRGLTGRGVKVAVLDSGISTHPDLNIRGGASFVPGEPSTQDGEGHGTHVAGTIAALNNSIGVLGVAPSAELYAVKVLGASGSGSVSSIAQGLEWAGNNGMHVANLSLGIPSPSATLEQAVNSATSRGVLVVAASGNSGAGSIDYPARYANAMAVGATDQNNNRASFSQYGAGLDIVAPGVNVQSTYPGSTYASLNGTSMATPHVAGAAALVKQKNPSWSNVQIRNHLKNTATSLGSTNLYGSGLVNAEAATR

SEQ ID NO: 56041 - protein, 269 aa, Unidentified
AQSVPWGNSRVQAPAAHNRRLTGRGVKVAVLDTGISTHPDLNIRGGASFVPGEPSTQDGNGHGTHVAGTIAALNNSIGVLGVAPSAELYAVKVLGASGAGSVSSIAQGLEWAGLNGMHVANLSLGSPSPSATLEQAVNSATSRGVLVVAASGNSGAGSISYPARYANAMAVGATDQNNNRASFSQYGAGLDIVAPGVNVQSTYPGSTYASLNGTSMATPHVAGAAALVKQKNPSWSNVQIRNHLKNTATSLGSTNLYGSGLVNAEAATR

SEQ ID NO: 56042 - protein, 269 aa, Unidentified
AQSVPWGISRVQAPAAHNRKLTGFGVKVAVLDTGISTHPDLNIRGGASFVPGEPSTQDGNGHGTHVAGTIAALNNSIGVLGVAPSAELYAVKVLGASGSGSVSSIAQGLEWAGNNRMHVANLSLGDPSPSATLEQAVNSATSRGVLVVAASGNSGAGSIDYPARYANAMAVGATDQNNNRASFSQYGAGLDIVAPGVNVQSTYPGSTYASLNGTSMATPHVAGAAALVKQKNPSWSNVQIRNHLKNTATSLGSTNLYGSGLVNAEAATR

SEQ ID NO: 56043 - protein, 269 aa, Unidentified
AQSVPWGISRVQAPAAHNRGLWGRGVKVAVLDTGISTHPDLNIRGGASFVPGEPSTQDGNGHGTHVAGTIAALNNSIGVLGVAPSAELYAVKVLGASGAGSVSSIAQGLEWAGNNGMHVANLSLGSPSPSATLEQAVNSATSRGVLVVAASGNSGAGSISYPARYANAMAVGATDQNNNRASFSQYGAGLDIVAPGVNVQSTYPQSAYASLNGTSMATPHVAGAAALVKQKNPSWSNVQIRNHLKNTATSLGSTNLYGSGLVNAEAATR

SEQ ID NO: 56044 - protein, 269 aa, Unidentified
AQSVPWGISRVQAPAAHRRGLTGRGVKVAVLDTGISTHPDLNIRGGASFVPGEPSTQDGNGHGTHVAGTIAALDNSIGVLGVAPSAELYAVKVLGASGAGSVSSIAQGLEWAGNNGMHVANLSLGSPSPSATLEQAVNSATSRGVLVVAASGNSGAGSISYPARYANAMAVGATDQNNNRASFSQYGAGLDIVAPGVNVQSTYPGSTYASLNGTSMATPHVAGAAALVKQKNPSWSNVQIRNRLKNTATSLGSTNLYGSGLVNAEAATR

SEQ ID NO: 56045 - protein, 269 aa, Unidentified
AQSVPWGISRVQAPAAHNRGLTGSRVKVAVLDTGISTHPDLNIRGGASFVPGEPSTQDGNGHGTHVAGTIAALNNSIGVLGVAPSAELYAVKVLGASGSGNVSSIAQGLEWAGNNGMHVANLSLGSPSPSATLEQAVNSATSRGVLVVAASGNSGAGSISYPARYANAMAVGATDQNNNKASFSQYGFGLDIVAPGVNVQSTYPGSTYASLNGTSMAAPHVAGAAALVKQKNPSWSNVQIRNHLKNTATSLGSTNLYGSGLVNAEAATR

SEQ ID NO: 56046 - protein, 269 aa, Unidentified
AQVVPWGISRVQAPAAHNRGLTGSGVKVAVLDTGISTHEDLNIRGGASFVPGEPSTQDGNGHGTHVAGTIAALDNSIGVLGVAPDAELYAVKVLGASGSGSVSSIAQGLEWAGNNRMHVANLSLGSPSPSATLEQAVNSATSRGVLVVAASGNSGAGSISYPARYANAMAVGATDQNNNRASFSQYGAGLDIVAPGVNVQSTYPGSTYASLNGTSMATPHVAGAAALVKQKNPSWSNVQIRNHLKNTATSLGSTNLYGSGLVNAEAATR

SEQ ID NO: 56047 - protein, 269 aa, Unidentified
AQSVPWGISRVQAPAAHNRRLTGSGVKVAVLDTGISTHPDLNIRGGASFVPGEPSTQDGEGHGTHVAGTIAALNNDIGVLGVAPSAELYAVKVLGASGSGSVSSIAQGLEWAGNNDMHVANLSLGSPSPSATLEQAVNSATSRGVLVVAASGNSGADSISYPARYANAMAVGATDQNNNRASFSQYGAGLDIVAPGVNVQSTYPGSTYASLNGTSMATPHVAGAAALVKQKNPSWSNVQIRNHLKNTATSLGSTNLYGSGLVNAEAATR

SEQ ID NO: 56048 - protein, 269 aa, Unidentified
AQSVPWGISRVQAPAAHNRKLTGSGVKVAVLDTGISTHPDLWIRGGASFVPGEPSTQDGEGHGTHVAGTIAALNNSIGVLGVAPSAELYAVKVLGASGSGSVSSIAQGLEWAGLNGMHVANLSLGSPSPSATLEQAVNSATSRGVLVVAASGNSGAGSISYPARYANAMAVGATDQNNNRADFSQYGAGLDIVAPGVNVQSTYPGSTYASLNGTSMATPHVAGAAALVKQKNPSWSNVQIRNHLKNTATSLGSTNLYGSGLVNAEAATR

SEQ ID NO: 56049 - protein, 269 aa, Unidentified
AQSVPWGISRVQAPAAHNRRLTGSGVKVAVLDTGISTHPDLNIRGGASFVPGEPSTQDGNGHGTHVAGTIAALNNGIGVLGVAPSAELYAVKVLGASGSGSVSSIAQGLEWAGNNSMHVANLSLGSESPSATLEQAVNSATSRGVLVVAASGNSGAGSISYPARYANAMAVGATDQNNNRADFSQYGAGLDIVAPGVNVQSTYPGSTYASLNGTSMATPHVAGAAALVKQKNPSWSNVQIRNHLKNTATSLGSTNLYGSGLVNAEAATR

SEQ ID NO: 56050 - protein, 269 aa, Unidentified
AQSVPWGISRVQAPAAHNRGLTGSGVKVAVLDTGISTHPDLNIRGGASFVPGEPSTQDGNGHGTHVAGTIAALNNSIGVLGVAPNAELYAVKVLGASGSGSVSSIAQGLEWAGNNVMHVANLSLGLQAPSATLEQAVNSATSRGVLVVAASGNSGAGSISYPARYANAMAVGATDQNNNRASFSQYGAGLDIVAPGVNVQSTYPGSTYASLNGTSMATPHVAGAAALVKQKNPSWSNVQIRNHLKNTATSLGSTNLYGSGLVNAEAATR

SEQ ID NO: 56051 - protein, 269 aa, Unidentified
AQSVPWGISRVQAPAAHNRGLTGSGVKVAVLDTGISTHPDLNIRGGASFVPGEPSTQDGNGHGTHVAGTIAALNNSIGVLGVAPSAELYAVKVLGADGNGAISSIAQGLEWAGNNGMHVANLSLGSPSPSATLEQAVNSATSRGVLVVAASGNSGASSISYPARYANAMAVGATDQNNNRASFSQYGAGLDIVAPGVNVQSTYPGSTYASLNGTSMATPHVAGAAALVKQKNPSWSNVQIRNHLKNTATSLGSTNLYGSGLVNAEAATR

SEQ ID NO: 56052 - protein, 269 aa, Unidentified
AQSVPWGISRVQAPAAHNRRLTGRGVKVAVLDTGISTHPDLNIRGGASFVPGEPSTQDGNGHGTHVAGTIAALNNDIGVLGVAPSAELYAVKVLGASGSGSVSSIAQGLEWAGNNDMHVANLSLGSESPSATLEQAVNSATSRGVLVVAASGNSGAGSISYPARYANAMAVGATDQNNNRASFSQYGAGLDIVAPGVNVQSTYPGSTYASLNGTSMATPHVAGAAALVKQKNPSWSNVQIRNHLKNTATSLGSTNLYGSGLVNAEAATR

SEQ ID NO: 56053 - protein, 269 aa, Unidentified
AQSVPWGISRVQAPAAHNRRLTGSGVKVAVLDTGISTHPDLNIRGGASFVPGEPSTQDGNGHGTHVAGTIAALNNSIGVLGVAPSAELYAVKVLGASGAGSVSSIAQGLEWAGLNGMHVANLSLGSPSPSATLEQAVNSATSRGVLVVAASGNSGAGSISYPARYANAMAVGATDQNNNRASFSQYGAGLDIVAPGVNVQSTYIQSTYASLNGTSMATPHVAGAAALVKQKNPSWSNVQIRNHLKNTATSLGSTNLYGSGLVNAEAATR

SEQ ID NO: 56054 - protein, 269 aa, Unidentified
AQSVPWGISRVQAPAAHRRGLTGRGVKVAVLDTGISTHPDLNIRGGASFVPGEPSTQDGNGHGTHVAGTIAALDNSIGVLGVAPSAELYAVKVLGASGSGSVSSIAQGLEWAGNNGMHVANLSLGSPSPSATLEQAVNSATSRGVLVVAASGNSGAGSISYPARYANAMAVGATDQNNNRASFSQYGAGLDIVAPGVNVQSTYPGSAYASLNGTSMATPHVAGAAALVKQKNPSWSNVQIRNRLKNTATSLGSTNLYGSGLVNAEAATR

SEQ ID NO: 56055 - protein, 269 aa, Unidentified
AQSVPWGISRVQAPAAHNRKLLGSGVKVAVLDTGISTHPDLNIRGGASFVPGEPSTQDGNGHGTHVAGTIAALNNNIGVLGVAPSAELYAVKVLGASGSGSVSSIAQGLEWAGNNGMHVANLSLGSPSPSATLEQAVNSATSRGVLVVAASGNSGAGSIDYPARYANAMAVGATDQNNNRASFSQYGAGLDIVAPGVNVQSTYPGSAYASLNGTSMATPHVAGAAALVKQKNPSWSNVQIRNHLKNTATSLGSTNLYGSGLVNAEAATR

SEQ ID NO: 56056 - protein, 269 aa, Unidentified
AQSVPWGISRVQAPAAHNRGLTGSGVKVAVLDTGISTHPDLNIRGGASFVPGEPSTQDGNGHGTHVAGTIAALNNSIGVLGVAPSAELYAVKVLGASGSGNVSSIAQGLEWAGNNGMFVANLSLGSPSPSATLEQAVNSATSRGVLVVAASGNSGAGSISWPARYANAMAVGATDQNNNRASFSQYGAGLDLVAPGVNVQSTYPGSTYASLNGTSMATPHVAGAAACVKQKNPSWSNVQIRNHLKNTATSLGSTNLYGSGLVNAEAATR

SEQ ID NO: 56057 - protein, 269 aa, Unidentified
AQSVPWGISRVQAPAAHNRGLTGSGVKVAVLDTGISTHPDLNIRGGASFVPGEPSTQDGNGHGTHVAGTIAALDNNIGVLGVAPSAELYAVKVLGASGSGSVSSIAQGLEWAGNNRMHVANLSLGSPSPSATLEQAVNSATSRGVLVVAASGNSGAGSISYPARYANAMAVGATDQNNNRASFSQYGAGLDIVAPGVNVLSTYPGSTYASLNGTSMATPHVAGAAALVKQKNPSWSNVQIRNRLKNTATSLGSTNLYGSGLVNAEAATR

SEQ ID NO: 56058 - protein, 269 aa, Unidentified
AQSVPWGISRVQAPAAHNRGLTGSGVKVAVLDTGISTHPDLRIRGGASFVPGEPSTQDGNGHGTHVAGTIAALNNNIGVLGVAPSAELYAVKVLGASSSGSVSSIAQGLEWAGNNGMHVANLSLGSPSPSATLEQAVNSATSRGVLVVAASGNSGAGSISYPARYANAMAVGATDQNNNRASFSQYGAGLDIVAPGVNVQSTYPGSTYASENGTSMATPHVAGAAALVKQKNPRWSNVQIRNHLKNTATSLGSTNLYGSGLVNAEAATR

SEQ ID NO: 56059 - protein, 269 aa, Unidentified
AQSVPWGISRVQAPAAHNRGLTGSGVKVAVLDTGISTHPDLNIRGGASFVPGEPSTQDGNGHGTHVAGTIAALNNDIGVLGVAPSAELYAVKVLGASGSGSVSSIAQGLEWAGNNDMHVANLSLGSESPSATLEQAVNSATSRGVLVVAASGNSGAGSISYPARYANAMAVGATDQNNNRASFSQYGAGLDIVAPGVNVQSTYPGSTYASLNGTSMATPHVAGAAALVKQKNPSWSNVRIRDHLKNTATSLGSTNLYGSGLVNAEAATR

SEQ ID NO: 56060 - protein, 269 aa, Unidentified
AQSVPWGISRVQAPAAHNRRLWGSGVKVAVLDTGISTHPDLRITGGASFVPGEPSTQDGNGHGTHVAGTIAALNNSIGVLGVAPSAELYAVKVLGASGAGSVSSIAQGLEWAGNNGMHVANLSLGSPSPSATLEQAVNSATSRGVLVVAASGNSGAGSISYPARYANAMAVGATDQNNNRASFSQYGAGLDIVAPGVNVQSTYPGSTYASLNGTSMATPHVAGAAALVKQKNPSWSNVQIRNHLKNTATSLGSTNLYGSGLVNAEAATR

SEQ ID NO: 56061 - protein, 269 aa, Unidentified
AQSVPWGISRVQAPAAHRRGLTGRGVKVAVLDTGISTHPDLDIRGGASFVPGEPSTQDGNGHGTHVAGTIAALDNSIGVLGVAPSAELYAVKVLGASGSGSVSSIAQGLEWAGNNGMHVANLSLGSPSPSATLEQAVNSATSRGVLVVAASGNSGAGSISYPARYANAMAVGATDQNNNRASFSQYGAGLDIVAPGVNVQSTYPGSTYASLNGTSMATPHVAGAAALVKQKNPSWRNVQIRNHLKNTATSLGSTNLYGSGLVNAEAATR

SEQ ID NO: 56062 - protein, 269 aa, Unidentified
AQSVPWGISRVQAPAAHNRGLTGRGVKVAVLDTGISTHPDLNIRGGASFVPGEPSTQDGNGHGTHVAGTIAALNNSIGVLGVAPSAELYAVKVLGASGSGSVSSIAQGLEWAGNNRMHVANLSLGIPSPSATLEQAVNSATSRGVLVVAASGNSGEGSISYPARYANAMAVGATDQNNNRADFSQYGAGLDIVAPGVNVQSTYPGSTYASLNGTSMATPHVAGAAALVKQKNPSWSNVQIRNHLKNTATSLGSTNLYGSGLVNAEAATR

SEQ ID NO: 56063 - protein, 269 aa, Unidentified
AQSVPWGISRVQAPASHNRGLTGSGVKVAVLDTGISTHPDLNIRGGASFVPGEPSTQDGNGHGTHVAGTIAALNNSIGVLGVAPSAELYAVKVLGASGAGAISSIAQGVEWAGNNGMHVANLSLGSPSPSATLEQAVNSATSRGVLVVAASGNSGAGSISYPARYANAMAVGATDQNNNRASFSQYGAGLDIVAPGVNVQSTYPGSTYASLNGTSMATPHVAGAAALVKQKNPSWSNVQIRNHLKNTATSLGSTNLYGSGLVNAEAATR

SEQ ID NO: 56064 - protein, 269 aa, Unidentified
AQSVPWGISRVQAPAAHNRGLTGSGVKVAVLDTGISTHPDLNIRGGASFVPGEPSTQDGNGHGTHVAGTIAALNNSIGVLGVAPSAELYAVKVLGASGSGSVSSIAQGLEWAGNNVMHVANLSLGLNVPSATLEQAVNSATSRGVLVVAASGNSGAGSISYPARYANAMAVGATDQNNNRASFSQYGAGLDIVAPGVNVQSTWPGSTYASLNGTSMATPHVAGAAALVKQKNPSWSNVQIRNHLKNTATSLGSTNLYGSGLVNAEAATR

SEQ ID NO: 56065 - protein, 269 aa, Unidentified
AQSVPWGISRVQAPAAHNRGLTGSGVKVAVLDTGISTHPDLNIRGGASFVPGEPSTQDGNGHGTHVAGTIAALNNSIGVLGVAPSAELYAVKVLGATGAAAISSIAQGLEWAGNNGMHVANLSLGSPSPSATLEQAVNSATSRGVLVVAASGNSGAGSISYPARYANAMAVGATDQNNNRASFSQYGAGLDIVAPGVNVQSTYPGSTYASLNGTSMATPHVAGAAALVKQKNPSWSNVQIRNHLKNTATSLGSTNLYGSGLVNAEAATR

SEQ ID NO: 56066 - protein, 269 aa, Unidentified
AQSVPWGISRVQAPAAHNRGLAGRGVKVAVLDTGISTHPDLNIRGGASFVPGEPSTQDGNGHGTHVAGTIAALNNSIGVLGVAPSAELYAVKVLGASGSGSVSSIAQGLEWAGNNGMHVANLSLGIPSPSATLEQAVNSATSRGVLVVAASGNSGEGSIDYPARYANAMAVGATDQNNNRASFSQYGAGLDIVAPGVNVQSTYPGSTYASLNGTSMATPHVAGAAALVKQKNPSWSNVQIRNHLKNTATSLGSTNLYGSGLVNAEAATR

SEQ ID NO: 56067 - protein, 269 aa, Unidentified
AQSVPWGISRVQAPAAHNRGLLGSGVKVAVLDTGISTHPDLNIRGGASFVPGEPSTQDGNGHGTHVAGTIAALNNNIGVLGVAPSAELYAVKVLGASGSGSVSSIAQGLEWAGLNGMHVANLSLGSESPSATLEQAVNSATSRGVLVVAASGNSGAGSISYPARYANAMAVGATDQNNNRASFSQYGAGLDIVAPGVNVQSTYPGSTYASLNGTSMATPHVAGAAALVKQKNPSWSNVQIRNHLKNTATNLGSTNLYGSGLVNAEAATR

SEQ ID NO: 56068 - protein, 269 aa, Unidentified
AQSVPWGISRVQAPAAHNRGLTGSGVKVAVLDTGISTHPDLNIRGGASFVPGEPSTQDGNGHGTHVAGTIAALNNSIGVLGVAPSAELYAVKVLGQTGSAGISSIAQGLEWAGNNGMHVANLSLGSPSPSATLEQAVNSATSRGVLVVAASGNSGAGSISYPARYANAMAVGATDQNNNRASFSQYGAGLDIVAPGVNVQSTYPGSTYASLNGTSMATPHVAGAAALVKQKNPSWSNVQIRNHLKNTATSLGSTNLYGSGLVNAEAATR

SEQ ID NO: 56069 - protein, 269 aa, Unidentified
AQSVPWGISRVQAPAAHNRGLAGRGVKVAVLDSGISTHPDLNIRGGASFVPGEPSTQDGNGHGTHVAGTIAALNNSIGVLGVAPSAELYAVKVLGASGSGSVSSIAQGLEWAGNNRMHVANLSLGSPSPSATLEQAVNSATSRGVLVVAASGNSGAGSISYPARYANAMAVGATDQNNNRADFSQYGAGLDIVAPGVNVQSTYPGSTYASLNGTSMATPHVAGAAALVKQKNPSWSNVQIRNHLKNTATSLGSTNLYGSGLVNAEAATR

SEQ ID NO: 56070 - protein, 269 aa, Unidentified
AQSVPWGISRVQAPAAHNRGLTGRGVKVAVLDTGISTHPDLRITGGASFVPGEPSTQDGNGHGTHVAGTIAALNNSIGVLGVAPSAELYAVKVLGASGAGSVSSIAQGLEWAGNNGMHVANLSLGSPSPSATLEQAVNSATSRGVLVVAASGNSGAGSISYPARYANAMAVGATDQNNNRASFSQYGAGLDIVAPGVNVQSTYPGSAYASLNGTSMATPHVAGAAALVKQKNPSWSNVQIRNHLKNTATSLGSTNLYGSGLVNAEAATR

SEQ ID NO: 56071 - protein, 269 aa, Unidentified
AQSVPWGISRVQAPAAHNRGLTGSGVKVAVLDTGISTHPDLNIRGGASFVPGEPSTQDGNGHGTHVAGTIAALNNSIGVLGVAPSAELYAVKVLGAGGGAAISSIAQGLEWAGNNGMHVANLSLGSPSPSATLEQAVNSATSRGVLVVAASGNSGAGSISYPARYANAMAVGATDQNNNRASFSQYGAGLDIVAPGVNVQSTYPGSTYASLNGTSMATPHVAGAAALVKQKNPSWSNVQIRNHLKNTATSLGSTNLYGSGLVNAEAATR

SEQ ID NO: 56072 - protein, 269 aa, Unidentified
AQSVPWGISRVQAPAAHRRGLTGRGVKVAVLDTGISTHPDLDIRGGASFVPGEPSTQDGNGHGTHVAGTIAALNNSIGVLGVAPSAELYAVKVLGASGSGSVSSIAQGLEWAGNNGMHVANLSLGSPSPSATLEQAVNSATSRGVLVVAASGNSGAGSISYPARYANAMAVGATDQNNNRASFSQYGAGLDIVAPGVNVQSTYPGSTYASLNGTSMATPHVAGEAALVKQKNPSWSNVQIRNRLKNTATSLGSTNLYGSGLVNAEAATR

SEQ ID NO: 56073 - protein, 269 aa, Unidentified
AQSVPWGISRVQAPAAHNRRLTGRGVKVAVLDTGISTHPDLNITGGASFVPGEPSTQDGNGHGTHVAGTIAALNNSIGVLGVAPSAELYAVKVLGASGSGSVSSIAQGLEWAGNNGMHVANLSLGSPSPSATLEQAVNSATSRGVLVVAASGNSGAGSISYPARYANAMAVGATDQNNNRASFSQYGAGLDIVAPGVNVQSTYPGSTYASLNGTSMATPHVAGEAALVKQKNPSWRNVQIRNHLKNTATSLGSTNLYGSGLVNAEAATR

SEQ ID NO: 56074 - protein, 269 aa, Unidentified
AQSVPWGISRVQAPAAHNRGLTGSGVKVAVLDTGISTHEDLNIRGGASFVPGEPSTQDGNGHGTHVAGTIAALNNSIGVLGVAPSAELYAVKVLGASGRGSVSSIAQGLEWAGNNGMHVANLSLGTPAPSATLEQAVNSATSRGVLVVAASGNSGAGSISYPARYANAMAVGATDQNNNRASFSQYGAGLDIVAPGVNVQSTYPGSTYASLNGTSMATPHVAGAAALVKQKNPSWSNVQIRDHLKNTATSLGSTNLYGSGLVNAEAATR

SEQ ID NO: 56075 - protein, 269 aa, Synthetic construct
AQSVPWGISRVQAPAAHNRGLTGSGVRVAVLDTGISTHPDLNIRGGASFVPGEPSTQDGNGHGTHVAGTIAALDNSIGVLGVAPSAELYAVKVLGASGSGSYSSIAQGLEWAGNNGMHVASLSLGSPSPSATLEQAVNSATSRGVLVVAASGNSGAGSISYPARYANAMAVGATDQNNNRASFSQYGAGLDIVAPGVNVQSTYPGSTYAVLNGTSMATPHVAGAAALVKQKNPSWSNVQIRNHLKNTATSLGSTNLYGSGLVNAEAATR

SEQ ID NO: 56076 - protein, 269 aa, Unidentified
AQSVPWGISRVQAPAAHNRGLTGSGVKVAVLDTGISTHPDLNIRGGASFVPGEPSTQDGNGHGTHVAGTIAALNNSIGVLGVAPNAELYAVKVLGASGSGSVSSIAQGLEWAGNNVMHVANLSLGVMSPSATLEQAVNSATSRGVLVVAASGNSGAGSISYPARYANAMAVGATDQNNNRASFSQYGAGLDIVAPGVNVQSTWPGSTYASLNGTSMATPHVAGAAALVKQKNPSWSNVQIRNHLKNTATSLGSTNLYGSGLVNAEAATR

SEQ ID NO: 56077 - protein, 269 aa, Unidentified
AQSVPWGISRVQAPAAHNRGLTGSGVKVAVLDTGISTHPDLNIRGGASFVPGEPSTQDGNGHGTHVAGTIAALNNSIGVLGVAPSAELYAVKVLAASGNGSVSSIAQGLEWAGNNGMHVANLSLGAPSPSATLEQAVNSATSRGVLVVAASGNSGAGSISYPARYANAMAVGATDQNNNRADFSQYGAGLDIVAPGVNVQSTYPGSTYASQNGTSMATPHVAGAAALVKQKNPSWSNVQIRNHLKNTATSLGSTNLYGSGLVNAEAATR

SEQ ID NO: 56078 - protein, 269 aa, Synthetic construct
AQSVPWGISRVQAPAAHNRGLTGSGVRVAVLDTGISTHPDLNIRGGASFVPGEPSTQDGNGHGTHVAGTIAALDNSIGVLGVAPSAELYAVKVLGASGSGSYSSIAQGLEWAGNNGMHVASLSLGSPSPSATLEQAVNSATSRGVLVVAASGNSGAGSISYPARYANAMAVGATDQNNNRASFSQYGAGLEIVAPGVNVQSTYPGSTYASLNGTSMATPHVAGAAALVKQKNPSWSNVQIRNHLKNTATSLGSTNLYGSGLVNAEAATR

SEQ ID NO: 56079 - protein, 269 aa, Unidentified
AQSVPWGISRVQAPAAHNRGLTGSGVKVAVLDTGISTHPDLNIRGGASFVPGEPSTQDGNGHGTHVAGTIAALNNGIGVLGVAPSAELYAVKVLGASGSGSVSSIAQGLEWAGNNDMHVANLSLGSESPSATLEQAVNSATSRGVLVVAASGNSGADSISYPARYANAMAVGATDQNNNRASFSQYGAGLDIVAPGVNVQSTYPGSTYASLNGTSMATPHVAGAAALVKQKNPSWSNVQIRNRLKNTATSLGSTNLYGSGLVNAEAATR

SEQ ID NO: 56080 - protein, 269 aa, Unidentified
AQSVPWGISRVQAPAAHNRGLTGSGVKVAVLDTGISTHPDLNIRGGASFVPGEPSTQDGEGHGTHVAGTIAALNNSIGVLGVAPSAELYAVKVLGASGSGSVSSIAQGLEWAGLNRMHVANLSLGIPSPSATLEQAVNSATSRGVLVVAASGNSGAGSISYPARYANAMAVGATDQNNNRADFSQYGAGLDIVAPGVNVQSTYPGSTYASLNGTSMATPHVAGAAALVKQKNPSWSNVQIRNHLKNTATSLGSTNLYGSGLVNAEAATR

SEQ ID NO: 56081 - protein, 269 aa, Unidentified
AQSVPWGISRVQAPAAHRRGLTGRGVKVAVLDTGISTHPDLDITGGASFVPGEPSTQDGNGHGTHVAGTIAALNNSIGVLGVAPSAELYAVKVLGASGSGSVSSIAQGLEWAGNNGMHVANLSLGSPSPSATLEQAVNSATSRGVLVVAASGNSGAGSISYPARYANAMAVGATDQNNNRASFSQYGAGLDIVAPGVNVQSTYPGSTYASLNGTSMATPHVAGAAALVKQKNPSWSNVQIRNRLKNTATSLGSTNLYGSGLVNAEAATR

SEQ ID NO: 56082 - protein, 269 aa, Unidentified
AQSVPWGISRVQAPAAHNRGLTGSGVKVAVLDTGISTHPDLNIRGGASFVPGEPSTQDGNGHGTHVAGTIAALDNSIGVLGVAPSAELYAVKVLGASGSGAISSIARGLEWAGNNGMHVANLSLGSPSPSATLEQAVNSATSRGVLVVAASGNSGAGSISYPARYANAMAVGATDQNNNRASFSQYGAGLDIVAPGVNVQSTYPGSTYASLNGTSMATPHVAGAAALVKQKNPSWSNVRIRNHLKNTATSLGSTNLYGSGLVNAEAATR

SEQ ID NO: 56083 - protein, 269 aa, Unidentified
AQSVPWGISRVQAPAAHNRGLTGSGVKVAVLDTGISTHPDLNIRGGASFVPGEPSTQDGNGHGTHVAGTIAALNNSIGVLGVAPSAELYAVKVLGADGDGAISSIAQGLEWAGNNGMHVANLSLGSPSPSATLEQAVNSATSRGVLVVAASGNSGASSISYPARYANAMAVGATDQNNNRASFSQYGAGLDIVAPGVNVQSTYPGSTYASLNGTSMATPHVAGAAALVKQKNPSWSNVQIRNHLKNTATSLGSTNLYGSGLVNAEAATR

SEQ ID NO: 56084 - protein, 269 aa, Unidentified
AQSVPWGISRVQAPAAHNRGLTGSGVKVAVLDTGISTHPDLNIRGGASFVPGEPSTQDGNGHGTHVAGTIAALNNSIGVLGVAPSAELYAVKVLPQTGSASISSIAQGLEWAGNNGMHVANLSLGSPSPSATLEQAVNSATSRGVLVVAASGNSGAGSISYPARYANAMAVGATDQNNNRASFSQYGAGLDIVAPGVNVQSTYPGSTYASLNGTSMATPHVAGAAALVKQKNPSWSNVQIRNHLKNTATSLGSTNLYGSGLVNAEAATR

SEQ ID NO: 56085 - protein, 269 aa, Unidentified
AQSVPWGISRVQAPAAHNRGLTGSGVKVAVLDTGISTHPDLNIRGGASFVPGEPSTQDGNGHGTHVAGTIAALNNSIGVLGVAPSAELYAVKVLGASGSGSLSSIAQGLEWAGNNGMHVANLSLGNPSPSATLEQAVNSATSRGVLVVAASGNSGEGSISYPARYANAMAVGATDQNNNHASFSQYGAGLDIVAPGVNVQSTYPGSTYASLNGTSMATPHVAGAAALVKQKNPSWSNVQIRNRLKNTATSLGSTNLYGSGLVNAEAATR

SEQ ID NO: 56086 - protein, 269 aa, Unidentified
AQSVPWGISRVQAPAAHRRGLTGRGVKVAVLDTGISTHPDLNIRGGASFVPGEPSTQDGNGHGTHVAGTIAALNNSIGVLGVAPSAELYAVKVLGASGSGSVSSIAQGLEWAGNNRMHVANLSLGSPSPSATLEQAVNSATSRGVLVVAASGNSGVGSISYPARYANAMAVGATDQNNNRASFSQYGAGLDIVAPGVNVQSTWPGSTYASLNGTSMATPHVAGAAALVKQKNPSWSNVQIRNHLKNTATSLGSTNLYGSGLVNAEAATR

SEQ ID NO: 56087 - protein, 269 aa, Unidentified
AQSVPWGISRVQAPAAHNRKLLGFGVKVAVLDTGISTHPDLNIRGGASFVPGEPSTQDGNGHGTHVAGTIAALNNSIGVLGVAPSAELYAVKVLGASGSGSVSSIAQGLEWAGNNRMHVANLSLGSPSPSATLEQAVNSATSRGVLVVAASGNSGAGSIDYPARYANAMAVGATDQNNNRASFSQYGAGLDIVAPGVNVQSTYPGSTYASLNGTSMATPHVAGAAALVKQKNPSWSNVQIRNHLKNTATSLGSTNLYGSGLVNAEAATR

SEQ ID NO: 56088 - protein, 269 aa, Unidentified
AQSVPWGISRVQAPAAHNRGLTGSGVKVAVLDTGISTHPDLNIRGGASFVPGEPSTQDGEGHGTHVAGTIAALNNSIGVLGVAPSAELYAVKVLGASGSGSVSSIAQGLEWAGNNGMHVANLSLGSPSPSATLEQAVNSATSRGVLVVAASGNSGEGSISYPARYANAMAVGATDQNNNRADFSQYGAGLDIVAPGVNVQSTYPGSTYASLNGTSMATPHVAGAAALVKQKNPSWSNVQIRNRLKNTATSLGSTNLYGSGLVNAFAATR

SEQ ID NO: 56089 - protein, 269 aa, Unidentified
AQSVPWGISRVQAPAAHNRGLLGSGVKVAVLDTGISFHPDLNIRGGASFVPGEPSTQDGNGHGTHVAGTIAALNNSIGVLGVAPSAELYAVKVLGASGSGSVSSIAQGLEWAGNNGMHFANLSLGSPSPSATLEQAVNSATSRGVLVVAASGNSGAGDISYPARYANAMAVGATDQNNNRASFSQYGAGLDIVAPGVNVQSTYPGSTYASLNGTSMATPHVAGAAALVKQKNPSWSNVQIRNHLKNTATSLGSTNLYGSGLVNAEFATR

SEQ ID NO: 56090 - protein, 269 aa, Unidentified
AQSVPWGISRVQAPAAHNRGLTGRGVKVAVLDTGISTHPDLNIRGGASFVPGEPSTQDGNGHGTHVAGTIAALNNSIGVLGVAPSAELFAVKVLGASGSGSVSSIAQGLEWAGNNGMHVANLSLGSPSPSATLEQAVNSATSRGVLVVAASGNSGAGSISYPARYANAMAVGATDQNNNRASFSQYGAGLDLVAPGVNVQSTYPGSTYFSLNGTSMATPHVAGAAALVKQKNSSWSNVQIRNHLKNTATSLGSTNLYGSGLVNAEAATR

SEQ ID NO: 56091 - protein, 269 aa, Unidentified
AQSVPWGISRVQAPAAHNRRLTGSGVKVAVLDTGISTHPDLNITGGASFVPGEPSTQDGNGHGTHVAGTIAALNNSIGVLGVAPSAELYAVKVLGASGAGSVSSIAQGLEWAGNNGMHVANLSLGSPSPSATLEQAVNSATSRGVLVVAASGNSGAGSISYPARYANAMAVGATDQNNNRASFSQYGAGLDIVAPGVSVQSTYIGSTYASLNGTSMATPHVAGAAALVKQKNPSWSNVQIRNHLKNTATSLGSTNLYGSGLVNAEAATR

SEQ ID NO: 56092 - protein, 269 aa, Unidentified
AQSVPWGISRVQAPAAHNRGLTGSGVKVAVLDSGISTHPDLWIRGGASFVPGEPSTQDGNGHGTHVAGTIAALNNSIGVLGVAPSAELYAVKVLGASGSGSVSSIAQGLEWAGNNGMHVANLSLGSPSPSATLEQAVNSATSRGVLVVAASGNSGAGSISYPARYANAMAVGATDQNNNRASFSQYGAGLDIVAPGVNVQSTYPGSTYASLDGTSMATPHVAGAAALVKQKNGSWSFVQIRNHLKNTATSLGSTNLYGSGLVNAEAATR

SEQ ID NO: 56093 - protein, 269 aa, Unidentified
AQSVPWGISRVQAPAAHNRRLTGSGVKVAVLDTGISTHPDLNIRGGASFVPGEPSTQDGNGHGTHVAGTIAALNNGIGVLGVAPSAELYAVKVLGASGSGSVSSIAQGLEWAGNNSMHVANLSLGSPSPSATLEQAVNSATSRGVLVVAASGNSGADSISYPARYANAMAVGATDQNNNRASFSQYGAGLDIVAPGVNVQSTYPGSTYASLNGTSMATPHVAGAAALVKQKNPSWSNVQIRNRLKNTATSLGSTNLYGSGLVNAEAATR

SEQ ID NO: 56094 - protein, 269 aa, Unidentified
AQSVPWGISRVQAPAAHNRRLTGRGVKVAVLDTGISTHPDLNIRGGASFVPGEPSTQDGNGHGTHVAGTIAALNNSIGVLGVAPSAELYAVKVLGASGAGSVSSIAQGLEWAGLNGMHVANLSLGSPSPSATLEQAVNSATSRGVLVVAASGNSGAGSISYPARYANAMAVGATDQNNNRASFSQYGAGLDIVAPGVNVQSTYPGSTYASLNGTSMATPHVAGAAALVKQKNPSWSNVQIRNHLKNTATSLGSTNLYGSGNVNAEAATR

SEQ ID NO: 56095 - protein, 269 aa, Unidentified
AQSVPWGISRVQAPAAHNRGLTGSGVKVAVLDTGISTHPDLNIRGGASFVPGEPSTQDGNGHGTHVAGTIAALNNSIGVLGVAPSAELYAVKVLGQTGGASLSSIAQGLEWAGNNGMHVANLSLGSPSPSATLEQAVNSATSRGVLVVAASGNSGAGSISYPARYANAMAVGATDQNNNRASFSQYGAGLDIVAPGVNVQSTYPGSTYASLNGTSMATPHVAGAAALVKQKNPSWSNVQIRNHLKNTATSLGSTNLYGSGLVNAEAATR

SEQ ID NO: 56096 - protein, 269 aa, Unidentified
AQSVPWGISRVQAPAAHNRGLAGSGVKVAVLDTGISTHPDLNIRGGASFVPGEPSTQDGEGHGTHVAGTIAALNNSIGVLGVAPSAELYAVKVLGASGSGSVSSIAQGLEWAGLNGMHVANLSLGSPSPSATLEQAVNSATSRGVLVVAASGNSGEGSISYPARYANAMAVGATDQNNNRADFSQYGAGLDIVAPGVNVQSTYPGSTYASLNGTSMATPHVAGAAALVKQKNPSWSNVQIRNHLKNTATSLGSTNLYGSGLVNAEAATR

SEQ ID NO: 56097 - protein, 269 aa, Unidentified
AQSVPWGISRVQAPAAHNRGLTGRGVKVAVLDTGISTHPDLNIRGGASFVPGEPSTQDGNGHGTHVAGTIAALNNSIGVLGVAPSAELYAVKVLGASGSGSVSSIAQGLEWAGNNGMHVANLSLGSESPSATLEQAVNSATSRGVLVVAASGNSGADSISYPARYANAMAVGATDQNNNRASFSQYGAGLDIVAPGVNVQSTYPGSTYASLNGTSMATPHVAGAAALVKQKNPSWSNVRIRDHLKNTATSLGSTNLYGSGLVNAEAATR

SEQ ID NO: 56098 - protein, 269 aa, Unidentified
AQSVPWGISRVQAPAAHNRGLTGRGVKVAVLDTGISTHPDLNIRGGASFVPGEPSTQDGQGHGTHVAGTIAALNNSIGVLGVAPSAELYAVKVLGASGSGSLSGIAQGLEWAGNNGMHVANLSLGSPSPSATLEQAVNSATSRGVLVVAASGNSGAGSISYPARYANAMAVGATDQNNNRASFSQYGAGLDIVAPGVNVQSTYPGSTYASLNGTSMATPHVAGAAALVKQKNPSWSNVQIRNRLKNTATSLGSTNLYGSGLVNAEAATR

SEQ ID NO: 56099 - protein, 269 aa, Unidentified
AQSVPWGISRVQAPAAHNRGLTGSGVKVAVLDTGISTHPDLNIRGGASFVPGEPSTQDGEGHGTHVAGTIAALNNGIGVLGVAPSAELYAVKVLGASGSGSVSSIAQGLEWAGNNDMHVANLSLGSPSPSATLEQAVNSATSRGVLVVAASGNSGAGSISYPARYANAMAVGATDQNNNRADFSQYGAGLDIVAPGVNVQSTYPGSTYASLNGTSMATPHVAGAAALVKQKNPSWSNVQIRDHLKNTATSLGSTNLYGSGLVNAEAATR

SEQ ID NO: 56100 - protein, 269 aa, Unidentified
AQSVPWGISRVQAPAAHNRRLTGSGVKVAVLDTGISTHPDLNIRGGASFVPGEPSTQDGNGHGTHVAGTIAALNNGIGVLGVAPSAELYAVKVLGASGSGSVSSIAQGLEWAGNNDMHVANLSLGSPSPSATLEQAVNSATSRGVLVVAASGNSGAGSISYPARYANAMAVGATDQNNNRASFSQYGAGLDIVAPGVNVQSTYPGSTYASLNGTSMATPHVAGAAALVKQKNPSWSNVQIRDRLKNTATSLGSTNLYGSGLVNAEAATR

SEQ ID NO: 56101 - protein, 269 aa, Unidentified
AQSVPWGISRVQAPAAHNRKLTGSGVKVAVLDTGISTHPDLNIRGGASFVPGEPSTQDGEGHGTHVAGTIAALNNNIGVLGVAPSAELYAVKVLGASGSGSVSSIAQGLEWAGNNGMHVANLSLGSPSPSATLEQAVNSATSRGVLVVAASGNSGAGSISYPARYANAMAVGATDQNNNRASFSQYGAGLDIVAPGVNVQSTYPGSAYASNNGTSMATPHVAGAAALVKQKNPSWSNVQIRNHLKNTATSLGSTNLYGSGLVNAEAATR

SEQ ID NO: 56102 - protein, 269 aa, Unidentified
AQSVPWGISRVQAPASHNRGLTGSGVKVAVLDTGISTHPDLNIRGGASFVPGEPSTQDGEGHGTHVAGTIAALNNSIGVLGVAPSAELYAVKVLGASGSGSVSSIAQGLEWAGNNGMHVANLSLGSPSPSATLEQAVNSATSRGVLVVAASGNSGEGSISYPARYANAMAVGATDQNNNHASFSQYGAGLDIVAPGVNVQSTYPGSTYASLNGTSMATPHVAGAAALVKQKNPSWSNVQIRNHLKNTATSLGSTNLYGSGLVNAFAATR

SEQ ID NO: 56103 - protein, 269 aa, Unidentified
AQSVPWGISRVQAPAAHNRGLTGSGVKVAVLDTGISTHPDLNIRGGASFVPGEPSTQDGNGHGTHVAGTIAALNNRIGVLGVAPSAELYAVKVLGAFGSGSVSSIAQGLEWAGANGMHVANLSLGSPSPSATLEQAVNSATSRGVLVVAASGNSGAGSISYPARYANAMAVGATDQNNNKASFSQYGAGLDIVAPGVNVQSTYPGSTYASLNGTSMAAPHVAGAAALVKQKNPSWSNVQIRNHLKNTATSLGSTNLYGSGLVNAEAATR

SEQ ID NO: 56104 - protein, 269 aa, Bacillus lentus
AQSVPWGIRRVQAPAAHNLGLTGSGVKVAVLDTGISTHPDLRIRGGASFVPGEPSTQDGDGHGTHVAGTIAALNNSIGVLGVAPSAELYAVKVLGASGSGSVSSIAQGLEWAGNNGMHVANLSLGSPSPSATLEQAVNSATSRGVLVVAASGNSGAGSISYPARYANAMAVGATDQNNNRASFSQYGAGLDIVAPGVNVQSTYPGSTYASLNGTSMATPHVAGAAALVKQKNPSWSNVQIRNHLKNTATSLGSTNLYGSGLVNAEAATQ

SEQ ID NO: 56105 - protein, 269 aa, Unidentified
AQSVPWGISRVQAPAAHNRKLTGSGVKVAVLDTGISTHPDLRIRGGASFVPGEPSTQDGNGHGTHVAGTIAALNNNIGVLGVAPSAELYAVKVLGASGSASVSSIAQGLEWAGNNGMHVANLSLGLPSPSATLEQAVNSATSRGVLVVAASGNSGAGSISYPARYANAMAVGATDQNNNRASFSQYGAGLDIVAPGVNVQSTYPGSTYASLNGTSMATPHVAGAAALVKQKNPSWSNVQIRNHLKNTATSLGSTNLYGSGLVNAEAATR

SEQ ID NO: 56106 - protein, 269 aa, Unidentified
AQSVPWGISRVQAPAAHNRGLTGSGVKVAVLDTGISTHPDLNIRGGASFVPGEPSTQDGNGHGTHVAGTIAALNNSIGVLGVAPSAELYAVKVLGASGGGAISSIAQGLEWAGNNGMHVANLSLGSPSPSATLEQAVNSATSRGVLVVAASGNSGAGSISYPARYANAMAVGATDQNNNRASFSQYGAGLDIVAPGVNVQSTYPGSTYASLNGTSMATPHVAGAAVLVKQKNPSWSNVRIRNHLKNTATSLGSTNLYGSGLVNAEAATR

SEQ ID NO: 56107 - protein, 269 aa, Synthetic construct
AQSVPWGISRVQAPAAHNRGLTGSGVKVAVLDTGISTHPDLNIRGGASFVPGEPSTQDGNGHGTHVAGTIAALDNSIGVLGVAPSAELYAVKVLGASGSGAISSIAQGLEWAGNNGMHVANLSFGSPSPSATLEQAVNSATSRGVLVVAASGNSGAGSISYPARYANAMAVGATDQNNNRASFSQYGAGLDIVAPGVNVQSTYPGSTYASLNGTSMATPHVAGAAALVKQKNPSWSNVQIRNHLKNTATSLGSTNLYGNGLVNAEAATR

SEQ ID NO: 56108 - protein, 269 aa, Unidentified
AQSVPWGISRVQAPAAHNRKLTGFGVKVAVLDTGISTHPDLNIRGGASFVPGEPSTQDGNGHGTHVAGTIAALNNSIGVLGVAPSAELYAVKVLGASGSGSVSSIAQGLEWAGNNRMHVANLSLGSPSPSATLEQAVNSATSRGVLVVAASGNSGAGSIDYPARYANAMAVGATDQNNNRASFSQYGAGLDIVAPGVNVQSTYPGSAYASLNGTSMATPHVAGAAALVKQKNPSWSNVQIRNHLKNTATSLGSTNLYGSGLVNAEAATR

SEQ ID NO: 56109 - protein, 269 aa, Unidentified
AQSVPWGISRVQAPAAHNRGLTGSGVKVAVLDTGISTHPDLNIRGGASFVPGEPSTQDGNGHGTHVAGTIAALDNSIGVLGVAPSAELYAVKVLGASGSGAISSIAQGLEWAGNNGMHVANLSLGSPSPSATLEQAVNSATSRGVLVVAASGNSGAGSISYPARYANAMAVGATDQNNNRASFSQYGAGLDIVAPGVNVESTYPGSTYASLNGTSMATPHVAGAAALVKQKNPSWSNVQIRNHLKNTATSLGSTDLYGSGLVNAEAATR

SEQ ID NO: 56110 - protein, 269 aa, Unidentified
AQSVPWGISRVQAPAAHNRGLTGSGVKVAVLDTGISTHPDLRIRGGASFVPGEPSTQDGNGHGTHVAGTIAALNNNIGVLGVAPSAELYAVKVLGASGDGSVSSIAQGLEWAGNNGMHVANLSLGLPSPSATLEQAVNSATSRGVLVVAASGNSGAGSISYPARYANAMAVGATDQNNNRASFSQYGAGLDIVAPGVNVQSTYPGSTYASLNGTSMATPHVAGAAALVKQKNPRWSNVQIRNHLKNTATSLGSTNLYGSGLVNAEAATR

SEQ ID NO: 56111 - protein, 269 aa, Unidentified
AQSVPWGISRVQAPAAHNRGLTGSGVKVAVLDTGISTHPDLNIRGGASFVPGEPSTQDGNGHGTHVAGTIAALNNSIGVLGVAPSAELYAVKVLPQTGSGALSSIAQGLEWAGNNGMHVANLSLGSPSPSATLEQAVNSATSRGVLVVAASGNSGAGSISYPARYANAMAVGATDQNNNRASFSQYGAGLDIVAPGVNVQSTYPGSTYASLNGTSMATPHVAGAAALVKQKNPSWSNVQIRNHLKNTATSLGSTNLYGSGLVNAEAATR

SEQ ID NO: 56112 - protein, 269 aa, Unidentified
AQSVPWGISRVQAPAAHNRRLTGSGVKVAVLDTGISTHPDLNIRGGASFVPGEPSTQDGNGHGTHVAGTIAALNNSIGVLGVAPSAELYAVKVLGASGGGSLSSIAQGLEWAGNNGMHVANLSLGSPSPSATLEQAVNSATSRGVLVVAASGNSGAGSISYPARYANAMAVGATDQNNNRASFSQYGAGLDIVAPGVNVQSTYPGSTYASLNGTSMATPHVAGAAVLVKQKNPSWSNVRIRNHLKNTATSLGSTNLYGSGLVNAEAATR

SEQ ID NO: 56113 - protein, 269 aa, Unidentified
AQSVPWGISRVQAPAAHNRKLTGSGVKVAVLDTGISTHPDLRIRGGASFVPGEPSTQDGEGHGTHVAGTIAALNNSIGVLGVAPSAELYAVKVLGASGSGSVSSIAQGLEWAGNNGMHVANLSLGLPSPSATLEQAVNSATSRGVLVVAASGNSGAGSISYPARYANAMAVGATDQNNNRASFSQYGAGLDIVAPGVNVQSTYPGSTYASENGTSMATPHVAGAAALVKQKNPSWSNVQIRNHLKNTATSLGSTNLYGSGLVNAEAATR

SEQ ID NO: 56114 - protein, 269 aa, Unidentified
AQSVPWGISRVQAPAAHNRGLTGSGVKVAVLDTGISTHPDLNIRGGASFVPGEPSTQDGNGHGTHVAGTIAALNNSIGVLGVAPSAELYAVKVLPATGGGALSSIAQGLEWAGNNGMHVANLSLGSPSPSATLEQAVNSATSRGVLVVAASGNSGAGSISYPARYANAMAVGATDQNNNRASFSQYGAGLDIVAPGVNVQSTYPGSTYASLNGTSMATPHVAGAAALVKQKNPSWSNVQIRNHLKNTATSLGSTNLYGSGLVNAEAATR

SEQ ID NO: 56115 - protein, 269 aa, Unidentified
AQSVPWGISRVQAPAAHNRGLTGSGVKVAVLDTGISTHPDLNIRGGASFVPGEPSTQDGNGHGTHVAGTIAALNNNIGVLGVAPSAELYAVKVLSASGNGSVSSIANGLEWAGNNGMHVANLSLGAPSPSATLEQAVNSATSRGVLVVAASGNSGAGSISYPARYANAMAVGATDQNNNRASFSQYGAGLDIVAPGVNVQSTYPGSTYASLNGTSMATPHVAGAAALVKQKNPSWSNVQIRNHLKNTATSLGSTNLYGSGLVNAEAATR

SEQ ID NO: 56116 - protein, 269 aa, Unidentified
AQSVPWGISRVQAPAAHRRGLTGSGVKVAVLDTGISTHPDLNIRGGASFVPGEPSTQDGNGHGTHVAGTIAALDNSIGVLGVAPSAELYAVKVLGASGSGAISSIAQGLEWAGNNGMHVANLSLGSPSPSATLEQAVNSATSRGVLVVAASGNSGAGSISYPARYANAMAVGATDQNNNRASFSQYGAGLDIVAPGVNVQSTYPGSTYASLNGTSMATPHVAGAAALVKQKNPSWSNVQIRNRLKNTATSLGSTNLYGSGLVNAEAATR

SEQ ID NO: 56117 - protein, 269 aa, Bacillus lentus
AQSVPWGISRVQATAAHKRGLTGSGVKVAVLDTGISTHPDLNIRGGASFVPGEPSTQDGNGHGTHVAGTIAALNNSIGVLGVAPSAELYAVKVLGASGSGSVSSIAQGLEWAGNNGMHVANLSLGSPSPSATLEQAVNSATSRGVLVVAASGNSGAGSISAPASYANAMAVGATDQNNNRASFSQYGPGLDIVAPGVNVQSTYPGSTYASLNGTSMATPHVAGAAALVKQKNPSWSNVQIRNHLKNTATSLGSTNLYGSGLVNAEAATR

SEQ ID NO: 56118 - protein, 269 aa, Unidentified
AQSVPWGISRVQAPASHNRGLAGSGVKVAVLDTGISTHPDLNIRGGASFVPGEPSTQDGNGHGTHVAGTIAALNNSIGVLGVAPSAELYAVKVLGASGAGSISSIAQGVEWAGNNGMHVANLSLGSPSPSATLEQAVNSATSRGVLVVAASGNSGAGSISYPARYANAMAVGATDQNNNRASFSQYGAGLDIVAPGVNVQSTYPGSTYASLNGTSMATPHVAGAAALVKQKNPSWSNVQIRNHLKNTATSLGSTNLYGSGLVNAEAATR

SEQ ID NO: 56119 - protein, 269 aa, Unidentified
AQVVPWGISRVQAPAAHNRGLTGSGVKVAVLDTGISTHEDLNIRGGASFVPGEPSTQDGNGHGTHVAGTIAALDNSIGVLGVAPSAELYAVKVLGASGSGSVSSIAQGLEWAGNNRMHVANLSLGSPSPSATLEQAVNSATSRGVLVVAASGNSGAGSISYPARYANAMAVGATDQNNNRASFSQYGAGLDIVAPGVNVYSTYPGSTYASLNGTSMATPHVAGAAALVKQKNPSWSNVQIRNHLKNTATSLGSTNLYGSGLVNAEAATR

SEQ ID NO: 56120 - protein, 269 aa, Unidentified
AQSVPWGISRVQAPAAHNRGLTGSGFKVAVLDTGISTHPDLNIRGGASFVPGEPSTQDGNGHGTHVAGTIAALNNNIGVLGVAPSAELYAVKVLGASGSGSVSSIAQGLEWAGNNGMHVANLSLGSPSPSATLEQAVNSATSRGVLVVAASGNSGACSISYPARYANAMAVGATDQNNKRASFSQYGAGLDIVAPGVNVQSTYPGSTYASLNGTSMATPHVAGAAALVKQKNPSWSFVQIRNHLKNTATSLGSTNLYGSGLVNAEAATR

SEQ ID NO: 56121 - protein, 269 aa, Bacillus lentus
AQSVPWGISRVQAPTAHNRGLTGSGVKVAVLDTGISTHPDLNIRGGASFVPGEPSTQDGNGHGTHAAGTIAALNNSIGVLGVAPSAELYAVKVLGAGGSGSVSSIAQGLEWAGNNGMHVANLSLGSPSPSATLEQAVNSATSRGVLVVAASGNSGAGSISYPARYANAMAVGATDQNNNRASFSQYGAGLDIVAPGVNVQSTYPGSTYASLNGTSMATPHVAGAAALVKQKNPSWSNVRIRNHLKNTATSLGSTDLYGSGLVNAEAATR

SEQ ID NO: 56122 - protein, 269 aa, Unidentified
AQSVPWGISRVQAPAAHNRGLTGRGVKVAVLDSGISTHPDLNIRGGASFVPGEPSTQDGNGHGTHVAGTIAALNNSIGVLGVAPSAELYAVKVLGASGSGSVSSIAQGLEWAGNNRMHVANLSLGIPSPSATLEQAVNSATSRGVLVVAASGNSGAGSIDYPARYANAMAVGATDQNNNRASFSQYGAGLDIVAPGVNVQSTYPGSTYASLNGTSMATPHVAGAAALVKQKNPSWSNVQIRNHLKNTATSLGSTNLYGSGLVNAEAATR

SEQ ID NO: 56123 - protein, 269 aa, Unidentified
AQSVPWGISRVQAPAAHNRGLTGSGVKVAVLDTGISTHPDLNIRGGASFVPGEPSTQDGNGHGTHVAGTIAALNNDIGVLGVAPSAELYAVKVLGASGSGSVSSIAQGLEWAGNNDMHVANLSLGSESPSATLEQAVNSATSRGVLVVAASGNSGADSISYPARYANAMAVGATDQNNNRASFSQYGAGLDIVAPGVNVQSTYPGSTYASLNGTSMATPHVAGAAALVKQKNPSWSNVRIRNHLKNTATSLGSTNLYGSGLVNAEAATR

SEQ ID NO: 56124 - protein, 269 aa, Bacillus subtilis
AQSVPWGISRVQAPAAHNRGLTGSGVKVAVLDTGISTHPDLNIRGGASFVPGEPSTQDGNGHGTHVAGTIAALNNSIGVLGVAPSAELYAVKVLGASGSGSVSSIAQGLEWAGNNGMHVANLSLGSPSPSATLEQAVNSATSRGVLVVAASGNSGAGSISFPARVANAMAVGATDQNNNRASFSQFGAGLDIVAPGVNVQSTFPGSTTASLNGTSMATPHVAGAAALVKQKNPSWSNVQIRNHLKNTATSLGSTNLYGSGLVNAEAATR

SEQ ID NO: 56125 - protein, 269 aa, Unidentified
AQSVPWGISRVQAPAAHNRGLTGSGVKVAVLDTGISTHPDLNIRGGASFVPGEPSTQDGEGHGTHVAGTIAALNNDIGVLGVAPSAELYAVKVLGASGSGSVSSIAQGLEWAGNNSMHVANLSLGSESPSATLEQAVNSATSRGVLVVAASGNSGAGSISYPARYANAMAVGATDQNNNRASFSQYGAGLDIVAPGVNVQSTYPGSTYASLNGTSMATPHVAGAAALVKQKNPSWSNVQIRNRLKNTATSLGSTNLYGSGLVNAEAATR

SEQ ID NO: 56126 - protein, 269 aa, Unidentified
AQSVPWGISRVQAPAAHNRGLAGSGVKVAVLDTGISTHPDLNIRGGASFVPGEPSTQDGNGHGTHVAGTIAALNNSIGVLGVAPSAELYAVKVLGASGGGAISSIAQGLEWAGNNGMHVANLSLGSPSPSATLEQAVNSATSRGVIVVAASGNSGAGSISYPARYANAMAVGATDQNNNRASFSQYGAGLDIVAPGVNVQSTYPGSTYASLNGTSMATPHVAGAAALVKQKNPSWSNVQIRNHLKNTATSLGSTNLYGSGLVNAEAATR

SEQ ID NO: 56127 - protein, 269 aa, Unidentified
AQSVPWGISRVQAPAAHNRGLTGRGVKVAVLDTGISTHPDLNIRGGASFVPGEPSTQDGNGHGTHVAGTIAALNNDIGVLGVAPSAELYAVKVLGASGSGSVSSIAQGLEWAGNNDMHVANLSLGSPSPSATLEQAVNSATSRGVLVVAASGNSGADSISYPARYANAMAVGATDQNNNRASFSQYGAGLDIVAPGVNVQSTYPGSTYASLNGTSMATPHVAGAAALVKQENPSWSNVQIRNHLKNTATSLGSTNLYGSGLVNAEAATR

SEQ ID NO: 56128 - protein, 269 aa, Unidentified
AQSVPWGISRVQAPAAHNRKLTGFGVKVAVLDTGISTHPDLNIRGGASFVPGEPSTQDGNGHGTHVAGTIAALNNNIGVLGVAPSAELYAVKVLGASGSGSVSSIAQGLEWAGNNGMHVANLSLGSPSPSATLEQAVNSATSRGVLVVAASGNSGAGSISYPARYANAMAVGATDQNNNRASFSQYGAGLDIVAPGVNVQSTYPGSAYASENGTSMATPHVAGAAALVKQKNPSWSNVQIRNHLKNTATSLGSTNLYGSGLVNAEAATR

SEQ ID NO: 56129 - protein, 269 aa, Unidentified
AQSVPWGISRVQAPAAHNRGLTGRGVKVAVLDTGISTHPDLNIRGGASFVPGEPSTQDGEGHGTHVAGTIAALNNGIGVLGVAPSAELYAVKVLGASGSGSVSSIAQGLEWAGNNSMHVANLSLGSPSPSATLEQAVNSATSRGVLVVAASGNSGADSISYPARYANAMAVGATDQNNNRASFSQYGAGLDIVAPGVNVQSTYPGSTYASLNGTSMATPHVAGAAALVKQKNPSWSNVQIRNHLKNTATSLGSTNLYGSGLVNAEAATR

SEQ ID NO: 56130 - protein, 269 aa, Unidentified
AQSVPWGISRVQAPAAHNRRLTGSGVKVAVLDTGISTHPDLNIRGGASFVPGEPSTQDGNGHGTHVAGTIAALNNSIGVLGVAPSAELYAVKVLGASGAGSVSSIAQGLEWAGNNGMHVANLSLGSPSPSATLEQAVNSATSRGVLVVAASGNSGAGSISYPARYANAMAVGATDQNNNRASFSQYGAGLDIVAPGVNVQGTYIGSAYASLNGTSMATPHVAGAAALVKQKNPSWSNVQIRNHLKNTATSLGSTNLYGSGLVNAEAATR

SEQ ID NO: 56131 - protein, 269 aa, Unidentified
AQSVPWGISRVQAPAAHNRGLTGSGVKVAVLDTGISTHPDLNIRGGASFVPGEPSTQDGNGHGTHVAGTIAALNNSIGVLGVAPSAELYAVKVLGASGSGSVSSIAQGLEWAGNNRMHVANLSLGSESPSATLEQAVNSATSRGVLVVAASGNSGADSISYPARYANAMAVGATDQNNNRADFSQYGAGLDIVAPGVNVQSTYPGSTYASLNGTSMATPHVAGAAALVKQKNPSWSNVQIRNRLKNTATSLGSTNLYGSGLVNAEAATR

SEQ ID NO: 56132 - protein, 269 aa, Unidentified
AQSVPWGISRVQAPAAHNRGLWGSGVKVAVLDTGISTHPDLRIRGGASFVPGEPSTQDGNGHGTHVAGTIAALNNSIGVLGVAPSAELYAVKVLGASGAGSVSSIAQGLEWAGNNGMHVANLSLGSPSPSATLEQAVNSATSRGVLVVAASGNSGAGSISYPARYANAMAVGATDQNNNRASFSQYGAGLDIVAPGVNVQSTYIQSTYASLNGTSMATPHVAGAAALVKQKNPSWSNVQIRNHLKNTATSLGSTNLYGSGLVNAEAATR

SEQ ID NO: 56133 - protein, 269 aa, Unidentified
AQSVPWGISRVQAPAAHNRRLTGRGVKVAVLDTGISTHPDLNIRGGASFVNGEPSTADGNGHGTHVAGTIAALNNSIGVLGVAPSAELYAVKVLGASGSGSVSSIAQGLEWAGNNGMHVANLSLGSPSPSATLEQAVNSATSRGVLVVAASGNSGAGSISYPARYANAMAVGATDQNNNRASFSQYGAGLDIVAPGVNVQSTYPGSTYAFLNGTSMATPHVAGAAALVKQKNPSWSNVQIRNHLKNTATSLGSTNLYGSGLVNAEAATR

SEQ ID NO: 56134 - protein, 269 aa, Unidentified
AQSVPWGISRVQAPAAHNRGLTGSGVKVAVLDTGISTHPDLNIRGGASFVPGEPSTQDGNGHGTHVAGTIAALNNNIGVLGVAPSAELYAVKVLGASGSGSVSSIAQGLEWAGNNRMHVANLSLGDPSPSATLEQAVNSATSRGVLVVAASGNSGAGSISYPARYANAMAVGATDQNNNRASFSQYGAGLDIVAPGVNVQSTYPGSAYASENGTSMATPHVAGAAALVKQKNPSWSNVQIRNHLKNTATSLGSTNLYGSGLVNAEAATR

SEQ ID NO: 56135 - protein, 269 aa, Unidentified
AQSVPWGISRVQAPAAHNRGLTGRGVKVAVLDTGISTHPDLRIRGGASFVPGEPSTQDGNGHGTHVAGTIAALNNSIGVLGVAPSAELYAVKVLGASGAGSVSSIAQGLEWAGNNGMHVANLSLGSPSPSATLEQAVNSATSRGVLVVAASGNSGAGSISYPARYANAMAVGATDQNNNRASFSQYGAGLDIVAPGVNVQSTYPGSTYFSLNGTSMATPHVAGAAALVKQKNPSWSNVQIRNHLKNTATSLGSTNLYGSGLVRAEAATR

SEQ ID NO: 56136 - protein, 269 aa, Unidentified
AQSVPWGISRVQAPAAHNRGLTGFGVKVAVLDTGISTHPDLNIRGGASFVPGEPSTQDGNGHGTHVAGTIAALNNSIGVLGVAPSAELYAVKVLGASGSGSVSSIAQGLEWAGNNRMHVANLSLGIESPSATLEQAVNSATSRGVLVVAASGNSGADSISYPARYANAMAVGATDQNNNRASFSQYGAGLDIVAPGVNVQSTYPGSTYASLNGTSMATPHVAGAAALVKQKNPSWSNVQIRNHLKNTATSLGSTNLYGSGLVNAEAATR

SEQ ID NO: 56137 - protein, 269 aa, Unidentified
AQSVPWGISRVQAPAAHNRGLTGRGVKVAVLDTGISTHPDLNIRGGASFVPGEPSTQDGNGHGTHVAGTIAALNNSIGVLGVAPSAELYAVKVLGASGSGSVSSIAQGLEWAGNNRMHVANLSLGSESPSATLEQAVNSATSRGVLVVAASGNSGAGSISYPARYANAMAVGATDQNNNRADFSQYGAGLDIVAPGVNVQSTYPGSTYASLNGTSMATPHVAGAAALVKQKNPSWSNVQIRNRLKNTATSLGSTNLYGSGLVNAEAATR

SEQ ID NO: 56138 - protein, 269 aa, Unidentified
AQSVPWGISRVQAPAAHNRGLTGSGVKVAVLDTGISTHPDLNIRGGASFVPGEPSTQDGNGHGTHVAGTIAALNNGIGVLGVAPSAELYAVKVLGASGSGSVSSIAQGLEWAGNNDMHVANLSLGSPSPSATLEQAVNSATSRGVLVVAASGNSGADSISYPARYANAMAVGATDQNNNRADFSQYGAGLDIVAPGVNVQSTYPGSTYASLNGTSMATPHVAGAAALVKQKNPSWSNVQIRNRLKNTATSLGSTNLYGSGLVNAEAATR

SEQ ID NO: 56139 - protein, 269 aa, Unidentified
AQSVPWGISRVQAPAAHNRRLTGRGVKVAVLDTGISTHPDLNIRGGASFVPGEPSTQDGNGHGTHVAGTIAALNNSIGVLGVAPSAELYAVKVLGASGGGSVSSIAQGLEWAGLNGMHVANLSLGAPSPSATLEQAVNSATSRGVLVVAASGNSGAGSISYPARYANAMAVGATDQNNNRASFSQYGAGLDIVAPGVNVQSTYPGSTYASLNGTSMATPHVAGAAALVKQKNPSWSNVQIRNHLKNTATSLGSTNLYGSGLVNAEAATR

SEQ ID NO: 56140 - protein, 269 aa, Unidentified
AQSVPWGISRVQAPAAHNRGLTGSGVKVAVLDTGISTHPDLNIRGGASFVPGEPSTQDGNGHGTHVAGTIAALNNDIGVLGVAPSAELYAVKVLGASGSGSVSSIAQGLEWAGNNDMHVANLSLGSESPSATLEQAVNSATSRGVLVVAASGNSGAGSISYPARYANAMAVGATDQNNNRASFSQYGAGLDIVAPGVNVQSTYPGSTYASLNGTSMATPHVAGAAALVKQKNPSWSNVQIRDRLKNTATSLGSTNLYGSGLVNAEAATR

SEQ ID NO: 56141 - protein, 269 aa, Unidentified
AQSVPWGISRVQAPAAHNRGLTGRRVKVAVLDTGISTHPDLNIRGGASFVPGEPSTQDGNGHGTHVAGTIAALNNSIGVLGVAPSAELYAVKVLGASGSGSVSSIAQGLEWAGNNGMHVANLSLGSPSPSATLEQAVNSATSRGVLVVAASGNSGAGSISYPARYANAMAVGATDQDNNRASFSQWGAGLDIVAPGVNVQSTYPGSTYASLNGTSMATPHVAGAAALVKQKNSSWSNVQIRNHLKNTATSLGSTNLYGSGLVNAEAATR

SEQ ID NO: 56142 - protein, 269 aa, Unidentified
AQSVPWGISRVQAPAAHNRRLTGSGVKVAVLDTGISTHPDLNIRGGASFVPGEPSTQDGNGHGTHVAGTIAALNNSIGVLGVAPSAELYAVKVLGASGAGGVSSIAQGLEWAGNNGMHVANLSLGSPSPSATLEQAVNSATSRGVLVVAASGNSGAGSISYPARYANAMAVGATDQNNNRASFSQYGAGLDIVAPGVNVQSTYPGSTYASLNGTSMATPHVAGAAVLVKQKNPSWSNVRIRNHLKNTATSLGSTNLYGSGLVNAEAATR

SEQ ID NO: 56143 - protein, 269 aa, Unidentified
AQSVPWGISRVQAPAAHNRGLTGSGVKVAVLDTGISTHPDLNIRGGASFVPGEPSTQDGNGHGTHVAGTIAALNNSIGVLGVAPSAELYAVKVLPQAGSGAISSIAQGLEWAGNNGMHVANLSLGSPSPSATLEQAVNSATSRGVLVVAASGNSGAGSISYPARYANAMAVGATDQNNNRASFSQYGAGLDIVAPGVNVQSTYPGSTYASLNGTSMATPHVAGAAALVKQKNPSWSNVQIRNHLKNTATSLGSTNLYGSGLVNAEAATR

SEQ ID NO: 56144 - protein, 269 aa, Unidentified
AQSVPWGISRVQAPAAHNRGLTGFGVKVAVLDTGISTHPDLNIRGGASFVPGEPSTQDGNGHGTHVAGTIAALNNSIGVLGVAPSAELYAVKVLGASGSGSVSSIAQGLEWAGNNRMHVANLSLGSESPSATLEQAVNSATSRGVLVVAASGNSGAGSISYPARYANAMAVGATDQNNNKASFSQYGAGLDIVAPGVNVQSTYPGSAYASLNGTSMATPHVAGAAALVKQKNPSWSNVQIRNHLKNTATSLGSTNLYGSGLVNAEAATR

SEQ ID NO: 56145 - protein, 269 aa, Unidentified
AQSVPWGISRVQAPAAHRRGLTGRGVKVAVLDTGISTHPDLDIRGGASFVPGEPSTQDGNGHGTHVAGTIAALNNSIGVLGVAPSAELYAVKVLGASGSGSVSSIAQGLEWAGNNGMHVANLSLGSPSPSATLEQAVNSATSRGVLVVAASGNSGAGSISYPARYANAMAVGATDQNNNRASFSQYGAGLDIVAPGVNVQSTYPGSTYASLNGTSMATPHVAGAAALVKQKNPSWRNVQIRNRLKNTATSLGSTNLYGSGLVNAEAATR

SEQ ID NO: 56146 - protein, 269 aa, Unidentified
AQSVPWGISRVQAPAAHNRGLTGSGVKVAVLDTGISTHPDLNIRGGASFVPGEPSTQDGNGHGTHVAGTIAALNNSIGVLGVAPSAELYAVKVLGASGAGSVSSIAQGLEWAGNNGMFVANLSLGSPSPSATLEQAVNSATSRGVLVVAASGNSGAGSISYPARYANAMAVGATDQNNNRASFSQWGAGLDIVAPGVNVQSTYPGSTYFSLNGTSMAAPHVAGAAALVKQKNPSWSNVQIRNHLKNTATSLGSTNLYGSGLVNAEAATR

SEQ ID NO: 56147 - protein, 269 aa, Unidentified
AQSVPWGISRVQAPAAHNRGLAGRGVKVAVLDSGISTHPDLNIRGGASFVPGEPSTQDGNGHGTHVAGTIAALNNSIGVLGVAPSAELYAVKVLGASGSGSVSSIAQGLEWAGNNGMHVANLSLGSPSPSATLEQAVNSATSRGVLVVAASGNSGAGSIDYPARYANAMAVGATDQNNNRADFSQYGAGLDIVAPGVNVQSTYPGSTYASLNGTSMATPHVAGAAALVKQKNPSWSNVQIRNHLKNTATSLGSTNLYGSGLVNAEAATR

SEQ ID NO: 56148 - protein, 269 aa, Unidentified
AQSVPWGISRVQAPAAHNRGLTGSGVKVAVLDTGISTHPDLNIRGGASFVPGEPSTQDGEGHGTHVAGTIAALNNSIGVLGVAPSAELYAVKVLGASGSGSVSSIAQGLEWAGNNGMHVANLSLGSPSPSATLEQAVNSATSRGVLVVAASGNSGEGSISYPARYANAMAVGATDQNNNHADFSQYGAGLDIVAPGVNVQSTYPGSTYASLNGTSMATPHVAGAAALVKQKNPSWSNVQIRNRLKNTATSLGSTNLYGSGLVNAEAATR

SEQ ID NO: 56149 - protein, 269 aa, Bacillus subtilis
AQSVPWGISRVQAPAAHNRGLTGSGVKVAVLDTGISTHPDSNIRGGASFVPGEPSTQDGNGHGTHVAGTIAALNNSIGVLGVAPSAELYAVKVLGASGSGLVESIAQGLEWAGNNGMHVANLSLGSPSPSATLEQAVNSATSRGVLVVAASGNSGAGSISYPARYANAMAVGATDQNNNRASFSQYGAGLDIVAPGVNVQNTYPGSRYASLNGTSMATPHVAGAAALVKQKNPSWSNVQIRNHLKNTATSLGSTNLYGSGLVNAEAATR

SEQ ID NO: 56150 - protein, 269 aa, Unidentified
AQSVPWGISRVQAPAAHNRGLLGFGVKVAVLDTGISTHPDLNIRGGASFVPGEPSTQDGNGHGTHVAGTIAALNNNIGVLGVAPSAELYAVKVLGASGSGSVSSIAQGLEWAGNNGMHVANLSLGSPSPSATLEQAVNSATSRGVLVVAASGNSGAGSISYPARYANAMAVGATDQNNNRASFSQYGAGLDIVAPGVNVQSTYPGSAYASLNGTSMATPHVAGAATLVKQKNPSWSNVQIRNHLKNTATSLGSTNLYGSGLVNAEAATR

SEQ ID NO: 56151 - protein, 269 aa, Unidentified
AQSVPWGISRVQAPAAHNRGLTGSGVKVAVLDTGISTHPDLNIRGGASFVPGEPSRQDGNGHGTHVAGTIAALNNSIGVLGVAPSAELYAVKVLGAFGSGSVSSIAQGLEWAGNNGMHFANLSLGSPSPSATLEQAVNSATSRGVLVVAASGNSGAGSISYPARYANAMAVGATDQNNIRASFSQWGAGLDIVAPGVNVQSTYPGSTYASLNGTSMATPHVAGAAALVKQKNPSWSNVQIRNHLKNTATSLGSTNLYGSGLVNAEAATR

SEQ ID NO: 56152 - protein, 269 aa, Unidentified
AQSVPWGISRVQAPAAHNRGLTGSGVKVAVLDTGISTHPDLNIRGGASFVPGEPSTQDGNGHGTHVAGTIAALNNDIGVLGVAPSAELYAVKVLGASGSGSVSSIAQGLEWAGNNSMHVANLSLGSPSPSATLEQAVNSATSRGVLVVAASGNSGADSISYPARYANAMAVGATDQNNNRASFSQYGAGLDIVAPGVNVQSTYPGSTYASLNGTSMATPHVAGAAALVKQKNPSWSNVQIRDRLKNTATSLGSTNLYGSGLVNAEAATR

SEQ ID NO: 56153 - protein, 269 aa, Unidentified
AQSVPWGISRVQAPAAHNRGLTGSGVKVAVLDTGISTHPDLNIRGGASFVPGEPSTQDGNGHGTHVAGTIAALNNSIGVLGVAPSAELYAVKVLGFTGGASISSIAQGLEWAGNNGMHVANLSLGSPSPSATLEQAVNSATSRGVLVVAASGNSGAGSISYPARYANAMAVGATDQNNNRASFSQYGAGLDIVAPGVNVQSTYPGSTYASLNGTSMATPHVAGAAALVKQKNPSWSNVQIRNHLKNTATSLGSTNLYGSGLVNAEAATR

SEQ ID NO: 56154 - protein, 269 aa, Unidentified
AQSVPWGISRVQAPAAHNRKLTGFGVKVAVLDTGISTHPDLNIRGGASFVPGEPSTQDGNGHGTHVAGTIAALNNSIGVLGVAPSAELYAVKVLGASGSGSVSSIAQGLEWAGNNGMHVANLSLGDPSPSATLEQAVNSATSRGVLVVAASGNSGAGSIDYPARYANAMAVGATDQNNNRASFSQYGAGLDIVAPGVNVQSTYPGSTYASLNGTSMATPHVAGAAALVKQKNPSWSNVQIRNHLKNTATSLGSTNLYGSGLVNAEAAAR

SEQ ID NO: 56155 - protein, 269 aa, Unidentified
AQSVPWGISRVQAPAAHNRGLTGSGVKVAVLDTGISTHPDLNIRGGASFVPGEPSTQDGNGHGTHVAGTIAALNNSIGVLGVAPSAELYAVKVLGASGSGSLSSIAQGLEWAGNNGMHVANLSLGSPSPSATLEQAVNSATSRGVLVVAASGNSGAGSISYPARYANAMAVGATDQNNNRASFSQYGAGLDIVAPGVNVQSTYPGSTYASENGTSMAAPHVAGAAALVKQKNPSWSNVQIRNRLKRTATSLGSTNLYGSGLVNAEAATR

SEQ ID NO: 56156 - protein, 269 aa, Unidentified
AQSVPWGISRVQAPAAHNRRLTGRGVKVAVLDTGISTHPDLNITGGASFVPGEPSTQDGNGHGTHVAGTIAALNNSIGVLGVAPSAELYAVKVLGASGSGSVSSIAQGLEWAGANGMHVANLSLGSPSPSATLEQAVNSATSRGVLVVAASGNSGAGSISYPARYANAMAVGATDQNNNRASFSQYGAGLDIVAPGVNVQSTYPGSTYASLNGTSMATPHVAGAAALVKQKNPSWSNVQIRNHLKNTATSLGSTNLYGSGLVRAEAATR

SEQ ID NO: 56157 - protein, 269 aa, Unidentified
AQSVPWGISRVQAPAAHNRGLTGRGVKVAVLDTGISTHPDLNIRGGASFVPGEPSTQDGNGHGTHVAGTIAALDNSIGVLGVAPSAELYAVKVLGASGSGAISSIAQGLEWAGNNGMHVANLSLGSPSPSATLEQAVNSATSRGVLVVAASGNSGAGSISYPARYANAMAVGATDQNNNRASFSQYGAGLDIVAPGVNVQSTYPGSTYASLNGTSMATPHVAGAAALVKQKNPSWSNVQIRNRLKNTATSLGSTNLYGSGLVNAEAATR

SEQ ID NO: 56158 - protein, 269 aa, Unidentified
AQSVPWGISRVQAPAAHNRGLTGSGVKVAVLDTGISTHPDLNIRGGASFVPGEPSTQDGNGHGTHVAGTIAALNNNIGVLGVAPSAELYAVKVLSASGGGSVSSIANGLEWAGNNGMHVANLSLGAPSPSATLEQAVNSATSRGVLVVAASGNSGAGSISYPARYANAMAVGATDQNNNRASFSQYGAGLDIVAPGVNVQSTYPGSTYASLNGTSMATPHVAGAAALVKQKNPSWSNVQIRNHLKNTATSLGSTNLYGSGLVNAEAATR

SEQ ID NO: 56159 - protein, 269 aa, Unidentified
AQSVPWGISRVQAPAAHNRGLTGSGVKVAVLDTGISTHPDLNIRGGASFVPGEPSTQDGNGHGTHVAGTIAALNNSIGVLGVAPSAELYAVKVLGATGAAALSSIAQGLEWAGNNGMHVANLSLGSPSPSATLEQAVNSATSRGVLVVAASGNSGAGSISYPARYANAMAVGATDQNNNRASFSQYGAGLDIVAPGVNVQSTYPGSTYASLNGTSMATPHVAGAAALVKQKNPSWSNVQIRNHLKNTATSLGSTNLYGSGLVNAEAATR

SEQ ID NO: 56160 - protein, 269 aa, Unidentified
AQSVPWGISRVQAPAAHNRGLTGRGVKVAVLDTGISTHPDLNIRGGASFVPGEPSTQDGEGHGTHVAGTIAALNNGIGVLGVAPSAELYAVKVLGASGSGSVSSIAQGLEWAGNNDMHVANLSLGSPSPSATLEQAVNSATSRGVLVVAASGNSGADSISYPARYANAMAVGATDQNNNRASFSQYGAGLDIVAPGVNVQSTYPGSTYASLNGTSMATPHVAGAAALVKQKNPSWSNVQIRNHLKNTATSLGSTNLYGSGLVNAEAATR

SEQ ID NO: 56161 - protein, 269 aa, Unidentified
AQSVPWGISRVQAPAAHRRGLTGRGVKVAVLDTGISTHPDLNIRGGASFVPGEPSTQDGNGHGTHVAGTIAALDNSIGVLGVAPSAELYAVKVLGASGSGAVSSIAQGLEWAGNNGMHVANLSLGSPSPSATLEQAVNSATSRGVLVVAASGNSGAGSISYPARYANAMAVGATDQNNNRASFSQYGAGLDIVAPGVNVQSTYPGSTYASLNGTSMATPHVAGAAALVKQKNPSWSNVQIRNRLKNTATSLGSTNLYGSGLVNAEAATR

SEQ ID NO: 56162 - protein, 269 aa, Unidentified
AQSVPWGISRVQAPAAHNRGLTGSGVKVAVLDTGISTHPDLNIRGGASFVPGEPSTQDGNGHGTHVAGTIAALNNGIGVLGVAPSAELYAVKVLGASGSGSVSSIAQGLEWAGNNSMHVANLSLGSPSPSATLEQAVNSATSRGVLVVAASGNSGAGSISYPARYANAMAVGATDQNNNRADFSQYGAGLDIVAPGVNVQSTYPGSTYASLNGTSMATPHVAGAAALVKQKNPSWSNVRIRNRLKNTATSLGSTNLYGSGLVNAEAATR

SEQ ID NO: 56163 - protein, 269 aa, Unidentified
AQSVPWGISRVQAPAAHNRGLTGRGVKVAVLDTGISTHPDLRIRGGASFVPGEPSTQDGNGHGTHVAGTIAALDNSIGVLGVAPSAELYAVKVLGASGSGSVSSIAQGLEWAGNNGMHVANLSLGSPSPSATLEQAVNSATSRGVLVVAASGNSGAGSISYPARYANAMAVGATDQNNNRASFSQYGAGLDIVAPGVNVQSTYPGSTYASLNGTSMATPHVAGEAALVKQKNPSWRNVQIRNHLKNTATSLGSTNLYGSGLVNAEAATR

SEQ ID NO: 56164 - protein, 269 aa, Unidentified
AQSVPWGISRVQAPAAHNRKLTGFGVKVAVLDTGISTHPDLNIRGGASFVPGEPSTQDGNGHGTHVAGTIAALNNSIGVLGVAPSAELYAVKVLGASGSGSVSSIAQGLEWAGNNRMHVANLSLGDPSPSATLEQAVNSATSRGVLVVAASGNSGAGSISYPARYANAMAVGATDQNNNRASFSQYGAGLDIVAPGVNVQSTYPGSAYASLNGTSMATPHVAGAAALVKQKNPSWSNVQIRNHLKNTATSLGSTNLYGSGLVNAEAATR

SEQ ID NO: 56165 - protein, 269 aa, Unidentified
AQSVPWGISRVQAPAAHNRGLTGRGVKVAVLDTGISTHPDLNIRGGASFVPGEPSTQDGNGHGTHVAGTIAALNNSIGVLGVAPSAELYAVKVLGASGSGSVSSIAQGLEWAGLNRMHVANLSLGSPSPSATLEQAVNSATSRGVLVVAASGNSGEGSISYPARYANAMAVGATDQNNNRADFSQYGAGLDIVAPGVNVQSTYPGSTYASLNGTSMATPHVAGAAALVKQKNPSWSNVQIRNHLKNTATSLGSTNLYGSGLVNAEAATR

SEQ ID NO: 56166 - protein, 269 aa, Unidentified
AQSVPWGISRVQAPAAHNRGLTGSGVKVAVLDTGISTHPDLNIRGGASFVPGEPSTQDGNGHGTHVAGTIAALNNSIGVLGVAPSAELYAVKVLGADGQGAISSIAQGLEWAGNNGMHVANLSLGSPSPSATLEQAVNSATSRGVLVVAASGNSGASSISYPARYANAMAVGATDQNNNRASFSQYGAGLDIVAPGVNVQSTYPGSTYASLNGTSMATPHVAGAAALVKQKNPSWSNVQIRNHLKNTATSLGSTNLYGSGLVNAEAATR

SEQ ID NO: 56167 - protein, 269 aa, Unidentified
AQSVPWGISRVQAPAAHNRGLTGRGVKVAVLDSGISTHPDLNIRGGASFVPGEPSTQDGNGHGTHVAGTIAALNNSIGVLGVAPSAELYAVKVLGASGSGSVSSIAQGLEWAGLNGMHVANLSLGSPSPSATLEQAVNSATSRGVLVVAASGNSGEGSIDYPARYANAMAVGATDQNNNRASFSQYGAGLDIVAPGVNVQSTYPGSTYASLNGTSMATPHVAGAAALVKQKNPSWSNVQIRNHLKNTATSLGSTNLYGSGLVNAEAATR

SEQ ID NO: 56168 - protein, 269 aa, Unidentified
AQSVPWGISRVQAPAAHNRGLTGRGVKVAVLDTGISTHPDLNIRGGASFVPGEPSTQDGEGHGTHVAGTIAALNNSIGVLGVAPSAELYAVKVLGASGSGSVSSIAQGLEWAGNNGMHVANLSLGIPSPSATLEQAVNSATSRGVLVVAASGNSGEGSISYPARYANAMAVGATDQNNNRADFSQYGAGLDIVAPGVNVQSTYPGSTYASLNGTSMATPHVAGAAALVKQKNPSWSNVQIRNHLKNTATSLGSTNLYGSGLVNAEAATR

SEQ ID NO: 56169 - protein, 269 aa, Unidentified
AQVVPWGISRVQAPAAHNRGLTGSGVKVAVLDTGISTHEDLNIRGGASFVPGEPSTQDGNGHGTHVAGTIAALDNSIGVLGVAPSAELYAVKVLGASGSGSVSSIAQGLEWAGNNRMHVANLSLGSPSPSATLEQAVNSATSRGVLVVAASGNSGAGSISYPARYANAMAVGATDQNNNRASFSQYGAGLDIVAPGVNVQSTYIGSTYASLNGTSMATPHVAGAAALVKQKNPSWSNVQIRNHLKNTATSLGSTNLYGSGLVNAEAATR

SEQ ID NO: 56170 - protein, 269 aa, Unidentified
AQSVPWGISRVQAPASHNRGLTGSGVKVAVLDTGISTHPDLNIRGGASFVPGEPSTQDGNGHGTHVAGTIAALNNSIGVLGVAPSAELYAVKVLGASGGGSISSIAQGLEWAGNNGMHVANLSLGNPSPSATLEQAVNSATSRGVIVVAASGNSGAGSISYPARYANAMAVGATDQNNNRASFSQYGAGLDIVAPGVNVQSTYPGSTYASLNGTSMATPHVAGAAALVKQKNPSWSNVQIRNHLKNTATSLGSTNLYGSGLVNAEAATR

SEQ ID NO: 56171 - protein, 269 aa, Unidentified
AQSVPWGISRVQAPAAHNRGLTGSGVKVAVLDTGISTHPDLNIRGGASFVPGEPSTQDGNGHGTHVAGTIAALNNSIGVLGVAPSAILYAVKVLGASGSGSVSSIAQGLEWAGNFGMHVANLSLGSPSPSATLEQAVNSATSRGVLVVAASGNSGAGSISYPARYANAMAVGATDQNNIRASFSQYGAGLDIVAPGVNVQSTYPGSTYFSLNGTSMATPHVAGAAACVKQKNPSWSNVQIRNHLKNTATSLGSTNLYGSGLVNAEAATR

SEQ ID NO: 56172 - protein, 269 aa, Unidentified
AQSVPWGISRVQAPAAHNRGLTGSGVKVAVLDTGISTHPDLNIRGGASFVPGEPSTQDGNGHGTHVAGTIAALNNNIGVLGVAPSAELYAVKVLSASGGGSVSSIAQGLEWAGNNGMHVANLSLGAPSPSATLEQAVNSATSRGVLVVAASGNSGAGSISYPARYANAMAVGATDQNNNRADFSQYGAGLDIVAPGVNVQSTYPGSTYASLNGTSMATPHVAGAAALVKQKNPSWSNVQIRNHLKNTATSLGSTNLYGSGLVNAEAATR

SEQ ID NO: 56173 - protein, 269 aa, Unidentified
AQSVPWGISRVQAPASHNRGLTGSGVKVAVLDTGISTHPDLNIRGGASFVPGEPSTQDGNGHGTHVAGTIAALNNSIGVLGVAPSAELYAVKVLGASGGGSISSIAQGVEWAGNNGMHVANLSLGNPSPSATLEQAVNSATSRGVLVVAASGNSGAGSISYPARYANAMAVGATDQNNNRASFSQYGAGLDIVAPGVNVQSTYPGSTYASLNGTSMATPHVAGAAALVKQKNPSWSNVQIRNHLKNTATSLGSTNLYGSGLVNAEAATR

SEQ ID NO: 56174 - protein, 269 aa, Unidentified
AQSVPWGISRVQAPASHNRGLTGSGVKVAVLDTGISTHPDLNIRGGASFVPGEPSTQDGEGHGTHVAGTIAALNNSIGVLGVAPSAELYAVKVLGASGSGSVSSIAQGLEWAGNNGMHVANLSLGNPSPSATLEQAVNSATSRGVLVVAASGNSGAGSISYPARYANAMAVGATDQNNNHASFSQYGAGLDIVAPGVNVQSTYPGSTYASLNGTSMATPHVAGAAALVKQKNPSWSNVQIRNHLKNTATSLGSTNLYGSGLVNAFAATR

SEQ ID NO: 56175 - protein, 269 aa, Unidentified
AQSVPWGISRVQAPAAHNRGLAGRGVKVAVLDTGISTHPDLNIRGGASFVPGEPSTQDGNGHGTHVAGTIAALNNSIGVLGVAPSAELYAVKVLGASGSGSVSSIAQGLEWAGLNGMHVANLSLGSPSPSATLEQAVNSATSRGVLVVAASGNSGEGSIDYPARYANAMAVGATDQNNNRASFSQYGAGLDIVAPGVNVQSTYPGSTYASLNGTSMATPHVAGAAALVKQKNPSWSNVQIRNHLKNTATSLGSTNLYGSGLVNAEAATR

SEQ ID NO: 56176 - protein, 269 aa, Unidentified
AQSVPWGISRVQAPAAHNRGLTGSGVKVAVLDTGISTHPDLNIRGGASFVPGEPSTQDGNGHGTHVAGTIAALNNSIGVLGVAPSAELYAVKVLSASGQGSVSSIANGLEWAGNNGMHVANLSLGAPSPSATLEQAVNSATSRGVLVVAASGNSGAGSISYPARYANAMAVGATDQNNNRASFSQYGAGLDIVAPGVNVQSTYPGSTYASQNGTSMATPHVAGAAALVKQKNPSWSNVQIRNHLKNTATSLGSTNLYGSGLVNAEAATR

SEQ ID NO: 56177 - protein, 269 aa, Unidentified
AQSVPWGISRVQAPAAHNRGLTGRGVKVAVLDTGISTHPDLNIRGGASFVPGEPSTQDGEGHGTHVAGTIAALNNSIGVLGVAPSAELYAVKVLGASGSGSVSSIAQGLEWAGNNGMHVANLSLGSPSPSATLEQAVNSATSRGVLVVAASGNSGEGSIDYPARYANAMAVGATDQNNNRADFSQYGAGLDIVAPGVNVQSTYPGSTYASLNGTSMATPHVAGAAALVKQKNPSWSNVQIRNHLKNTATSLGSTNLYGSGLVNAEAATR

SEQ ID NO: 56178 - protein, 269 aa, Unidentified
AQSVPWGISRVQAPASHNRGLAGSGVKVAVLDTGISTHPDLNIRGGASFVPGEPSTQDGNGHGTHVAGTIAALNNSIGVLGVAPSAELYAVKVLGASGGGGISSIAQGLEWAGNNGMHVANLSLGSPSPSATLEQAVNSATSRGVLVVAASGNSGAGSISYPARYANAMAVGATDQNNNRASFSQYGAGLDIVAPGVNVQSTYPGSTYASLNGTSMATPHVAGAAALVKQKNPSWSNVQIRNHLKNTATSLGSTNLYGSGLVNAEAATR

SEQ ID NO: 56179 - protein, 269 aa, Unidentified
AQSVPWGISRVQAPAAHNRRLWGSGVKVAVLDTGISTHPDLNITGGASFAPGEPSTQDGNGHGTHVAGTIAALNNSIGVLGVAPSAELYAVKVLGASGAGSVSSIAQGLEWAGNNGMHVANLSLGSPSPSATLEQAVNSATSRGVLVVAASGNSGAGSISYPARYANAMAVGATDQNNNRASFSQYGAGLDIVAPGVNVQSTYPGSTYASLNGTSMATPHVAGAAALVKQKNPSWSNVQIRNHLKNTATSLGSTNLYGSGLVNAEAATR

SEQ ID NO: 56180 - protein, 269 aa, Unidentified
AQSVPWGISRVQAPAAHNRGLAGSGVKVAVLDTGISTHPDLNIRGGASFVPGEPSTQDGEGHGTHVAGTIAALNNSIGVLGVAPSAELYAVKVLGASGSGSVSSIAQGLEWAGLNRMHVANLSLGSPSPSATLEQAVNSATSRGVLVVAASGNSGAGSISYPARYANAMAVGATDQNNNRADFSQYGAGLDIVAPGVNVQSTYPGSTYASLNGTSMATPHVAGAAALVKQKNPSWSNVQIRNHLKNTATSLGSTNLYGSGLVNAEAATR

SEQ ID NO: 56181 - protein, 269 aa, Unidentified
AQSVPWGISRVQAPAAHNRGLLGSGVKVAVLDTGISTHPDLNIRGGASFVPGEPSTQDGNGHGTHVAGTIAALNNNIGVLGVAPSAELYAVKVLGASGSGSVSSIAQGLEWAGNNRMHVANLSLGSPSPSATLEQAVNSATSRGVLVVAASGNSGAGSIDYPARYANAMAVGATDQNNNRASFSQYGAGLDIVAPGVNVQSTYPGSAYASLNGTSMATPHVAGAAALVKQKNPSWSNVQIRNHLKNTATSLGSTNLYGSGLVNAEAATR

SEQ ID NO: 56182 - protein, 269 aa, Unidentified
AQSVPWGISRVQAPAAHNRGLTGRGVKVAVLDTGISTHPDLNIRGGASFVPGEPSTQDGNGHGTHVAGTIAALNNDIGVLGVAPSAELYAVKVLGASGSGSVSSIAQGLEWAGNNSMHVANLSLGSESPSATLEQAVNSATSRGVLVVAASGNSGADSISYPARYANAMAVGATDQNNNRASFSQYGAGLDIVAPGVNVQSTYPGSTYASLNGTSMATPHVAGAAALVKQKNPSWSNVQIRNHLKNTATSLGSTNLYGSGLVNAEAATR

SEQ ID NO: 56183 - protein, 269 aa, Unidentified
AQSVPWGISRVQAPAAHNRKLTGSGVKVAVLDTGISTHPDLNIRGGASFVPGEPSTQDGEGHGTHVAGTIAALNNSIGVLGVAPSAELYAVKVLGASGGGSVSSIAQGLEWAGLNGMHVANLSLGSPSPSATLEQAVNSATSRGVLVVAASGNSGAGSISYPARYANAMAVGATDQNNNRADFSQYGAGLDIVAPGVNVQSTYPGSTYASLNGTSMATPHVAGAAALVKQKNPSWSNVQIRNHLKNTATSLGSTNLYGSGLVNAEAATR

SEQ ID NO: 56184 - protein, 269 aa, Bacillus lentus
AQSVPWGISRVQAPAAHNRGLTGSGVKVAVLDTGISTHPDLNIRGGASFVPGEPSTQDGNGHGTHVAGTIAALNNSIGVLGVAPSAELYAVKVLGTSGSGSVSSIAQGLEWAGNNGMHVANLSLGSPSPSATLELAVNSATSRGVLVVAASGNSGAGSISAPASYANALAVGATDQNNNRASFSQYGAGLDIVAPGVNVQSTYPGSTYASLNGTSMATPHVAGAAALVKQKNPSWSNVQIRNHLKNTATSLGSTNLYGSGLVNAEAATR

SEQ ID NO: 56185 - protein, 269 aa, Unidentified
AQSVPWGISRVQAPAAHNRRLTGSGVKVAVLDTGISTHPDLNIRGGASFVPGEPSTQDGEGHGTHVAGTIAALNNGIGVLGVAPSAELYAVKVLGASGSGSVSSIAQGLEWAGNNSMHVANLSLGSPSPSATLEQAVNSATSRGVLVVAASGNSGAGSISYPARYANAMAVGATDQNNNRADFSQYGAGLDIVAPGVNVQSTYPGSTYASLNGTSMATPHVAGAAALVKQKNPSWSNVQIRNHLKNTATSLGSTNLYGSGLVNAEAATR

SEQ ID NO: 56186 - protein, 269 aa, unidentified
AQTIPWGISRVQAPAAHNRGLTGSGVKVAVLDTGISTHPDLNIRGGASFVPGEPSTQDGNGHGTHVAGTIAALNNSIGVLGVAPSAELYAVKVLGASGSGSVSSIAQGLEWAGNNGMHVANLSLGSPSPSATLEQAVNSATSRGVLVVAASGNSGAGSISYPARYANAMAVGATDQNNNRASFSQYGAGLDIMAPGVNIQSTYPGSTYASDNGTSMATPHVAGAAALVKQKNPSWSNVQIRNHLKNTATSLGSTNLYGSGLVNAEAATR

SEQ ID NO: 56187 - protein, 269 aa, Unidentified
AQSVPWGISRVQAPAAHNRRLTGRGVKVAVLDTGISTHPDLNIRGGASFVPGEPSTQDGNGHGTHVAGTIAALNNSIGVLGVAPSAELYAVKVLGASGNGSVSSIAGGLEWAGLNGMHVANLSLGSPSPSATLEQAVNSATSRGVLVVAASGNSGAGSISYPARYANAMAVGATDQNNNRASFSQYGAGLDIVAPGVNVQSTYPGSTYASLNGTSMATPHVAGAAALVKQKNPSWSNVQIRNHLKNTATSLGSTNLYGSGLVNAEAATR

SEQ ID NO: 56188 - protein, 269 aa, Unidentified
AQSVPWGISRVQAPAAHNRGLTGSGVKVAVLDTGISTHPDINIRGGASFVPGEPSTQDGNGHGTHVAGTIAALDNSIGVLGVAPSAELYAVKVLGASGSGAISSIAQGLEWAGNNGMHVANLSLGSPSPSATLEQAVNSATSRGVLVVAASGNSGADSISYPARYANAMAVGATDQNNNRASFSQYGAGLDIVAPGVNVQSTYPGSTYASLNGTSMATPHVAGAAALVKQKNPSWSNVQIRNHLKNTATSLGSTNLYGSGLVNAEAATR

SEQ ID NO: 56189 - protein, 269 aa, Unidentified
AQSVPWGISRVQAPAAHNRGLTGSGVKVAVLDTGISTHPDLNIRGGASFVPGEPSTQDGEGHGTHVAGTIAALNNSIGVLGVAPSAELYAVKVLGASGSGSLSSIAQGLEWAGNNGMHVANLSLGSPSPSATLEQAVNSATSRGVLVVAASGNSGAGSISYPARYANAMAVGATDQNNNHADFSQYGAGLDIVAPGVNVQSTYPGSTYASLNGTSMATPHVAGAAALVKQKNPSWSNVQIRNHLKNTATSLGSTNLYGSGLVNAFAATR

SEQ ID NO: 56190 - protein, 269 aa, Unidentified
AQSVPWGIERVQAPAAHNRGLTGSGVKVAVLDTGISTHPDLNIRGGASFVPGEPSTQDENGHGTHVAGTIAALDNSIGVLGVAPSAELYAVKVLGASGSGSVSSIAQGLEWAGNNGMHVANLSLGSPSPSATLEQAVNSATSRGVLVVAASGNSGAGSISYPARYANAMAVGATDQNNNRASFSQYGAGLDIVAPGVNVLSTYPGSTYASLNGTSMATPHVAGAAALVKQKNPSWSNVQIRNHLKNTATSLGSTNEYGSGLVNAEAATR

SEQ ID NO: 56191 - protein, 269 aa, Unidentified
AQSVPWGISRVQAPAAHNRGLAGSGVKVAVLDSGISTHPDLNIRGGASFVPGEPSTQDGNGHGTHVAGTIAALNNSIGVLGVAPSAELYAVKVLGASGSGSVSSIAQGLEWAGLNRMHVANLSLGIPSPSATLEQAVNSATSRGVLVVAASGNSGAGSISYPARYANAMAVGATDQNNNRASFSQYGAGLDIVAPGVNVQSTYPGSTYASLNGTSMATPHVAGAAALVKQKNPSWSNVQIRNHLKNTATSLGSTNLYGSGLVNAEAATR

SEQ ID NO: 56192 - protein, 269 aa, Unidentified
AQSVPWGISRVQAPAAHNRGLAGRGVKVAVLDTGISTHPDLNIRGGASFVPGEPSTQDGNGHGTHVAGTIAALNNSIGVLGVAPSAELYAVKVLGASGSGSVSSIAQGLEWAGLNRMHVANLSLGSPSPSATLEQAVNSATSRGVLVVAASGNSGAGSIDYPARYANAMAVGATDQNNNRASFSQYGAGLDIVAPGVNVQSTYPGSTYASLNGTSMATPHVAGAAALVKQKNPSWSNVQIRNHLKNTATSLGSTNLYGSGLVNAEAATR

SEQ ID NO: 56193 - protein, 269 aa, Unidentified
AQSVPWGISRVQAPAAHNRGLTGSGVKVAVLDTGISTHPDLNIRGGASFVPGEPSTQDGNGHGTHVAGTIAALNNRIGVLGVAPSAELFAVKVLGASGSGSVSSIAQGLEWAGNNGMHFANLSLGSPSPSATLEQAVNSATSRGVLVVAASGNSGAGSISYPARYANAMAVGATDQNNNRASFSQYGAGLDIVAPGVNVQSTYPGSTYASLNGTSMATPHVAGAAACVKQKNPSWSNVQIRNHLKRTATSLGSTNLYGSGLVNAEAATR

SEQ ID NO: 56194 - protein, 269 aa, Unidentified
AQSVPWGISRVQAPAAHNRKLTGSGVKVAVLDTGISTHPDLNIRGGASFVPGEPSTQDGNGHGTHVAGTIAALNNSIGVLGVAPSAELYAVKVLGASGSGSVSSIAQGLEWAGLNGMHVANLSLGQPSPSATLEQAVNSATSRGVLVVAASGNSGAGSISYPARYANAMAVGATDQNNNRASFSQYGAGLDIVAPGVNVQSTHPGSAYASLNGTSMATPHVAGAAALVKQKNPSWSNVQIRNHLKNTATSLGSTNLYGSGLVNAEAATR

SEQ ID NO: 56195 - protein, 269 aa, Unidentified
AQSVPWGISRVQAPASHNRGLTGSGVKVAVLDTGISTHPDLNIRGGASFVPGEPSTQDGNGHGTHVAGTIAALNNSIGVLGVAPSAELYAVKVLGASGSGGISSIAQGLEWAGNNGMHVANLSLGNPSPSATLEQAVNSATSRGVIVVAASGNSGAGSISYPARYANAMAVGATDQNNNRASFSQYGAGLDIVAPGVNVQSTYPGSTYASLNGTSMATPHVAGAAALVKQKNPSWSNVQIRNHLKNTATSLGSTNLYGSGLVNAEAATR

SEQ ID NO: 56196 - protein, 269 aa, Bacillus sp.
AQSVPWGISRVQAPAAHNRGLTGSGVKVAVLDTGISTHPDLNIRGGASFVPGEPSTQDGNGHGTHVAGTIAALNNSIGVLGVAPNAELYAVKVLGASGSGSVSSIAQGLEWAGNNVMHVANLSLGNHIPSATLEQAVNSATSRGVLVVAASGNSGAGSISYPARYANAMAVGATDQNNNRASFSQYGAGLDIVAPGVNVQSTYPGSTYASLNGTSMATPHVAGAAALVKQKNPSWSNVQIRNHLKNTATSLGSTNLYGSGLVNAEAATR

SEQ ID NO: 56197 - protein, 269 aa, Unidentified
AQSVPWGISRVQAPAAHNRGLTGSGVKVAVLDSGISTHPDLNIRGGASFVPGEPSTQDGNGHGTHVAGTIAALNNSIGVLGVAPSAELYAVKVLGASGSGSVSSIAQGLEWAGLNRMHVANLSLGIPSPSATLEQAVNSATSRGVLVVAASGNSGAGSISYPARYANAMAVGATDQNNNRADFSQYGAGLDIVAPGVNVQSTYPGSTYASLNGTSMATPHVAGAAALVKQKNPSWSNVQIRNHLKNTATSLGSTNLYGSGLVNAEAATR

SEQ ID NO: 56198 - protein, 269 aa, Unidentified
AQSVPWGISRVQAPAAHNRRLTGSGVKVAVLDTGISTHPDLNIRGGASFVPGEPSTQDGNGHGTHVAGTIAALNNSIGVLGVAPSAELYAVKVLGASGAGAVSSIAQGLEWAGNNGMHVANLSLGSPSPSATLEQAVNSATSRGVLVVAASGNSGAGSISYPARYANAMAVGATDQNNNRASFSQYGAGLDIVAPGVNVQSTYPGSTYASLNGTSMATPHVAGAAVLVKQKNPSWRNVQIRNHLKNTATSLGSTNLYGSGLVNAEAATR

SEQ ID NO: 56199 - protein, 269 aa, Unidentified
AQSVPWGISRVQAPAAHNRRLTGSGVKVAVLDTGISTHPDLNIRGGASFVPGEPSTQDGNGHGTHVAGTIAALNNSIGVLGVAPSAELYAVKVLGASGSGSVSSIAQGLEWAGNNGMHVANLSLGSPSPSATLEQAVNSATSRGVLVVAASGNSGADSISYPARYANAMAVGATDQNNNRADFSQYGAGLDIVAPGVNVQSTYPGSTYASLNGTSMATPHVAGAAALVKQKNPSWSNVRIRDHLKNTATSLGSTNLYGSGLVNAEAATR

SEQ ID NO: 56200 - protein, 269 aa, Unidentified
AQSEPWGISRVQAPAAHNRGLTGSGVKVAVLDTGISTHPDLNIRGGASFVPGEPSTQDGNGHGTHVAGTIAALDNSIGVLGVAPSAELYAVKVLGASGSGAISSIAQGLEWAGNNGMHVANLSLGSPSPSATLEQAVNSATSRGVLVVAASGNSGEGSISYPARYANAMAVGATDQNNNRASFSQYGAGLDIVAPGVNVQSTYPGSTYASLNGTSMATPHVAGAAALVKQKNPSWSNVQIRNHLKNTATSLGSTNLYGSGLVNAEAATR

SEQ ID NO: 56201 - protein, 269 aa, Unidentified
AQSVPWGISRVQAPAAHNRGLTGRGVKVAVLDTGISTHPDLNIRGGASFVPGEPSTQDGNGHGTHVAGTIAALNNSIGVLGVAPSAELYAVKVLGASGSGSVSSIAQGLEWAGANGMHVANLSLGSPSPSATLEQAVNSATSRGVLVVAASGNSGAGSISYPARYANAMAVGATDQNNNKASFSQYGAGLDIVAPGVNVQSTYPGSTYASLNGTSMATPHVAGAAACVKNKNPSWSNVQIRNHLKNTATSLGSTNLYGSGLVNAEAATR

SEQ ID NO: 56202 - protein, 269 aa, Unidentified
AQSVPWGISRVQAPAAHNRGLTGSGVKVAVLDTGISTHPDLNIRGGASFVPGEPSTQDGEGHGTHVAGTIAALNNDIGVLGVAPSAELYAVKVLGASGSGSVSSIAQGLEWAGNNSMHVANLSLGSPSPSATLEQAVNSATSRGVLVVAASGNSGADSISYPARYANAMAVGATDQNNNRASFSQYGAGLDIVAPGVNVQSTYPGSTYASLNGTSMATPHVAGAAALVKQKNPSWSNVQIRNRLKNTATSLGSTNLYGSGLVNAEAATR

SEQ ID NO: 56203 - protein, 269 aa, Unidentified
AQSVPWGISRVQAPAAHNRGLTGSGVKVAVLDTGISTHPDLNIRGGASFVPGEPSTQDGNGHGTHVAGTIAALDNSIGVLGVAPSAELYAVKVLGASGSGAISSIAQGLEWAGNNGMHVANLSLGSPSPSATLERAVNSATSRGVLVVAASGNSGAGSISYPARYANAMAVGATDQNNNRASFSQYGAGLDIVAPGVNVQSTYPGSTYASLNGTSMATPHVAGAAALVKQKNPSWSNVQIRSHLKNTATSLGSTNLYGSGLVNAEAATR

SEQ ID NO: 56204 - protein, 269 aa, Unidentified
AQSVPWGISRVQAPAAHNRGLTGSGVKVAVLDTGISTHPDLNIRGGASFVPGEPSTQDGNGHGTHVAGTIAALNNNIGVLGVAPSAELYAVKVLGASGSGSVSSIAQGLEWAGNNRMNVANLSLGDPSPSATLEQAVNSATSRGVLVVAASGNSGAGSIDYPARYANAMAVGATDQNNNRASFSQYGAGLDIVAPGVNVQSTYPGSTYASLNGTSMATPHVAGAAALVKQKNPSWSNVQIRNHLKNTATSLGSTNLYGSGLVNAEAATR

SEQ ID NO: 56205 - protein, 269 aa, Unidentified
AQSVPWGISRVQAPAAHNRGLTGRGVKVAVLDTGISTHPDLNIRGGASFVPGEPSTQDGNGHGTHVAGTIAALNNSIGVLGVAPSAELYAVKVLGASGAGSVSSIAQGLEWAGNNGMFVANLSLGSPSPSATLEQAVNSATSRGVLVVAASGNSGAGSISYPARYANAMAVGATDQNNNRASFSQYGFGLDIVAPGVNVQSTYPGSTYASLNGTSMATPHVAGAAALVKQKNPSWSNVQIRNRLKNTATSLGSTNLYGSGLVNAEAATR

SEQ ID NO: 56206 - protein, 269 aa, Unidentified
AQSVPWGISRVQAPAAHNRGLTGSGVKVAVLDTGISTHPDLNIRGGASFVPGEPSTQDGNGHGTHVAGTIAALNNNIGVLGVAPSAELYAVKVLGASGSGSVSSIAQGLEWAGNNGMHVANLSLGLPSPSATLEQAVNSATSRGVLVVAASGNSGAGSISYPARYANAMAVGATDQNNNRASFSQYGAGLDIVAPGVNVQSTYPGSTYASENGTSMATPHVAGAAALVKQKNPRWSNVQIRNHLKNTATSLGSTNLYGSGLVNALAATR

SEQ ID NO: 56207 - protein, 269 aa, Unidentified
AQSVPWGISRVQAPAAHNRGLTGSGVKVAVLDTGISTHPDLNIRGGASFVPGEPSTQDGNGHGTHVAGTIAALDNSIGVLGVAPSAELYAVKVLGASGSGAISSIAQGLEWAGNNGMHVANLSLGSPSPSATLEQAVNSATSRGVLVVAASGNSGAGSISYPARYANAMAVGATDQNNNRASFSQYGAGLDIVAPGVNVQSTYPGSTYASLNGTSMATPHVAGAAALVKQKNPSWSNVQIRNHLKKTATSLGSTYLYGSGLVNAEAATR

SEQ ID NO: 56208 - protein, 269 aa, Unidentified
AQSVPWGISRVQAPAAHNRGLTGSGVKVAVLDTGISTHPDLNIRGGASFVPGEPSTQDGNGHGTHVAGTIAALNNGIGVLGVAPSAELYAVKVLGASGSGSVSSIAQGLEWAGNNSMHVANLSLGSESPSATLEQAVNSATSRGVLVVAASGNSGADSISYPARYANAMAVGATDQNNNRASFSQYGAGLDIVAPGVNVQSTYPGSTYASLNGTSMATPHVAGAAALVKQKNPSWSNVQIRNRLKNTATSLGSTNLYGSGLVNAEAATR

SEQ ID NO: 56209 - protein, 269 aa, Unidentified
AQSVPWGISRVQAPAAHNRRLWGSGVKVAVLDTGISTHPDLNITGGASFVPGEPSTQDGNGHGTHVAGTIAALNNSIGVLGVAPSAELYAVKVLGASGAGSVSSIAQGLEWAGNNGMHVANLSLGSPSPSATLEQAVNSATSRGVLVVAASGNSGAGSISYPARYANAMAVGATDQNNNRASFSQYGAGLDIVAPGVNVQSTYPGSAYASLNGTSMATPHVAGAAALVKQKNPSWSNVQIRNHLKNTATSLGSTNLYGSGLVNAEAATR

SEQ ID NO: 56210 - protein, 269 aa, Unidentified
AQVVPWGVSRVQAPAAHNRGLTGSGVKVAVLDTGISTHEDLNIRGGASFVPGEPSTQDGNGHGTHVAGTIAALDNSIGVLGVAPSAELYAVKVLGASGSGSVSSIAQGLEWAGNNRMHVANLSLGSPSPSATLEQAVNSATSRGVLVVAASGNSGAGSISYPARYANAMAVGATDQNNNRASFSQYGAGLDIVAPGVNVQSTYPGSTYASLNGTSMATPHVAGAAALVKQKNPSWSNVQIRNHLKNTATSLGSTNLYGSGLVNAEAATR

SEQ ID NO: 56211 - protein, 269 aa, Unidentified
AQSVPWGISRVQAPAAHNRGLAGSGVKVAVLDSGISTHPDLNIRGGASFVPGEPSTQDGEGHGTHVAGTIAALNNSIGVLGVAPSAELYAVKVLGASGSGSVSSIAQGLEWAGLNGMHVANLSLGSPSPSATLEQAVNSATSRGVLVVAASGNSGAGSISYPARYANAMAVGATDQNNNRADFSQYGAGLDIVAPGVNVQSTYPGSTYASLNGTSMATPHVAGAAALVKQKNPSWSNVQIRNHLKNTATSLGSTNLYGSGLVNAEAATR

SEQ ID NO: 56212 - protein, 269 aa, Unidentified
AQSVPWGISRVQAPAAHNRRLWGRGVKVAVLDTGISTHPDLNIRGGASFVPGEPSTQDGNGHGTHVAGTIAALNNSIGVLGVAPSAELYAVKVLGASGAGSVSSIAQGLEWAGNNGMHVANLSLGSPSPSATLEQAVNSATSRGVLVVAASGNSGAGSISYPARYANAMAVGATDQNNNRASFSQYGAGLDIVAPGVNVQSTYPGSAYASLNGTSMATPHVAGAAALVKQKNPSWSNVQIRNHLKNTATSLGSTNLYGSGLVNAEAATR

SEQ ID NO: 56213 - protein, 269 aa, Unidentified
AQSVPWGISRVQAPAAHNRGLTGGGVKVAVLDTGISTHPDLNIRGGASFVPGEPSTQDGNGHGTHVAGTIAALNNSIGVLGVAPSAELYAVKVLSASGGGSVSSIAQGLEWAGNNGMHVANLSLGAPSPSATLEQAVNSATSRGVLVVAASGNSGAGSISYPARYANAMAVGATDQNNNRASFSQYGAGLDIVAPGVNVQSTYPGSTYASQNGTSMATPHVAGAAALVKQKNPSWSNVQIRNHLKNTATSLGSTNLYGSGLVNAEAATR

SEQ ID NO: 56214 - protein, 269 aa, Unidentified
AQSVPWGISRVQAPAAHNRRLTGRGVKVAVLDTGISTHPDLRIRGGASFVPGEPSTQDGNGHGTHVAGTIAALNNRIGVLGVAPSAELYAVKVLGASGSGSVSSIAQGLEWAGNNGMHVANLSLGSPSPSATLEQAVNSATSRGVLVVAASGNSGAGSISYPARYANAMAVGATDQNNNRASFSQYGAGLDIVAPGVNVQSTYPGSTYASLNGTSMATPHVAGAAALVKQKNPSWRNVQIRNHLKNTATSLGSTNLYGSGLVNAEAATR

SEQ ID NO: 56215 - protein, 269 aa, Unidentified
AQSVPWGISRVQAPAAHNRGLTGRGVKVAVLDTGISTHPDLAIRGGASFVPGEPSTQDGNGHGTHVAGTIAALNNSIGVLGVAPSAELYAVKVLGASGSGSVTGIAQGLEWAGNNGMHVANLSLGSPSPSATLEQAVNSATSRGVLVVAASGNSGAGSISYPARYANAMAVGATDQNNNRASFSQYGAGLDLVAPGVNVQSTYPGSTYASLNGTSMATPHVAGAAALVKQKNPSWSNVQIRNHLKNTATSLGSTNLYGSGLVNAEAATR

SEQ ID NO: 56216 - protein, 269 aa, Unidentified
AQSVPWGISRVQAPAAHNRGLTGSGVKVAVLDTGISTHPDLNIRGGASFVPGEPSTQDGEGHGTHVAGTIAALNNSIGVLGVAPSAELYAVKVLGASGAGSVSSIAQGLEWAGNNGMHVANLSLGSPSPSATLEQAVNSATSRGVLVVAASGNSGEGSISYPARYANAMAVGATDQNNNRADFSQYGAGLDIVAPGVNVQSTYPGSTYASLNGTSMATPHVAGAAALVKQKNPSWSNVQIRNRLKNTATSLGSTNLYGSGLVNAEAATR

SEQ ID NO: 56217 - protein, 269 aa, Unidentified
AQSVPWGISRVQAPAAHNRGLTGGGVKVAVLDTGISTHPDLNIRGGASFVPGEPSTQDGNGHGTHVAGTIAALNNSIGVLGVAPSAELYAVKVLAASGQGSVSSIAGGLEWAGNNGMHVANLSLGSPSPSATLEQAVNSATSRGVLVVAASGNSGAGSISYPARYANAMAVGATDQNNNRASFSQYGAGLDIVAPGVNVQSTYPGSTYASQNGTSMATPHVAGAAALVKQKNPSWSNVQIRNHLKNTATSLGSTNLYGSGLVNAEAATR

SEQ ID NO: 56218 - protein, 269 aa, Unidentified
AQSVPWGISRVQAPAAHNRGLTGRGVKVAVLDTGISTHPDLNIRGGASFVPGEPSTQDGNGHGTHVAGTIAALNNGIGVLGVAPSAELYAVKVLGASGSGSVSSIAQGLEWAGNNDMHVANLSLGSESPSATLEQAVNSATSRGVLVVAASGNSGAGSISYPARYANAMAVGATDQNNNRASFSQYGAGLDIVAPGVNVQSTYPGSTYASLNGTSMATPHVAGAAALVKQKNPSWSNVQIRDHLKNTATSLGSTNLYGSGLVNAEAATR

SEQ ID NO: 56219 - protein, 269 aa, Unidentified
AQSVPWGISRVQAPAAHNRGLTGRGVKVAVLDSGISTHPDLNIRGGASFVPGEPSTQDGNGHGTHVAGTIAALNNSIGVLGVAPSAELYAVKVLGASGSGSVSSIAQGLEWAGLNGMHVANLSLGSPSPSATLEQAVNSATSRGVLVVAASGNSGAGSIDYPARYANAMAVGATDQNNNRADFSQYGAGLDIVAPGVNVQSTYPGSTYASLNGTSMATPHVAGAAALVKQKNPSWSNVQIRNHLKNTATSLGSTNLYGSGLVNAEAATR

SEQ ID NO: 56220 - protein, 269 aa, Unidentified
AQSVPWGISRVQAPAAHNRGLTGSGVKVAVLDTGISTHPDLNIRGGASFVPGEPSTQDGNGHGTHVAGTIAALNNSIGVLGVAPSAELYAVKVLGASGGGAISSIAQGLEWAGNNGMHVANLSLGSPSPSATLEQAVNSATSRGVLVVAASGNSGAGSISYPARYANAMAVGATDQNNNRASFSQYGAGLDIVAPGVNVQSTYPGSTYASLNGTSQATPHVAGAAYLVKQKNPSWSNVRIRNHLKNTATSLGSTNLYGSGLVNAEAATR

SEQ ID NO: 56221 - protein, 269 aa, Unidentified
AQSVPWGISRVQAPAAHNRKLTGSGVKVAVLDTGISTHPDLNIRGGASFVPGEPSTQDGNGHGTHVAGTIAALNNNIGVLGVAPSAELYAVKVLGASGDGSVSSIAQGLEWAGNNGMHVANLSLGLPSPSATLEQAVNSATSRGVLVVAASGNSGAGSISYPARYANAMAVGATDQNNNRASFSQYGAGLDIVAPGVNVQSTYPGSTYASLNGTSMATPHVAGAAALVKQKNPRWSNVQIRNHLKNTATSLGSTNLYGSGLVNAEAATR

SEQ ID NO: 56222 - protein, 269 aa, Unidentified
AQSVPWGISRVQAPAAHNRGLTGRGVKVAVLDTGISTHPDLNIRGGASFVPGEPSTQDGNGHGTHVAGTIAALNNDIGVLGVAPSAELYAVKVLGASGSGSVSSIAQGLEWAGNNDMHVANLSLGSPSPSATLEQAVNSATSRGVLVVAASGNSGADSISYPARYANAMAVGATDQNNNRASFSQYGAGLDIVAPGVNVQSTYPGSTYASLNGTSMATPHVAGAAALVKQKNPSWSNVQIRDHLKNTATSLGSTNLYGSGLVNAEAATR

SEQ ID NO: 56223 - protein, 269 aa, Unidentified
AQSVPWGISRVQAPAAHNRKLTGSGVKVAVLDTGISTHPDLNIRGGASFVPGEPSTQDGEGHGTHVAGTIAALNNNIGVLGVAPSAELYAVKVLGASGSGSVSSIAQGLEWAGLNGMHVANLSLGIPSPSATLEQAVNSATSRGVLVVAASGNSGAGSISYPARYANAMAVGATDQNNNRASFSQYGAGLDIVAPGVNVQSTYPGSTYASLNGTSMATPHVAGAAALVKQKNPSWSNVQIRNHLKNTATSLGSTNLYGSGLVNAEAATR

SEQ ID NO: 56224 - protein, 269 aa, Unidentified
AQSVPWGISRVQAPAAHRRGLTGRGVKVAVLDTGISTHPDLNIRGGASFVPGEPSTQDGNGHGTHVAGTIAALDNNIGVLGVAPSAELYAVKVLGASGSGSVSSIAQGLEWAGNNGMHVANLSLGSPSPSATLEQAVNSATSRGVLVVAASGNSGAGSISYPARYANAMAVGATDQNNNRASFSQYGAGLDIVAPGVNVQSTYPGSTYASLNGTSMATPHVAGAAALVKQKNPSWSNVQIRNRLKNTATSLGSTNLYGSGLVNAEAATR

SEQ ID NO: 56225 - protein, 269 aa, Unidentified
AQSVPWGISRVQAPAAHNRGLTGSGVKVAVLDTGISTHPDLNIRGGASFVPGEPSTQDGNGHGTHVAGTIAALDNSIGVLGVAPSAELYAVKVLGASGSGSVSSIAQGLEWAGNNGMHVANLSLGSPSPSATLEQAVNSATSRGVLVVAASGNSGAGSINYPARYANAMAVGATDQNNNRASFSQYGAGLDIVAPGVNVQSTWPGSAYASLNGTSMATPHVAGAAALVKQKNPSWSNVQIRNRLKNTATSLGSTNLYGSGLVNAEAATR

SEQ ID NO: 56226 - protein, 269 aa, Unidentified
AQSVPWGISRVQAPAAHNRKLTGSGVKVAVLDTGISTHPDLRIRGGASFVPGEPSTQDGEGHGTHVAGTIAALNNNIGVLGVAPSAELYAVKVLGASGDGSVSSIAQGLEWAGNNGMHVANLSLGSPSPSATLEQAVNSATSRGVLVVAASGNSGAGSISYPARYANAMAVGATDQNNNRASFSQYGAGLDIVAPGVNVQSTYPGSTYASLNGTSMATPHVAGAAALVKQKNPSWSNVQIRNHLKNTATSLGSTNLYGSGLVNAEAATR

SEQ ID NO: 56227 - protein, 269 aa, Unidentified
AQSVPWGISRVQAPAAHRRGLTGSGVKVAVLDTGISTHPDLNIRGGASFVPGEPSTQDGNGHGTHVAGTIAALDNSIGVLGVAPSAELYAVKVLGASGSGSISSIAQGLEWAGNNGMHVANLSLGSPSPSATLEQAVNSATSRGVLVVAASGNSGAGSISYPARYANAMAVGATDQNNNRASFSQYGAGLDIVAPGVNVQSTYPGSTYASLNGTSMATPHVAGAAALVKQKNPSWSNVRIRNRLKNTATSLGSTNLYGSGLVNAEAATR

SEQ ID NO: 56228 - protein, 269 aa, Unidentified
AQSVPWGISRVQAPAAHNRGLTGFGVKVAVLDTGISTHPDLNIRGGASFVPGEPSTQDGNGHGTHVAGTIAALNNSIGVLGVAPSAELYAVKVLGASGSGSVSSIAQGLEWAGNNRMHVANLSLGDPSPSATLEQAVNSATSRGVLVVAASGNSGAGSIDYPARYANAMAVGATDQNNNRASFSQYGAGLDIVAPGVNVQSTYPGSAYASLNGTSMATPHVAGAAALVKQKNPSWSNVQIRNHLKNTATSLGSTNLYGSGLVNAEAATR

SEQ ID NO: 56229 - protein, 269 aa, Unidentified
AQSVPWGISRVQAPAAHNRGLTGSGVKVAVLDTGISTHPDLNIRGGASFVPGEPSTQDGNGHGTHVAGTIAALNNSIGVLGVAPSAELYAVKVLGADGRGTISSIAQGLEWAGNNGMHVANLSLGSPSPSATLEQAVNSATSRGVLVVAASGNSGASSISYPARYANAMAVGATDQNNNRASFSQYGAGLDIVAPGVNVQSTYPGSTYASLNGTSMATPHVAGAAALVKQKNPSWSNVQIRNHLKNTATSLGSTNLYGSGLVNAEAATR

SEQ ID NO: 56230 - protein, 269 aa, Unidentified
AQSVPWGISRVQAPAAHNRGLTGGGVKVAVLDTGISTHPDLNIRGGASFVPGEPSTQDGNGHGTHVAGTIAALNNSIGVLGVAPSAELYAVKVLAASGNGSVSSIAGGLEWAGNNGMHVANLSLGSPSPSATLEQAVNSATSRGVLVVAASGNSGAGSISYPARYANAMAVGATDQNNNRADFSQYGAGLDIVAPGVNVQSTYPGSTYASLNGTSMATPHVAGAAALVKQKNPSWSNVQIRNHLKNTATSLGSTNLYGSGLVNAEAATR

SEQ ID NO: 56231 - protein, 269 aa, Unidentified
AQVVPWGISRVQAPAAHNRGLTGSGVKVAVLDTGISTHPDLNIRGGASFVPGEPSTQDGNGHGTHVAGTIAALDNSIGVLGVAPSAELYAVKVLGASGSGSVSSIAQGLEWAGNNRMHVANLSLGRPSPSATLEQAVNSATSRGVLVVAASGNSGAGSISYPARYANAMAVGATDQNNNRASFSQYGAGLDIVAPGVNVQSTYPPSTYASLNGTSMATPHVAGAAALVKQKNPSWSNVQIRNHLKNTATSLGSTNLYGSGLVNAEAATR

SEQ ID NO: 56232 - protein, 269 aa, Unidentified
AQSVPWGISRVQAPAAHNRRLTGSGVKVAVLDTGISTHPDLNIRGGASFVPGEPSTQDGNGHGTHVAGTIAALNNSIGVLGVAPSAELYAVKVLGASGSGGISSIAQGLEWAGNNGMHVANLSLGSPSPSATLEQAVNSATSRGVLVVAASGNSGAGSISYPARYANAMAVGATDQNNNRASFSQYGAGLDIVAPGVNVQSTYPGSTYASLNGTSMATPHVAGAAVLVKQKNPSWRNVQIRNHLKNTATSLGSTNLYGSGLVNAEAATR

SEQ ID NO: 56233 - protein, 269 aa, Unidentified
AQSVPWGISRVQAPAAHNRGLTGFGVKVAVLDTGISTHPDLNIRGGASFVPGEPSTQDGNGHGTHVAGTIAALNNSIGVLGVAPSAELYAVKVLGASGSGSVSSIAQGLEWAGNNRMHVANLSLGDPSPSATLEQAVNSATSRGVLVVAASGNSGAGSISYPARYANAMAVGATDQNNNRASFSQYGAGLDIVAPGVNVQSTYPGSAYASENGTSMATPHVAGAAALVKQKNPSWSNVQIRNHLKNTATSLGSTNLYGSGLVNAEAATR

SEQ ID NO: 56234 - protein, 269 aa, Unidentified
AQSVPWGISRVQAPAAHNRGLTGRGVKVAVLDSGISTHPDLNIRGGASFVPGEPSTQDGEGHGTHVAGTIAALNNSIGVLGVAPSAELYAVKVLGASGSGSVSSIAQGLEWAGNNGMHVANLSLGSPSPSATLEQAVNSATSRGVLVVAASGNSGAGSIDYPARYANAMAVGATDQNNNRADFSQYGAGLDIVAPGVNVQSTYPGSTYASLNGTSMATPHVAGAAALVKQKNPSWSNVQIRNHLKNTATSLGSTNLYGSGLVNAEAATR

SEQ ID NO: 56235 - protein, 269 aa, Unidentified
AQSVPWGISRVQAPAAHNRGLTGSGVKVAVLDTGISTHPDLNIRGGASFVPGEPSYQDGNGHGTHVAGTIAALNNSIGVLGVAPSAELYAVKVLGASGRGSVSSIAQGLEWAGQNGMHVANLSLGSPAPSATLEQAVNSATSRGVLVVAASGNSGAGSISYPARYANAMAVGATDQNNNRASFSQYGAGLDIVAPGVNVQSTYPGSTYASLNGTSMATPHVAGAAALVKQKNPSWSNVQIRDHLKNTATSLGSTNLYGSGLVNAEAATR

SEQ ID NO: 56236 - protein, 269 aa, Unidentified
AQSVPWGISRVQAPAAHNRGLTGSGVKVAVLDTGISTHPDLWIRGGASFVPGEPSTQDGNGHGTHVAGTIAALNNSIGVLGVAPSAELYAVKVLGASGSGSVTSIAQGLEWAGNNGMHVANLSLGSPSPSATLEQAVNSATSRGVLVVAASGNSGAGSISYPARYANAMAVGATDQNNNRASFSQYGAGLDIVAPGVNVQSTYPGSAYDFLNGTSMATPHVAGAAALVKQKNPSWSNVQIRNHLKNTATSLGSTNLYGSGLVNAEAATR

SEQ ID NO: 56237 - protein, 269 aa, Unidentified
AQSVPWGISRVQAPAAHNRGLAGRGVKVAVLDTGISTHPDLNIRGGASFVPGEPSTQDGNGHGTHVAGTIAALNNSIGVLGVAPSAELYAVKVLGASGSGSVSSIAQGLEWAGNNGMHVANLSLGIPSPSATLEQAVNSATSRGVLVVAASGNSGEGSISYPARYANAMAVGATDQNNNRADFSQYGAGLDIVAPGVNVQSTYPGSTYASLNGTSMATPHVAGAAALVKQKNPSWSNVQIRNHLKNTATSLGSTNLYGSGLVNAEAATR

SEQ ID NO: 56238 - protein, 269 aa, Unidentified
AQSVPWGISRVQAPAAHNRGLTGSGVKVAVLDTGISTHPDLNIRGGASFVPGEPSTQDGNGHGTHVAGTIAALDNSIGVLGVAPSAELYAVKVLGASGSGAISSIAQGLEWAGNNGMHVANLSLGSPSPSATLEQAVNSATSRGVLVVAASGNSGADSISYPARYANAMAVGATDQNNNRASFSQYGAGLDIVAPGVNVQSTYPGSTYASLNGTSMAAPHVAGAAALVKQKNPSWSNVQIRNHLKNTATSLGSTNLYGSGLVNAEAATR

SEQ ID NO: 56239 - protein, 269 aa, Unidentified
AQSVPWGISRVQAPAAHNRGLWGSGVKVAVLDTGISTHPDLNIRGGASFVPGEPSTQDGNGHGTHVAGTIAALNNSIGVLGVAPSAELYAVKVLGASGAGSVSSIAQGLEWAGNNGMHVANLSLGSPSPSATLEQAVNSATSRGVLVVAASGNSGAGSISYPARYANAMAVGATDQNNNRASFSQYGAGLDIVAPGVNVQSTYIQSAYASLNGTSMATPHVAGAAALVKQKNPSWSNVQIRNHLKNTATSLGSTNLYGSGLVNAEAATR

SEQ ID NO: 56240 - protein, 269 aa, Unidentified
AQSVPWGISRVQAPAAHNRRLTGSGVKVAVLDTGISTHPDLNIRGGASFVPGEPSTQDGQGHGTHVAGTIAALNNSIGVLGVAPSAILYAVKVLGASGSGSVSSIAQGLEWAGNNGMHVANLSLGSPSPSATLEQAVNSATSRGVLVVAASGNSGAGSISYPARYANAMAVGATDQNNNKASFSQYGAGLDIVAPGVNVQSTYPGMTYASLNGTSMATPHVAGAAALVKQKNPSWSNVQIRNHLKNTATSLGSTNLYGSGLVNAEAATR

SEQ ID NO: 56241 - protein, 269 aa, Unidentified
AQSVPWGISRVQAPAAHNRGLTGRGVKVAVLDTGISTHPDLNIRGGASFVPGEPSTQDGNGHGTHVAGTIAALNNSIGVLGVAPSAELYAVKVLGASGSGSVSSIAQGLEWAGNNRMHVANLSLGSPSPSATLEQAVNSATSRGVLVVAASGNSGADSISYPARYANAMAVGATDQNNNRADFSQYGAGLDIVAPGVNVQSTYPGSTYASLNGTSMATPHVAGAAALVKQKNPSWSNVQIRDHLKNTATSLGSTNLYGSGLVNAEAATR

SEQ ID NO: 56242 - protein, 269 aa, Unidentified
AQSVPWGISRVQAPAAHNRGLTGRGVKVAVLDTGISTHPDLNIRGGASFVPGEPSTQDGNGHGTHVAGTIAALNNGIGVLGVAPSAELYAVKVLGASGSGSVSSIAQGLEWAGNNDMHVANLSLGSESPSATLEQAVNSATSRGVLVVAASGNSGAGSISYPARYANAMAVGATDQNNNRADFSQYGAGLDIVAPGVNVQSTYPGSTYASLNGTSMATPHVAGAAALVKQKNPSWSNVQIRNHLKNTATSLGSTNLYGSGLVNAEAATR

SEQ ID NO: 56243 - protein, 269 aa, Unidentified
AQSVPWGISRVQAPAAHNRGLTGSGVKVAVLDTGISTHPDLNIRGGASFVPGEPSTQDGNGHGTHVAGTIAALNNSIGVLGVAPSAELYAVKVLPQTGAGSISSIAQGLEWAGNNGMHVANLSLGSPSPSATLEQAVNSATSRGVLVVAASGNSGAGSISYPARYANAMAVGATDQNNNRASFSQYGAGLDIVAPGVNVQSTYPGSTYASLNGTSMATPHVAGAAALVKQKNPSWSNVQIRNHLKNTATSLGSTNLYGSGLVNAEAATR

SEQ ID NO: 56244 - protein, 269 aa, Unidentified
AQSVPWGISRVQAPAAHNRGLTGSGVKVAVLDTGISTHPDLNIRGGASFVNGEPSTQDGNGHGTHVAGTIAALNNRIGVLGVAPSAELYAVKVLGASGSGNVSSIAQGLEWAGNNGMHVANLSLGSPSPSATLEQAVNSATSRGVIVVAASGNSGAGSISYPARYANAMAVGATDQNNNRASFSQYGAGLDIVAPGVNVQSTYPGSAYASLNGTSMATPHVAGAAALVKQKNPSWSNVQIRNHLKNTATSLGSTNLYGSGLVNAEAATR

SEQ ID NO: 56245 - protein, 269 aa, Unidentified
AQSVPWGISRVQAPAAHNRGLAGSGVKVAVLDSGISTHPDLNIRGGASFVPGEPSTQDGEGHGTHVAGTIAALNNSIGVLGVAPSAELYAVKVLGASGSGSVSSIAQGLEWAGNNRMHVANLSLGIPSPSATLEQAVNSATSRGVLVVAASGNSGAGSISYPARYANAMAVGATDQNNNRASFSQYGAGLDIVAPGVNVQSTYPGSTYASLNGTSMATPHVAGAAALVKQKNPSWSNVQIRNHLKNTATSLGSTNLYGSGLVNAEAATR

SEQ ID NO: 56246 - protein, 269 aa, Unidentified
AQSVPWGISRVQAPAAHNRGLRGSGVKVAVLDTGISTHPDLNIRGGASFVPGEPSTQDGNGHGTHVAGTIAALNNSIGVLGVAPSAELYAVKVLGASGGGNVSSIAQGLEWAGNNGMHVANLSLGSPSPSATLEQAVNSATSRGVLVVAASGNSGAGSISYPARYANAMAVGATDQNNNRASFSQYGAGLDIVAPGVNVQSTYPGSTYASLNGTSMATPHVAGAALLVKQKNPSWSNVRIRNHLKNTATSLGSTNLYGSGLVNAEAATR

SEQ ID NO: 56247 - protein, 269 aa, Unidentified
AQSVPWGISRVQAPAAHNRKLLGFGVKVAVLDTGISTHPDLNIRGGASFVPGEPSTQDGNGHGTHVAGTIAALNNSIGVLGVAPSAELYAVKVLGASGSGSVSSIAQGLEWAGNNGMHVANLSLGSPSPSATLEQAVNSATSRGVLVVAASGNSGAGSIDYPARYANAMAVGATDQNNNRASFSQYGAGLDIVAPGVNVQSTYPGSTYASENGTSMATPHVAGAAALVKQKNPSWSNVQIRNHLKNTATSLGSTNLYGSGLVNAEAATR

SEQ ID NO: 56248 - protein, 269 aa, Unidentified
AQSVPWGISRVQAPAAHNRRLTGRGVKVAVLDTGISTHPDLNIRGGASFVPGEPSTQDGNGHGTHVAGTIAALNNSIGVLGVAPSAELYAVKVLGASGAGSVSSIAQGLEWAGNNGMHVANLSLGSPSPSATLEQAVNSATSRGVLVVAASGNSGAGSISYPARYANAMAVGATDQNNNRASFSQYGAGLDIVAPGVNVQSTYIGSAYASLNGTSMATPHVAGAAALVKQKNPSWSNVQIRNHLKNTATSLGSTNLYGSGLVNAEAATR

SEQ ID NO: 56249 - protein, 269 aa, Unidentified
AQSVPWGISRVQAPAAHNRGLTASGVKVAVLDTGISTHPDLNIRGGASFVPGEPSTQDGNGHGTHVAGTIAALNNSIGVLGVAPSAELYAVKVLGASGSGNVSGIAQGLEWAGNNGMHVANLSLGSPSPSATLEQAVNSATSRGVLVVAASGNSGAGSISYPARYANAMAVGATDQNNNRASFSQYGAGLDIVAPGVNVQSTYPGMTYFSLNGTSMATPHVAGAAALVKQKNPSWSNVQIRNHLKNTATSLGSTNLYGSGLVNAEAATR

SEQ ID NO: 56250 - protein, 269 aa, Unidentified
AQSVPWGISRVQAPAAHNRGLTGFGVKVAVLDTGISTHPDLWIRGGASFVPGEPSTQDGNGHGTHVAGTIAALNNSIGVLGVAPSAELYAVKVLGASGSGSLSSIAQGLEWAGNNGMHFANLSLGSESPSATLEQAVNSATSRGVLVVAASGNSGAGSISYPARYANAMAVGATDQNNNRASFSQYGAGLDIVAPGVNVQSTYPGSTYASLNGTSMATPHVAGAAALVKQKNPSWSNVQIRNHLKNTATSLGSTNLYGSGLVNAEAATR

SEQ ID NO: 56251 - protein, 269 aa, Unidentified
AQSRPWGIARVQAPAAHNRGLRGSGVKVAVLDTGISTHPDLNIRGGASFVPGEPSTQDGNGHGTHVAGTIAALNNRIGVLGVAPSAELYAVKVLGASGSGSVSSIAQGLEWAGNNGMHVANLSLGSPSPSATLEQAVNSATSRGVLVVAASGNSGAGSISYPARYANAMAVGATDQNNNRASFSQYGAGLDIVAPGVNVQSTYPGFTYASLNGTSMATPHVAGAAALVKQKNPSWSNVQIRNHLKNTATSLGSTNLYGSGLVNAEAATR

SEQ ID NO: 56252 - protein, 269 aa, Unidentified
AQSVPWGISRVQAPAAHNRGLTGSGVKVAVLDTGISTHPDLNIRGGASFVPGEPSTQDGNGHGTHVAGTIAALNNSIGVLGVAPSAELYAVKVLPQTGSGAISSIAQGLEWAGNNGMHVANLSLGSPSPSATLEQAVNSATSRGVLVVAASGNSGAGSISYPARYANAMAVGATDQNNNRASFSQYGAGLDIVAPGVNVQSTYPGSTYASLNGTSMATPHVAGAAALVKQKNPSWSNVQIRNHLKNTATSLGSTNLYGSGLVNAEAATR

SEQ ID NO: 56253 - protein, 269 aa, Unidentified
AQSVPWGISRVQAPAAHNRGLTGRGVKVAVLDTGISTHPDLNIRGGASFVPGEPSTQDGNGHGTHVAGTIAALNNDIGVLGVAPSAELYAVKVLGASGSGSVSSIAQGLEWAGNNDMHVANLSLGSPSPSATLEQAVNSATSRGVLVVAASGNSGADSISYPARYANAMAVGATDQNNNRASFSQYGAGLDIVAPGVNVQSTYPGSTYASLNGTSMATPHVAGAAALVKQKNPSWSNVRIRNHLKNTATSLGSTNLYGSGLVNAEAATR

SEQ ID NO: 56254 - protein, 269 aa, Unidentified
AQSVPWGISRVQAPAAHNRGLAGRGVKVAVLDSGISTHPDLNIRGGASFVPGEPSTQDGNGHGTHVAGTIAALNNSIGVLGVAPSAELYAVKVLGASGSGSVSSIAQGLEWAGLNGMHVANLSLGSPSPSATLEQAVNSATSRGVLVVAASGNSGEGSISYPARYANAMAVGATDQNNNRASFSQYGAGLDIVAPGVNVQSTYPGSTYASLNGTSMATPHVAGAAALVKQKNPSWSNVQIRNHLKNTATSLGSTNLYGSGLVNAEAATR

SEQ ID NO: 56255 - protein, 269 aa, Unidentified
AQSVPWGISRVQAPAAHRRRLTGSGVKVAVLDTGISTHPDLDIRGGASFVPGEPSTQDGNGHGTHVAGTIAALNNSIGVLGVAPSAELYAVKVLGASGSGSVSSIAQGLEWAGNNGMHVANLSLGSPSPSATLEQAVNSATSRGVLVVAASGNSGAGSISYPARYANAMAVGATDQNNNRASFSQYGAGLDIVAPGVNVQSTYPGSTYASLNGTSMATPHVAGEAALVKQKNPSWRNVQIRNHLKNTATSLGSTNLYGSGLVNAEAATR

SEQ ID NO: 56256 - protein, 269 aa, Unidentified
AQSVPWGISRVQAPAAHNRRLTGRGVKVAVLDTGISTHPDLNIRGGASFVPGEPSTQDGNGHGTHVAGTIAALNNSIGVLGVAPSAELYAVKVLGASGSGSVSSIAQGLEWAGNNGMHVANLSLGSPSPSATLEQAVNSATSRGVLVVAASGNSGAGSISYPARYANAMAVGATDQNNNRADFSQYGAGLDIVAPGVNVQSTYPGSTYASLNGTSMATPHVAGAAALVKQKNPSWSNVRIRDHLKNTATSLGSTNLYGSGLVNAEAATR

SEQ ID NO: 56257 - protein, 269 aa, Unidentified
AQSVPWGISRVQAPAAHNRGLTGRGVKVAVLDTGISTHPDLNIRGGASFVPGEPSTQDGNGHGTHVAGTIAALNNDIGVLGVAPSAELYAVKVLGASGSGSVSSIAQGLEWAGNNSMHVANLSLGSESPSATLEQAVNSATSRGVLVVAASGNSGAGSISYPARYANAMAVGATDQNNNRASFSQYGAGLDIVAPGVNVQSTYPGSTYASLNGTSMATPHVAGAAALVKQKNPSWSNVQIRDHLKNTATSLGSTNLYGSGLVNAEAATR

SEQ ID NO: 56258 - protein, 269 aa, Unidentified
AQSVPWGISRVQAPAAHNRGLTGSGVKVAVLDTGISTHPDLNIRGGASFVPGEPSTQDGNGHGTHVAGTIAALNNSIGVLGVAPNAELYAVKVLGASGSGSVSSIAQGLEWAGNNVMHVANLSLGVMSPSATLEQAVNSATSRGVLVVAASGNSGAGSIDYPARYANAMAVGATDQNNNRASFSQYGAGLDIVAPGVNVQSTYPGSTYASLNGTSMATPHVAGAAALVKQKNPSWSNVQIRNHLKNTATSLGSTNLYGSGLVNAEAATR

SEQ ID NO: 56259 - protein, 269 aa, Unidentified
AQSVPWGISRVQAPAAHNRKLLGFGVKVAVLDTGISTHPDLNIRGGASFVPGEPSTQDGNGHGTHVAGTIAALNNSIGVLGVAPSAELYAVKVLGASGSGSVSSIAQGLEWAGNNRMHVANLSLGSPSPSATLEQAVNSATSRGVLVVAASGNSGAGSISYPARYANAMAVGATDQNNNRASFSQYGAGLDIVAPGVNVQSTYPGSTYASENGTSMATPHVAGAAALVKQKNPSWSNVQIRNHLKNTATSLGSTNLYGSGLVNAEAATR

SEQ ID NO: 56260 - protein, 269 aa, Unidentified
AQSVPWGISRVQAPAAHNRKLTGSGVKVAVLDTGISTHPDLNIRGGASFVPGEPSTQDGEGHGTHVAGTIAALNNSIGVLGVAPSAELYAVKVLAASGQGSVSSIAQGLEWAGLNGMHVANLSLGSPSPSATLEQAVNSATSRGVLVVAASGNSGAGSISYPARYANAMAVGATDQNNNRADFSQYGAGLDIVAPGVNVQSTYPGSTYASLNGTSSATPHVAGAAALVKQKNPSWSNVQIRNHLKNTATSLGSTNLYGSGLVNAEAATR

SEQ ID NO: 56261 - protein, 269 aa, Unidentified
AQSVPWGISRVQAPASHNRGLTGSGVKVAVLDTGISTHPDLNIRGGASFVPGEPSTQDGNGHGTHVAGTIAALNNSIGVLGVAPSAELYAVKVLGASGAGAVSSIAQGLEWAGNNGMHVANLSLGNPSPSATLEQAVNSATSRGVIVVAASGNSGAGSISYPARYANAMAVGATDQNNNRASFSQYGAGLDIVAPGVNVQSTYPGSTYASLNGTSMATPHVAGAAALVKQKNPSWSNVQIRNHLKNTATSLGSTNLYGSGLVNAEAATR

SEQ ID NO: 56262 - protein, 269 aa, Unidentified
AQSVPWGISRVQAPAAHNRRLTGSGVKVAVLDTGISTHPDLNIRGGASFVPGEPSTQDGNGHGTHVAGTIAALNNSIGVLGVAPSAELYAVKVLGASGSGAISSIAQGLEWAGNNGMHVANLSLGSPSPSATLEQAVNSATSRGVLVVAASGNSGAGSISYPARYANAMAVGATDQNNNRASFSQYGAGLDIVAPGVNVQSTYPGSTYASLNGTSMATPHVAGAAVLVKQKNPSWRNVQIRNHLKNTATSLGSTNLYGSGLVNAEAATR

SEQ ID NO: 56263 - protein, 269 aa, Unidentified
AQSVPWGISRVQAPAAHNRGLWGRGVKVAVLDTGISTHPDLNITGGASFVPGEPSTQDGNGHGTHVAGTIAALNNSIGVLGVAPSAELYAVKVLGASGAGSVSSIAQGLEWAGNNGMHVANLSLGSPSPSATLEQAVNSATSRGVLVVAASGNSGAGSISYPARYANAMAVGATDQNNNRASFSQYGAGLDIVAPGVNVQSTYPGSAYASLNGTSMATPHVAGAAALVKQKNPSWSNVQIRNHLKNTATSLGSTNLYGSGLVNAEAATR

SEQ ID NO: 56264 - protein, 269 aa, Unidentified
AQSVPWGISRVQAPAAHNRGLTGSGVKVAVLDTGISTHPDLNIRGGASFVPGEPSTQDGNGHGTHVAGTIAALNNSIGVLGVAPSAELYAVKVLGASGGGAISSIAQGVEWAGNNGMHVANLSLGNPSPSATLEQAVNSATSRGVLVVAASGNSGAGSISYPARYANAMAVGATDQNNNRASFSQYGAGLDIVAPGVNVQSTYPGSTYASLNGTSMATPHVAGAAALVKQKNPSWSNVQIRNHLKNTATSLGSTNLYGSGLVNAEAATR

SEQ ID NO: 56265 - protein, 269 aa, Unidentified
AQSVPWGISRVQAPAAHNRGLTGGGVKVAVLDTGISTHPDLNIRGGASFVPGEPSTQDGNGHGTHVAGTIAALNNSIGVLGVAPSAELYAVKVLGASGNGSVSSIANGLEWAGNNGMHVANLSLGAPSPSATLEQAVNSATSRGVLVVAASGNSGAGSISYPARYANAMAVGATDQNNNRADFSQYGAGLDIVAPGVNVQSTYPGSTYASLNGTSMATPHVAGAAALVKQKNPSWSNVQIRNHLKNTATSLGSTNLYGSGLVNAEAATR

SEQ ID NO: 56266 - protein, 269 aa, Unidentified
AQSVPWGISRVQAPAAHNRKLTGSGVKVAVLDTGISTHPDLNIRGGASFVPGEPSTQDGEGHGTHVAGTIAALNNNIGVLGVAPSAELYAVKVLGASGSGSVSSIAQGLEWAGLNGMHVANLSLGQPSPSATLEQAVNSATSRGVLVVAASGNSGAGSISYPARYANAMAVGATDQNNNRASFSQYGAGLDIVAPGVNVQSTYPGSTYASLNGTSMATPHVAGAAALVKQKNPSWSNVQIRNHLKNTATSLGSTNLYGSGLVNAEAATR

SEQ ID NO: 56267 - protein, 269 aa, Unidentified
AQSVPWGISRVQAPAAHNRGLTAFGVKVAVLDTGISTHPDLNIRGGASFVPGEPSTQDGNGHGTHVAGTIAALNNSIGVLGVAPSAELYAVKVLGASGSGSVSSIAQGLEWAGLNGMHVANLSLGSPSPSATLEQAVNSATSRGVLVVAASGNSGAGSISYPARYANAMAVGATDQNNNRADFSQYGAGLDIVAPGVNVQSTYPGSTYASLNGTSMATPHVAGAAALVKQKNGSWSNVQIRNHLKNTATSLGSTNLYGSGLVNAEAATR

SEQ ID NO: 56268 - protein, 269 aa, Unidentified
AQSVPWGISRVQAPAAHNRGLTGSGVKVAVLDTGISTHPDLRITGGASFVPGEPSTQDGNGHGTHVAGTIAALNNSIGVLGVAPSAELYAVKVLGASGAGSVSSIAQGLEWAGNNGMHVANLSLGSPSPSATLEQAVNSATSRGVLVVAASGNSGAGSISYPARYANAMAVGATDQNNNRASFSQYGAGLDIVAPGVNVQSTYIQSTYASLNGTSMATPHVAGAAALVKQKNPSWSNVQIRNHLKNTATSLGSTNLYGSGLVNAEAATR

SEQ ID NO: 56269 - protein, 269 aa, Unidentified
AQSVPWGISRVQAPAAHNRGLTGSGVKVAVLDTGISTHPDLNIRGGASFVPGEPSTQDGEGHGTHVAGTIAALNNGIGVLGVAPSAELYAVKVLGASGSGSVSSIAQGLEWAGNNSMHVANLSLGSPSPSATLEQAVNSATSRGVLVVAASGNSGADSISYPARYANAMAVGATDQNNNRASFSQYGAGLDIVAPGVNVQSTYPGSTYASLNGTSMATPHVAGAAALVKQKNPSWSNVQIRNRLKNTATSLGSTNLYGSGLVNAEAATR

SEQ ID NO: 56270 - protein, 269 aa, Unidentified
AQSVPWGISRVQAPAAHNRGLTGSGVKVAVLDTGISTHPDLNIRGGASFVPGEPSTQDGNGHGTHVAGTIAALNNDIGVLGVAPSAELYAVKVLGASGSGSVSSIAQGLEWAGNNDMHVANLSLGSESPSATLEQAVNSATSRGVLVVAASGNSGAGSISYPARYANAMAVGATDQNNNRADFSQYGAGLDIVAPGVNVQSTYPGSTYASLNGTSMATPHVAGAAALVKQKNPSWSNVQIRNRLKNTATSLGSTNLYGSGLVNAEAATR

SEQ ID NO: 56271 - protein, 269 aa, Unidentified
AQSVPWGISRVQAPAAHNRRLTGSGVKVAVLDTGISTHPDLNIRGGASFVPGEPSTQDGNGHGTHVAGTIAALNNSIGVLGVAPSAELYAVKVLGASGAGGVSSIAQGLEWAGNNGMHVANLSLGSPSPSATLEQAVNSATSRGVLVVAASGNSGAGSISYPARYANAMAVGATDQNNNRASFSQYGAGLDIVAPGVNVQSTYPGSTYASLNGTSMATPHVAGAAVLVKQKNPSWRNVQIRNHLKNTATSLGSTNLYGSGLVNAEAATR

SEQ ID NO: 56272 - protein, 269 aa, Unidentified
AQSVPWGISRVQAPAAHNRGLWGSGVKVAVLDTGISTHPDLNIRGGASFVPGEPSTQDGNGHGTHVAGTIAALNNRIGVLGVAPSAELYAVKVLGASGSGSVSSIAQGLEWAGNNGMHVANLSLGSPSPSATLEQAVNSATSRGVLVVAASGNSGAGSISWPARYANAMAVGATDQNNNRASFSQYGAGLDIVAPGVNVQSTYPGMTYASLNGTSMATPHVAGAAALVKQKNPSWSNVQIRNHLKNTATSLGSTNLYGSGLVNCEAATR

SEQ ID NO: 56273 - protein, 269 aa, Unidentified
AQSVPWGISRVQAPAAHNRRLTGRGVKVAVLDTGISTHPDLRITGGASFVPGEPSTQDGNGHGTHVAGTIAALNNSIGVLGVAPSAELYAVKVLGASGSGSVSSIAQGLEWAGNNGMHVANLSLGSPSPSATLEQAVNSATSRGVLVVAASGNSGAGSISYPARYANAMAVGATDQNNNRASFSQYGAGLDIVAPGVNVQSTYPGSTYASLNGTSMATPHVAGAAALVKQKNPSWSNVQIRNRLKNTATSLGSTNLYGSGLVNAEAATR

SEQ ID NO: 56274 - protein, 269 aa, Unidentified
AQSVPWGISRVQAPAAHNRGLAGRGVKVAVLDTGISTHPDLNIRGGASFVPGEPSTQDGEGHGTHVAGTIAALNNSIGVLGVAPSAELYAVKVLGASGSGSVSSIAQGLEWAGLNGMHVANLSLGSPSPSATLEQAVNSATSRGVLVVAASGNSGEGSISYPARYANAMAVGATDQNNNRASFSQYGAGLDIVAPGVNVQSTYPGSTYASLNGTSMATPHVAGAAALVKQKNPSWSNVQIRNHLKNTATSLGSTNLYGSGLVNAEAATR

SEQ ID NO: 56275 - protein, 269 aa, Bacillus lentus
AQAVPWGIRRVQAPAAHNLGLTGSGVKVAVLDTGISTHPDLNIRGGASFVPGEPSTQDGDGHGTHVAGTIAALNNSIGVLGVAPSAELYAVKVLGASGSGSVSSIAQGLEWAGNNGMHVANLSLGSPSPSATLEQAVNSATSRGVLVVAASGNSGAGSISYPARYANAMAVGATDQNNNRASFSQYGPGLDIVAPGVNVQSTYPGSTYASLNGTSMATPHVAGAAALVKQKNPSWSNVQIRNHLKNTATSLGSTNLYGSGLVNAEAATR

SEQ ID NO: 56276 - protein, 269 aa, Unidentified
AQSVPWGISRVQAPAAHNRRLTGSGVKVAVLDTGISTHPDLNIRGGASFVNGEPSTQDGQGHGTHVAGTIAALNNSIGVLGVAPSAELFAVKVLGASGSGSVSSIAQGLEWAGNNGMHVANLSLGSPSPSATLEQAVNSATSRGVLVVAASGNSGAGSISYPARYANAMAVGATDQNNNRASFSQWGAGLDIVAPGVNVQSTYPGSTYASLNGTSMATPHVAGAAALVKQKNPSWSNVQIRNHLKNTATSLGSTNLYGSGLVNAEAATR

SEQ ID NO: 56277 - protein, 269 aa, Unidentified
AQSVPWGISRVQAPAAHNRGLTGSGVKVAVLDTGISTHPDLNIRGGASFVPGEPSTQDGNGHGTHVAGTIAALNNDIGVLGVAPSAELYAVKVLGASGSGSVSSIAQGLEWAGNNSMHVANLSLGSESPSATLEQAVNSATSRGVLVVAASGNSGADSISYPARYANAMAVGATDQNNNRASFSQYGAGLDIVAPGVNVQSTYPGSTYASLNGTSMATPHVAGAAALVKQKNPSWSNVQIRNRLKNTATSLGSTNLYGSGLVNAEAATR

SEQ ID NO: 56278 - protein, 269 aa, Unidentified
AQSVPWGISRVQAPAAHNRRLTGSGVKVAVLDTGISTHPDLNIRGGASFVPGEPSTQDGNGHGTHVAGTIAALNNGIGVLGVAPSAELYAVKVLGASGSGSVSSIAQGLEWAGNNDMHVANLSLGSPSPSATLEQAVNSATSRGVLVVAASGNSGADSISYPARYANAMAVGATDQNNNRADFSQYGAGLDIVAPGVNVQSTYPGSTYASLNGTSMATPHVAGAAALVKQKNPSWSNVQIRNHLKNTATSLGSTNLYGSGLVNAEAATR

SEQ ID NO: 56279 - protein, 269 aa, Unidentified
AQSVPWGISRVQAPAAHNRGLTGSGVKVAVLDTGISTHPDLNIRGGASFVPGEPSTQDGEGHGTHVAGTIAALNNSIGVLGVAPSAELYAVKVLGASGSGSVSSIAQGLEWAGNNGMHVANLSLGSESPSATLEQAVNSATSRGVLVVAASGNSGADSISYPARYANAMAVGATDQNNNRADFSQYGAGLDIVAPGVNVQSTYPGSTYASLNGTSMATPHVAGAAALVKQKNPSWSNVRIRNHLKNTATSLGSTNLYGSGLVNAEAATR

SEQ ID NO: 56280 - protein, 269 aa, Unidentified
AQSVPWGISRVQAPAAHNRKLTGSGVKVAVLDTGISTHPDLNIRGGASFVPGEPSTQDGNGHGTHVAGTIAALNNNIGVLGVAPSAELYAVKVLGASGSGSVSSIAQGLEWAGNNGMHVANLSLGLPSPSATLEQAVNSATSRGVLVVAASGNSGAGSISYPARYANAMAVGATDQNNNRASFSQYGAGLDIVAPGVNVQSTYPGSTYASENGTSMATPHVAGAAALVKQKNPSWSNVQIRNHLKNTATSLGSTNLYGSGLVNALAATR

SEQ ID NO: 56281 - protein, 269 aa, Unidentified
AQSVPWGISRVQAPAAHNRKLTASGVKVAVLDTGISTHPDLNIRGGASFVPGEPSTQDGEGHGTHVAGTIAALNNSIGVLGVAPSAELYAVKVLGASGSGSVSSIAQGLEWAGLNGMHVANLSLGSPSPSATLEQAVNSATSRGVLVVAASGNSGAGSISYPARYANAMAVGATDQNNNRADFSQYGAGLDIVAPGVNVQSTYPGSTYASLNGTSMATPHVAGAAALVKQKNPSWSNVQIRNHLKNTATSLGSTNLYGSGLVNAEAATR

SEQ ID NO: 56282 - protein, 269 aa, Unidentified
AQSVPWGISRVQAPAAHNRGLTGSGVKVAVLDTGISTHPDLNIRGGASFVPGEPSTQDGNGHGTHVAGTIAALNNNIGVLGVAPSAELYAVKVLGASGNGSVSSIAGGLEWAGNNGMHVANLSLGSPSPSATLEQAVNSATSRGVLVVAASGNSGAGSISYPARYANAMAVGATDQNNNRADFSQYGAGLDIVAPGVNVQSTYPGSTYASQNGTSMATPHVAGAAALVKQKNPSWSNVQIRNHLKNTATSLGSTNLYGSGLVNAEAATR

SEQ ID NO: 56283 - protein, 269 aa, Unidentified
AQSVPWGISRVQAPAAHNRGLTGSGVKVAVLDTGISTHPDLNIRGGASFVPGEPSTQDGNGHGTHVAGTIAALNNSIGVLGVAPSAELYAVKVLGAFGSGSVTGIAQGLEWAGNNGMHVANLSLGSPSPSATLEQAVNSATSRGVLVVAASGNSGAGSISYPARYANAMAVGATDQNNNRASFSQYGFGLDIVAPGVNVQSTYPGMTYASLNGTSMATPHVAGAAALVKQKNPSWSNVQIRNHLKNTATSLGSTNLYGSGLVNAEAATR

SEQ ID NO: 56284 - protein, 269 aa, Unidentified
AQSVPWGISRVQAPAAHNRGLLGSGVKVAVLDTGISTHPDLNIRGGASFVPGEPSTQDGNGHGTHVAGTIAALNNNIGVLGVAPSAELYAVKVLGASGSGSVSSIAQGLEWAGNNGMHVANLSLGDPSPSATLEQAVNSATSRGVLVVAASGNSGAGSISYPARYANAMAVGATDQNNNRASFSQYGAGLDIVAPGVNVQSTYPGSAYASENGTSMATPHVAGAAALVKQKNPSWSNVQIRNHLKNTATSLGSTNLYGSGLVNAEAATR

SEQ ID NO: 56285 - protein, 269 aa, Unidentified
AQSVPWGISRVQAPAAHNRKLLGSGVKVAVLDTGISTHPDLNIRGGASFVPGEPSTQDGNGHGTHVAGTIAALNNSIGVLGVAPSAELYAVKVLGASGSGSVSSIAQGLEWAGNNGMHVANLSLGDPSPSATLEQAVNSATSRGVLVVAASGNSGAGSISYPARYANAMAVGATDQNNNRASFSQYGAGLDIVAPGVNVQSTYPGSAYASENGTSMATPHVAGAAALVKQKNPSWSNVQIRNHLKNTATSLGSTNLYGSGLVNAEAATR

SEQ ID NO: 56286 - protein, 269 aa, Unidentified
AQSVPWGISRVQAPAAHNRGLTGSGVKVAVLDTGISTHPDLNIRRGASFVPGEPSTQDGNGHGTHVAGTIAALNNSIGVLGVAPSAILFAVKVLGASGAGSVSSIAQGLEWAGANGMHVANLSLGSPSPSATLEQAVNSATSRGVLVVAASGNSGAGSISYPARYANAMAVGATDQNNNRASFSQYGAGLDIVAPGVNVQSTYPGSTYASLNGTSMATPHVAGAAALVKQKNPSWSNVQIRNHLKNTATSLGSTNLYGSGLVNAEAATR

SEQ ID NO: 56287 - protein, 269 aa, Unidentified
AQSVPWGISRVQAPAAHNRRLTGRGVKVAVLDTGISTHPDLNIRGGASFVPGEPSTQDGNGHGTHVAGTIAALNNDIGVLGVAPSAELYAVKVLGASGSGSVSSIAQGLEWAGNNDMHVANLSLGSPSPSATLEQAVNSATSRGVLVVAASGNSGADSISYPARYANAMAVGATDQNNNRASFSQYGAGLDIVAPGVNVQSTYPGSTYASLNGTSMATPHVAGAAALVKQKNPSWSNVQIRNHLKNTATSLGSTNLYGSGLVNAEAATR

SEQ ID NO: 56288 - protein, 269 aa, Unidentified
AQSVPWGISRVQAPAAHNRGLTGRGVKVAVLDTGISTHPDLNIRGGASFVPGEPSTQDGEGHGTHVAGTIAALNNSIGVLGVAPSAELYAVKVLGASGSGSVSSIAQGLEWAGLNGMHVANLSLGIPSPSATLEQAVNSATSRGVLVVAASGNSGEGSISYPARYANAMAVGATDQNNNRASFSQYGAGLDIVAPGVNVQSTYPGSTYASLNGTSMATPHVAGAAALVKQKNPSWSNVQIRNHLKNTATSLGSTNLYGSGLVNAEAATR

SEQ ID NO: 56289 - protein, 269 aa, Unidentified
AQSVPWGISRVQAPAAHNRGLAGSGVKVAVLDTGISTHPDLNIRGGASFVPGEPSTQDGNGHGTHVAGTIAALNNSIGVLGVAPSAELYAVKVLGASGSGGLSSIAQGLEWAGNNGMHVANLSLGNPSPSATLEQAVNSATSRGVIVVAASGNSGAGSISYPARYANAMAVGATDQNNNRASFSQYGAGLDIVAPGVNVQSTYPGSTYASLNGTSMATPHVAGAAALVKQKNPSWSNVQIRNHLKNTATSLGSTNLYGSGLVNAEAATR

SEQ ID NO: 56290 - protein, 269 aa, Unidentified
AQSVPWGISRVQAPAAHNRGLAGRGVKVAVLDSGISTHPDLNIRGGASFVPGEPSTQDGNGHGTHVAGTIAALNNSIGVLGVAPSAELYAVKVLGASGSGSVSSIAQGLEWAGNNGMHVANLSLGIPSPSATLEQAVNSATSRGVLVVAASGNSGAGSISYPARYANAMAVGATDQNNNRADFSQYGAGLDIVAPGVNVQSTYPGSTYASLNGTSMATPHVAGAAALVKQKNPSWSNVQIRNHLKNTATSLGSTNLYGSGLVNAEAATR

SEQ ID NO: 56291 - protein, 269 aa, Unidentified
AQSVPWGISRVQAPAAHNRGLTGSGVKVAVLDTGISTHPDLNIRGGASFVPGEPSTQDGEGHGTHVAGTIAALNNGIGVLGVAPSAELYAVKVLGASGSGSVSSIAQGLEWAGNNDMHVANLSLGSPSPSATLEQAVNSATSRGVLVVAASGNSGAGSISYPARYANAMAVGATDQNNNRADFSQYGAGLDIVAPGVNVQSTYPGSTYASLNGTSMATPHVAGAAALVKQKNPSWSNVRIRNHLKNTATSLGSTNLYGSGLVNAEAATR

SEQ ID NO: 56292 - protein, 269 aa, Unidentified
AQSVPWGISRVQAPAAHNRGLTGSGVKVAVLDTGISTHPDLNIRGGASFVPGEPSTQDGNGHGTHVAGTIAALNNSIGVLGVAPNAELYAVKVLGASGSGSLSSIAQGLEWAGNNVMHVANLSLGVMSPSATLEQAVNSATSRGVLVVAASGNSGAGSISYPARYANAMAVGATDQNNNRASFSQYGAGLDIVAPGVNVQSTYPGSTYASLNGTSMATPHVAGAAALVKQKNPSWSNVQIRNHLKNTATSLGSTNLYGSGLVNAEAATR

SEQ ID NO: 56293 - protein, 269 aa, Unidentified
AQSVPWGISRVQAPAAHNRRLTGSGVKVAVLDTGISTHPDLNIRGGASFVPGEPSTQDGEGHGTHVAGTIAALNNDIGVLGVAPSAELYAVKVLGASGSGSVSSIAQGLEWAGNNDMHVANLSLGSPSPSATLEQAVNSATSRGVLVVAASGNSGAGSISYPARYANAMAVGATDQNNNRASFSQYGAGLDIVAPGVNVQSTYPGSTYASLNGTSMATPHVAGAAALVKQKNPSWSNVRIRNHLKNTATSLGSTNLYGSGLVNAEAATR

SEQ ID NO: 56294 - protein, 269 aa, Unidentified
AQSVPWGISRVQAPAAHNRGLTGRGVKVAVLDTGISTHPDLNIRGGASFVPGEPSTQDGNGHGTHVAGTIAALDNNIGVLGVAPSAELYAVKVLGASGSGSVSSIAQGLEWAGNNRMHVANLSLGSPSPSATLEQAVNSATSRGVLVVAASGNSGAGSISYPARYANAMAVGATDQNNNRASFSQYGAGLDIVAPGVNVLSTYPGSTYASLNGTSMATPHVAGAAALVKQKNPSWSNVQIRNHLKNTATSLGSTNLYGSGLVNAEAATR

SEQ ID NO: 56295 - protein, 269 aa, Bacillus sp
AQSVPWGISRVQAPAAHNRGLTGSGVKVAVLDTGISTHPDLNIRGGASFVPGEPSTQDGNGHGTHVAGTIAALNNSIGVLGVAPNAELYAVKVLGASGSGSVSSIAQGLEWAGNNVMHVANLSLGNSSPSATLEQAVNSATSRGVLVVAASGNSGAGSIDYPARYANAMAVGATDQNNNRASFSQYGAGLDIVAPGVNVQSTYPGSTYASLNGTSMATPHVAGAAALVKQKNPSWSNVQIRNHLKNTATSLGSTNLYGSGLVNAEAATR

SEQ ID NO: 56296 - protein, 269 aa, Unidentified
AQSVPWGISRVQAPAAHNRGLTGSGVKVAVLDSGISTHPDLNIRGGASFVPGEPSTQDGNGHGTHVAGTIAALNNSIGVLGVAPSAELYAVKVLGASGSGSVSSIAQGLEWAGNNRMHVANLSLGIPSPSATLEQAVNSATSRGVLVVAASGNSGEGSIDYPARYANAMAVGATDQNNNRASFSQYGAGLDIVAPGVNVQSTYPGSTYASLNGTSMATPHVAGAAALVKQKNPSWSNVQIRNHLKNTATSLGSTNLYGSGLVNAEAATR

SEQ ID NO: 56297 - protein, 269 aa, Bacillus sp.
AQSVPWGISRVQAPAAHNRGLTGSGVKVAVLDTGISTHPDLNIRGGASFVPGEPSTQDGNGHGTHVAGTIAALNNSIGVLGVAPNAELYAVKVLGASGSGSVSSIAQGLEWAGNNVMHVANLSLGYGLPSATLEQAVNSATSRGVLVVAASGNSGAGSISYPARYANAMAVGATDQNNNRASFSQYGAGLDIVAPGVNVQSTYPGSTYASLNGTSMATPHVAGAAALVKQKNPSWSNVQIRNHLKNTATSLGSTNLYGSGLVNAEAATR

SEQ ID NO: 56298 - protein, 269 aa, Unidentified
AQSVPWGISRVQAPAAHNRGLAGSGVKVAVLDTGISTHPDLNIRGGASFVPGEPSTQDGNGHGTHVAGTIAALNNSIGVLGVAPSAELYAVKVLGASGSGSVSSIAQGLEWAGNNGMHVANLSLGSPSPSATLEQAVNSATSRGVLVVAASGNSGEGSISYPARYANAMAVGATDQNNNHASFSQYGAGLDIVAPGVNVQSTYPGSTYASLNGTSMATPHVAGAAALVKQKNPSWSNVQIRNRLKNTATSLGSTNLYGSGLVNAFAATR

SEQ ID NO: 56299 - protein, 269 aa, Unidentified
AQSVPWGISRVQAPAAHNRRLTGRGVKVAVLDTGISTHPDLNIRGGASFVPGEPSTQDGNGHGTHVAGTIAALNNGIGVLGVAPSAELYAVKVLGASGSGSVSSIAQGLEWAGNNDMHVANLSLGSPSPSATLEQAVNSATSRGVLVVAASGNSGADSISYPARYANAMAVGATDQNNNRASFSQYGAGLDIVAPGVNVQSTYPGSTYASLNGTSMATPHVAGAAALVKQKNPSWSNVQIRNHLKNTATSLGSTNLYGSGLVNAEAATR

SEQ ID NO: 56300 - protein, 269 aa, Unidentified
AQSVPWGISRVQAPAAHNRGLTGFGVKVAVLDTGISTHPDLNIRGGASFVPGEPSTQDGNGHGTHVAGTIAALNNSIGVLGVAPSAELYAVKVLGASGSGSVSSIAQGLEWAGNNRMHVANLSLGDPSPSATLEQAVNSATSRGVLVVAASGNSGAGSIDYPARYANAMAVGATDQNNNRASFSQYGAGLDIVAPGVNVQSTYPGSTYASLNGTSMATPHVAGAAALVKQKNPSWSNVQIRNHLKNTATSLGSTNLYGSGLVNAEVATR

SEQ ID NO: 56301 - protein, 269 aa, Unidentified
AQSVPWGISRVQAPAAHNRGLTGSGVKVAVLDTGISTHPDLNIRGGASFVPGEPSTQDGNGHGTHVAGTIAALNNSIGVLGVAPSAELYAVKVLGASGSGSLSSIAQGLEWAGNNGMHVANLSLGNPSPSATLEQAVNSATSRGVLVVAASGNSGAGSISYPARYANAMAVGATDQNNNHADFSQYGAGLDIVAPGVNVQSTYPGSTYASLNGTSMATPHVAGAAALVKQKNPSWSNVQIRNRLKNTATSLGSTNLYGSGLVNAEAATR

SEQ ID NO: 56302 - protein, 269 aa, Unidentified
AQSVPWGISRVQAPAAHNRGLTGSGVKVAVLDTGISTHPDLNIRGGASFVPGEPSTQDGNGHGTHVAGTIAALNNSIGVLGVAPSAELYAVKVLPQSGAGALSSIAQGLEWAGNNGMHVANLSLGSPSPSATLEQAVNSATSRGVLVVAASGNSGAGSISYPARYANAMAVGATDQNNNRASFSQYGAGLDIVAPGVNVQSTYPGSTYASLNGTSMATPHVAGAAALVKQKNPSWSNVQIRNHLKNTATSLGSTNLYGSGLVNAEAATR

SEQ ID NO: 56303 - protein, 269 aa, Unidentified
AQSVPWGISRVQAPAAHNRRLTGSGVKVAVLDTGISTHPDLNIRGGASFVPGEPSTQDGNGHGTHVAGTIAALNNGIGVLGVAPSAELYAVKVLGASGSGSVSSIAQGLEWAGNNSMHVANLSLGSPSPSATLEQAVNSATSRGVLVVAASGNSGADSISYPARYANAMAVGATDQNNNRASFSQYGAGLDIVAPGVNVQSTYPGSTYASLNGTSMATPHVAGAAALVKQKNPSWSNVQIRDHLKNTATSLGSTNLYGSGLVNAEAATR

SEQ ID NO: 56304 - protein, 269 aa, Unidentified
AQSVPWGISRVQAPAAHNRGLTGSGVKVAVLDTGISTHPDLNIRGGASFVPGEPSTQDGNGHGTHVAGTIAALNNNIGVLGVAPSAELYAVKVLAASGNGSVSSIANGLEWAGNNGMHVANLSLGSPSPSATLEQAVNSATSRGVLVVAASGNSGAGSISYPARYANAMAVGATDQNNNRADFSQYGAGLDIVAPGVNVQSTYPGSTYASLNGTSMATPHVAGAAALVKQKNPSWSNVQIRNHLKNTATSLGSTNLYGSGLVNAEAATR

SEQ ID NO: 56305 - protein, 269 aa, Unidentified
AQSVPWGISRVQAPAAHNRGLTGSGVKVAVLDTGISTHPDLNIRGGASFVPGEPSTQDGNGHGTHVAGTIAALNNSIGVLGVAPNAELYAVKVLGASGSGSVSSIAQGLEWAGNNVMHVANLSLGVMSPSATLEQAVNSATSRGVLVVAASGNSGAGSISYPARYANAMAVGATDQNNNRASFSQYGAGLDIVAPGVGVQSTYPGSTYASLNGTSMATPHVAGAAALVKQKNPSWSNVQIRNHLKNTATSLGSTNLYGSGLVNAEAATR

SEQ ID NO: 56306 - protein, 269 aa, Unidentified
AQSVPWGIGRVQAPAAHNRGLTGGGVKVAVLDTGISTHPDLNIRGGASFVPGEPSTQDGNGHGTHVAGTIAALNNSIGVLGVAPSAELYAVKVLAASGQGSVSSIAQGLEWAGNNGMHVANLSLGAPSPSATLEQAVNSATSRGVLVVAASGNSGAGSISYPARYANAMAVGATDQNNNRASFSQYGAGLDIVAPGVNVQSTYPGSTYASLNGTSMATPHVAGAAALVKQKNPSWSNVQIRNHLKNTATSLGSTNLYGSGLVNAEAATR

SEQ ID NO: 56307 - protein, 269 aa, Unidentified
AQSVPWGISRVQAPAAHNRGLLGFGVKVAVLDTGISTHPDLNIRGGASFVPGEPSTQDGNGHGTHVAGTIAALNNSIGVLGVAPSAELYAVKVLGASGSGSVSSIAQGLEWAGNNRMHVANLSLGSPSPSATLEQAVNSATSRGVLVVAASGNSGAGSIDYPARYANAMAVGATDQNNNRASFSQYGAGLDIVAPGVNVQSTYPGSTYASENGTSMATPHVAGAAALVKQKNPSWSNVQIRNHLKNTATSLGSTNLYGSGLVNAEAATR

SEQ ID NO: 56308 - protein, 269 aa, Unidentified
AQSVPWGISRVQAPAAHRRGLTGSGVKVAVLDTGISTHPDLRIRGGASFVPGEPSTQDGNGHGTHVAGTIAALDNSIGVLGVAPSAELYAVKVLGASGSGSVSSIAQGLEWAGNNGMHVANLSLGSPSPSATLEQAVNSATSRGVLVVAASGNSGAGSISYPARYANAMAVGATDQNNNRASFSQYGAGLDIVAPGVNVQSTYPGSTYASLNGTSMATPHVAGAAALVKQKNPSWRNVQIRNRLKNTATSLGSTNLYGSGLVNAEAATR

SEQ ID NO: 56309 - protein, 269 aa, Unidentified
AQSVPWGISRVQAPAAHNRGLTGSGVKVAVLDTGISTHPDLRIRGGASFVPGEPSTQDGNGHGTHVAGTIAALNNNIGVLGVAPSAELYAVKVLGASSSGSVSSIAQGLEWAGNNGMHVANLSLGLPSPSATLEQAVNSATSRGVLVVAASGNSGAGSISYPARYANAMAVGATDQNNNRASFSQYGAGLDIVAPGVNVQSTYPGSTYASLNGTSMATPHVAGAAALVKQKNPRWSNVQIRNHLKNTATSLGSTNLYGSGLVNAEAATR

SEQ ID NO: 56310 - protein, 269 aa, Unidentified
AQSVPWGISRVQAPAAHNRGLAGRGVKVAVLDTGISTHPDLNIRGGASFVPGEPSTQDGNGHGTHVAGTIAALNNSIGVLGVAPSAELYAVKVLGASGSGSVSSIAQGLEWAGLNRMHVANLSLGSPSPSATLEQAVNSATSRGVLVVAASGNSGEGSISYPARYANAMAVGATDQNNNRASFSQYGAGLDIVAPGVNVQSTYPGSTYASLNGTSMATPHVAGAAALVKQKNPSWSNVQIRNHLKNTATSLGSTNLYGSGLVNAEAATR

SEQ ID NO: 56311 - protein, 269 aa, Unidentified
AQSVPWGISRVQAPAAHNRGLTGSGVKVAVLDSGISTHPDLNIRGGASFVPGEPSTQDGNGHGTHVAGTIAALNNSIGVLGVAPSAELYAVKVLGASGSGSVSSIAQGLEWAGNNRMHVANLSLGSESPSATLEQAVNSATSRGVLVVAASGNSGAGSISYPARYANAMAVGATDQNNNRASFSQYGEGLDIVAPGVNVQSTYPGSTYASLNGTSMATPHVAGAAALVKQKNGSWSNVQIRNHLKNTATSLGSTNLYGSGLVNAEAATR

SEQ ID NO: 56312 - protein, 269 aa, Unidentified
AQSVPWGISRVQAPAAHNRRLTGGGVKVAVLDTGISTHPDLRIRGGASFVPGEPSTQDGNGHGTHVAGTIAALNNNIGVLGVAPSAELYAVKVLGASGQGSVSSIAQGLEWAGNNGMHVANLSLGSPSPSATLEQAVNSATSRGVLVVAASGNSGAGSISYPARYANAMAVGATDQNNNRASFSQYGAGLDIVAPGVNVQSTYPGSTYASLNGTSMATPHVAGAAALVKQKNPSWSNVQIRNHLKNTATSLGSTNLYGSGLVNAEAATR

SEQ ID NO: 56313 - protein, 269 aa, Unidentified
AQSVPWGISRVQAPAAHNRKLTGSGVKVAVLDTGISTHPDLNIRGGASFVPGEPSTQDGNGHGTHVAGTIAALNNNIGVLGVAPSAELYAVKVLGAGGSGSVSSIAQGLEWAGNNGMHVANLSLGLPSPSATLEQAVNSATSRGVLVVAASGNSGAGSISYPARYANAMAVGATDQNNNRASFSQYGAGLDIVAPGVNVQSTYPGSTYASENGTSMATPHVAGAAALVKQKNPSWSNVQIRNHLKNTATSLGSTNLYGSGLVNAEAATR

SEQ ID NO: 56314 - protein, 269 aa, Unidentified
AQSVPWGISRVQAPAAHRRGLTGRGVKVAVLDTGISTHPDLDIRGGASFVPGEPSTQDGNGHGTHVAGTIAALDNSIGVLGVAPSAELYAVKVLGASGSGSVSSIAQGLEWAGNNGMHVANLSLGSPSPSATLEQAVNSATSRGVLVVAASGNSGAGSISYPARYANAMAVGATDQNNNRASFSQYGAGLDIVAPGVNVQSTYPGSTYASLNGTSMATPHVAGAAALVKQKNPSWSNVQIRNRLKNTATSLGSTNLYGSGLVNAEAATR

SEQ ID NO: 56315 - protein, 269 aa, Unidentified
AQSVPWGISRVQAPAAHNRGLTGSGVKVAVLDTGISTHPDLNIRGGASFVPGEPSTQDGEGHGTHVAGTIAALNNGIGVLGVAPSAELYAVKVLGASGSGSVSSIAQGLEWAGNNSMHVANLSLGSESPSATLEQAVNSATSRGVLVVAASGNSGAGSISYPARYANAMAVGATDQNNNRASFSQYGAGLDIVAPGVNVQSTYPGSTYASLNGTSMATPHVAGAAALVKQKNPSWSNVQIRDHLKNTATSLGSTNLYGSGLVNAEAATR

SEQ ID NO: 56316 - protein, 269 aa, Unidentified
AQSVPWGISRVQAPAAHNRGLTGRGVKVAVLDTGISTHPDLNIRGGASFVPGEPSTQDGNGHGTHVAGTIAALNNDIGVLGVAPSAELYAVKVLGASGSGSVSSIAQGLEWAGNNDMHVANLSLGSESPSATLEQAVNSATSRGVLVVAASGNSGAGSISYPARYANAMAVGATDQNNNRASFSQYGAGLDIVAPGVNVQSTYPGSTYASLNGTSMATPHVAGAAALVKQKNPSWSNVQIRNRLKNTATSLGSTNLYGSGLVNAEAATR

SEQ ID NO: 56317 - protein, 269 aa, Unidentified
AQSVPWGISRVQAPAAHNRGLTGSGVKVAVLDTGISTHPDLNIRGGASFVPGEPSTQDGNGHGTHVAGTIAALDNSIGVLGVAPSAELYAVKVLGASGSGAISSIAQGLEWAGNNGMHVANLSLGSPSPSATLEQAVNSATSRGVLVVAASGNSGAGSISYPARYANAMAVGATDRNNNRASFSQYGAGLDVVAPGVNVQSTYPGSTYASLNGTSMATPHVAGAAALVKQKNPSWSNVQIRNHLKNTATSLGSTNLYGSGLVNAEAATR

SEQ ID NO: 56318 - protein, 269 aa, Unidentified
AQSVPWGISRVQAPAAHNRRLTGSGVKVAVLDTGISTHPDLNIRGGASFVPGEPSTQDGNGHGTHVAGTIAALNNSIGVLGVAPSAELYAVKVLGASGSGSVSSIAQGLEWAGNNRMHVANLSLGSESPSATLEQAVNSATSRGVLVVAASGNSGAGSISYPARYANAMAVGATDQNNNRADFSQYGAGLDIVAPGVNVQSTYPGSTYASLNGTSMATPHVAGAAALVKQKNPSWSNVQIRDHLKNTATSLGSTNLYGSGLVNAEAATR

SEQ ID NO: 56319 - protein, 269 aa, Unidentified
AQSVPWGISRVQAPAAHNRGLTGSGVKVAVLDTGISTHPDLNIRGGASFVPGEPSTQDGEGHGTHVAGTIAALNNSIGVLGVAPSAELYAVKVLGASGSGSVSSIAQGLEWAGLNRMHVANLSLGSPSPSATLEQAVNSATSRGVLVVAASGNSGAGSIDYPARYANAMAVGATDQNNNRADFSQYGAGLDIVAPGVNVQSTYPGSTYASLNGTSMATPHVAGAAALVKQKNPSWSNVQIRNHLKNTATSLGSTNLYGSGLVNAEAATR

SEQ ID NO: 56320 - protein, 269 aa, Unidentified
AQSVPWGISRVQAPAAHNRGLTGGGVKVAVLDTGISTHPDLNIRGGASFVPGEPSTQDGNGHGTHVAGTIAALNNNIGVLGVAPSAELYAVKVLAASGNGSVSSIAQGLEWAGNNGMHVANLSLGAPSPSATLEQAVNSATSRGVLVVAASGNSGAGSISYPARYANAMAVGATDQNNNRASFSQYGAGLDIVAPGVNVQSTYPGSTYASLNGTSMATPHVAGAAALVKQKNPSWSNVQIRNHLKNTATSLGSTNLYGSGLVNAEAATR

SEQ ID NO: 56321 - protein, 269 aa, Unidentified
AQSVPWGISRVQAPAAHNRKLTGSGVKVAVLDTGISTHPDLNIRGGASFVPGEPSTQDGNGHGTHVAGTIAALNNNIGVLGVAPSAELYAVKVLGASGDASVSSIAQGLEWAGNNGMHVANLSLGSPSPSATLEQAVNSATSRGVLVVAASGNSGAGSISYPARYANAMAVGATDQNNNRASFSQYGAGLDIVAPGVNVQSTYPGSTYASENGTSMATPHVAGAAALVKQKNPSWSNVQIRNHLKNTATSLGSTNLYGSGLVNAEAATR

SEQ ID NO: 56322 - protein, 269 aa, Alkalihalobacillus alcalophilus
AQSVPWGISRVQAPAAHNRGLTGSGVKVAVLDTGISTHPDLNIRGGASFVPGEPSTQDGNGHGTHVAGTIAALDNSIGVLGVAPSAELYAVKVLGASGSGSVSSIAQGLEWAGNNRMHVANLSLGLQAPSATLEQAVNSATSRGVLVVAASGNSGAGSISYPARYANAMAVGATDQNNNRASFSQYGAGLDIVAPGVNVQSTYPGSTYASLNGTSMATPHVAGAAALVKQKNPSWSNVQIRNHLKNTATSLGSTNLYGSGLVNAEAATR

SEQ ID NO: 56323 - protein, 269 aa, Unidentified
AQSVPWGISRVQAPAAHRRRLTGSGVKVAVLDTGISTHPDLRITGGASFVPGEPSTQDGNGHGTHVAGTIAALNNSIGVLGVAPSAELYAVKVLGASGSGSVSSIAQGLEWAGNNGMHVANLSLGSPSPSATLEQAVNSATSRGVLVVAASGNSGAGSISYPARYANAMAVGATDQNNNRASFSQYGAGLDIVAPGVNVQSTYPGSTYASLNGTSMATPHVAGAAALVKQKNPSWSNVQIRNRLKNTATSLGSTNLYGSGLVNAEAATR

SEQ ID NO: 56324 - protein, 269 aa, Unidentified
AQSVPWGISRVQAPAAHNRRLTGSGVKVAVLDTGISTHPDLNIRGGASFVPGEPSTQDGNGHGTHVAGTIAALNNSIGVLGVAPSAELYAVKVLGASGAGSVSSIAQGLEWAGNNGMHVANLSLGSPSPSATLEQAVNSATSRGVLVVAASGNSGAGSISYPARYANAMAVGATDQNNNRASFSQYGAGLDIVAPGVNVQSTYIQSAYASLNGTSMATPHVAGAAALVKQKNPSWSNVQIRNHLKNTATSLGSTNLYGSGLVNAEAATR

SEQ ID NO: 56325 - protein, 269 aa, Unidentified
AQSVPWGISRVQAPAAHNRGLTGSGVKVAVLDTGISTHPDLNIRGGASFVPGEPSTQDGNGHGTHVAGTIAALNNSIGVLGVAPSAELYAVKVLGASGAGSLSSIAQGLEWAGNNGMHVANLSLGSPSPSATLEQAVNSATSRGVLVVAASGNSGEGSISYPARYANAMAVGATDQNNNHASFSQYGAGLDIVAPGVNVQSTYPGSTYASLNGTSMATPHVAGAAALVKQKNPSWSNVQIRNRLKNTATSLGSTNLYGSGLVNAEAATR

SEQ ID NO: 56326 - protein, 269 aa, Synthetic construct
AQSVPWGISRVQAPAAHNRGLTGSGVKVAVLDTGISTHPDLNIRGGASFVPGEPSTQDGNGHGTHVAGTIAALDNSIGVLGVAPSAELYAVKVLGASGSGAISSIAQGLEWAGNNGMHVANLSLGSPSPSATLEQAVNSATSRGVLVVAASGNEGAGSIDYPARYANAMAVGATDQNNNRASFSQYGAGLDIVAPGVNVQSTYPGSTYASLNGTSMATPHVAGAAALVKQKNPSWSNVQIRNHLKNTATSLGSTNLYGSGLVNAEAATR

SEQ ID NO: 56327 - protein, 269 aa, Unidentified
AQSVPWGISRVQAPAAHNRGLTGSGVKVAVLDTGISTHPDLNIRGGASFVPGEPSTQDGNGHGTHVAGTIAALNNNIGVLGVAPSAELYAVKVLSASGGGSVSSIAQGLEWAGNNGMHVANLSLGAPSPSATLEQAVNSATSRGVLVVAASGNSGAGSISYPARYANAMAVGATDQNNNRASFSQYGAGLDIVAPGVNVQSTYPGSTYASQNGTSMATPHVAGAAALVKQKNPSWSNVQIRNHLKNTATSLGSTNLYGSGLVNAEAATR

SEQ ID NO: 56328 - protein, 269 aa, Unidentified
AQSVPWGISRVQAPAAHRRGLTGRGVKVAVLDTGISTHPDLNIRGGASFVPGEPSTQDGNGHGTHVAGTIAALDNSIGVLGVAPSAELYAVKVLGASGSGSVSSIAQGLEWAGNNGMHVANLSLGSPSPSATLEQAVNSATSRGVLVVAASGNSGAGSISYPARYANAMAVGATDQNNNRASFSQYGAGLDIVAPGVNVQSTYPGSTYASLNGTSMATPHVAGAAVLVKQKNPSWSNVQIRNRLKNTATSLGSTNLYGSGLVNAEAATR

SEQ ID NO: 56329 - protein, 269 aa, Unidentified
AQSVPWGISRVQAPAAHNRKLLGFGVKVAVLDTGISTHPDLNIRGGASFVPGEPSTQDGNGHGTHVAGTIAALNNNIGVLGVAPSAELYAVKVLGASGSGSVSSIAQGLEWAGNNGMHVANLSLGSPSPSATLEQAVNSATSRGVLVVAASGNSGAGSISYPARYANAMAVGATDQNNNRASFSQYGAGLDIVAPGVNVQSTYPGSAYASLNGTSMATPHVAGAAALVKQKNPSWSNVQIRNHLKNTATSLGSTNLYGSGLVNAEAATR

SEQ ID NO: 56330 - protein, 269 aa, Unidentified
AQSVPWGISRVQAPAAHNRGLTGGGVKVAVLDTGISTHPDLNIRGGASFVPGEPSTQDGNGHGTHVAGTIAALNNNIGVLGVAPSAELYAVKVLAASGGGSVSSIANGLEWAGNNGMHVANLSLGSPSPSATLEQAVNSATSRGVLVVAASGNSGAGSISYPARYANAMAVGATDQNNNRASFSQYGAGLDIVAPGVNVQSTYPGSTYASLNGTSMATPHVAGAAALVKQKNPSWSNVQIRNHLKNTATSLGSTNLYGSGLVNAEAATR

SEQ ID NO: 56331 - protein, 269 aa, Unidentified
AQSVPWGISRVQAPAAHNRGLTGSGVKVAVLDTGISTHPDLNIRGGASFVPGEPSTQDGNGHGTHVAGTIAALNNSIGVLGVAPSAELYAVKVLGASGAGAISSIAQGLEWAGNNGMHVANLSLGSPSPSATLEQAVNSATSRGVLVVAASGNSGAGSISYPARYANAMAVGATDQNNNRADFSQYGAGLDIVAPGVNVQSTYPGSTYASLNGTSSATPHVAGAAVLVKQKNPSWSNVRIRNHLKNTATSLGSTNLYGSGLVNAEAATR

SEQ ID NO: 56332 - protein, 269 aa, Unidentified
AQSVPWGISRVQAPAAHNRGLTGRGVKVAVLDTGISTHPDLNIRGGASFVPGEPSTQDGNGHGTHVAGTIAALNNSIGVLGVAPSAELYAVKVLGASGSGSVSSIAQGLEWAGLNGMHVANLSLGIPSPSATLEQAVNSATSRGVLVVAASGNSGAGSIDYPARYANAMAVGATDQNNNRADFSQYGAGLDIVAPGVNVQSTYPGSTYASLNGTSMATPHVAGAAALVKQKNPSWSNVQIRNHLKNTATSLGSTNLYGSGLVNAEAATR

SEQ ID NO: 56333 - protein, 269 aa, Unidentified
AQSVPWGISRVRAPAAHNRGLTGSGVKVAVLDTGISTHPDLNIRGGASFVPGEPSTQDGNGHGTHVAGTIAALDNSIGVLGVAPSAELYAVKVLGASGSGATSSIAQGLEWAGNNGMHVANLSLGSPSPSATLEQAVNSATSRGVLVVAASGNSGAGSISYPARYANAMAVGATDQNNNRASFSQYGAGLDIVAPGVNVQSTYPGSTYASLNGTSSATPHVAGAAALVKQKNPSWSNIRIRNHLKNTATSLGSTNLYGSGLVNAEAATR

SEQ ID NO: 56334 - protein, 269 aa, Unidentified
AQSVPWGISRVQAPAAHNRVLTGSGVKVAVLDTGISTHPDLNIRGGASFVPGEPSTQDGSGHGTHVAGTIAALDNSIGVLGVAPSAELYAVKVLGASGSGAISSIAQGLEWAGNNGMHVANLSLGSPSPSATLEQAVNSATSRGVLVVAASGNSGAGSISYPARYANAMAVGATDQNNNRASFSQYGAGLDIVAPGVNVQSTYPGSTYASLNGTSMATPHVAGAAALVKQKNPSWSNVQIRNHLKNTATSLGSTNLYGSGLVNAEAATR

SEQ ID NO: 56335 - protein, 269 aa, Unidentified
AQSVPWGISRVQAPAAHNRGLTGRGVKVAVLDTGISTHPDLNIRGGASFVPGEPSTQDGNGHGTHVAGTIAALNNGIGVLGVAPSAELYAVKVLGASGSGSVSSIAQGLEWAGNNDMHVANLSLGSPSPSATLEQAVNSATSRGVLVVAASGNSGADSISYPARYANAMAVGATDQNNNRASFSQYGAGLDIVAPGVNVQSTYPGSTYASLNGTSMATPHVAGAAALVKQKNPSWSNVQIRNRLKNTATSLGSTNLYGSGLVNAEAATR

SEQ ID NO: 56336 - protein, 269 aa, Unidentified
AQSVPWGISRVQAPAAHNRKLTGSGVKVAVLDTGISTHPDLNIRGGASFVPGEPSTQDGNGHGTHVAGTIAALNNSIGVLGVAPSAELYAVKVLGASGDGSVSSIAQGLEWAGNNGMHVANLSLGLPSPSATLEQAVNSATSRGVLVVAASGNSGAGSISYPARYANAMAVGATDQNNNRASFSQYGAGLDIVAPGVNVQSTYPGSTYASENGTSMATPHVAGAAALVKQKNPRWSNVQIRNHLKNTATSLGSTNLYGSGLVNAEAATR

SEQ ID NO: 56337 - protein, 269 aa, Unidentified
AQSVPWGISRVQAPAAHNRGLTGSGVKVAVLDTGISTHPDLNIRGGASFVPGEPSTQDGNGHGTHVAGTIAALNNDIGVLGVAPSAELYAVKVLGASGSGSVSSIAQGLEWAGNNSMHVANLSLGSESPSATLEQAVNSATSRGVLVVAASGNSGAGSISYPARYANAMAVGATDQNNNRADFSQYGAGLDIVAPGVNVQSTYPGSTYASLNGTSMATPHVAGAAALVKQKNPSWSNVRIRNHLKNTATSLGSTNLYGSGLVNAEAATR

SEQ ID NO: 56338 - protein, 269 aa, Unidentified
AQSVPWGISRVQAPAAHNRGLTGSGVKVAVLDTGISTHPDLNIRGGASFVPGEPSTQDGNGHGTHVAGTIAALNNSIGVLGVAPSAELYAVKVLGQASGGSISSIAQGLEWAGNNGMHVANLSLGSPSPSATLEQAVNSATSRGVLVVAASGNSGAGSISYPARYANAMAVGATDQNNNRASFSQYGAGLDIVAPGVNVQSTYPGSTYASLNGTSMATPHVAGAAALVKQKNPSWSNVQIRNHLKNTATSLGSTNLYGSGLVNAEAATR

SEQ ID NO: 56339 - protein, 269 aa, Unidentified
AQSVPWGISRVQAPAAHNRKLTGFGVKVAVLDTGISTHPDLNIRGGASFVPGEPSTQDGEGHGTHVAGTIAALNNSIGVLGVAPSAELYAVKVLGASGSGSVSSIAQGLEWAGNNGMHVANLSLGSPSPSATLEQAVNSATSRGVLVVAASGNSGAGSISYPARYANAMAVGATDQNNNRADFSQYGAGLDIVAPGVNVQSTYPGSTYASLNGTSMATPHVAGAAALVKQKNGSWSNVQIRNHLKNTATSLGSTNLYGSGLVNAEAATR

SEQ ID NO: 56340 - protein, 269 aa, Unidentified
AQSVPWGISRVQAPAAHNRGLRGSGVKVAVLDTGISTHPDLNIRGGASFVPGEPSTQDGNGHGTHVAGTIAALNNSIGVLGVAPSAELYAVKVLGASGSGAISSIAQGLEWAGNNGMHVANLSLGSPSPSATLEQAVNSATSRGVLVVAASGNSGAGSISYPARYANAMAVGATDQNNNRASFSQYGAGLDIVAPGVNVQSTYPGSTYASLNGTSMATPHVAGAAVLVKQKNPSWSNVRIRNHLKNTATSLGSTNLYGSGLVNAEAATR

SEQ ID NO: 56341 - protein, 269 aa, Unidentified
AQSVPWGISRVQAPAAHNRKLTGSGVKVAVLDTGISTHPDLNIRGGASFVPGEPSTQDGEGHGTHVAGTIAALNNNIGVLGVAPSAELYAVKVLGASGSGSVSSIAQGLEWAGLNGMHVANLSLGSPSPSATLEQAVNSATSRGVLVVAASGNSGAGSISYPARYANAMAVGATDQNNNRASFSQYGAGLDIVAPGVNVQSTYPGSTYASNNGTSMATPHVAGAAALVKQKNPSWSNVQIRNHLKNTATSLGSTNLYGSGLVNAEAATR

SEQ ID NO: 56342 - protein, 269 aa, Unidentified
AQSVPWGISRVQAPAAHNRGLTASGVKVAVLDTGISTHPDLNIRGGASFVPGEPSTQDGNGHGTHVAGTIAALNNSIGVLGVAPSAELFAVKVLGASGAGSVSSIAQGLEWAGNNGMHVANLSLGSPSPSATLEQAVNSATSRGVLVVAASGNSGAGSISYPARYANAMAVGATDQNNNRASFSQYGAGLDLVAPGVNVQSTYPGSTYASLNGTSMATPHVAGAAALVKQKNPSWSNVQIRNHLKRTATSLGSTNLYGSGLVNAEAATR

SEQ ID NO: 56343 - protein, 269 aa, Unidentified
AQSVPWGISRVQAPAAHNRGLTGRGVKVAVLDTGISTHPDLNIRGGASFVPGEPSTQDGNGHGTHVAGTIAALNNDIGVLGVAPSAELYAVKVLGASGSGSVSSIAQGLEWAGNNDMHVANLSLGSPSPSATLEQAVNSATSRGVLVVAASGNSGADSISYPARYANAMAVGATDQNNNRASFSQYGAGLDIVAPGVNVQSTYPGSTYASLNGTSMATPHVAGAAALVKQKNPSWSNVQIRNRLKNTATSLGSTNLYGSGLVNAEAATR

SEQ ID NO: 56344 - protein, 269 aa, Unidentified
AQSVPWGISRVQAPAAHNRGLTGSGVKVAVLDTGISTHPDLNIRGGASFVPGEPSTQDGEGHGTHVAGTIAALNNDIGVLGVAPSAELYAVKVLGASGSGSVSSIAQGLEWAGNNDMHVANLSLGSESPSATLEQAVNSATSRGVLVVAASGNSGAGSISYPARYANAMAVGATDQNNNRASFSQYGAGLDIVAPGVNVQSTYPGSTYASLNGTSMATPHVAGAAALVKQKNPSWSNVQIRNRLKNTATSLGSTNLYGSGLVNAEAATR

SEQ ID NO: 56345 - protein, 269 aa, Unidentified
AQSVPWGISRVQAPAAHNRRLTGRGVKVAVLDTGISTHPDLNIRGCASFVPGEPSTQDGNGHGTHVAGTIAALNNSIGVLGVAPSAELYAVKVLGASGAGSVSSIAQGLEWAGNNGMHVANLSLGSPSPSATLEQAVNSATSRGVLVVAASGNSGAGSISYPARYANAMAVGATDQNNNRASFSQYGAGLDIVAPGVNVQSTYPQSTYASLNGTSMATPHVAGAAALVKQKNPSWSNVQIRNHLKNTATSLGSTNLYGSGLVNAEAATR

SEQ ID NO: 56346 - protein, 269 aa, Unidentified
AQSVPWGISRVRAPAAHNRGLTGSGVKVAVLDTGISTHPDLNIRGGASFVPGEPSTQDGNGHGTHVAGTIAALDNSIGVLGVAPSAELYAVKVLGASGSGATSSIAQGLEWAGNNGMHVANLSLGSPTPSATLEQAVNSATSRGVLVVAASGNSGAGSISYPARYANAMAVGATDQNNNRASFSQYGAGLDIVAPGVNVQSTYPGSTYASLNGTSSATPHVAGAAALVKQKNPSWSNVRIRNHLKNTATSLGSTNLYGSGLVNAEAATR

SEQ ID NO: 56347 - protein, 269 aa, Unidentified
AQSVPWGISRVQAPAAHNRGLAGRGVKVAVLDTGISTHPDLNIRGGASFVPGEPSTQDGNGHGTHVAGTIAALNNSIGVLGVAPSAELYAVKVLGASGSGSVSSIAQGLEWAGNNRMHVANLSLGSPSPSATLEQAVNSATSRGVLVVAASGNSGEGSIDYPARYANAMAVGATDQNNNRASFSQYGAGLDIVAPGVNVQSTYPGSTYASLNGTSMATPHVAGAAALVKQKNPSWSNVQIRNHLKNTATSLGSTNLYGSGLVNAEAATR

SEQ ID NO: 56348 - protein, 269 aa, Unidentified
AQSVPWGISRVQAPAAHNRRLTGSGVKVAVLDTGISTHPDLNIRGGASFVPGEPSTQDGNGHGTHVAGTIAALNNSIGVLGVAPSAELYAVKVLGASGSGSVSSIAQGLEWAGNNRMHVANLSLGSPSPSATLEQAVNSATSRGVLVVAASGNSGADSISYPARYANAMAVGATDQNNNRASFSQYGAGLDIVAPGVNVQSTYPGSTYASLNGTSMATPHVAGAAALVKQKNPSWSNVQIRDRLKNTATSLGSTNLYGSGLVNAEAATR

SEQ ID NO: 56349 - protein, 269 aa, Unidentified
AQSVPWGISRVQAPAAHNRGLTGRGVKVAVLDTGISTHPDLRIRGGASFVPGEPSTQDGNGHGTHVAGTIAALNNSIGVLGVAPSAELYAVKVLGASGAGSVSSIAQGLEWAGNNGMHVANLSLGSPSPSATLEQAVNSATSRGVLVVAASGNSGAGSISYPARYANAMAVGATDQNNNRASFSQYGAGLDIVAPGVNVQSTYIGSAYASLNGTSMATPHVAGAAALVKQKNPSWSNVQIRNHLKNTATSLGSTNLYGSGLVNAEAATR

SEQ ID NO: 56350 - protein, 269 aa, Unidentified
AQSVPWGISRVQAPAAHNRGLTGSGVKVAVLDTGISTHPDLNIRRGASFVPGEPSTQDGNGHGTHVAGTIAALNNSIGVLGVAPSAILYAVKVLGAFGSGSVSSIAQGLEWAGNNGMHVANLSLGSPSPSATLEQAVNSATSRGVLVVAASGNSGAGSISYPARYANAMAVGATDQNNNKASFSQYGAGLDIVAPGVNVQSTYPGMTYASLNGTSMATPHVAGAAALVKQKNPSWSNVQIRNHLKNTATSLGSTNLYGSGLVNAEAATR

SEQ ID NO: 56351 - protein, 269 aa, Unidentified
AQSVPWGISRVQAPAAHNRRLTGSGVKVAVLDTGISTHPDLNIRGGASFVPGEPSTQDGNGHGTHVAGTIAALNNGIGVLGVAPSAELYAVKVLGASGSGSVSSIAQGLEWAGNNSMHVANLSLGSESPSATLEQAVNSATSRGVLVVAASGNSGAGSISYPARYANAMAVGATDQNNNRASFSQYGAGLDIVAPGVNVQSTYPGSTYASLNGTSMATPHVAGAAALVKQKNPSWSNVQIRNRLKNTATSLGSTNLYGSGLVNAEAATR

SEQ ID NO: 56352 - protein, 269 aa, Unidentified
AQSVPWGISRVQAPAAHNRGLTGSGVKVAVLDTGISTHPDLNIRGGASFVPGEPSTQDGNGHGTHVAGTIAALNNSIGVLGVAPSAELYAVKVLGASGSGSLSSIAQGLEWAGNNGMEVANLSLGSPSPSATLEQAVNSATSRGVLVVAASGNSGAGSISYPARYANAMAVGATDQNNNKASFSQYGAGLDIVAPGVNVQSTYPGSTYAFLNGTSMATPHVAGAAALVKQKNPSWSNVQIRNHLKRTATSLGSTNLYGSGLVNAEAATR

SEQ ID NO: 56353 - protein, 269 aa, Unidentified
AQSVPWGISRVQAPAAHNRRLTGSGVKVAVLDTGISTHPDLNIRGGASFVPGEPSTQDGNGHGTHVAGTIAALNNSIGVLGVAPSAELYAVKVLGASGSGSVSSIAQGLEWAGNNGMHVANLSLGSESPSATLEQAVNSATSRGVLVVAASGNSGADSISYPARYANAMAVGATDQNNNRADFSQYGAGLDIVAPGVNVQSTYPGSTYASLNGTSMATPHVAGAAALVKQKNPSWSNVRIRNHLKNTATSLGSTNLYGSGLVNAEAATR

SEQ ID NO: 56354 - protein, 269 aa, Unidentified
AQSVPWGISRVQAPAAHNRGLTGRGVKVAVLDTGISTHPDLNIRGGASFVPGEPSTQDGNGHGTHVAGTIAALNNGIGVLGVAPSAELYAVKVLGASGSGSVSSIAQGLEWAGNNDMHVANLSLGSPSPSATLEQAVNSATSRGVLVVAASGNSGADSISYPARYANAMAVGATDQNNNRASFSQYGAGLDIVAPGVNVQSTYPGSTYASLNGTSMATPHVAGAAALVKQKNPSWSNVQIRDHLKNTATSLGSTNLYGSGLVNAEAATR

SEQ ID NO: 56355 - protein, 269 aa, Unidentified
AQSVPWGISRVQAPAAHNRRLWGSGVKVAVLDTGISTHPDLRIRGGASFAPGEPSTQDGNGHGTHVAGTIAALNNSIGVLGVAPSAELYAVKVLGASGAGSVSSIAQGLEWAGNNGMHVANLSLGSPSPSATLEQAVNSATSRGVLVVAASGNSGAGSISYPARYANAMAVGATDQNNNRASFSQYGAGLDIVAPGVNVQSTYPGSTYASLNGTSMATPHVAGAAALVKQKNPSWSNVQIRNHLKNTATSLGSTNLYGSGLVNAEAATR

SEQ ID NO: 56356 - protein, 269 aa, Unidentified
AQSVPWGISRVQAPAAHNRGLTGSGVKVAVLDTGISTHPDLNIRGGASFVPGEPSTQDGNGHGTHVAGTIAALNNGIGVLGVAPSAELYAVKVLGASGSGSVSSIAQGLEWAGNNSMHVANLSLGSESPSATLEQAVNSATSRGVLVVAASGNSGADSISYPARYANAMAVGATDQNNNRASFSQYGAGLDIVAPGVNVQSTYPGSTYASLNGTSMATPHVAGAAALVKQKNPSWSNVRIRNHLKNTATSLGSTNLYGSGLVNAEAATR

SEQ ID NO: 56357 - protein, 269 aa, Unidentified
AQSVPWGISRVQAPAAHNRKLTGFGVKVAVLDTGISTHPDLNIRGGASFVPGEPSTQDGNGHGTHVAGTIAALNNNIGVLGVAPSAELYAVKVLGASGSGSVSSIAQGLEWAGNNRMHVANLSLGSPSPSATLEQAVNSATSRGVLVVAASGNSGAGSISYPARYANAMAVGATDQNNNRASFSQYGAGLDIVAPGVNVQSTYPGSAYASLNGTSMATPHVAGAAALVKQKNPSWSNVQIRNHLKNTATSLGSTNLYGSGLVNAEAATR

SEQ ID NO: 56358 - protein, 269 aa, Unidentified
AQSVPWGISRVQAPAAHNRGLTGGGVKVAVLDTGISTHPDLNIRGGASFVPGEPSTQDGNGHGTHVAGTIAALNNNIGVLGVAPSAELYAVKVLSASGQGSVSSIAQGLEWAGNNGMHVANLSLGSPSPSATLEQAVNSATSRGVLVVAASGNSGAGSISYPARYANAMAVGATDQNNNRASFSQYGAGLDIVAPGVNVQSTYPGSTYASQNGTSMATPHVAGAAALVKQKNPSWSNVQIRNHLKNTATSLGSTNLYGSGLVNAEAATR

SEQ ID NO: 56359 - protein, 269 aa, Unidentified
AQSVPWGISRVQAPAAHNRGLTGRGVKVAVLDSGISTHPDLNIRGGASFVPGEPSTQDGNGHGTHVAGTIAALNNSIGVLGVAPSAELYAVKVLGASGSGSVSSIAQGLEWAGNNGMHVANLSLGIPSPSATLEQAVNSATSRGVLVVAASGNSGAGSIDYPARYANAMAVGATDQNNNRADFSQYGAGLDIVAPGVNVQSTYPGSTYASLNGTSMATPHVAGAAALVKQKNPSWSNVQIRNHLKNTATSLGSTNLYGSGLVNAEAATR

SEQ ID NO: 56360 - protein, 269 aa, Unidentified
AQSVPWGISRVQAPAAHNRGLTGSGVKVAVLDSGISTHPDLNIRGGASFVPGEPSTQDGNGHGTHVAGTIAALNNSIGVLGVAWSAELYAVKVLGASGSGSVSSIAQGLEWAGNNRMHVANLSLGSPSPSATLEQAVNSATSRGVLVVAASGNSGAGSISYPARYANAMAVGATDQNNNRASFSQYGAGLDIVAPGVNVQSTAPGSTYASLNGTSMATPHVAGAAALVKQKNPSWSFVQIRNHLKNTATSLGSTNLYGSGLVNAEAATR

SEQ ID NO: 56361 - protein, 269 aa, Unidentified
AQSVPWGISRVQAPAAHNRRLTGSGVKVAVLDTGISTHPDLNIRGGASFVPGEPSTQDGNGHGTHVAGTIAALNNRIGVLGVAPSAELYAVKVLGASGGGSVSSIAQGLEWAGNNGMHVANLSLGSPSPSATLEQAVNSATSRGVLVVAASGNSGAGSISYPARYANAMAVGATDQNNNRASFSQYGAGLDIVAPGVNVQSTYPGSTYASLNGTSMATPHVAGAAVLVKQKNPSWSNVRIRNHLKNTATSLGSTNLYGSGLVNAEAATR

SEQ ID NO: 56362 - protein, 269 aa, Unidentified
AQSVPWGISRVQAPASHNRGLTGSGVKVAVLDTGISTHPDLNIRGGASFVPGEPSTQDGNGHGTHVAGTIAALNNSIGVLGVAPSAELYAVKVLGASGSGGLSSIAQGLEWAGNNGMHVANLSLGNPSPSATIEQAVNSATSRGVLVVAASGNSGAGSISYPARYANAMAVGATDQNNNRASFSQYGAGLDIVAPGVNVQSTYPGSTYASLNGTSMATPHVAGAAALVKQKNPSWSNVQIRNHLKNTATSLGSTNLYGSGLVNAEAATR

SEQ ID NO: 56363 - protein, 269 aa, Unidentified
AQSVPWGISRVQAPAAHNRGLTGSGVKVAVLDTGISTHPDLNIRGGASFVPGEPSYQDGNGHGTHVAGTIAALNNSIGVLGVAPSAELYAVKVLGASGRGSVSSIAQGLEWAGQNGMHVANLSLGTPSPSATLEQAVNSATSRGVLVVAASGNSGAGSISYPARYANAMAVGATDQNNNRASFSQYGAGLDIVAPGVNVQSTYPGSTYASLNGTSMATPHVAGAAALVKQKNPSWSNVQIRDHLKNTATSLGSTNLYGSGLVNAEAATR

SEQ ID NO: 56364 - protein, 269 aa, Unidentified
AQSVPWGISRVQAPAAHNRKLLGSGVKVAVLDTGISTHPDLNIRGGASFVPGEPSTQDGNGHGTHVAGTIAALNNSIGVLGVAPSAELYAVKVLGASGSGSVSSIAQGLEWAGNNGMHVANLSLGDPSPSATLEQAVNSATSRGVLVVAASGNSGAGSIDYPARYANAMAVGATDQNNNRASFSQYGAGLDIVAPGVNVQSTYPGSAYASLNGTSMATPHVAGAAALVKQKNPSWSNVQIRNHLKNTATSLGSTNLYGSGLVNAEAATR

SEQ ID NO: 56365 - protein, 269 aa, Unidentified
AQSVPWGISRVQAPAAHNRGLTGRGVKVAVLDTGISTHPDLNIRGGASFVPGEPSTQDGEGHGTHVAGTIAALNNSIGVLGVAPSAELYAVKVLGASGSGSVSSIAQGLEWAGLNRMHVANLSLGSPSPSATLEQAVNSATSRGVLVVAASGNSGEGSISYPARYANAMAVGATDQNNNRASFSQYGAGLDIVAPGVNVQSTYPGSTYASLNGTSMATPHVAGAAALVKQKNPSWSNVQIRNHLKNTATSLGSTNLYGSGLVNAEAATR

SEQ ID NO: 56366 - protein, 269 aa, Unidentified
AQSVPWGISRVQAPAAHNRGLTGSGVKVAVLDTGISTHPDLNIRGGASFVPGEPSTQDGNGHGTHVAGTIAALNNGIGVLGVAPSAELYAVKVLGASGSGSVSSIAQGLEWAGNNSMHVANLSLGSPSPSATLEQAVNSATSRGVLVVAASGNSGAGSISYPARYANAMAVGATDQNNNRADFSQYGAGLDIVAPGVNVQSTYPGSTYASLNGTSMATPHVAGAAALVKQKNPSWSNVRIRDHLKNTATSLGSTNLYGSGLVNAEAATR

SEQ ID NO: 56367 - protein, 269 aa, Unidentified
AQSVPWGISRVQAPAAHNRGLTGSGVKVAVLDTGISTHPDLNIRGGASFVPGEPSTQDGNGHGTHVAGTIAALDNSIGVLGVAPSAELYAVKVLGASGSGAISSIAQGLEWAGNNGMHVANLSLGSPSPSATLEQAVNSATSRGVLVVAASGNSGAGSISYPARYANAMAVGATDQNNNRASFSQYGAGLDIVAPGVNVQSTYPGPTYASLNGTSMATPHVAGAAALVKQKNPSWSNVQIRNHLKNTATSLRSTNLYGSGLVNAEAATR

SEQ ID NO: 56368 - protein, 269 aa, Unidentified
AQSVPWGISRVQAPAAHNRRLTGRGVKVAVLDTGISTHPDLNIRGGASFVPGEPSTQDGNGHGTHVAGTIAALNNSIGVLGVAPSAELYAVKVLGASGAGSVSSIAQGLEWAGLNGMHVANLSLGSPSPSATLEQAVNSATSRGVLVVAASGNSGAGSISYPARYANAMAVGATDQNNNRASFSQYGAGLDIVAPGVNVQSTYPGSTYASLNGTSMATPHVAGAAALVKQKNPSWSNVQIRNHLKNTATSLGSTNLYGSGLVIAEAATR

SEQ ID NO: 56369 - protein, 269 aa, Unidentified
AQSVPWGISRVQAPAAHNRGLAGRGVKVAVLDTGISTHPDLNIRGGASFVPGEPSTQDGNGHGTHVAGTIAALNNSIGVLGVAPSAELYAVKVLGASGSGSVSSIAQGLEWAGNNGMHVANLSLGIPSPSATLEQAVNSATSRGVLVVAASGNSGAGSIDYPARYANAMAVGATDQNNNRADFSQYGAGLDIVAPGVNVQSTYPGSTYASLNGTSMATPHVAGAAALVKQKNPSWSNVQIRNHLKNTATSLGSTNLYGSGLVNAEAATR

SEQ ID NO: 56370 - protein, 269 aa, Unidentified
AQSVPWGISRVQAPAAHNRKLTGSGVKVAVLDTGISTHPDLNIRGGASFVPGEPSTQDGNGHGTHVAGTIAALNNNIGVLGVAPSAELYAVKVLGASGSGSVSSIAQGLEWAGNNGMHVANLSLGLPSPSATLEQAVNSATSRGVLVVAASGNSGAGSISYPARYANAMAVGATDQNNNRASFSQYGAGLDIVAPGVNVQSTYPGSTYASENGTSMATPHVAGAAALVKQKNPRWSNVQIRNHLKNTATSLGSTNLYGSGLVNAEAATR

SEQ ID NO: 56371 - protein, 269 aa, Unidentified
AQSVPWGISRVQAPAAHNRGLTGSGVKVAVLDTGISTHPDLNIRGGASFVPGEPSTQDGNGHGTHVAGTIAALNNNIGVLGVAPSAELYAVKVLSASGGGSVSSIANGLEWAGNNGMHVANLSLGAPSPSATLEQAVNSATSRGVLVVAASGNSGAGSISYPARYANAMAVGATDQNNNRASFSQYGAGLDIVAPGVNVQSTYPGSTYASQNGTSSATPHVAGAAALVKQKNPSWSNVQIRNHLKNTATSLGSTNLYGSGLVNAEAATR

SEQ ID NO: 56372 - protein, 269 aa, Unidentified
AQSVPWGISRVQAPAAHNRRLTGSGVKVAVLDTGISTHPDLNIRGGASFVPGEPSTQDGNGHGTHVAGTIAALNNSIGVLGVAPSAELYAVKVLGASGSGSVSSIAQGLEWAGNNRMHVANLSLGSPSPSATLEQAVNSATSRGVLVVAASGNSGADSISYPARYANAMAVGATDQNNNRADFSQYGAGLDIVAPGVNVQSTYPGSTYASLNGTSMATPHVAGAAALVKQKNPSWSNVQIRDHLKNTATSLGSTNLYGSGLVNAEAATR

SEQ ID NO: 56373 - protein, 269 aa, Unidentified
AQSVPWGISRVQAPAAHRRGLTGRGVKVAVLDTGISTHPDLNIRGGASFVPGEPSTQDGNGHGTHVAGTIAALDNSIGVLGVAPSAELYAVKVLGASGSGSVSSIAQGLEWAGANGMHVANLSLGSPSPSATLEQAVNSATSRGVLVVAASGNSGAGSISYPARYANAMAVGATDQNNNRASFSQYGAGLDIVAPGVNVQSTYPGSTYASLNGTSMATPHVAGAAALVKQKNPSWSNVQIRNRLKNTATSLGSTNLYGSGLVNAEAATR

SEQ ID NO: 56374 - protein, 269 aa, Synthetic construct
AQSVPWGISRVQAPAAHNRGLTGSGVRVAVLDTGISTHPDLNIRGGASFVPGEPSTQDGNGHGTHVAGTIAALDNSIGVLGVAPSAELYAVKVLGASGSGSYSSIAQGLEWAGNNGMHVASLSLGSPSPSATLEQAVNSATSRGVLVVAASGNSGAGSISYPARYANAMAVGATDQNNNRASFSQYGAGLDIVAPGVNVQSPYPGSTYASLNGTSMATPHVAGAAALVKQKNPSWSNVQIRNHLKNTATSLGSTNLYGSGLVNAEAATR

SEQ ID NO: 56375 - protein, 269 aa, Unidentified
AQSVPWGISRVQAPAAHNRGLTGSGVKVAVLDSGISTHPDLNIRGGASFVPGEPSTQDGEGHGTHVAGTIAALNNSIGVLGVAPSAELYAVKVLGASGSGSVSSIAQGLEWAGLNRMHVANLSLGSPSPSATLEQAVNSATSRGVLVVAASGNSGAGSISYPARYANAMAVGATDQNNNRADFSQYGAGLDIVAPGVNVQSTYPGSTYASLNGTSMATPHVAGAAALVKQKNPSWSNVQIRNHLKNTATSLGSTNLYGSGLVNAEAATR

SEQ ID NO: 56376 - protein, 269 aa, Unidentified
AQSVPWGISRVRAPAAHNRGLTGSGVKVAVLDTGISTHPDLNIRGGASFVPGEPSTQDGNGHGTHVAGTIAALDNSIGVLGVAPSAELYAVKVLGASGSGAISSIAQGLEWAGNNGMHVANLSLGSPSPSATLEQAVNSATSRGVLVVAASGNSGAGSISYPARYANAMAVGATDQNNNRASFSQYGAGLDIVAPGVNVQSTYPGSTYASLNGTSMATPHVAGAAALVKQKNPSWSNVRIRNHLKNTATSLGSTNLYGSGLVNAEAATR

SEQ ID NO: 56377 - protein, 269 aa, Unidentified
AQSVPWGISRVQAPAAHNRRLTGSGVKVAVLDTGISTHPDLNIRGGASFVPGEPSTQDGNGHGTHVAGTIAALNNSIGVLGVAPSAELYAVKVLGASGAGSVSSIAQGLEWAGNNGMHVANLSLGSPSPSATLEQAVNSATSRGVLVVAASGNSGAGSISYPARYANAMAVGATDQNNNRASFSQYGAGLDIVAPGVNVQSPYIQSTYASLNGTSMATPHVAGAAALVKQKNPSWSNVQIRNHLKNTATSLGSTNLYGSGLVNAEAATR

SEQ ID NO: 56378 - protein, 269 aa, Unidentified
AQSVPWGISRVQAPAAHNRGLTGSGVKVAVLDTGISTHPDLNIRGGASFVPGEPSTQDGEGHGTHVAGTIAALNNNIGVLGVAPSAELYAVKVLGASGSGSVSSIAQGLEWAGNNGMHVANLSLGSPSPSATLEQAVNSATSRGVLVVAASGNSGAGSISYPARYANAMAVGATDQNNNRASFSQYGAGLDIVAPGVNVQSTYPGSTYASENGTSMATPHVAGAAALVKQKNPRWSNVQIRNHLKNTATSLGSTNLYGSGLVNALAATR

SEQ ID NO: 56379 - protein, 269 aa, Unidentified
AQSVPWGISRVQAPAAHNRGLTGRGVKVAVLDTGISTHPDLNIRGGASFVPGEPSTQDGEGHGTHVAGTIAALNNDIGVLGVAPSAELYAVKVLGASGSGSVSSIAQGLEWAGNNSMHVANLSLGSPSPSATLEQAVNSATSRGVLVVAASGNSGAGSISYPARYANAMAVGATDQNNNRASFSQYGAGLDIVAPGVNVQSTYPGSTYASLNGTSMATPHVAGAAALVKQKNPSWSNVQIRNRLKNTATSLGSTNLYGSGLVNAEAATR

SEQ ID NO: 56380 - protein, 269 aa, Unidentified
AQSVPWGISRVQAPAAHNRGLAGRGVKVAVLDSGISTHPDLNIRGGASFVPGEPSTQDGNGHGTHVAGTIAALNNSIGVLGVAPSAELYAVKVLGASGSGSVSSIAQGLEWAGNNGMHVANLSLGSPSPSATLEQAVNSATSRGVLVVAASGNSGEGSIDYPARYANAMAVGATDQNNNRASFSQYGAGLDIVAPGVNVQSTYPGSTYASLNGTSMATPHVAGAAALVKQKNPSWSNVQIRNHLKNTATSLGSTNLYGSGLVNAEAATR

SEQ ID NO: 56381 - protein, 269 aa, Unidentified
AQSVPWGISRVQAPAAHNRRLTGSGVKVAVLDTGISTHPDLNIRGGASFVPGEPSTQDGNGHGTHVAGTIAALNNSIGVLGVAPSAELYAVKVLGASGAGAVSSIAQGLEWAGNNGMHVANLSLGSPSPSATLEQAVNSATSRGVLVVAASGNSGAGSISYPARYANAMAVGATDQNNNRASFSQYGAGLDIVAPGVNVQSTYPGSTYASLNGTSMATPHVAGAAVLVKQKNPSWSNVRIRNHLKNTATSLGSTNLYGSGLVNAEAATR

SEQ ID NO: 56382 - protein, 269 aa, Unidentified
AQSVPWGISRVQAPAAHNRRLTGSGVKVAVLDTGISTHPDLNIRGGASFVPGEPSTQDGNGHGTHVAGTIAALNNGIGVLGVAPSAELYAVKVLGASGSGSVSSIAQGLEWAGNNDMHVANLSLGSPSPSATLEQAVNSATSRGVLVVAASGNSGAGSISYPARYANAMAVGATDQNNNRADFSQYGAGLDIVAPGVNVQSTYPGSTYASLNGTSMATPHVAGAAALVKQKNPSWSNVQIRNRLKNTATSLGSTNLYGSGLVNAEAATR

SEQ ID NO: 56383 - protein, 269 aa, Unidentified
AQSVPWGISRVQAPAAHNRGLWGRGVKVAVLDTGISTHPDLRIRGGASFVPGEPSTQDGNGHGTHVAGTIAALNNSIGVLGVAPSAELYAVKVLGASGAGSVSSIAQGLEWAGNNGMHVANLSLGSPSPSATLEQAVNSATSRGVLVVAASGNSGAGSISYPARYANAMAVGATDQNNNRASFSQYGAGLDIVAPGVNVQSTYIGSTYASLNGTSMATPHVAGAAALVKQKNPSWSNVQIRNHLKNTATSLGSTNLYGSGLVNAEAATR

SEQ ID NO: 56384 - protein, 269 aa, Unidentified
AQSVPWGISRVQAPAAHNRGLTGSGVKVAVLDTGISTHPDLNIRGGASFVPGEPSTQDGNGHGTHVAGTIAALNNSIGVLGVAPSAELYAVKVLGASGAGSVSSIAQGLEWAGNNGMHVANLSLGSPSPSATLEQAVNSATSRGVLVVAASGNSGEGSISYPARYANAMAVGATDQNNNHADFSQYGAGLDIVAPGVNVQSTYPGSTYASLNGTSMATPHVAGAAALVKQKNPSWSNVQIRNRLKNTATSLGSTNLYGSGLVNAEAATR

SEQ ID NO: 56385 - protein, 269 aa, Unidentified
AQSVPWGISRVQAPAAHNRGLTGSGVKVAVLDTGISTHPDLNIRGGASFVPGEPSTQDGNGHGTHVAGTIAALNNSIGVLGVAPSAILYAVKVLGASGSGSVTSIAQGLEWAGANGMHVANLSLGSPSPSATLEQAVNSATSRGVLVVAASGNSGAGSISYPARYANAMAVGATDQNNNRASFSQYGAGLDIVAPGVNVQSTYPGSTYFFLNGTSMATPHVAGAAALVKQKNPSWSNVQIRNHLKNTATSLGSTNLYGSGLVNAEAATR

SEQ ID NO: 56386 - protein, 269 aa, Unidentified
AQSVPWGISRVQAPAAHRRGLTGSGVKVAVLDTGISTHPDLNIRGGASFVPGEPSTQDGNGHGTHVAGTIAALNNSIGVLGVAPSAELYAVKVLGASGGGSISSIAQGLEWAGNNGMHVANLSLGSPSPSATLEQAVNSATSRGVLVVAASGNSGAGSISYPARYANAMAVGATDQNNNRASFSQYGAGLDIVAPGVNVQSTYPGSTYASLNGTSMATPHVAGAAVLVKQKNPSWSNVRIRNHLKNTATSLGSTNLYGSGLVNAEAATR

SEQ ID NO: 56387 - protein, 269 aa, Unidentified
AQSVPWGISRVQAPAAHNRGLTGRGVKVAVLDTGISTHPDLNIRGGASFVPGEPSTQDGNGHGTHVAGTIAALNNGIGVLGVAPSAELYAVKVLGASGSGSVSSIAQGLEWAGNNSMHVANLSLGSESPSATLEQAVNSATSRGVLVVAASGNSGAGSISYPARYANAMAVGATDQNNNRADFSQYGAGLDIVAPGVNVQSTYPGSTYASLNGTSMATPHVAGAAALVKQKNPSWSNVQIRNHLKNTATSLGSTNLYGSGLVNAEAATR

SEQ ID NO: 56388 - protein, 269 aa, Unidentified
AQSVPWGISRVQAPAAHNRRLTGRGVKVAVLDTGISTHPDLNIRGGASFVPGEPSTQDGNGHGTHVAGTIAALNNDIGVLGVAPSAELYAVKVLGASGSGSVSSIAQGLEWAGNNSMHVANLSLGSPSPSATLEQAVNSATSRGVLVVAASGNSGAGSISYPARYANAMAVGATDQNNNRADFSQYGAGLDIVAPGVNVQSTYPGSTYASLNGTSMATPHVAGAAALVKQKNPSWSNVQIRNHLKNTATSLGSTNLYGSGLVNAEAATR

SEQ ID NO: 56389 - protein, 269 aa, Unidentified
AQSVPWGISRVQAPAAHNRGLTGSGVKVAVLDTGISTHPDLNIRGGASFVPGEPSTQDGNGHGTHVAGTIAALDNSIGVLGVAPSAELYAVKVLGASGGGAISSIAQGLEWAGNNGMHVANLSLGSPSPSATLEQAVNSATSRGVLVVAASGNSGAGSISYPARYANAMAVGATDQNNNRASFSQYGAGLDIVAPGVNVQSTYPGSTYASLNGTSMATPHVAGAAALVKQKNPSWSNVQIRNRLKNTATSLGSTNLYGSGLVNAEAATR

SEQ ID NO: 56390 - protein, 269 aa, Unidentified
AQSVPWGISRVQAPAAHNRKLTGSGVKVAVLDTGISTHPDLNIRGGASFVPGEPSTQDGEGHGTHVAGTIAALNNSIGVLGVAPSAELYAVKVLGASGQGSVSSIAGGLEWAGLNGMHVANLSLGSPSPSATLEQAVNSATSRGVLVVAASGNSGAGSISYPARYANAMAVGATDQNNNRASFSQYGAGLDIVAPGVNVQSTYPGSTYASQNGTSSATPHVAGAAALVKQKNPSWSNVQIRNHLKNTATSLGSTNLYGSGLVNAEAATR

SEQ ID NO: 56391 - protein, 269 aa, Unidentified
AQSVPWGISRVQAPAAHNRRLTGRGVKVAVLDTGISTHPDLDIRGGASFVPGEPSTQDGNGHGTHVAGTIAALDNSIGVLGVAPSAELYAVKVLGASGSGSVSSIAQGLEWAGNNGMHVANLSLGSPSPSATLEQAVNSATSRGVLVVAASGNSGAGSISYPARYANAMAVGATDQNNNRASFSQYGAGLDIVAPGVNVQSTYPGSTYASLNGTSMATPHVAGAAALVKQKNPSWSNVQIRNRLKNTATSLGSTNLYGSGLVNAEAATR

SEQ ID NO: 56392 - protein, 269 aa, Unidentified
AQSVPWGISRVQAPAAHNRKLLGFGVKVAVLDTGISTHPDLNIRGGASFVPGEPSTQDGNGHGTHVAGTIAALNNNIGVLGVAPSAELYAVKVLGASGSGSVSSIAQGLEWAGNNGMHVANLSLGSPSPSATLEQAVNSATSRGVLVVAASGNSGAGSIDYPARYANAMAVGATDQNNNRASFSQYGAGLDIVAPGVNVQSTYPGSTYASLNGTSMATPHVAGAAALVKQKNPSWSNVQIRNHLKNTATSLGSTNLYGSGLVNAEAATR

SEQ ID NO: 56393 - protein, 269 aa, Unidentified
AQSVPWGISRVQAPAAHNRGLTGGGVKVAVLDTGISTHPDLNIRGGASFVPGEPSTQDGNGHGTHVAGTIAALNNSIGVLGVAPSAELYAVKVLAASGQGSVSSIANGLEWAGNNGMHVANLSLGSPSPSATLEQAVNSATSRGVLVVAASGNSGAGSISYPARYANAMAVGATDQNNNRASFSQYGAGLDIVAPGVNVQSTYPGSTYASQNGTSMATPHVAGAAALVKQKNPSWSNVQIRNHLKNTATSLGSTNLYGSGLVNAEAATR

SEQ ID NO: 56394 - protein, 269 aa, Unidentified
AQSVPWGISRVQAPASHNRGLTGSGVKVAVLDTGISTHPDLNIRGGASFVPGEPSTQDGEGHGTHVAGTIAALNNSIGVLGVAPSAELYAVKVLGASGSGSVSSIAQGLEWAGNNGMHVANLSLGSPSPSATLEQAVNSATSRGVLVVAASGNSGEGSISYPARYANAMAVGATDQNNNRASFSQYGAGLDIVAPGVNVQSTYPGSTYASLNGTSMATPHVAGAAALVKQKNPSWSNVQIRNRLKNTATSLGSTNLYGSGLVNAFAATR

SEQ ID NO: 56395 - protein, 269 aa, Unidentified
AQSVPWGISRVQAPAAHNRKLLGSGVKVAVLDTGISTHPDLNIRGGASFVPGEPSTQDGNGHGTHVAGTIAALNNSIGVLGVAPSAELYAVKVLGASGSGSVSSIAQGLEWAGNNRMHVANLSLGSPSPSATLEQAVNSATSRGVLVVAASGNSGAGSIDYPARYANAMAVGATDQNNNRASFSQYGAGLDIVAPGVNVQSTYPGSAYASLNGTSMATPHVAGAAALVKQKNPSWSNVQIRNHLKNTATSLGSTNLYGSGLVNAEAATR

SEQ ID NO: 56396 - protein, 269 aa, Unidentified
AQSRPWGIARVQAPAAHNRGLTGRGVKVAVLDTGISTHPDLRIRGGASFVPGEPSTQDGNGHGTHVAGTIAALNNSIGVLGVAPSAELYAVKVLGASGSGSVSSIAQGLEWAGNNGMHVANLSLGSPSPSATLEQAVNSATSRGVLVVAASGNSGAGSISYPARYANAMAVGATDQNNNRASFSQYGAGLDIVAPGVNVQSTYPGSTYASLNGTSMATPHVAGAAALVKQKNPSRSNVQIRNHLKNTATSLGSTNLYGSGLVNAEAATR

SEQ ID NO: 56397 - protein, 269 aa, Unidentified
AQSVPWGISRVQAPAAHNRKLTGSGVKVAVLDTGISTHPDLNIRGGASFVPGEPSTQDGEGHGTHVAGTIAALNNNIGVLGVAPSAELYAVKVLGASGSGSVSSIAQGLEWAGNNGMHVANLSLGQPSPSATLEQAVNSATSRGVLVVAASGNSGAGSISYPARYANAMAVGATDQNNNRASFSQYGAGLDIVAPGVNVQSTYPGSTYASNNGTSMATPHVAGAAALVKQKNPSWSNVQIRNHLKNTATSLGSTNLYGSGLVNAEAATR

SEQ ID NO: 56398 - protein, 269 aa, Unidentified
AQSVPWGISRVQAPAAHNRGLTGGGVKVAVLDTGISTHPDLNIRGGASFVPGEPSTQDGNGHGTHVAGTIAALNNSIGVLGVAPSAELYAVKVLGASGQGSVSSIAGGLEWAGNNGMHVANLSLGAPSPSATLEQAVNSATSRGVLVVAASGNSGAGSISYPARYANAMAVGATDQNNNRASFSQYGAGLDIVAPGVNVQSTYPGSTYASQNGTSMATPHVAGAAALVKQKNPSWSNVQIRNHLKNTATSLGSTNLYGSGLVNAEAATR

SEQ ID NO: 56399 - protein, 269 aa, Unidentified
AQSVPWGISRVQAPAAHNRGLAGSGVKVAVLDTGISTHPDLNIRGGASFVPGEPSTQDGNGHGTHVAGTIAALNNSIGVLGVAPSAELYAVKVLGASGSGSVSSIAQGLEWAGNNGMHVANLSLGIPSPSATLEQAVNSATSRGVLVVAASGNSGEGSIDYPARYANAMAVGATDQNNNRADFSQYGAGLDIVAPGVNVQSTYPGSTYASLNGTSMATPHVAGAAALVKQKNPSWSNVQIRNHLKNTATSLGSTNLYGSGLVNAEAATR

SEQ ID NO: 56400 - protein, 269 aa, Unidentified
AQSVPWGISRVQTPAAHNRGLTGSGVKVAVLDTGISTHPDLNIRGGASFVPGEPSTQDGNGHGTHVAGTIAALDNSIGVLGVAPSAELYAVKVLGASGSGAISSIAQGLEWAGNNGMHVANLSLGSPSPSATLEQAVNSATSRGVLVVAASGNSGAGSISYPARYANAMAVGATDQNNNRASFSQYGAGLDIVAPGVNVRSTYPGSTYASLNGTSMATPHVAGAAALVKQKNPSWSNVQIRNHLKNTATSLGSTNLYGSGLVNAEAATR

SEQ ID NO: 56401 - protein, 269 aa, Unidentified
AQSVPWGISRVQAPAAHNRKLTGSGVKVAVLDTGISTHPDLNIRGGASFVPGEPSTQDGEGHGTHVAGTIAALNNSIGVLGVAPSAELYAVKVLGASGSGSVSSIAQGLEWAGLNGMHVANLSLGIPSPSATLEQAVNSATSRGVLVVAASGNSGAGSISYPARYANAMAVGATDQNNNRASFSQYGAGLDIVAPGVNVQSTYPGSAYASLNGTSMATPHVAGAAALVKQKNPSWSNVQIRNHLKNTATSLGSTNLYGSGLVNAEAATR

SEQ ID NO: 56402 - protein, 269 aa, Unidentified
AQSVPWGISRVQAPAAHNRGLTGSGVKVAVLDTGISTHPDLNIRGGASFVPGEPSTQDGNGHGTHVAGTIAALDNSIGVLGVAPSAELYAVKVLGASGAGAISSIAQGLEWAGNNGMHVANLSLGSPSPSATLEQAVNSATSRGVLVVAASGNSGAGSISYPARYANAMAVGATDQNNNRASFSQYGAGLDIVAPGVNVQSTYPGSTYASLNGTSSATPHVAGAAVLVKQKNPSWSNVRIRNHLKNTATSLGSTNLYGSGLVNAEAATR

SEQ ID NO: 56403 - protein, 269 aa, Unidentified
AQSVPWGISRVQAPAAHNRGLAGSGVKVAVLDSGISTHPDLNIRGGASFVPGEPSTQDGNGHGTHVAGTIAALNNSIGVLGVAPSAELYAVKVLGASGSGSVSSIAQGLEWAGLNRMHVANLSLGSPSPSATLEQAVNSATSRGVLVVAASGNSGEGSISYPARYANAMAVGATDQNNNRASFSQYGAGLDIVAPGVNVQSTYPGSTYASLNGTSMATPHVAGAAALVKQKNPSWSNVQIRNHLKNTATSLGSTNLYGSGLVNAEAATR

SEQ ID NO: 56404 - protein, 269 aa, Unidentified
AQSVPWGISRVQAPAAHNRRLTGRGVKAAVLDTGISTHPDLNIRGGASFVPGEPSTQDGNGHGTHVAGTIAALNNSIGVLGVAPSAELYAVKVLGASGAGSVSSIAQGLEWAGLNGMHVANLSLGSPSPSATLEQAVNSATSRGVLVVAASGNSGAGSISYPARYANAMAVGATDQNNNRASFSQYGAGLDIVAPGVNVQSTYPGSTYASLNGTSMATPHVAGAAALVKQKNPSWSNVQIRNHLKNTATSLGSTNLYGSGLVNAEAATR

SEQ ID NO: 56405 - protein, 269 aa, Unidentified
AQSVPWGISRVQAPAAHNRRLTGRGVKVAVLDTGISTHPDLNIRGGASFVPGEPSTQDGNGHGTHVAGTIAALNNDIGVLGVAPSAELYAVKVLGASGSGSVSSIAQGLEWAGNNDMHVANLSLGSPSPSATLEQAVNSATSRGVLVVAASGNSGAGSISYPARYANAMAVGATDQNNNRASFSQYGAGLDIVAPGVNVQSTYPGSTYASLNGTSMATPHVAGAAALVKQKNPSWSNVRIRNHLKNTATSLGSTNLYGSGLVNAEAATR

SEQ ID NO: 56406 - protein, 269 aa, Unidentified
AQSVPWGISRVQAPAAHNRKLTGSGVKVAVLDTGISTHPDLNIRGGASFVPGEPSTQDGEGHGTHVAGTIAALNNNIGVLGVAPSAELYAVKVLGASGDGSVSSIAQGLEWAGNNGMHVANLSLGSPSPSATLEQAVNSATSRGVLVVAASGNSGAGSISYPARYANAMAVGATDQNNNRASFSQYGAGLDIVAPGVNVQSTYPGSTYASENGTSMATPHVAGAAALVKQKNPSWSNVQIRNHLKNTATSLGSTNLYGSGLVNAEAATR

SEQ ID NO: 56407 - protein, 269 aa, Unidentified
AQSVPWGISRVQAPAAHNRGLTASGVKVAVLDTGISTHPDLNIRGGASFVPGEPSTQDGNGHGTHVAGTIAALNNRIGVLGVAPSAELYAVKVLGASGSGSVSSIAQGLEWAGNNGMHVANLSLGSPSPSATLEQAVNSATSRGVLVVAASGNSGAGSISYPARYANAMAVGATDQNNNRASFSQYGAGLDIVAPGVNVQSTYPGSTYAFLNGTSMATPHVAGAAALVKNKNPSWSNVQIRNRLKNTATSLGSTNLYGSGLVNAEAATR

SEQ ID NO: 56408 - protein, 269 aa, Unidentified
AQSVPWGISRVQAPAAHNRGLTGSGVKVAVLDTGISTHPDLNIRRGASFVPGEPSTADGNGHGTHVAGTIAALNNSIGVLGVAPSAELYAVKVLGASGSGNVSSIAQGLEWAGNNGMHVANLSLGSPSPSATLEQAVNSATSRGVLVVAASGNSGAGSISYPARYANAMAVGATDQNNNRASFSQYGAGLDIVAPGVNVQSTYPQMTYASLNGTSMATPHVAGAAALVKQKNPSWSNVQIRNHLKNTATSLGSTNLYGSGLVNAEAATR

SEQ ID NO: 56409 - protein, 269 aa, Unidentified
AQSVPWGISRVQAPAAHNRGLTGSGVKVAVLDTGISTHPDLNIRGGASFVPGEPSTQDGEGHGTHVAGTIAALNNGIGVLGVAPSAELYAVKVLGASGSGSVSSIAQGLEWAGNNDMHVANLSLGSPSPSATLEQAVNSATSRGVLVVAASGNSGAGSISYPARYANAMAVGATDQNNNRASFSQYGAGLDIVAPGVNVQSTYPGSTYASLNGTSMATPHVAGAAALVKQKNPSWSNVQIRDRLKNTATSLGSTNLYGSGLVNAEAATR

SEQ ID NO: 56410 - protein, 269 aa, Unidentified
AQSVPWGISRVQAPAAHNRGLTGRGVKVAVLDTGISTHPDLNIRGGASFVPGEPSTQDGEGHGTHVAGTIAALNNDIGVLGVAPSAELYAVKVLGASGSGSVSSIAQGLEWAGNNDMHVANLSLGSPSPSATLEQAVNSATSRGVLVVAASGNSGAGSISYPARYANAMAVGATDQNNNRASFSQYGAGLDIVAPGVNVQSTYPGSTYASLNGTSMATPHVAGAAALVKQKNPSWSNVQIRDHLKNTATSLGSTNLYGSGLVNAEAATR

SEQ ID NO: 56411 - protein, 269 aa, Unidentified
AQSVPWGISRVQAPAAHNRGLTGGGVKVAVLDTGISTHPDLNIRGGASFVPGEPSTQDGNGHGTHVAGTIAALNNSIGVLGVAPSAELYAVKVLAASGNGSVSSIANGLEWAGNNGMHVANLSLGAPSPSATLEQAVNSATSRGVLVVAASGNSGAGSISYPARYANAMAVGATDQNNNRASFSQYGAGLDIVAPGVNVQSTYPGSTYASLNGTSMATPHVAGAAALVKQKNPSWSNVQIRNHLKNTATSLGSTNLYGSGLVNAEAATR

SEQ ID NO: 56412 - protein, 269 aa, Unidentified
AQSVPWGISRVQAPAAHNRGLTGRGVKVAVLDTGISTHPDLNIRGGASFVPGEPSTQDGNGHGTHVAGTIAALNNSIGVLGVAPSAELYAVKVLGASGSGAISSIAQGLEWAGNNGMHVANLSLGSPSPSATLEQAVNSATSRGVLVVAASGNSGAGSISYPARYANAMAVGATDQNNNRASFSQYGAGLDIVAPGVNVQSTYPGSTYASLNGTSMATPHVAGAAVLVKQKNPSWSNVQIRNRLKNTATSLGSTNLYGSGLVNAEAATR

SEQ ID NO: 56413 - protein, 269 aa, Unidentified
AQSVPWGISRVQAPAAHNRGLTGSGVKVAVLDTGISTHPDLNIRGGASFVPGEPSTQDGNGHGTHVAGTVAALDNSIGVLGVAPSAELYAVKVLGASGSGAISSIAQGLEWAGNNGMHVANLSLGSPSPSATLEQAVNSATSRGVLVVAASGNSGAGSISYPARYANAMAVGATDQNNDRASFSQYGAGLDIVAPGVNVQSTYPGSTYASLNGTSMATPHVAGAAALVKQKNPSWSNVQIRNHLKNTATSLGSTNLYGSGLVNAEAATR

SEQ ID NO: 56414 - protein, 269 aa, Bacillus sp.
AQSVPWGISRVQAPAAHNRGLTGSGVKVAVLDTGISTHPDLNIRGGASFVPGEPSTQDGNGHGTHVAGTIAALNNSIGVLGVAPNAELYAVKVLGASGSGSVSSIAQGLEWAGNNVMHVANLSLGLNVPSATLEQAVNSATSRGVLVVAASGNSGAGSISYPARYANAMAVGATDQNNNRASFSQYGAGLDIVAPGVNVQSTYPGSTYASLNGTSMATPHVAGAAALVKQKNPSWSNVQIRNHLKNTATSLGSTNLYGSGLVNAEAATR

SEQ ID NO: 56415 - protein, 269 aa, Unidentified
AQSVPWGISRVQAPAAHNRKLTGSGVKVAVLDTGISTHPDLRIRGGASFVPGEPSTQDGNGHGTHVAGTIAALNNSIGVLGVAPSAELYAVKVLGASGSGSVSSIAQGLEWAGNNGMHVANLSLGLPSPSATLEQAVNSATSRGVLVVAASGNSGAGSISYPARYANAMAVGATDQNNNRASFSQYGAGLDIVAPGVNVQSTYPGSTYASENGTSMATPHVAGAAALVKQKNPRWSNVQIRNHLKNTATSLGSTNLYGSGLVNAEAATR

SEQ ID NO: 56416 - protein, 269 aa, Unidentified
AQSVPWGISRVQAPAAHNRRLTGSGVKVAVLDTGISTHPDLNIRGGASFVPGEPSTQDGEGHGTHVAGTIAALNNDIGVLGVAPSAELYAVKVLGASGSGSVSSIAQGLEWAGNNSMHVANLSLGSPSPSATLEQAVNSATSRGVLVVAASGNSGAGSISYPARYANAMAVGATDQNNNRADFSQYGAGLDIVAPGVNVQSTYPGSTYASLNGTSMATPHVAGAAALVKQKNPSWSNVQIRNHLKNTATSLGSTNLYGSGLVNAEAATR

SEQ ID NO: 56417 - protein, 269 aa, Unidentified
AQSVPWGISRVQAPAAHNRGLTGSGVKVAVLDTGISTHPDLNIRGGASFVPGEPSTQDGNGHGTHVAGTIAALNNSIGVLGVAPSAELYAVKVLPFTGSGAISSIAQGLEWAGNNGMHVANLSLGSPSPSATLEQAVNSATSRGVLVVAASGNSGAGSISYPARYANAMAVGATDQNNNRASFSQYGAGLDIVAPGVNVQSTYPGSTYASLNGTSMATPHVAGAAALVKQKNPSWSNVQIRNHLKNTATSLGSTNLYGSGLVNAEAATR

SEQ ID NO: 56418 - protein, 269 aa, Unidentified
AQSVPWGISRVQAPAAHNRRLTGRGVKVAVLDTGISTHPDLNIRGGASFVPGEPSTQDGNGHGTHVAGTIAALNNDIGVLGVAPSAELYAVKVLGASGSGSVSSIAQGLEWAGNNSMHVANLSLGSPSPSATLEQAVNSATSRGVLVVAASGNSGAGSISYPARYANAMAVGATDQNNNRASFSQYGAGLDIVAPGVNVQSTYPGSTYASLNGTSMATPHVAGAAALVKQKNPSWSNVQIRNRLKNTATSLGSTNLYGSGLVNAEAATR

SEQ ID NO: 56419 - protein, 269 aa, Unidentified
AQSVPWGISRVQAPAAHNRGLTGSGVKVAVLDTGISTHPDLNIRGGASFVPGEPSRQDGNGHGTHVAGTIAALNNSIGVLGVAPSAELYAVKVLGAFGSGSVTSIAQGLEWAGNNGMHVANLSLGSPSPSATLEQAVNSATSRGVLVVAASGNSGAGSISYPARYANAMAVGATDQNNNRASFSQYGAGLDLVAPGVNVQSTYPGSAYASLNGTSMATPHVAGAAALVKQKNPSWSNVQIRNHLKNTATSLGSTNLYGSGLVNAEAATR

SEQ ID NO: 56420 - protein, 269 aa, Unidentified
AQSVPWGISRVQAPAAHNRRLTGSGVKVAVLDTGISTHPDLNIRGGASFVPGEPSTQDGNGHGTHVAGTIAALNNSIGVLGVAPSAELYAVKVLGASGSGSVSSIAQGLEWAGNNRMHVANLSLGSPSPSATLEQAVNSATSRGVLVVAASGNSGAGSISYPARYANAMAVGATDQNNNRADFSQYGAGLDIVAPGVNVQSTYPGSTYASLNGTSMATPHVAGAAALVKQKNPSWSNVRIRDHLKNTATSLGSTNLYGSGLVNAEAATR

SEQ ID NO: 56421 - protein, 269 aa, Unidentified
AQSVPWGISRVQAPAAHNRRLTGSGVKVAVLDTGISTHPDLNIRGGASFVPGEPSTQDGEGHGTHVAGTIAALNNDIGVLGVAPSAELYAVKVLGASGSGSVSSIAQGLEWAGNNSMHVANLSLGSESPSATLEQAVNSATSRGVLVVAASGNSGAGSISYPARYANAMAVGATDQNNNRASFSQYGAGLDIVAPGVNVQSTYPGSTYASLNGTSMATPHVAGAAALVKQKNPSWSNVQIRNHLKNTATSLGSTNLYGSGLVNAEAATR

SEQ ID NO: 56422 - protein, 269 aa, Unidentified
AQSVPWGISRVQAPAAHNRGLAGRGVKVAVLDTGISTHPDLNIRGGASFVPGEPSTQDGNGHGTHVAGTIAALNNSIGVLGVAPSAELYAVKVLGASGSGSVSSIAQGLEWAGNNGMHVANLSLGSPSPSATLEQAVNSATSRGVLVVAASGNSGEGSIDYPARYANAMAVGATDQNNNRADFSQYGAGLDIVAPGVNVQSTYPGSTYASLNGTSMATPHVAGAAALVKQKNPSWSNVQIRNHLKNTATSLGSTNLYGSGLVNAEAATR

SEQ ID NO: 56423 - protein, 269 aa, Bacillus lentus
AQSVPWGIRRVQAPTAHNRGLTGSGVKVAVLDTGISTHPDLNIRGGASFVPGEPSTQDGNGHGTHAAGTIAALNNSIGVLGVAPSAELYAVKVLGASGSGSVSSIAQGLEWAGNNGMHVANLSLGSPSPSATLEQAVNSATSRGVLVVAASGNSGAGSISYPARYANAMAVGATDQNNNRASFSQYGAGLDIVAPGVNVQSTYPGSTYASLNGTSMATPHVAGAAALVKQKNPSWSNVRIRNHLKNTATSLGSTDLYGSGLVNAEAATR

SEQ ID NO: 56424 - protein, 269 aa, Unidentified
AQSVPWGISRVQAPAAHNRGLAGSGVKVAVLDTGISTHPDLNIRGGASFVPGEPSTQDGNGHGTHVAGTIAALNNSIGVLGVAPSAELYAVKVLGASGAGSVSSIAQGVEWAGNNGMHVANLSLGNPSPSATLEQAVNSATSRGVIVVAASGNSGAGSISYPARYANAMAVGATDQNNNRASFSQYGAGLDIVAPGVNVQSTYPGSTYASLNGTSMATPHVAGAAALVKQKNPSWSNVQIRNHLKNTATSLGSTNLYGSGLVNAEAATR

SEQ ID NO: 56425 - protein, 269 aa, Unidentified
AQSEPWGISRVQAPAAHNRGLTGSGVKVAVLDTGISTHPDLNIRGGASFVPGEPSTQDGNGHGTHVAGTIAALDNSIGVLGVAPSAELYAVKVLGASGSGAISSIAQGLEWAGNNGMHVANLSLGSPSPSATLEQAVNSATSRGVLVVAASGNSGAGSISYPARYANAMAVGATDQNNNRAEFSQYGAGLDIVAPGVNVQSTYPGSTYASLNGTSMATPHVAGAAALVKQKNPSWSNVQIRNHLKNTATSLGSTNLYGSGLVNAEAATR

SEQ ID NO: 56426 - protein, 269 aa, Unidentified
AQSVPWGISRVQAPAAHNRGLTGSGVKVAVLDTGISTHPDLNIRGGASFVPGEPSTQDGNGHGTHVAGTIAALNNSIGVLGVAPSAELYAVKVLPASGAAAISSIAQGLEWAGNNGMHVANLSLGSPSPSATLEQAVNSATSRGVLVVAASGNSGAGSISYPARYANAMAVGATDQNNNRASFSQYGAGLDIVAPGVNVQSTYPGSTYASLNGTSMATPHVAGAAALVKQKNPSWSNVQIRNHLKNTATSLGSTNLYGSGLVNAEAATR

SEQ ID NO: 56427 - protein, 269 aa, Unidentified
AQSVPWGISRVQAPAAHNRGLTGRGVKVAVLDTGISTHPDLNIRGGASFVPGEPSTQDGNGHGTHVAGTIAALDNSIGVLGVAPSAELYAVKVLGASGSGAISSIAQGLEWAGNNGMHVANLSLGSPSPSATLEQAVNSATSRGVLVVAASGNSGAGSISYPARYANAMAVGATDQNNNRASFSQYGAGLDIVAPGVNVQSTYPGSTYASLNGTSMATPHVAGAAVLVKQKNPSWSNVQIRNHLKNTATSLGSTNLYGSGLVNAEAATR

SEQ ID NO: 56428 - protein, 269 aa, Unidentified
AQSVPWGISRVQAPAAHNRGLTGSGVKVAVLDTGISTHPDLNIRGGASFVPGEPSTQDGEGHGTHVAGTIAALNNRIGVLGVAPSAELYAVKVLGASGSGSVSSIAQGLEWAGNNRMHVANLSLGSESPSATLEQAVNSATSRGVLVVAASGNSGAGSISYPARYANAMAVGATDQNNNRASFSQYGAGLDIVAPGVNVQSTYPGSTYASLNGTSMATPHVAGAAALVKQKNPSWSNVQIRDHLKNTATSLGSTNLYGSGLVNAEAATR

SEQ ID NO: 56429 - protein, 269 aa, Unidentified
AQSVPWGISRVQAPAAHNRGLWGSGVKVAVLDTGISTHPDLNIRGGASFVPGEPSTQDGNGHGTHVAGTIAALNNSIGVLGVAPSAELYAVKVLGASGSGSVSSIAQGLEWAGNNGMHVANLSLGSPSPSATLEQAVNSATSRGVLVVAASGNSGAGSISYPARYANAMAVGATDQNNNRASFSQYGFGLDIVAPGVNVQSTYPGSAYASLNGTSMATPHVAGAAACVKQKLPSWSNVQIRNHLKNTATSLGSTNLYGSGLVNAEAATR

SEQ ID NO: 56430 - protein, 269 aa, Unidentified
AQSVPWGISRVQAPAAHNRGLTGSGVKVAVLDTGISTHPDLNIRGGASFVPGEPSTQDGNGHGTHVAGTIAALNNSIGVLGVAPSAELYAVKVLGASGSGSVSSIAQGLEWAGNNGMHVANLSLGSPSPSATLEQAVNSATSRGVLVVAASGNSGAGSISFPARVANAMAVGATDQNNNRASFSQFGAGLDIVAPGVNVQSTQPGSTQASLNGTSMATPHVAGAAALVKQKNPSWSNVQIRNHLKNTATSLGSTNLYGSGLVNAEAATR

SEQ ID NO: 56431 - protein, 269 aa, Unidentified
AQSVPWGISRVQAPAAHNRGLTGSGVKVAVLDTGISTHPDLNIRGGASFVPGEPSTQDGNGHGTHVAGTIAALNNSIGVLGVAPSAELYAVKVLGASGSGSVTSIAQGLEWAGNNGMHVANLSLGNPSPSATLEQAVNSATRRGVIVVAASGNSGAGSISYPARYANAMAVGATDQNNNRASFSQYGAGLDIVAPGVNVQSTYPGMTYASLNGTSMATPHVAGAAALVKQKNPSWSNVQIRNHLKNTATSLGSTNLYGSGLVNAEAATR

SEQ ID NO: 56432 - protein, 269 aa, Unidentified
AQSVPWGISRVQAPAAHNRGLWGSGVKVVVLDTGISTHPDLRIRGGASFVPGEPSTQDGNGHGTHVAGTIAALNNSIGVLGVAPSAELYAVKVLGASGAGSVSSIAQGLEWAGNNGMHVANLSLGSPSPSATLEQAVNSATSRGVLVVAASGNSGAGSISYPARYANAMAVGATDQNNNRASFSQYGAGLDIVAPGVNVQSTYIGSTYASLNGTSMATPHVAGAAALVKQKNPSWSNVQIRNHLKNTATSLGSTNLYGSGLVNAEAATR

SEQ ID NO: 56433 - protein, 269 aa, Unidentified
AQSVPWGISRVQAPAAHNRGLAGSGVKVAVLDTGISTHPDLNIRGGASFVPGEPSTQDGNGHGTHVAGTIAALNNSIGVLGVAPSAELYAVKVLGASGAGAISSIAQGVEWAGNNGMHVANLSLGSPSPSATLEQAVNSATSRGVLVVAASGNSGAGSISYPARYANAMAVGATDQNNNRASFSQYGAGLDIVAPGVNVQSTYPGSTYASLNGTSMATPHVAGAAALVKQKNPSWSNVQIRNHLKNTATSLGSTNLYGSGLVNAEAATR

SEQ ID NO: 56434 - protein, 269 aa, Bacillus subtilis
AQSVPWGISRVQAPAAHNRGLTGSGVKVAVLDTGISTHPDLNIRGGASFVPGEPSTQDGNGHGTHVAGTIAALNNSIGVLGVAPSAELYAVKVLGASGSGSVSSIAQGLEWAGNNGMHVANLSLGSPSPSATLEQAVNSATSRGVLVVAASGNSGAGSISYPARYANAMAVGATDQNNNRASFSQYGAGLDIVAPGVNVQSTYPGSTYASLNGTSMATPSVAGAAALVLQRNPSWSNVQIRNHLNNTATSLGSTNLFGSGLVNAEAATR

SEQ ID NO: 56435 - protein, 269 aa, Unidentified
AQSVPWGISRVQAPAAHNRGLTGRGVKVAVLDTGISTHPDLNITGGASFVPGEPSTQDGNGHGTHVAGTIAALNNSIGVLGVAPSAELYAVKVLGASGAGSVSSIAQGLEWAGNNGMHVANLSLGSPSPSATLEQAVNSATSRGVLVVAASGNSGAGSISYPARYANAMAVGATDQNNNRASFSQYGAGLDIVAPGVNVQSTYPQSAYASLNGTSMATPHVAGAAALVKQKNPSWSNVQIRNHLKNTATSLGSTNLYGSGLVNAEAATR

SEQ ID NO: 56436 - protein, 269 aa, Unidentified
AQSVPWGISRVQAPAAHNRGLTGSGVKVAVLDTGISTHPDLNIRGGASFVPGEPSTQDGEGHGTHVAGTIAALNNDIGVLGVAPSAELYAVKVLGASGSGSVSSIAQGLEWAGNNSMHVANLSLGSPSPSATLEQAVNSATSRGVLVVAASGNSGAGSISYPARYANAMAVGATDQNNNRADFSQYGAGLDIVAPGVNVQSTYPGSTYASLNGTSMATPHVAGAAALVKQKNPSWSNVQIRDHLKNTATSLGSTNLYGSGLVNAEAATR

SEQ ID NO: 56437 - protein, 269 aa, Unidentified
AQSVPWGIARVQAPAAHNRGLRGSGVKVAVLDTGISTHPDLNIRGGASFVPGEPSTQDGNGHGTHVAGTIAALNNRIGVLGVAPSAELYAVKVLGASGSGSVSSIAQGLEWAGNNGMHVANLSLGSPSPSATLEQAVNSATSRGVLVVAASGNSGAGSISYPARYANAMAVGATDQNNNRASFSQYGAGLDIVAPGVNVQSTYPGFTYASLNGTSMATPHVAGAAALVKQKNPSRSNVQIRNHLKNTATSLGSTNLYGSGLVNAEAATR

SEQ ID NO: 56438 - protein, 269 aa, Unidentified
AQSVPWGISRVQAPAAHNRRLTGRGVKVAVLDTGISTHPDLNIRGGASFVPGEPSTQDGNGHGTHVAGTIAALNNSIGVLGVAPSAELYAVKVLGASGSGSVSSIAQGLEWAGANGMHVANLSLGSPSPSATLEQAVNSATSRGVLVVAASGNSGAGSISYPARYANAMAVGATDQNNNRASFSQYGAGLDIVAPGVNVQSTYPGSAYFSLNGTSMATPHVAGAAALVKQKNPSWSNVQIRNHLKNTATSLGSTNLYGSGLVNAEAATR

SEQ ID NO: 56439 - protein, 269 aa, Unidentified
AQSVPWGISRVQAPAAHNRRLTGSGVKVAVLDTGISTHPDLRITGGASFVPGEPSTQDGNGHGTHVAGTIAALNNSIGVLGVAPSAELYAVKVLGASGAGSVSSIAQGLEWAGNNGMHVANLSLGSPSPSATLEQAVNSATSRGVLVVAASGNSGAGSISYPARYANAMAVGATDQNNNRASFSQYGAGLDIVAPGVNVQSTYPQSTYASLNGTSMATPHVAGAAALVKQKNPSWSNVQIRNHLKNTATSLGSTNLYGSGLVNAEAATR

SEQ ID NO: 56440 - protein, 269 aa, Unidentified
AQSVPWGISRVQAPAAHNRGLTGSGVKVAVLDTGISTHEDLNIRGGASFVPGEPSTQDGNGHGTHVAGTIAALNNSIGVLGVAPSADLYAVKVLGASGRGSVSSIAQGLEWAGNNGMHVANLSLGSPAPSATLEQAVNSATSRGVLVVAASGNSGAGSISYPARYANAMAVGATDQNNNRASFSQYGAGLDIVAPGVNVQSTYPGSTYASLNGTSMATPHVAGAAALVKQKNPSWSNVQIRDHLKNTATSLGSTNLYGSGLVNAEAATR

SEQ ID NO: 56441 - protein, 269 aa, Unidentified
AQSVPWGISRVQAPAAHNRRLTGSGVKVAVLDTGISTHPDLNIRGGASFVPGEPSTQDGNGHGTHVAGTIAALNNSIGVLGVAPSAELYAVKVLGASGSGGISSIAQGLEWAGNNGMHVANLSLGSPSPSATLEQAVNSATSRGVLVVAASGNSGAGSISYPARYANAMAVGATDQNNNRASFSQYGAGLDIVAPGVNVQSTYPGSTYASLNGTSMATPHVAGAAVLVKQKNPSWSNVRIRNHLKNTATSLGSTNLYGSGLVNAEAATR

SEQ ID NO: 56442 - protein, 269 aa, Unidentified
AQSVPWGISRVQAPASHNRGLAGSGVKVAVLDTGISTHPDLNIRGGASFVPGEPSTQDGNGHGTHVAGTIAALNNSIGVLGVAPSAELYAVKVLGASGAGSLSSIAQGVEWAGNNGMHVANLSLGSPSPSATLEQAVNSATSRGVLVVAASGNSGAGSISYPARYANAMAVGATDQNNNRASFSQYGAGLDIVAPGVNVQSTYPGSTYASLNGTSMATPHVAGAAALVKQKNPSWSNVQIRNHLKNTATSLGSTNLYGSGLVNAEAATR

SEQ ID NO: 56443 - protein, 269 aa, Unidentified
AQSVPWGISRVQAPAAHNRGLTGRGVKVAVLDTGISTHPDLNIRGGASFVPGEPSTQDGEGHGTHVAGTIAALNNGIGVLGVAPSAELYAVKVLGASGSGSVSSIAQGLEWAGNNSMHVANLSLGSPSPSATLEQAVNSATSRGVLVVAASGNSGAGSISYPARYANAMAVGATDQNNNRASFSQYGAGLDIVAPGVNVQSTYPGSTYASLNGTSMATPHVAGAAALVKQKNPSWSNVQIRNRLKNTATSLGSTNLYGSGLVNAEAATR

SEQ ID NO: 56444 - protein, 269 aa, Unidentified
AQSVPWGISRVQAPAAHRRGLTGSGVKVAVLDTGISTHPDLDIRGGASFVPGEPSTQDGNGHGTHVAGTIAALDNSIGVLGVAPSAELYAVKVLGASGSGSVSSIAQGLEWAGNNGMHVANLSLGSPSPSATLEQAVNSATSRGVLVVAASGNSGAGSISYPARYANAMAVGATDQNNNRASFSQYGAGLDIVAPGVNVQSTYPGSTYASLNGTSMATPHVAGAAALVKQKNPSWRNVQIRNRLKNTATSLGSTNLYGSGLVNAEAATR

SEQ ID NO: 56445 - protein, 269 aa, Unidentified
AQSVPWGISRVQAPAAHNRRLTGSGVKVAVLDTGISTHPDLRITGGASFVPGEPSTQDGNGHGTHVAGTIAALNNSIGVLGVAPSAELYAVKVLGASGAGSVSSIAQGLEWAGNNGMHVANLSLGSPSPSATLEQAVNSATSRGVLVVAASGNSGAGSISYPARYANAMAVGATDQNNNRASFSQYGAGLDIVAPGVNVQSTYPGSTYASLNGTSMATPHVAGAAALVKQKNPSWSNVQIRNHLKNTATSLGSTNLYGSGLVRAEAATR

SEQ ID NO: 56446 - protein, 269 aa, Unidentified
AQSVPWGISRVQAPAAHNRGLLGSGVKVAVLDTGISTHPDLNIRGGASFVPGEPSTQDGNGHGTHVAGTIAALNNNIGVLGVAPSAELYAVKVLGASGSGSVSSIAQGLEWAGNNRMHVANLSLGDPSPSATLEQAVNSATSRGVLVVAASGNSGAGSISYPARYANAMAVGATDQNNNRASFSQYGAGLDIVAPGVNVQSTYPGSTYASENGTSMATPHVAGAAALVKQKNPSWSNVQIRNHLKNTATSLGSTNLYGSGLVNAEAATR

SEQ ID NO: 56447 - protein, 269 aa, Unidentified
AQSVPWGISRVQAPAAHNRGLTGSGVKVAVLDTGISTHPDLNIRGGASFVPGEPSTQDGNGHGTHVAGTIAALNNGIGVLGVAPSAELYAVKVLGASGSGSVSSIAQGLEWAGNNDMHVANLSLGSPSPSATLEQAVNSATSRGVLVVAASGNSGADSISYPARYANAMAVGATDQNNNRADFSQYGAGLDIVAPGVNVQSTYPGSTYASLNGTSMATPHVAGAAALVKQKNPSWSNVRIRNHLKNTATSLGSTNLYGSGLVNAEAATR

SEQ ID NO: 56448 - protein, 269 aa, Unidentified
AQSVPWGISRVQAPAAHNRGLTGRGVKVAVLDTGISTHPDLNIRGGASFVPGEPSTQDGEGHGTHVAGTIAALNNDIGVLGVAPSAELYAVKVLGASGSGSVSSIAQGLEWAGNNSMHVANLSLGSPSPSATLEQAVNSATSRGVLVVAASGNSGAGSISYPARYANAMAVGATDQNNNRADFSQYGAGLDIVAPGVNVQSTYPGSTYASLNGTSMATPHVAGAAALVKQKNPSWSNVQIRNHLKNTATSLGSTNLYGSGLVNAEAATR

SEQ ID NO: 56449 - protein, 269 aa, Unidentified
AQSVPWGISRVQAPAAHNRGLTGGGVKVAVLDTGISTHPDLNIRGGASFVPGEPSTQDGNGHGTHVAGTIAALNNSIGVLGVAPSAELYAVKVLSASGQGSVSSIAQGLEWAGNNGMHVANLSLGAPSPSATLEQAVNSATSRGVLVVAASGNSGAGSISYPARYANAMAVGATDQNNNRADFSQYGAGLDIVAPGVNVQSTYPGSTYASLNGTSMATPHVAGAAALVKQKNPSWSNVQIRNHLKNTATSLGSTNLYGSGLVNAEAATR

SEQ ID NO: 56450 - protein, 269 aa, Unidentified
AQSVPWGISRVQAPAAHNRGLTGRGVKVAVLDSGISTHPDLNIRGGASFVPGEPSTQDGNGHGTHVAGTIAALNNSIGVLGVNSSAELYAVKVLGASGSGSVSSIAQGLEWAGNNGMHVANLSLGSPSPSATLEQAVNSATSRGVLVVAASGNSGAGSISYPARYANAMAVGATDQNNNRASFSQYGAGLDIVAPGVNVQSTYPGSTYASLNGTSMATPHVAGAAALVFQKNPSWSNVQIRNHLKNTATSLGSTNLYGSGLVNAEAATR

SEQ ID NO: 56451 - protein, 269 aa, Unidentified
AQSVPWGISRVQAPAAHNRGLTGSGVKVAVLDTGISTHPDLNIRGGASFVPGEPSTQDGNGHGTHVAGTIAALNNDIGVLGVAPSAELYAVKVLGASGSGSVSSIAQGLEWAGNNSMHVANLSLGSESPSATLEQAVNSATSRGVLVVAASGNSGAGSISYPARYANAMAVGATDQNNNRASFSQYGAGLDIVAPGVNVQSTYPGSTYASLNGTSMATPHVAGAAALVKQKNPSWSDVQIRNRLKNTATSLGSTNLYGSGLVNAEAATR

SEQ ID NO: 56452 - protein, 269 aa, Unidentified
AQSVPWGISRVQAPAAHRRGLTGRGVKVAVLDTGISTHPDLNIRGGASFVPGEPSTQDGNGHGTHVAGTIAALDNSIGVLGVAPDAELYAVKVLGASGSGSVSSIAQGLEWAGNNGMHVANLSLGSPSPSATLEQAVNSATSRGVLVVAASGNSGAGSISYPARYANAMAVGATDQNNNRASFSQYGAGLDIVAPGVNVQSTYPGSTYASLNGTSMATPHVAGAAALVKQKNPSWSNVQIRNRLKNTATSLGSTNLYGSGLVNAEAATR

SEQ ID NO: 56453 - protein, 269 aa, Bacillus lentus
AQSVPWGIRRVQAPAAHNLGLTGSGVKVAVLDTGISTHPDLRIRGGASFVPGEPSTQDGDGHGTHVAGTIAALDNSIGVLGVAPSAELYAVKVLGASGSGSVSSIAQGLEWAGNNGMHVANLSLGSPSPSATLEQAVNSATSRGVLVVAASGNSGAGSISYPARYANAMAVGATDQNNNRASFSQYGAGLDIVAPGVNVQSTYPGSTYASLNGTSMATPHVAGAAALVKQKNPSWSNVQIRNHLKNTATSLGSTNLYGSGLVNAEAATR

SEQ ID NO: 56454 - protein, 269 aa, Unidentified
AQSVPWGISRVQAPAAHNRGLTGSGVKVAVLDTGISTHPDLNIRGGASFVPGEPSTQDGNGHGTHVAGTIAALNNSIGVLGVAPSAELYAVKVLPFTGSGALSSIAQGLEWAGNNGMHVANLSLGSPSPSATLEQAVNSATSRGVLVVAASGNSGAGSISYPARYANAMAVGATDQNNNRASFSQYGAGLDIVAPGVNVQSTYPGSTYASLNGTSMATPHVAGAAALVKQKNPSWSNVQIRNHLKNTATSLGSTNLYGSGLVNAEAATR

SEQ ID NO: 56455 - protein, 269 aa, Unidentified
AQSVPWGISRVQAPAAHNRRLTGSGVKVAVLDTGISTHPDLNIRGGASFVPGEPSTQDGNGHGTHVAGTIAALNNDIGVLGVAPSAELYAVKVLGASGSGSVSSIAQGLEWAGNNDMHVANLSLGSPSPSATLEQAVNSATSRGVLVVAASGNSGAGSISYPARYANAMAVGATDQNNNRASFSQYGAGLDIVAPGVNVQSTYPGSTYASLNGTSMATPHVAGAAALVKQKNPSWSNVRIRNRLKNTATSLGSTNLYGSGLVNAEAATR

SEQ ID NO: 56456 - protein, 269 aa, Unidentified
AQSVPWGISRVQAPAAHNRGLTGSGVKVAVLDTGISTHPDLNIRGGASFVPGEPSTQDGNGHGTHVAGTIAALNNSIGVLGVAPSAELYAVKVLSASGNGSVSSIAGGLEWAGNNGMHVANLSLGAPSPSATLEQAVNSATSRGVLVVAASGNSGAGSISYPARYANAMAVGATDQNNNRADFSQYGAGLDIVAPGVNVQSTYPGSTYASLNGTSMATPHVAGAAALVKQKNPSWSNVQIRNHLKNTATSLGSTNLYGSGLVNAEAATR

SEQ ID NO: 56457 - protein, 269 aa, Unidentified
AQSVPWGISRVQAPAAHNRRLTGSGVKVAVLDTGISTHPDLNIRGGASFVPGEPSTQDGNGHGTHVAGTIAALNNDIGVLGVAPSAELYAVKVLGASGSGSVSSIAQGLEWAGNNSMHVANLSLGSESPSATLEQAVNSATSRGVLVVAASGNSGADSISYPARYANAMAVGATDQNNNRASFSQYGAGLDIVAPGVNVQSTYPGSTYASLNGTSMATPHVAGAAALVKQKNPSWSNVQIRNHLKNTATSLGSTNLYGSGLVNAEAATR

SEQ ID NO: 56458 - protein, 269 aa, Unidentified
AQSVPWGISRVQAPAAHNRGLTGSGFKVAVLDTGISTHPDLNIRGGASFVPGEPSTQDGNGHGTHVAGTIAALNNNIGVLGVAPSAELYAVKVLGASGSGSVSSIAQGLEWAGNNGMHVANLSLGSPSPSATLEQAVNSATSRGVLVVAASGNSGACSISYPARYANAMAVGATDQNNNKASFSQYGAGLDIVAPGVNVQSTYPGSTYASLNGTSMATPHVAGAAALVKQKNPSWSFVQIRNHLKNTATSLGSTNLYGSGLVNAEAATR

SEQ ID NO: 56459 - protein, 269 aa, Unidentified
AQSVPWGISRVQAPAAHNRGLTGSGVKVAVLDTGISTHPDLNVRGGVSFVPGEPSTQDGNGHGTHVAGTIAALNNSIGVLGVAPSAELYAVKVLGASGRGSVSSIAQGLEWAGNNGMHVANLSLGTPSPSATLEQAVNSATSRGVLVVAASGNSGAGSISYPARYANAMAVGATDQNNNRASFSQYGAGLDIVAPGVNVQSTYPGSTYASLNGTSMATPHVAGAAALVKQKNPSWSNVQIRDHLKNTATSLGSTNLYGSGLVNAEAATR

SEQ ID NO: 56460 - protein, 269 aa, Unidentified
AQSVPWGISRVQAPAAHNRGLAGSGVKVAVLDTGISTHPDLNIRGGASFVPGEPSTQDGNGHGTHVAGTIAALNNSIGVLGVAPSAELYAVKVLGASGSGSVSSIAQGLEWAGLNRMHVANLSLGIPSPSATLEQAVNSATSRGVLVVAASGNSGAGSISYPARYANAMAVGATDQNNNRADFSQYGAGLDIVAPGVNVQSTYPGSTYASLNGTSMATPHVAGAAALVKQKNPSWSNVQIRNHLKNTATSLGSTNLYGSGLVNAEAATR

SEQ ID NO: 56461 - protein, 269 aa, Unidentified
AQSVPWGISRVQAPAAHNRRLTGSGVKVAVLDTGISTHPDLNIRGGASFVPGEPSTQDGNGHGTHVAGTIAALNNDIGVLGVAPSAELYAVKVLGASGSGSVSSIAQGLEWAGNNDMHVANLSLGSESPSATLEQAVNSATSRGVLVVAASGNSGADSISYPARYANAMAVGATDQNNNRASFSQYGAGLDIVAPGVNVQSTYPGSTYASLNGTSMATPHVAGAAALVKQKNPSWSNVQIRNHLKNTATSLGSTNLYGSGLVNAEAATR

SEQ ID NO: 56462 - protein, 269 aa, Unidentified
AQSVPWGISRVQAPAAHNRRLTGSGVKVAVLDTGISTHPDLNIRGGASFVPGEPSTQDGNGHGTHVAGTIAALNNDIGVLGVAPSAELYAVKVLGASGSGSVSSIAQGLEWAGNNDMHVANLSLGSPSPSATLEQAVNSATSRGVLVVAASGNSGADSISYPARYANAMAVGATDQNNNRASFSQYGAGLDIVAPGVNVQSTYPGSTYASLNGTSMATPHVAGAAALVKQKNPSWSNVQIRNRLKNTATSLGSTNLYGSGLVNAEAATR

SEQ ID NO: 56463 - protein, 269 aa, Unidentified
AQSVPWGISRVQAPAAHNRGLTGSGVKVAVLDTGISTHPDLNIRGGASFVPGEPSTQDGEGHGTHVAGTIAALNNSIGVLGVAPSAELYAVKVLGASGAGSVSSIAQGLEWAGNNGMHVANLSLGSPSPSATLEQAVNSATSRGVLVVAASGNSGEGSISYPARYANAMAVGATDQNNNHASFSQYGAGLDIVAPGVNVQSTYPGSTYASLNGTSMATPHVAGAAALVKQKNPSWSNVQIRNRLKNTATSLGSTNLYGSGLVNAEAATR

SEQ ID NO: 56464 - protein, 269 aa, Unidentified
AQSVPWGISRVQAPAAHNRKLLGSGVKVAVLDTGISTHPDLNIRGGASFVPGEPSTQDGNGHGTHVAGTIAALNNNIGVLGVAPSAELYAVKVLGASGSGSVSSIAQGLEWAGNNGMHVANLSLGSPSPSATLEQAVNSATSRGVLVVAASGNSGAGSISYPARYANAMAVGATDQNNNRASFSQYGAGLDIVAPGVNVQSTYPGSAYASENGTSMATPHVAGAAALVKQKNPSWSNVQIRNHLKNTATSLGSTNLYGSGLVNAEAATR

SEQ ID NO: 56465 - protein, 269 aa, Unidentified
AQSVPWGISRVQAPAAHNRGLAGRGVKVAVLDTGISTHPDLNIRGGASFVPGEPSTQDGNGHGTHVAGTIAALNNSIGVLGVAPSAELYAVKVLGASGSGSVSSIAQGLEWAGLNGMHVANLSLGIPSPSATLEQAVNSATSRGVLVVAASGNSGAGSISYPARYANAMAVGATDQNNNRADFSQYGAGLDIVAPGVNVQSTYPGSTYASLNGTSMATPHVAGAAALVKQKNPSWSNVQIRNHLKNTATSLGSTNLYGSGLVNAEAATR

SEQ ID NO: 56466 - protein, 269 aa, Unidentified
AQSVPWGISRVQAPAAHNRGLTGSGVKVAVLDTGISTHPDLNIRGGASFVPGEPSTQDGNGHGTHVAGTIAALNNNIGVLGVAPSAELYAVKVLGASGSGSVSSIAQGLEWAGNNRMHVANLSLGDPSPSATLEQAVNSATSRGVLVVAASGNSGAGSIDYPARYANAMAVGATDQNNNRASFSQYGAGLDIVAPGVNVQSTYPGSTYASENGTSMATPHVAGAAALVKQKNPSWSNVQIRNHLKNTATSLGSTNLYGSGLVNAEAATR

SEQ ID NO: 56467 - protein, 269 aa, Unidentified
AQVVPWGISRVQAPAAHNRGLTGSGVKVAVLDTGISTHEDLNIRGGASFVPGEPSTQDGNGHGTHVAGTIAALDNSIGVLGVAPSAELYAVKVLGASGSGSVSSIAQGLEWAGNNRMHVANLSLGSPSPSATLEQAVNSATSRGVLVVAASGNSGAGSISYPARYANAMAVGATDQNNNRASFSQYGAGLDIVAPGVNVQSTYPGSTYKSLNGTSMATPHVAGAAALVKQKNPSWSNVQIRNHLKNTATSLGSTNLYGSGLVNAEAATR

SEQ ID NO: 56468 - protein, 269 aa, Unidentified
AQSVPWGISRVQAPAAHNRGLTGRGVKVAVLDSGISTHPDLNIRGGASFVPGEPSTQDGNGHGTHVAGTIAALNNSIGVLGVAPSAELYAVKVLGASGSGSVSSIAQGLEWAGNNRMHVANLSLGSPSPSATLEQAVNSATSRGVLVVAASGNSGAGSIDYPARYANAMAVGATDQNNNRADFSQYGAGLDIVAPGVNVQSTYPGSTYASLNGTSMATPHVAGAAALVKQKNPSWSNVQIRNHLKNTATSLGSTNLYGSGLVNAEAATR

SEQ ID NO: 56469 - protein, 269 aa, Unidentified
AQSVPWGISRVQAPAAHRRGLTGRGVKVAVLDTGISTHPDLNIRGGASFVPGEPSTQDGNGHGTHVAGTIAALDNSIGVLGVAPSAELYAVKVLGASGGGSVSSIAQGLEWAGNNGMHVANLSLGSPSPSATLEQAVNSATSRGVLVVAASGNSGAGSISYPARYANAMAVGATDQNNNRASFSQYGAGLDIVAPGVNVQSTYPGSTYASLNGTSMATPHVAGAAALVKQKNPSWSNVRIRNHLKNTATSLGSTNLYGSGLVNAEAATR

SEQ ID NO: 56470 - protein, 269 aa, Unidentified
AQSVPWGISRVQAPAAHRRGLTGRGVKVAVLDTGISTHPDLNIRGGASFVPGEPSTQDGNGHGTHVAGTIAALDNSIGVLGVAPSAELYAVKVLGASGSGSVSSIAQGLEWAGNNGMHVANLSLGSPSPSATLEQAVNSATSRGVLVVAASGNSGAGSISYPARYANAMAVGATDQNNNRASFSQYGAGLDIVAPGVNVQSTYPGSTYASLNGTSMATPHVAGAAALVKQKNPSWSNVQIRNRLKNTATSLGSTNLYGSGLVRAEAATR

SEQ ID NO: 56471 - protein, 269 aa, Unidentified
AQSVPWGISRVQAPAAHNRRLTGSGVKVAVLDTGISTHPDLNIRGGASFVPGEPSTQDGNGHGTHVAGTIAALNNSIGVLGVAPSAELYAVKVLGASGAGSISSIAQGLEWAGNNGMHVANLSLGSPSPSATLEQAVNSATSRGVLVVAASGNSGAGSISYPARYANAMAVGATDQNNNRASFSQYGAGLDIVAPGVNVQSTYPGSTYASLNGTSMATPHVAGAAVLVKQKNPSWSNVRIRNHLKNTATSLGSTNLYGSGLVNAEAATR

SEQ ID NO: 56472 - protein, 269 aa, Unidentified
AQSVPWGISRVQAPAAHNRGLTGSGFKVAVFDTGISTHPDLNIRGGASFVPGEPSTQDGNGHGTHVAGTIAALNNNIGVLGVAPSAELYAVKVLGASGSASVSSIAQGLEWAGNNGMHVANLSLGSPSPSATLEQAVNSATSRGVLVVAASGNSGAGDISYPARYANAMAVGATDQNNNRASFSQYGAGLDIVAPGVNVQSTYPGSTYASLNGTSMATPHVAGAAALVKQKNPSWSNVQIRNHLKNTATSLGSTNLYGSGLVNAEAATR

SEQ ID NO: 56473 - protein, 269 aa, Unidentified
AQSVPWGISRVQAPAAHNRKLTGSGVKVAVLDTGISTHPDLNIRGGASFVPGEPSTQDGEGHGTHVAGTIAALNNSIGVLGVAPSAELYAVKVLGASGGGSVSSIAGGLEWAGLNGMHVANLSLGSPSPSATLEQAVNSATSRGVLVVAASGNSGAGSISYPARYANAMAVGATDQNNNRASFSQYGAGLDIVAPGVNVQSTYPGSTYASLNGTSMATPHVAGAAALVKQKNPSWSNVQIRNHLKNTATSLGSTNLYGSGLVNAEAATR

SEQ ID NO: 56474 - protein, 269 aa, Unidentified
AQSVPWGISRVQAPAAHNRGLTGSGVKVAVLDTGISTHPDLNIRGGASFVPGEPSTQDGEGHGTHVAGTIAALNNSIGVLGVAPSAELYAVKVLGASGSGSVSSIAQGLEWAGNNGMHVANLSLGSPSPSATLEQAVNSATSRGVLVVAASGNSGAGSISYPARYANAMAVGATDQNNNHADFSQYGAGLDIVAPGVNVQSTYPGSTYASLNGTSMATPHVAGAAALVKQKNPSWSNVQIRNRLKNTATSLGSTNLYGSGLVNAFAATR

SEQ ID NO: 56475 - protein, 269 aa, Unidentified
AQSVPWGISRVQAPAAHNRRLTGSGVKVAVLDTGISTHPDLNIRGGASFVPGEPSTQDGNGHGTHVAGTIAALNNSIGVLGVAPSAELYAVKVLGASGGGAVSSIAQGLEWAGNNGMHVANLSLGSPSPSATLEQAVNSATSRGVLVVAASGNSGAGSISYPARYANAMAVGATDQNNNRASFSQYGAGLDIVAPGVNVQSTYPGSTYASLNGTSMATPHVAGAAVLVKQKNPSWRNVQIRNHLKNTATSLGSTNLYGSGLVNAEAATR

SEQ ID NO: 56476 - protein, 269 aa, Unidentified
AQSVPWGISRVQAPAAHNRKLTGFGVKVAVLDSGISTHPDLNIRGGASFVPGEPSTQDGNGHGTHVAGTIAALNNSIGVLGVAPSAELYAVKVLGASGSGSVSSIAQGLEWAGNNGMHVANLSLGSESPSATLEQAVNSATSRGVLVVAASGNSGAGSISYPARYANAMAVGATDQNNNRASFSQYGEGLDIVAPGVNVQSTYPGSTYASLNGTSMATPHVAGAAALVKQKNPSWSNVQIRNHLKNTATSLGSTNLYGSGLVNAEAATR

SEQ ID NO: 56477 - protein, 269 aa, Unidentified
AQSVPWGISRVQAPAAHNRGLTGSGVKVAVLDTGISTHPDLNIRGGASFVPGEPSTQDGEGHGTHVAGTIAALNNDIGVLGVAPSAELYAVKVLGASGSGSVSSIAQGLEWAGNNDMHVANLSLGSPSPSATLEQAVNSATSRGVLVVAASGNSGAGSISYPARYANAMAVGATDQNNNRASFSQYGAGLDIVAPGVNVQSTYPGSTYASLNGTSMATPHVAGAAALVKQKNPSWSNVQIRDRLKNTATSLGSTNLYGSGLVNAEAATR

SEQ ID NO: 56478 - protein, 269 aa, Unidentified
AQSVPWGISRVQAPAAHNRGLTGSGVKVAVLDTGISTHPDLNIRGGASFVPGEPSTQDGNGHGTHVAGTIAALNNSIGVLGVAPSAELYAVKVLGADGRGAISSIAQGLEWAGNNGMHVANLSLGSPSPSATLEQAVNSATSRGVLVVAASGNSGATSISYPARYANAMAVGATDQNNNRASFSQYGAGLDIVAPGVNVQSTYPGSTYASLNGTSMATPHVAGAAALVKQKNPSWSNVQIRNHLKNTATSLGSTNLYGSGLVNAEAATR

SEQ ID NO: 56479 - protein, 269 aa, Unidentified
AQSVPWGISRVQAPAAHNRGLLGFGVKVAVLDTGISTHPDLNIRGGASFVPGEPSTQDGNGHGTHVAGTIAALNNNIGVLGVAPSAELYAVKVLGASGSGSVSSIAQGLEWAGNNGMHVANLSLGDPSPSATLEQAVNSATSRGVLVVAASGNSGAGSIDYPARYANAMAVGATDQNNNRASFSQYGAGLDIVAPGVNVQSTYPGSTYASLNGTSMATPHVAGAAALVKQKNPSWSNVQIRNHLKNTATSLGSTNLYGSGLVNAEAATR

SEQ ID NO: 56480 - protein, 269 aa, Unidentified
AQSVPWGISRVQAPAAHNRGLAGSGVKVAVLDTGISTHPDLNIRGGASFVPGEPSTQDGNGHGTHVAGTIAALNNSIGVLGVAPSAELYAVKVLGASGGGGISSIAQGLEWAGNNGMHVANLSLGNPSPSATLEQAVNSATSRGVLVVAASGNSGAGSISYPARYANAMAVGATDQNNNRASFSQYGAGLDIVAPGVNVQSTYPGSTYASLNGTSMATPHVAGAAALVKQKNPSWSNVQIRNHLKNTATSLGSTNLYGSGLVNAEAATR

SEQ ID NO: 56481 - protein, 269 aa, Unidentified
AQSVPWGIARVQAPAAHNRRLTGSGVKVAVLDTGISTHPDRNIRGGASFVPGEPSTQDGNGHGTHVAGTIAALNNRIGVLGVAPSAELYAVKVLGASGSGSVSSIAQGLEWAGNNGMHVANLSLGSPSPSATLEQAVNSATSRGVLVVAASGNSGAGSISYPARYANAMAVGATDQNNNRASFSQYGAGLDIVAPGVNVQSTYPGSTYASLNGTSMATPHVAGAAALVKQKNPSWRNVQIRNHLKNTATSLGSTNLYGSGLVNAEAATR

SEQ ID NO: 56482 - protein, 269 aa, Unidentified
AQSVPWGISRVQAPAAHNRGLLGFGVKVAVLDTGISTHPDLNIRGGASFVPGEPSTQDGNGHGTHVAGTIAALNNNIGVLGVAPSAELYAVKVLGASGSGSVSSIAQGLEWAGNNGMHVANLSLGSPSPSATLEQAVNSATSRGVLVVAASGNSGAGSIDYPARYANAMAVGATDQNNNRASFSQYGAGLDIVAPGVNVQSTYPGSAYASLNGTSMATPHVAGAAALVKQKNPSWSNVQIRNHLKNTATSLGSTNLYGSGLVNAEAATR

SEQ ID NO: 56483 - protein, 269 aa, Unidentified
AQSVPWGISRVQAPAAHRRGLTGRGVKVAVLDTGISTHPDLNIRGGASFVPGEPSTQDGNGHGTHVAGTIAALDNSIGVLGVAPSAELYAVKVLGASGSGSVSSIAQGLEWAGNNGMHVANLSLGSPSPSATLEQAVNSATSRGVLVVAASGNSGAGSISYPARYANAMAVGATDQNNNRASFSQYGAGLDIVAPGVNVQSTYPQSTYASLNGTSMATPHVAGAAALVKQKNPSWSNVQIRNRLKNTATSLGSTNLYGSGLVNAEAATR

SEQ ID NO: 56484 - protein, 269 aa, Unidentified
AQSVPWGISRVQAPAAHNRGLTGRGVKVAVLDTGISTHPDLNIRGGASFVPGEPSTQDGEGHGTHVAGTIAALNNSIGVLGVAPSAELYAVKVLGASGSGSVSSIAQGLEWAGNNRMHVANLSLGIPSPSATLEQAVNSATSRGVLVVAASGNSGAGSISYPARYANAMAVGATDQNNNRADFSQYGAGLDIVAPGVNVQSTYPGSTYASLNGTSMATPHVAGAAALVKQKNPSWSNVQIRNHLKNTATSLGSTNLYGSGLVNAEAATR

SEQ ID NO: 56485 - protein, 269 aa, Unidentified
AQSVPWGISRVQAPAAHNRKLTGSGVKVAVLDTGISTHPDLRIRGGASFVPGEPSTQDGNGHGTHVAGTIAALNNNIGVLGVAPSAELYAVKVLGASGDGSVSSIAQGLEWAGNNGMHVANLSLGSPSPSATLEQAVNSATSRGVLVVAASGNSGAGSISYPARYANAMAVGATDQNNNRASFSQYGAGLDIVAPGVNVQSTYPGSTYASLNGTSMATPHVAGAAALVKQKNPRWSNVQIRNHLKNTATSLGSTNLYGSGLVNAEAATR

SEQ ID NO: 56486 - protein, 269 aa, Unidentified
AQSVPWGISRVQAPAAHNRGLTGSGVKVAVLDTGISTHPDLNIRGGASFVPGEPSTQDGNGHGTHVAGTIAALNNSIGVLGVAPSAELYAVKVLGASGSGSVSSIAQGLEWAGNNVMHVANLSLGLQAPSATLEQAVNSATSRGVLVVAASGNSGAGSIDYPARYANAMAVGATDQNNNRASFSQYGAGLDIVAPGVNVQSTYPGSTYASLNGTSMATPHVAGAAALVKQKNPSWSNVQIRNHLKNTATSLGSTNLYGSGLVNAEAATR

SEQ ID NO: 56487 - protein, 269 aa, Unidentified
AQSVPWGISRVQAPAAHNRKLLGFGVKVAVLDTGISTHPDLNIRGGASFVPGEPSTQDGNGHGTHVAGTIAALNNNIGVLGVAPSAELYAVKVLGASGSGSVSSIAQGLEWAGNNGMHVANLSLGDPSPSATLEQAVNSATSRGVLVVAASGNSGAGSISYPARYANAMAVGATDQNNNRASFSQYGAGLDIVAPGVNVQSTYPGSTYASLNGTSMATPHVAGAAALVKQKNPSWSNVQIRNHLKNTATSLGSTNLYGSGLVNAEAATR

SEQ ID NO: 56488 - protein, 269 aa, Unidentified
AQSVPWGISRVQAPAAHNRRLTGRGVKVAVLDTGISTHPDLNITGGASFVPGEPSTQDGNGHGTHVAGTIAALNNSIGVLGVAPSAELYAVKVLGASGAGSVSSIAQGLEWAGNNGMHVANLSLGSPSPSATLEQAVNSATSRGVLVVAASGNSGAGSISYPARYANAMAVGATDQNNNRASFSQYGAGLDIVAPGVNVQSTYPGSAYASLNGTSMATPHVAGAAALVKQKNPSWSNVQIRNHLKNTATSLGSTNLYGSGLVNAEAATR

SEQ ID NO: 56489 - protein, 269 aa, Unidentified
AQSVPWGISRVQAPAAHNRGLTGSGVKVAVLDSGISTHPDLNIRGGASFVPGEPSTQDGNGHGTHVAGTIAALNNRIGVLGVAWSAELYAVKVLGASGSGSVSSIAQGLEWAGNNRMHVANLSLGSPSPSATLEQAVNSATSRGVLVVAASGNSGAGSISYPARYANAMAVGATDQNNNRASFSQYGAGLDIVAPGVNVQSTAPGSTYASLNGTSMATPHVAGAAALVKQKNPSWSNVQIRNHLKNTATSLGSTNLYGSGLVNAEAATR

SEQ ID NO: 56490 - protein, 269 aa, Unidentified
AQSVPWGISRVQAPAAHNRGLTGSGVKVAVLDTGISTHPDLNIRGGASFVPGEPSTQDGNGHGTHVAGTIAALNNSIGVLGVAPSAELYAVKVLGASGAGAISSIAQGLEWAGNNGMHVANLSLGSPSPSATLEQAVNSATSRGVLVVAASGNSGAGSISYPARYANAMAVGATDQNNNRASFSQYGAGLDIVAPGVNVQSTYPGSTYASLNGTSMATPHVAGAAVLVKQKNPSWSNVRIRNHLKNTATSLGSTNLYGSGLVNAEAATR

SEQ ID NO: 56491 - protein, 269 aa, Unidentified
AQSVPWGISRVQAPAAHNRGLTGSGVKVAVLDTGISTHPDLNIRGGASFVPGEPSTQDGNGHGTHVAGTIAALNNSIGVLGVAPSAELYAVKVLGASGAGSVSSIAQGLEWAGNNGMHVANLSLGNPSPSATLEQAVNSATSRGVLVVAASGNSGEGSISYPARYANAMAVGATDQNNNHASFSQYGAGLDIVAPGVNVQSTYPGSTYASLNGTSMATPHVAGAAALVKQKNPSWSNVQIRNHLKNTATSLGSTNLYGSGLVNAFAATR

SEQ ID NO: 56492 - protein, 269 aa, Unidentified
AQSVPWGISAVQAPAAHNRRLTGRGVKVAVLDTGISTHPDLNIRGGASFVPGEPSTQDGNGHGTHVAGTIAALNNSIGVLGVAPSAELYAVKVLGASGAGSVSSIAQGLEWAGLNGMHVANLSLGSPSPSATLEQAVNSATSRGVLVVAASGNSGAGSISYPARYANAMAVGATDQNNNRASFSQYGAGLDIVAPGVNVQSTYPGSTYASLNGTSMATPHVAGAAALVKQKNPSWSNVQIRNHLKNTATSLGSTNLYGSGLVNAEAATR

SEQ ID NO: 56493 - protein, 269 aa, Unidentified
AQSVPWGISRVQAPAAHNRKLTGSGVRVAVLDTGISTHPDLNIRGGASFVPGEPSTQDGNGHGTHVAGTIAALNNSIGVLGVAPSAELYAVKVLGASGSGSVSSIAQGLEWAGNNGMHVANLSLGSESPSATLEQAVNSATSRGVLVVAASGNSGAGSIDYPARYANAMAVGATDQNNNRASFSQYGAGLDIVAPGVNVQSTYPGSTYASLNGTSMATPHVAGAAALVKQKNGSWSNVQIRNHLKNTATSLGSTNLYGSGLVNAEAATR

SEQ ID NO: 56494 - protein, 269 aa, Unidentified
AQSVPWGISRVQAPAAHNRRLTGRGVKVAVLDTGISTHPDLNIRGGASFVPGEPSTQDGNGHGTHVAGTIAALNNSIGVLGVAPSAELYAVKVLGASGAGSVSSIAQGLEWAGLNGMHVANLSLGSPSPSATLEQAVNSATSRGVLVVAASGNSGAGSISYPARYANAMAVGATDQNNNRASFSQYGAGLDIVAPGVNVQSTYPGSTYASLNGTSMATPHVAGAAALVKQKNGSWSNVQIRNHLKNTATSLGSTNLYGSGLVNAEAATR

SEQ ID NO: 56495 - protein, 269 aa, Unidentified
AQSVPWGISRVQAPAAHNRKLLGSGVKVAVLDTGISTHPDLNIRGGASFVPGEPSTQDGNGHGTHVAGTIAALNNNIGVLGVAPSAELYAVKVLGASGSGSVSSIAQGLEWAGNNGMHVANLSLGDPSPSATLEQAVNSATSRGVLVVAASGNSGAGSISYPARYANAMAVGATDQNNNRASFSQYGAGLDIVAPGVNVQSTYPGSAYASLNGTSMATPHVAGAAALVKQKNPSWSNVQIRNHLKNTATSLGSTNLYGSGLVNAEAATR

SEQ ID NO: 56496 - protein, 269 aa, Unidentified
AQSVPWGISRVQAPAAHNRGLAGSGVKVAVLDTGISTHPDLNIRGGASFVPGEPSTQDGNGHGTHVAGTIAALNNSIGVLGVAPSAELYAVKVLGASGGGAISSIAQGLEWAGNNGMHVANLSLGNPSPSATLEQAVNSATSRGVLVVAASGNSGAGSISYPARYANAMAVGATDQNNNRASFSQYGAGLDIVAPGVNVQSTYPGSTYASLNGTSMATPHVAGAAALVKQKNPSWSNVQIRNHLKNTATSLGSTNLYGSGLVNAEAATR

SEQ ID NO: 56497 - protein, 270 aa, Synthetic construct
AQSVPWGISRVQAPAAHNRGLTGSGVKVAVLDTGIDSTHPDLNIRGGASFVPGEPSTQDGNGHGTHVAGTIAALDNSIGVLGVAPSAELYAVKVLGASGSGSVSSIAQGLEWAGNNGMDVANLSLGSPSPSATLEQAVNSATSRGVLVVAASGNSGAGSISYPARYANAMAVGATDQNNNRASFSQYGPELDIVAPGVNVQSTYPGSTYASLNGTSMATPHVAGAAALVLQKNPSWSNVQIRNHLKNTATSLGSTNLYGSGLVNAEAATR

SEQ ID NO: 56498 - protein, 269 aa, Unidentified
AQSVPWGISRVQAPAAHNRGLTGSGVKVAVLDSGISTHPDLNIRGGASFVPGEPSTQDGNGHGTHVAGTIAALNNSIGVLGVAPSAELYAVKVLGASGSGSVSSIAQGLEWAGLNGMHVANLSLGSPSPSATLEQAVNSATSRGVLVVAASGNSGEGSIDYPARYANAMAVGATDQNNNRADFSQYGAGLDIVAPGVNVQSTYPGSTYASLNGTSMATPHVAGAAALVKQKNPSWSNVQIRNHLKNTATSLGSTNLYGSGLVNAEAATR

SEQ ID NO: 56499 - protein, 269 aa, Unidentified
AQSVPWGISRVQAPAAHNRGLTGSGVKVAVLDTGISTHPDLNIRGGASFVPGEPSTQDGNGHGTHVAGTIAALDNNIGVLGVAPSAELYAVKVLGASGSGSVSSIAQGLEWAGNNGMRVANLSLGSPSPSATLEQAVNSATSRGVLVVAASGNSGAGSISYPARYANAMAVGATDQNNNRASFSQYGAGLDIVAPGVNVLSTYPGSTYASLNGTSMATPHVAGAAALVKQKNPSWSNVQIRNRLKNTATSLGSTNLYGSGLVNAEAATR

SEQ ID NO: 56500 - protein, 269 aa, Unidentified
AQSVPWGISRVQAPAAHNRGLTGGGVKVAVLDTGISTHPDLNIRGGASFVPGEPSTQDGNGHGTHVAGTIAALNNSIGVLGVAPSAELYAVKVLSASGQGSVSSIANGLEWAGNNGMHVANLSLGAPSPSATLEQAVNSATSRGVLVVAASGNSGAGSISYPARYANAMAVGATDQNNNRASFSQYGAGLDIVAPGVNVQSTYPGSTYASLNGTSMATPHVAGAAALVKQKNPSWSNVQIRNHLKNTATSLGSTNLYGSGLVNAEAATR

SEQ ID NO: 56501 - protein, 269 aa, Unidentified
AQSVPWGISRVQAPAAHNRGLTGSGVKVAVLDTGISTHPDLNIRGGASFVPGEPSTQDGNGHGTHVAGTIAALNNRIGVLGVAPSAELYAVKVLGASGSGNVSGIAQGLEWAGNNGMHVANLSLGSPSPSATLEQAVNSATSRGVLVVAASGNSGAGSISWPARYANAMAVGATDQNNNRASFSQYGAGLDIVAPGVNVQSTYPGSTYASLNGTSMATPHVAGAAALVKNKNPSWSNVQIRNHLKNTATSLGSTNLYGSGLVNAEAATR

SEQ ID NO: 56502 - protein, 269 aa, Unidentified
AQSVPWGISRVQAPAAHNRRLTGRGVKVAVLDTGISTHPDLNIRGGASFVPGEPSTQDGNGHGTHVAGTIAALNNSIGVLGVAPSAELYAVKVLGASGAGSVSSIAQGLEWAGLNGMHVANLSLGSPSPSATLEQAVNSATSRGVLVVAASGNSGAGSISYPARYANAMAVGATDQNNNRASFSQYGAGLDIVAPGVNVQSTYPGSTYASLNGTSMATPHVAGAAALFKQKNPSWSNVQIRNHLKNTATSLGSTNLYGSGLVNAEAATR

SEQ ID NO: 56503 - protein, 269 aa, Unidentified
AQSVPWGISRVQAPAAHNRGLTGSGVKVAVLDTGISTHPDLNIRGGASFVPGEPSTQDGNGHGTHVAGTIAALNNSIGVLGVAPSAELYAVKVLGASGSGSVSSIAQGLEWAGNNGMHVANLSLGSPSPSATLEQAVNSATSRGVLVVAASGNSGAGSISYPARYANAMAVGATDQNNNRASFSQYGAGLDIVAPGVNVQSTYPGSTYASENGTSMATPHVAGAAVLVKQKNPSWSNVRIRDRLKNTATSLGSTNLYGSGLVNAEAATR

SEQ ID NO: 56504 - protein, 269 aa, Unidentified
AQSVPWGISRVQAPAAHNRRLTGSGVKVAVLDTGISTHPDLNIRGGASFVPGEPSTQDGEGHGTHVAGTIAALNNSIGVLGVAPSAELYAVKVLGASGSGSVSSIAQGLEWAGNNRMHVANLSLGSPSPSATLEQAVNSATSRGVLVVAASGNSGADSISYPARYANAMAVGATDQNNNRASFSQYGAGLDIVAPGVNVQSTYPGSTYASLNGTSMATPHVAGAAALVKQKNPSWSNVQIRDHLKNTATSLGSTNLYGSGLVNAEAATR

SEQ ID NO: 56505 - protein, 269 aa, Unidentified
AQSVPWGISRVQAPAAHNRKLTGSGVKVAVLDTGISTHPDLNIRGGASFVPGEPSTQDGNGHGTHVAGTIAALNNNIGVLGVAPSAELYAVKVLGASGSGSVSSIAQGLEWAGNNGMHVANLSLGLPSPSATLEQAVNSATSRGVLVVAASGNSGAGSISYPARYANAMAVGATDQNNNRASFSQYGAGLDIVAPGVNVQSTYPGSTYASLNGTSMATPHVAGAAALVKQKNPRWSNVQIRNHLKNTATSLGSTNLYGSGLVNALAATR

SEQ ID NO: 56506 - protein, 269 aa, Unidentified
AQSVPWGISRVQAPAAHNRGLAGRGVKVAVLDTGISTHPDLNIRGGASFVPGEPSTQDGNGHGTHVAGTIAALNNSIGVLGVAPSAELYAVKVLGASGSGSVSSIAQGLEWAGLNGMHVANLSLGSPSPSATLEQAVNSATSRGVLVVAASGNSGEGSISYPARYANAMAVGATDQNNNRADFSQYGAGLDIVAPGVNVQSTYPGSTYASLNGTSMATPHVAGAAALVKQKNPSWSNVQIRNHLKNTATSLGSTNLYGSGLVNAEAATR

SEQ ID NO: 56507 - protein, 269 aa, Unidentified
AQSVPWGISRVQAPAAHNRRLWGSGVKVAVLDTGISTHPDLNIRGGASFVPGEPSTQDGNGHGTHVAGTIAALNNSIGVLGVAPSAELYAVKVLGASGAGSVSSIAQGLEWAGNNGMHVANLSLGSPSPSATLEQAVNSATSRGVLVVAASGNSGAGSISYPARYANAMAVGATDQNNNRASFSQYGAGLDIVAPGVNVQSTYIGSAYASLNGTSMATPHVAGAAALVKQKNPSWSNVQIRNHLKNTATSLGSTNLYGSGLVNAEAATR

SEQ ID NO: 56508 - protein, 269 aa, Unidentified
AQSVPWGISRVQAPAAHNRGLTGSGVKVAVLDTGISTHPDLNIRGGASFVPGEPSTQDGEGHGTHVAGTIAALNNDIGVLGVAPSAELYAVKVLGASGSGSVSSIAQGLEWAGNNDMHVANLSLGSPSPSATLEQAVNSATSRGVLVVAASGNSGAGSISYPARYANAMAVGATDQNNNRADFSQYGAGLDIVAPGVNVQSTYPGSTYASLNGTSMATPHVAGAAALVKQKNPSWSNVQIRNRLKNTATSLGSTNLYGSGLVNAEAATR

SEQ ID NO: 56509 - protein, 269 aa, Unidentified
AQSVPWGISRVQAPAAHNRGLLGFGVKVAVLDTGISTHPDLNIRGGASFVPGEPSTQDGNGHGTHVAGTIAALNNNIGVLGVAPSAELYAVKVLGASGSGSVSSIAQGLEWAGNNRMHVANLSLGSPSPSATLEQAVNSATSRGVLVVAASGNSGAGSIDYPARYANAMAVGATDQNNNRASFSQYGAGLDIVAPGVNVQSTYPGSTYASLNGTSMATPHVAGAAALVKQKNPSWSNVQIRNHLKNTATSLGSTNLYGSGLVNAEAATR

SEQ ID NO: 56510 - protein, 269 aa, Unidentified
AQSVPWGISRVQAPAAHNRGLTGRGVKVAVLDTGISTHPDLNIRGGASFVPGEPSTQDGNGHGTHVAGTIAALNNDIGVLGVAPSAELYAVKVLGASGSGSVSSIAQGLEWAGNNSMHVANLSLGSPSPSATLEQAVNSATSRGVLVVAASGNSGADSISYPARYANAMAVGATDQNNNRASFSQYGAGLDIVAPGVNVQSTYPGSTYASLNGTSMATPHVAGAAALVKQKNPSWSNVRIRNHLKNTATSLGSTNLYGSGLVNAEAATR

SEQ ID NO: 56511 - protein, 269 aa, Unidentified
AQSVPWGISRVQAPAAHNRGLTGSGVKVAVLDTGISTHPDLNIRGGASFVPGEPSTQDGNGHGTHVAGTIAALNNSIGVLGVAPSAELYAVKVLGASGAGSVSSIAQGLEWAGNNGMEVANLSLGSPSPSATLEQAVNSATSRGVLVVAASGNSGAGSISYPARYANAMAVGATDQNNNRASFSQWGAGLDIVAPGVNVQSTYPGSTYFSLNGTSMAAPHVAGAAALVKQKNPSWSNVQIRNHLKNTATSLGSTNLYGSGLVNAEAATR

SEQ ID NO: 56512 - protein, 269 aa, Unidentified
AQSVPWGISRVQAPAAHNRGLTGSGVKVAVLDSGISTHPDLNIRGGASFVPGEPSTQDGEGHGTHVAGTIAALNNSIGVLGVAPSAELYAVKVLGASGSGSVSSIAQGLEWAGNNRMHVANLSLGIPSPSATLEQAVNSATSRGVLVVAASGNSGEGSISYPARYANAMAVGATDQNNNRASFSQYGAGLDIVAPGVNVQSTYPGSTYASLNGTSMATPHVAGAAALVKQKNPSWSNVQIRNHLKNTATSLGSTNLYGSGLVNAEAATR

SEQ ID NO: 56513 - protein, 269 aa, Unidentified
AQSVPWGISRVQAPAAHNRKLLGFGVKVAVLDTGISTHPDLNIRGGASFVPGEPSTQDGNGHGTHVAGTIAALNNSIGVLGVAPSAELYAVKVLGASGSGSVSSIAQGLEWAGNNRMHVANLSLGDPSPSATLEQAVNSATSRGVLVVAASGNSGAGSISYPARYANAMAVGATDQNNNRASFSQYGAGLDIVAPGVNVQSTYPGSTYASLNGTSMATPHVAGAAALVKQKNPSWSNVQIRNHLKNTATSLGSTNLYGSGLVNAEAATR

SEQ ID NO: 56514 - protein, 269 aa, Unidentified
AQSVPWGISRVQAPAAHRRGLTGSGVKVAVLDTGISTHPDLNIRGGASFVPGEPSTQDGNGHGTHVAGTIAALNNSIGVLGVAPSAELYAVKVLGASGGGSISSIAQGLEWAGNNGMHVANLSLGSPSPSATLEQAVNSATSRGVLVVAASGNSGAGSISYPARYANAMAVGATDQNNNRASFSQYGAGLDIVAPGVNVQSTYPGSTYASLNGTSMATPHVAGAAVLVKQKNPSWSNVQIRNRLKNTATSLGSTNLYGSGLVNAEAATR

SEQ ID NO: 56515 - protein, 269 aa, Unidentified
AQSVPWGISRVQAPAAHRRGLTGRGVKVAVLDTGISTHPDLRIRGGASFVPGEPSTQDGNGHGTHVAGTIAALDNSIGVLGVAPSAELYAVKVLGASGSGSVSSIAQGLEWAGNNGMHVANLSLGSPSPSATLEQAVNSATSRGVLVVAASGNSGAGSISYPARYANAMAVGATDQNNNRASFSQYGAGLDIVAPGVNVQSTYPGSTYASLNGTSMATPHVAGAAALVKQKNPSWSNVQIRNRLKNTATSLGSTNLYGSGLVNAEAATR

SEQ ID NO: 56516 - protein, 269 aa, Unidentified
AQSVPWGISRVQAPAAHNRGLTGSGVKVAVLDTGISTHPDLNVRGGVSFVPGEPSTQDGNGHGTHVAGTIAALNNSIGVLGVAPSAELYAVKVLGASGRGSVSSIAQGLEWAGNNGMHVANLSLGSPAPSATLEQAVNSATSRGVLVVAASGNSGAGSISYPARYANAMAVGATDQNNNRASFSQYGAGLDIVAPGVNVQSTYPGSTYASLNGTSMATPHVAGAAALVKQKNPSWSNVQIRDHLKNTATSLGSTNLYGSGLVNAEAATR

SEQ ID NO: 56517 - protein, 269 aa, Unidentified
AQSVPWGISRVQAPAAHNRKLTGGGVKVAVLDTGISTHPDLNIRGGASFVPGEPSTQDGEGHGTHVAGTIAALNNSIGVLGVAPSAELYAVKVLGASGGGSVSSIAQGLEWAGLNGMHVANLSLGSPSPSATLEQAVNSATSRGVLVVAASGNSGAGSISYPARYANAMAVGATDQNNNRASFSQYGAGLDIVAPGVNVQSTYPGSTYASLNGTSMATPHVAGAAALVKQKNPSWSNVQIRNHLKNTATSLGSTNLYGSGLVNAEAATR

SEQ ID NO: 56518 - protein, 269 aa, Unidentified
AQSVPWGISRVQAPAAHNRRLTGRGVKVAVLDTGISTHPDLNIRGGASFVPGEPSTQDGNGHGTHVAGTIAALNNSIGVLGVAPSAELYAVKVLGASGAGSVSSIAQGLEWAGLNGMHVANLSLGSPSPSATLEQAVNSATSRGVLVVAASGNSGAGSISYPARYANAMAVGATDQNNNRASFSQYGAGLDIVAPGVNVQSTYPGSTYASLNGTSMATPHVAGAAALVKQKNPSWSNVQIRNHLKNTATSLGSTNLYGSGLVNAAAATR

SEQ ID NO: 56519 - protein, 269 aa, Unidentified
AQSVPWGISRVQAPAAHRRGLTGSGVKVAVLDTGISTHPDLRITGGASFVPGEPSTQDGNGHGTHVAGTIAALNNSIGVLGVAPSAELYAVKVLGASGSGSVSSIAQGLEWAGNNGMHVANLSLGSPSPSATLEQAVNSATSRGVLVVAASGNSGAGSISYPARYANAMAVGATDQNNNRASFSQYGAGLDIVAPGVNVQSTYPGSTYASLNGTSMATPHVAGAAALVKQKNPSWRNVQIRNRLKNTATSLGSTNLYGSGLVNAEAATR

SEQ ID NO: 56520 - protein, 269 aa, Unidentified
AQSVPWGISRVQAPASHNRGLAGSGVKVAVLDTGISTHPDLNIRGGASFVPGEPSTQDGNGHGTHVAGTIAALNNSIGVLGVAPSAELYAVKVLGASGSGALSSIAQGLEWAGNNGMHVANLSLGNPSPSATLEQAVNSATSRGVLVVAASGNSGAGSISYPARYANAMAVGATDQNNNRASFSQYGAGLDIVAPGVNVQSTYPGSTYASLNGTSMATPHVAGAAALVKQKNPSWSNVQIRNHLKNTATSLGSTNLYGSGLVNAEAATR

SEQ ID NO: 56521 - protein, 269 aa, Unidentified
AQVVPWGISRVQAPAAHNRGLTGSGVKVAVLDTGISTHPDLNIRGGASFVPGEPSTQDGNGHGTHVAGTIAALDNSIGVLGVAPDAELYAVKVLGASGSGSVSSIAQGLEWAGNNRMHVANLSLGRPSPSATLEQAVNSATSRGVLVVAASGNSGAGSISYPARYANAMAVGATDQNNNRASFSQYGAGLDIVAPGVNVQSTYPGSTYASLNGTSMATPHVAGAAALVKQKNPSWSNVQIRNHLKNTATSLGSTNLYGSGLVNAEAATR

SEQ ID NO: 56522 - protein, 269 aa, Unidentified
AQSVPWGISRVQAPAAHNRGLTGSGVKVAVLDTGISTHPDLNIRGGASFVPGEPSTQDGNGHGTHVAGTIAALNNDIGVLGVAPSAELYAVKVLGASGSGSVSSIAQGLEWAGNNSMHVANLSLGSPSPSATLEQAVNSATSRGVLVVAASGNSGADSISYPARYANAMAVGATDQNNNRASFSQYGAGLDIVAPGVNVQSTYPGSTYASLNGTSMATPHVAGAAALVKQKNPSWSNVRIRNRLKNTATSLGSTNLYGSGLVNAEAATR

SEQ ID NO: 56523 - protein, 269 aa, Unidentified
AQSVPWGISRVQAPAAHNRGLTGSGVKVAVLDTGISTHPDLNIRGGASFVPGEPSTQDGNGHGTHVAGTIAALNNSIGVLGVAPSAELYAVKVLGASGAGSVSSIAQGLEWAGNNGMHVANLSLGNPSPSATLEQAVNSATSRGVLVVAASGNSGEGSISYPARYANAMAVGATDQNNNRASFSQYGAGLDIVAPGVNVQSTEPGSTYASLNGTSMATPHVAGAAALVKQKNPSWSNVQIRNRLKNTATSLGSTNLYGSGLVNAEAATR

SEQ ID NO: 56524 - protein, 269 aa, Unidentified
AQSVPWGISRVQAPAAHNRGLTGFGVKVAVLDTGISTHPDLNIRGGASFVPGEPSTQDGNGHGTHVAGTIAALNNNIGVLGVAPSAELYAVKVLGASGSGSVSSIAQGLEWAGNNRMHVANLSLGDPSPSATLEQAVNSATSRGVLVVAASGNSGAGSISYPARYANAMAVGATDQNNNRASFSQYGAGLDIVAPGVNVQSTYPGSAYASLNGTSMATPHVAGAAALVKQKNPSWSNVQIRNHLKNTATSLGSTNLYGSGLVNAEAATR

SEQ ID NO: 56525 - protein, 269 aa, Unidentified
AQSVPWGISRVQAPAAHNRGLTGSGVKVAVLDTGISTHPDLNIRGGASFVPGEPSTQDGNGHGTHVAGTIAALNNSIGVLGVAPSAILFAVKVLGASGSGSVSSIAQGLEWAGNNGMHVANLSLGSPSPSATLEQAVNSATSRGVLVVAASGNSGAGSISYPARYANAMAVGATDQNNIRASFSQYGAGLDIVAPGVNVQSTYPQSTYASLNGTSMATPHVAGAAALVKQKNPSWSNVQIRNHLKNTATSLGSTNLYGSGLVNCEAATR

SEQ ID NO: 56526 - protein, 269 aa, Unidentified
AQSVPWGISRVQAPAAHNRGLTGRGVKVAVLDTGISTHPDLNIRGGASFVPGEPSTQDGNGHGTHVAGTIAALNNGIGVLGVAPSAELYAVKVLGASGSGSVSSIAQGLEWAGNNDMHVANLSLGSESPSATLEQAVNSATSRGVLVVAASGNSGAGSISYPARYANAMAVGATDQNNNRASFSQYGAGLDIVAPGVNVQSTYPGSTYASLNGTSMATPHVAGAAALVKQKNPSWSNVRIRNHLKNTATSLGSTNLYGSGLVNAEAATR

SEQ ID NO: 56527 - protein, 269 aa, Unidentified
AQSVPWGISRVQAPAAHNRGLTGSGVKVAVLDTGISTHPDLNIRGGASFVPGEPSTQDGNGHGTHVAGTIAALNNSIGVLGVAPNAELYAVKVLGASGSGSISSIAQGLEWAGNNVMHVANLSLGVMSPSATLEQAVNSATSRGVLVVAASGNSGAGSISYPARYANAMAVGATDQNNNRASFSQYGAGLDIVAPGVNVQSTYPGSTYASLNGTSMATPHVAGAAALVKQKNPSWSNVQIRNHLKNTATSLGSTNLYGSGLVNAEAATR

SEQ ID NO: 56528 - protein, 269 aa, Unidentified
AQSVPWGISRVQAPAAHNRGLAGSGVKVAVLDTGISTHPDLNIRGGASFVPGEPSTQDGNGHGTHVAGTIAALNNSIGVLGVAPSAELYAVKVLGASGSGSLSSIAQGLEWAGNNGMHVANLSLGSPSPSATLEQAVNSATSRGVLVVAASGNSGAGSISYPARYANAMAVGATDQNNNHADFSQYGAGLDIVAPGVNVQSTYPGSTYASLNGTSMATPHVAGAAALVKQKNPSWSNVQIRNRLKNTATSLGSTNLYGSGLVNAEAATR

SEQ ID NO: 56529 - protein, 269 aa, Unidentified
AQSVPWGISRVQAPAAHNRGLAGSGVKVAVLDTGISTHPDLNIRGGASFVPGEPSTQDGNGHGTHVAGTIAALNNSIGVLGVAPSAELYAVKVLGASGSGAISSIAQGVEWAGNNGMHVANLSLGNPSPSATLEQAVNSATSRGVLVVAASGNSGAGSISYPARYANAMAVGATDQNNNRASFSQYGAGLDIVAPGVNVQSTYPGSTYASLNGTSMATPHVAGAAALVKQKNPSWSNVQIRNHLKNTATSLGSTNLYGSGLVNAEAATR

SEQ ID NO: 56530 - protein, 269 aa, Bacillus sp.
AQSVPWGISRVQAPAAHNRGLTGSGVKVAVLDTGISTHPDLNIRGGASFVPGEPSTQDGNGHGTHVAGTIAALNNSIGVLGVAPNAELYAVKVLGASGSGSVSSIAQGLEWAGNNVMHVANLSLGRSPPSATLEQAVNSATSRGVLVVAASGNSGAGSISYPARYANAMAVGATDQNNNRASFSQYGAGLDIVAPGVNVQSTYPGSTYASLNGTSMATPHVAGAAALVKQKNPSWSNVQIRNHLKNTATSLGSTNLYGSGLVNAEAATR

SEQ ID NO: 56531 - protein, 269 aa, Unidentified
AQSVPWGISRVQAPAAHNRRLTGSGVKVAVLDTGISTHPDLNIRGGASFVPGEPSTQDGNGHGTHVAGTIAALNNGIGVLGVAPSAELYAVKVLGASGSGSVSSIAQGLEWAGNNDMHVANLSLGSPSPSATLEQAVNSATSRGVLVVAASGNSGAGSISYPARYANAMAVGATDQNNNRASFSQYGAGLDIVAPGVNVQSTYPGSTYASLNGTSMATPHVAGAAALVKQKNPSWSNVRIRDHLKNTATSLGSTNLYGSGLVNAEAATR

SEQ ID NO: 56532 - protein, 269 aa, Unidentified
AQSVPWGISRVQAPAAHNRGLTGSGVKVAVLDTGISTHPDLNIRGGASFVPGEPSTQDGEGHGTHVAGTIAALNNGIGVLGVAPSAELYAVKVLGASGSGSVSSIAQGLEWAGNNSMHVANLSLGSESPSATLEQAVNSATSRGVLVVAASGNSGAGSISYPARYANAMAVGATDQNNNRASFSQYGAGLDIVAPGVNVQSTYPGSTYASLNGTSMATPHVAGAAALVKQKNPSWSNVRIRNHLKNTATSLGSTNLYGSGLVNAEAATR

SEQ ID NO: 56533 - protein, 269 aa, Unidentified
AQSVPWGISRVQAPAAHNRGLTGSGVKVAVLDTGISTHPDLNIRGGASFVPGEPSTQDGNGHGTHVAGTIAALDNSIGVLGVAPSAELYAVKVLGASGSGAISSIAQGLEWAGNNGIHVANLSLGSPSPSATLERAVNSATSRGVLVVAASGNSGAGSISYPARYANAMAVGATDQNNNRASFSQYGAGLDIVAPGVNVQSTYPGSTYASLNGTSMATPHVAGAAALVKQKNPSWSNVQIRNHLKNTATSLGSTNLYGSGLVNAEAATR

SEQ ID NO: 56534 - protein, 269 aa, Unidentified
AQSVPWGISRVQAPAAHNRGLTGRGVKVAVLDTGISTHPDLNIRGGASFVPGEPSTQDGEGHGTHVAGTIAALNNSIGVLGVAPSAELYAVKVLGASGSGSVSSIAQGLEWAGNNRMHVANLSLGIPSPSATLEQAVNSATSRGVLVVAASGNSGEGSISYPARYANAMAVGATDQNNNRASFSQYGAGLDIVAPGVNVQSTYPGSTYASLNGTSMATPHVAGAAALVKQKNPSWSNVQIRNHLKNTATSLGSTNLYGSGLVNAEAATR

SEQ ID NO: 56535 - protein, 269 aa, Unidentified
AQSVPWGISRVQAPAAHNRGLTGSGVKVAVLDTGISTHPDLRIRGGASFVPGEPSTQDGNGHGTHVAGTIAALNNSIGVLGVAPSAELYAVKVLGASGSASVSSIAQGLEWAGNNGMHVANLSLGLPSPSATLEQAVNSATSRGVLVVAASGNSGAGSISYPARYANAMAVGATDQNNNRASFSQYGAGLDIVAPGVNVQSTYPGSTYASENGTSMATPHVAGAAALVKQKNPRWSNVQIRNHLKNTATSLGSTNLYGSGLVNAEAATR

SEQ ID NO: 56536 - protein, 269 aa, Unidentified
AQSVPWGISRVQAPAAHNRGLTGSGVKVAVLDTGISTHPDLNIRGGASFVPGEPSTQDGNGHGTHVAGTIAALNNNIGVLGVAPSAELYAVKVLGASGDGSVSSIAQGLEWAGNNGMHVANLSLGQPSPSATLEQAVNSATSRGVLVVAASGNSGAGSISYPARYANAMAVGATDQNNNRASFSQYGAGLDIVAPGVNVQSTYPGSTYASENGTSMATPHVAGAAALVKQKNPSWSNVQIRNHLKNTATSLGSTNLYGSGLVNALAATR

SEQ ID NO: 56537 - protein, 269 aa, Bacillus lentus
AQSVPWGIRRVQAPTAHNRGLTGSGVKVAVLDTGISTHPDLNIRGGASFVPGEPSTQDGNGHGTHAAGTIAALNNSIGVLGVAPSAELYAVKVLGASGSGSVSSIAQGLEWAGNNGMHVANLSLGSPSPSATLEQAVNSATSRGVLVVAASGNSGAGSISYPARYANAMAVGATDQNNNRASFSQYGAGLDIVAPGVNVQSTYPGSTYASLNGTSMATPHVAGAAALVKQKNPSWSNVRIRNHLKKTATSLGSTNLYGSGLVNAEAATR

SEQ ID NO: 56538 - protein, 269 aa, Unidentified
AQSVPWGISRVQAPAAHNRGLTGSGVKVAVLDTGISTHPDLNIRGGASFVPGEPSTQDGNGHGTHVAGTIAALNNSIGVLGVAPSAELYAVKVLPQTGAGGVSSIAQGLEWAGNNGMHVANLSLGSPSPSATLEQAVNSATSRGVLVVAASGNSGAGSISYPARYANAMAVGATDQNNNRASFSQYGAGLDIVAPGVNVQSTYPGSTYASLNGTSMATPHVAGAAALVKQKNPSWSNVQIRNHLKNTATSLGSTNLYGSGLVNAEAATR

SEQ ID NO: 56539 - protein, 269 aa, Unidentified
AQSVPWGISRVQAPAAHNRGLTGSGVKVAVLDTGISTHPDLNIRGGASFVPGEPSTQDGEGHGTHVAGTIAALNNGIGVLGVAPSAELYAVKVLGASGSGSVSSIAQGLEWAGNNSMHVANLSLGSESPSATLEQAVNSATSRGVLVVAASGNSGAGSISYPARYANAMAVGATDQNNNRADFSQYGAGLDIVAPGVNVQSTYPGSTYASLNGTSMATPHVAGAAALVKQKNPSWSNVQIRNHLKNTATSLGSTNLYGSGLVNAEAATR

SEQ ID NO: 56540 - protein, 269 aa, Unidentified
AQSVPWGISRVQAPAAHNRGLTGSGVKVAVLDTGISTHPDLNIRGGASFVPGEPSTQDGNGHGTHVAGTIAALDNNIGVLGVAPRAELYAVKVLGASGSGSVSSIAQGLEWAGNNRMHVANLSLGSPSPSATLEQAVNSATSRGVLVVAASGNSGAGSISYPARYANAMAVGATDQNNNRASFSQYGAGLDIVAPGVNVLSTYPGSTYASLNGTSQATPHVAGAAALVKQKNPSWSNVQIRNHLKNTATSLGSTNLYGSGLVNAEAATR

SEQ ID NO: 56541 - protein, 269 aa, Unidentified
AQSVPWGISRVQAPAAHNRKLTGSGVKVAVLDTGISTHPDLNIRGGASFVPGEPSTQDGEGHGTHVAGTIAALNNSIGVLGVAPSAELYAVKVLGASGSGSVSSIAQGLEWAGLNGMHVAGLSLGSPSPSATLEQAVNSATSRGVLVVAASGNSGAGSISYPARYANAMAVGATDQNNNRASFSQYGAGLDIVAPGVNVQSTYPGSAYASLNGTSMATPHVAGAAALVKQKNPSWSNVQIRNHLKNTATSLGSTNLYGSGLVNAEAATR

SEQ ID NO: 56542 - protein, 269 aa, Synthetic construct
AQSVPWGISRVQAPAAHNRGLTGSGVRVAVLDTGISTHPDLNIRGGASFVPGEPSTQDGNGHGTHVAGTIAALNNSIGVLGVAPSAELYAVKVLGASGSGSYSSIAQGLEWAGNNGSHVASLSLGSPSPSATLEQAVNSATSRGVLVVAASGNSGAGSISYPARYANAMAVGATDQNNNRASFSQYGAGLDIVAPGVNVQSTYPGSTYASLNGTSMATPHVAGAAALVKQKNPSWSNVQIRNHLKNTATSLGSTNLYGSGLVNAEAAAR

SEQ ID NO: 56543 - protein, 269 aa, Unidentified
AQSVPWGISRVQAPAAHNRRLTGSGVKVAVLDTGISTHPDLNIRGGASFVPGEPSTQDGNGHGTHVAGTIAALNNDIGVLGVAPSAELYAVKVLGASGSGSVSSIAQGLEWAGNNDMHVANLSLGSPSPSATLEQAVNSATSRGVLVVAASGNSGAGSISYPARYANAMAVGATDQNNNRADFSQYGAGLDIVAPGVNVQSTYPGSTYASLNGTSMATPHVAGAAALVKQKNPSWSNVRIRNHLKNTATSLGSTNLYGSGLVNAEAATR

SEQ ID NO: 56544 - protein, 269 aa, Unidentified
AQSVPWGISRVQAPAAHNRGLTGSGVKVAVLDTGISTHPDLNIRGGASFVPGEPSTQDGNGHGTHVAGTIAALNNSIGVLGVAPSAELYAVKVLGASGSGSLSSIAQGLEWAGNNGMHVANLSLGSPSPSATLEQAVNSATSRGVLVVAASGNSGEGSISYPARYANAMAVGATDQNNNHASFSQYGAGLDIVAPGVNVQSTYPGSTYASLNGTSMATPHVAGAAALVKQKNPSWSNVQIRNRLKNTATSLGSTNLYGSGLVNAFAATR

SEQ ID NO: 56545 - protein, 269 aa, Unidentified
AQSVPWGISRVQAPAAHNRGLTGSGVKVAVLDTGISTHPDLNIRGGASFVPGEPSTQDGNGHGTHVAGTIAALNNSIGVLGVAPSAELYAVKVLPFTGGGSISSIAQGLEWAGNNGMHVANLSLGSPSPSATLEQAVNSATSRGVLVVAASGNSGAGSISYPARYANAMAVGATDQNNNRASFSQYGAGLDIVAPGVNVQSTYPGSTYASLNGTSMATPHVAGAAALVKQKNPSWSNVQIRNHLKNTATSLGSTNLYGSGLVNAEAATR

SEQ ID NO: 56546 - protein, 269 aa, Unidentified
AQSVPWGISRVQAPAAHNRGLTGRGVKVAVLDTGISTHPDLNIRGGASFVPGEPSTQDGEGHGTHVAGTIAALNNSIGVLGVAPSAELYAVKVLGASGSGSVSSIAQGLEWAGNNRMHVANLSLGSPSPSATLEQAVNSATSRGVLVVAASGNSGEGSISYPARYANAMAVGATDQNNNRADFSQYGAGLDIVAPGVNVQSTYPGSTYASLNGTSMATPHVAGAAALVKQKNPSWSNVQIRNHLKNTATSLGSTNLYGSGLVNAEAATR

SEQ ID NO: 56547 - protein, 269 aa, Unidentified
AQSVPWGISRVQAPAAHNRGLWGSGVKVAVLDTGISTHPDLRIRGGASFVPGEPSTQDGNGHGTHVAGTIAALNNSIGVLGVAPSAELYAVKVLGASGAGSVSSIAQGLEWAGNNGMHVANLSLGSPSPSATLEQAVNSATSRGVLVVAASGNSGAGSISYPARYANAMAVGATDQNNNRASFSQYGAGLDIVAPGVNVQSTYPQSAYASLNGTSMATPHVAGAAALVKQKNPSWSNVQIRNHLKNTATSLGSTNLYGSGLVNAEAATR

SEQ ID NO: 56548 - protein, 269 aa, Unidentified
AQSVPWGISRVQAPAAHNRGLTGRGVKVAVLDTGISTHPDLNIRGGASFVPGEPSTQDGNGHGTHVAGTIAALNNDIGVLGVAPSAELYAVKVLGASGSGSVSSIAQGLEWAGNNSMHVANLSLGNESPSATLEQAVNSATSRGVLVVAASGNSGAGSISYPARYANAMAVGATDQNNNRASFSQYGAGLDIVAPGVNVQSTYPGSTYASLNGTSMATPHVAGAAALVKQKNPSWSNVQIRNHLKNTATSLGSTNLYGSGLVNAEAATR

SEQ ID NO: 56549 - protein, 269 aa, Unidentified
AQSRPWGIARVQAPAAHNRGLRGRGVKVAVLDTGISTHPDLNIRGGASFVPGEPSTQDGNGHGTHVAGTIAALNNSIGVLGVAPSAELYAVKVLGASGSGSVSSIAQGLEWAGNNGMHVANLSLGSPSPSATLEQAVNSATSRGVLVVAASGNSGAGSISYPARYANAMAVGATDQNNNRASFSQYGAGLDIVAPGVNVQSTYPGFTYASLNGTSMATPHVAGAAALVKQKNPSWSNVQIRNHLKNTATSLGSTNLYGSGLVNAEAATR

SEQ ID NO: 56550 - protein, 269 aa, Unidentified
AQSVPWGISRVQAPAALNRGLTGSGVKVAVLDTGISTHPDLNIRGGASFVPGEPSTQDGNGHGTHVAGTIAALDNSIGVLGVAPSAELYAVKVLGASGSGAISSIAQGLEWAGNNGMHVANLSLGSPSPSATLEQAVNSATSRGVLVVAASGNSGAGSISYPARYANAMAVGATDQNNNRASFSQYGAGLDIVAPGVNVQSTYPGSTYASLNGTSMATPHVAGAAALVKQENPSWSNVQIRNHLKNTATSLGSTNLYGSGLVNAEAATR

SEQ ID NO: 56551 - protein, 269 aa, Unidentified
AQSVPWGISRVQAPAAHRRGLTGRGVKVAVLDTGISTHPDLNIRGGASFVPGEPSTQDGNGHGTHVAGTIAALDNSIGVLGVAPSAELYAVKVLGASGAGSVSSIAQGLEWAGNNGMHVANLSLGSPSPSATLEQAVNSATSRGVLVVAASGNSGAGSISYPARYANAMAVGATDQNNNRASFSQYGAGLDIVAPGVNVQSTYPGSTYASLNGTSMATPHVAGAAALVKQKNPSWSNVRIRNHLKNTATSLGSTNLYGSGLVNAEAATR

SEQ ID NO: 56552 - protein, 269 aa, Unidentified
AQSVPWGISRVQAPAAHNRGLTGRGVKVAVLDTGISTHPDLNIRGGASFVPGEPSTQDGNGHGTHVAGTIAALNNDIGVLGVAPSAELYAVKVLGASGSGSVSSIAQGLEWAGNNSMHVANLSLGSPSPSATLEQAVNSATSRGVLVVAASGNSGADSISYPARYANAMAVGATDQNNNRADFSQYGAGLDIVAPGVNVQSTYPGSTYASLNGTSMATPHVAGAAALVKQKNPSWSNVQIRNHLKNTATSLGSTNLYGSGLVNAEAATR

SEQ ID NO: 56553 - protein, 269 aa, Unidentified
AQSVPWGISRVQAPAAHNRGLLGFGVKVAVLDTGISTHPDLNIRGGASFVPGEPSTQDGNGHGTHVAGTIAALNNNIGVLGVAPSAELYAVKVLGASGSGSVSSIAQGLEWAGNNGMHVANLSLGDPSPSATLEQAVNSATSRGVLVVAASGNSGAGSISYPARYANAMAVGATDQNNNRASFSQYGAGLDIVAPGVNVQSTYPGSAYASLNGTSMATPHVAGAAALVKQKNPSWSNVQIRNHLKNTATSLGSTNLYGSGLVNAEAATR

SEQ ID NO: 56554 - protein, 269 aa, Unidentified
AQSVPWGISRVQAPAAHNRRLTGSGVKVAVLDTGISTHPDLRIRGGASFVPGEPSTQDGNGHGTHVAGTIAALDNSIGVLGVAPSAELYAVKVLGASGSGSVSSIAQGLEWAGNNGMHVANLSLGSPSPSATLEQAVNSATSRGVLVVAASGNSGAGSISYPARYANAMAVGATDQNNNRASFSQYGAGLDIVAPGVNVQSTYPGSTYASLNGTSMATPHVAGEAALVKQKNPSWSNVQIRNRLKNTATSLGSTNLYGSGLVNAEAATR

SEQ ID NO: 56555 - protein, 269 aa, Unidentified
AQSVPWGISRVQAPAAHNRGLTGSGVKVAVLDTGISTHPDLNIRGGASFVPGEPSSQDGNGHGTHVAGTIAALDNSIGVLGVAPSAELYAVKVLGASGSGAISSIAQGLEWAGNNGMHVANLSLGSPSPSATLEQAVNSATSRGVLVVAASGNSGAGSISYPARYANAMAVGATDQNNNRASFSQYGAGLDIVAPGVNVQSTYPGSTYASLNGTSMATPHVAGAAALVKQKNPSWSNVQIRNHLKNTATSLGSTNLYGSGLVNAGAATR

SEQ ID NO: 56556 - protein, 269 aa, Unidentified
AQSVPWGISRVQAPAAHNRGLRGSGVKVAVLDTGISTHPDLNIRGGASFVPGEPSTQDGNGHGTHVAGTIAALNNSIGVLGVAPSAELYAVKVLGASGGGAISSIAQGLEWAGNNGMHVANLSLGSPSPSATLEQAVNSATSRGVLVVAASGNSGAGSISYPARYANAMAVGATDQNNNRASFSQYGAGLDIVAPGVNVQSTYPGSTYASLNGTSMATPHVAGAAVLVKQKNPSWSNVQIRNHLKNTATSLGSTNLYGSGLVNAEAATR

SEQ ID NO: 56557 - protein, 269 aa, Unidentified
AQSVPWGISRVQAPAAHNRGLTGRGVKVAVLDTGISTHPDLNIRGGASFVPGEPSTQDGNGHGTHVAGTIAALNNGIGVLGVAPSAELYAVKVLGASGSGSVSSIAQGLEWAGNNDMHVANLSLGSPSPSATLEQAVNSATSRGVLVVAASGNSGAGSISYPARYANAMAVGATDQNNNRADFSQYGAGLDIVAPGVNVQSTYPGSTYASLNGTSMATPHVAGAAALVKQKNPSWSNVQIRDHLKNTATSLGSTNLYGSGLVNAEAATR

SEQ ID NO: 56558 - protein, 269 aa, Unidentified
AQSVPWGISRVQAPAAHNRGLTGSGVKVAVLDSGISTHPDLNIRGGASFVPGEPSTQDGNGHGTHVAGTIAALNNSIGVLGVAPSAELYAVKVLGASGSGSVSSIAQGLEWAGNNRMHVANLSLGIPSPSATLEQAVNSATSRGVLVVAASGNSGAGSIDYPARYANAMAVGATDQNNNRADFSQYGAGLDIVAPGVNVQSTYPGSTYASLNGTSMATPHVAGAAALVKQKNPSWSNVQIRNHLKNTATSLGSTNLYGSGLVNAEAATR

SEQ ID NO: 56559 - protein, 269 aa, Unidentified
AQSVPWGISRVQAPAAHNRRLWGSGVKVAVLDTGISTHPDLRIRGGASFVPGEPSTQDGNGHGTHVAGTIAALNNSIGVLGVAPSAELYAVKVLGASGAGSVSSIAQGLEWAGNNGMHVANLSLGSPSPSATLEQAVNSATSRGVLVVAASGNSGAGSISYPARYANAMAVGATDQNNNRASFSQYGAGLDIVAPGVNVQSTYPGSAYASLNGTSMATPHVAGAAALVKQKNPSWSNVQIRNHLKNTATSLGSTNLYGSGLVNAEAATR

SEQ ID NO: 56560 - protein, 269 aa, Unidentified
AQSVPWGISRVQAPAAHNRGLTGSGVKVAVLDTGISTHPDLNIRGGASFVPGEPSTQDGNGHGTHVAGTIAALDNSIGVLGVAPSAELYAVKVLGASGSGAISSIARGLEWAGNNGMHVANLSLGSPSPSATLEQAVNSATSRGVLVVAASGNSGAGSISYPARYANAMAVGATDQNNNRASFSQYGAGLDIVAPGVNVQSTYLGSTYASLNGTSMATPHVAGAAALVKQKNPSWSNVQIRNHLKNTATSLGSTNLYGSGLVNAEAATR

SEQ ID NO: 56561 - protein, 269 aa, Unidentified
AQSVPWGISRVQAPAAHNRGLTGSRVKVAVLDTGISTHPDLNIRGGASFVPGEPSTQDGNGHGTHVAGTIAALNNSIGVLGVAPSAELYAVKVLGASGSGSVSSIAQGLEWAGANGMFVANLSLGSPSPSATLEQAVNSATSRGVLVVAASGNSGAGSISYPARYANAMAVGATDQNNNRASFSQYGAGLDIVAPGVNVQSTYPGSTYASLNGTSMAAPHVAGAAALVKQKNPSWSNVQIRNHLKNTATSLGSTNLYGSGLVNCEAATR

SEQ ID NO: 56562 - protein, 269 aa, Unidentified
AQSVPWGISRVQAPAAHNRGLTGSGVKVAVLDTGISTHPDLNIRGGASFVPGEPSTQDGNGHGTHVAGTIAALDNNIGVLGVAPDAELYAVKVLGASGSGSVSSIAQGLEWAGNNRMHVANLSLGSPSPSATLEQAVNSATSRGVLVVAASGNSGAGSISYPARYANAMAVGATDQNNNRASFSQYGAGLDIVAPGVNVQSTWPGSTYASLNGTSSATPHVAGAAALVKQKNPSWSNVQIRNRLKNTATSLGSTNLYGSGLVNAEAATR

SEQ ID NO: 56563 - protein, 269 aa, Unidentified
AQSVPWGISRVQAPAAHNRGLTGSGVKVAVLDTGISTHPDLNIRGGASFVPGEPSTQDGNGHGTHVAGTIAALNNNIGVLGVAPSAELYAVKVLSASGQGSVSSIAGGLEWAGNNGMHVANLSLGSPSPSATLEQAVNSATSRGVLVVAASGNSGAGSISYPARYANAMAVGATDQNNNRASFSQYGAGLDIVAPGVNVQSTYPGSTYASLNGTSMATPHVAGAAALVKQKNPSWSNVQIRNHLKNTATSLGSTNLYGSGLVNAEAAIR

SEQ ID NO: 56564 - protein, 269 aa, Unidentified
AQSVPWGISRVQAPAAHNRGLAGRGVKVAVLDSGISTHPDLNIRGGASFVPGEPSTQDGNGHGTHVAGTIAALNNSIGVLGVAPSAELYAVKVLGASGSGSVSSIAQGLEWAGNNGMHVANLSLGSPSPSATLEQAVNSATSRGVLVVAASGNSGEGSISYPARYANAMAVGATDQNNNRADFSQYGAGLDIVAPGVNVQSTYPGSTYASLNGTSMATPHVAGAAALVKQKNPSWSNVQIRNHLKNTATSLGSTNLYGSGLVNAEAATR

SEQ ID NO: 56565 - protein, 269 aa, Unidentified
AQSVPWGISRVQAPAAHNRGLTGRGVKVAVLDTGISTHPDLNIRGGASFVPGEPSTQDGNGHGTHVAGTIAALNNSIGVLGVVWSAELYAVKVLGASGSGSVSSIAQGLEWAGNNRMHVANLSLGSPSPSATLEQAVNSATSRGVLVVAASGNSGAGSISYPARYANAMAVGATDQNNNRASFSQYGAGLDIVAPGVNVQSTYPGSTYASLNGTSMATPHVAGAAALVFQKNPSWSNVQIRNHLKNTATSLGSTNLYGSGLVNAEAATR

SEQ ID NO: 56566 - protein, 269 aa, Unidentified
AQSVPWGISRVQAPAAHNRGLWGSGVKVAVLDTGISTHPDLNITGGASFVPGEPSTQDGNGHGTHVAGTIAALNNSIGVLGVAPSAELYAVKVLGASGAGSVSSIAQGLEWAGNNGMHVANLSLGSPSPSATLEQAVNSATSRGVLVVAASGNSGAGSISYPARYANAMAVGATDQNNNRASFSQYGAGLDIVAPGVNVQSTYPQSAYASLNGTSMATPHVAGAAALVKQKNPSWSNVQIRNHLKNTATSLGSTNLYGSGLVNAEAATR

SEQ ID NO: 56567 - protein, 269 aa, Unidentified
AQSVPWGISRVQAPAAHNRRLTGSGVKVAVLDTGISTHPDLNIRGGASFVPGEPSTQDGNGHGTHVAGTIAALNNSIGVLGVAPSAELYAVKVLGASGAGSISSIAQGLEWAGNNGMHVANLSLGSPSPSATLEQAVNSATSRGVLVVAASGNSGAGSISYPARYANAMAVGATDQNNNRASFSQYGAGLDIVAPGVNVQSTYPGSTYASLNGTSMATPHVAGAAVLVKQKNPSWRNVQIRNHLKNTATSLGSTNLYGSGLVNAEAATR

SEQ ID NO: 56568 - protein, 269 aa, Unidentified
AQSVPWGISRVQAPAAHNRGLTGRGVKVAVLDTGISTHPDLRIRGGASFVPGEPSTQDGNGHGTHVAGTIAALNNSIGVLGVAPSAELYAVKVLGASGAGSVSSIAQGLEWAGNNGMHVANLSLGSPSPSATLEQAVNSATSRGVLVVAASGNSGAGSISYPARYANAMAVGATDQNNNRASFSQYGAGLDIVAPGVNVQSTYIQSTYASLNGTSMATPHVAGAAALVKQKNPSWSNVQIRNHLKNTATSLGSTNLYGSGLVNAEAATR

SEQ ID NO: 56569 - protein, 269 aa, Unidentified
AQSVPWGISRVQAPAAHNRGLTGRGVKVAVLDSGISTHPDLNIRGGASFVPGEPSTQDGNGHGTHVAGTIAALNNRIGVLGVAWSAELYAVKVLGASGSGSVSSIAQGLEWAGNNRMHVANLSLGSPSPSATLEQAVNSATSRGVLVVAASGNSGAGSISYPARYANAMAVGATDQNNNRASFSQYGAGLDIVAPGVNVQSTYPGSTYASLNGTSMATPHVAGAAALVKQKNPSWSNVQIRNHLKNTATSLGSTNLYGSGLVNAEAATR

SEQ ID NO: 56570 - protein, 269 aa, Unidentified
AQSVPWGISRVQAPAAHNRGLTGRGVKVAVLDTGISTHPDLNIRGGASFVPGEPSTQDGNGHGTHVAGTIAALNNGIGVLGVAPSAELYAVKVLGASGSGSVSSIAQGLEWAGNNSMHVANLSLGSESPSATLEQAVNSATSRGVLVVAASGNSGAGSISYPARYANAMAVGATDQNNNRASFSQYGAGLDIVAPGVNVQSTYPGSTYASLNGTSMATPHVAGAAALVKQKNPSWSNVQIRDHLKNTATSLGSTNLYGSGLVNAEAATR

SEQ ID NO: 56571 - protein, 269 aa, Unidentified
AQSVPWGISRVQAPAAHNRKLTGSGVKVAVLDTGISTHPDLNIRGGASFVPGEPSTQDGNGHGTHVAGTIAALNNSIGVLGVAPSAELYAVKVLGASGSGSVSSIAQGLEWAGNNGMHVANLSLGQPSPSATLEQAVNSATSRGVLVVAASGNSGAGSISYPARYANAMAVGATDQNNNRASFSQYGAGLDIVAPGVNVQSTYPGSTYASENGTSMATPHVAGAAALVKQKNPSWSNAQIRNHLKNTATSLGSTNLYGSGLVNALAATR

SEQ ID NO: 56572 - protein, 269 aa, Unidentified
AQSVPWGISRVQAPAAHNRGLTGRGVKVAVLDTGISTHPDLNIRGGASFVPGEPSTQDGNGHGTHVAGTIAALDNSIGVLGVAPSAELYAVKVLGASGGGSVSSIAQGLEWAGNNGMHVANLSLGSPSPSATLEQAVNSATSRGVLVVAASGNSGAGSISYPARYANAMAVGATDQNNNRASFSQYGAGLDIVAPGVNVQSTYPGSTYASLNGTSMATPHVAGAAVLVKQKNPSWSNVRIRNHLKNTATSLGSTNLYGSGLVNAEAATR

SEQ ID NO: 56573 - protein, 269 aa, Unidentified
AQSVPWGISRVQAPAAHNRGLTGSGVKVAVLDTGISTHPDLNIRGGASFVPGEPSTQDGNGHGTHAAGTIAALDNSIGVLGVAPSAELYAVKVLGASGSGAISSIAQGLEWAGNNGMHVANLSLGSPSPSATLEQAVNSATSRGVLVVAASGNSGAGSISYPARYANAMAVGATDQNNNRASFSQYGAGLDIVAPGVNVQSTYPGSTYASLNGTSMATPHVAGAAALVKHKNPSWSNVQIRNHLKNTATSLGSTNLYGSGLVNAEAATR

SEQ ID NO: 56574 - protein, 269 aa, Unidentified
AQSVPWGISRVQAPAAHNRGLTGSGVKVAVLDTGISTHPDLNIRGGASFVPGEPSTQDGNGHGTHVAGTIAALNNSIGVLGVAPDAELYAVKVLGASGSGSVSSIAQGLEWAGNNGMHVANLSLGSPSPSATLEQAVNSATSRGVLVVAASGNSGAGSISYPARYANAMAVGATDQNNNRASFSQYGAGLDIVAPGVNVLSTWPGSAYASLNGTSMATPHVAGAAALVKQKNPSWSNVQIRNRLKNTATSLGSTNLYGSGLVNAEAATR

SEQ ID NO: 56575 - protein, 269 aa, Unidentified
AQSVPWGISRVQAPAAHNRKLLGSGVKVAVLDTGISTHPDLNIRGGASFVPGEPSTQDGNGHGTHVAGTIAALNNNIGVLGVAPSAELYAVKVLGASGSGSVSSIAQGLEWAGNNGMHVANLSLGSPSPSATLEQAVNSATSRGVLVVAASGNSGAGSIDYPARYANAMAVGATDQNNNRASFSQYGAGLDIVAPGVNVQSTYPGSTYASENGTSMATPHVAGAAALVKQKNPSWSNVQIRNHLKNTATSLGSTNLYGSGLVNAEAATR

SEQ ID NO: 56576 - protein, 269 aa, Unidentified
AQSVPWGISRVQAPAAHNRGLAGSGVKVAVLDSGISTHPDLNIRGGASFVPGEPSTQDGNGHGTHVAGTIAALNNSIGVLGVAPSAELYAVKVLGASGSGSVSSIAQGLEWAGNNRMHVANLSLGSPSPSATLEQAVNSATSRGVLVVAASGNSGAGSIDYPARYANAMAVGATDQNNNRADFSQYGAGLDIVAPGVNVQSTYPGSTYASLNGTSMATPHVAGAAALVKQKNPSWSNVQIRNHLKNTATSLGSTNLYGSGLVNAEAATR

SEQ ID NO: 56577 - protein, 269 aa, Unidentified
AQSVPWGISRVQAPAAHNRGLTGRGVKVAVLDSGISTHPDLNIRGGASFVPGEPSTQDGEGHGTHVAGTIAALNNSIGVLGVAPSAELYAVKVLGASGSGSVSSIAQGLEWAGNNGMHVANLSLGSPSPSATLEQAVNSATSRGVLVVAASGNSGEGSIDYPARYANAMAVGATDQNNNRASFSQYGAGLDIVAPGVNVQSTYPGSTYASLNGTSMATPHVAGAAALVKQKNPSWSNVQIRNHLKNTATSLGSTNLYGSGLVNAEAATR

SEQ ID NO: 56578 - protein, 269 aa, Unidentified
AQSVPWGISRVQAPAAHNRKLTGSGVKVAVLDTGISTHPDLNIRGGASFVPGEPSTQDGNGHGTHVAGTIAALNNNIGVLGVAPSAELYAVKVLGASGSGSVSSIAQGLEWAGNNRMHVANLSLGSPSPSATLEQAVNSATSRGVLVVAASGNSGAGSIDYPARYANAMAVGATDQNNNRASFSQYGAGLDIVAPGVNVQSTYPGSAYASLNGTSMATPHVAGAAALVKQKNPSWSNVQIRNHLKNTATSLGSTNLYGSGLVNAEAATR

SEQ ID NO: 56579 - protein, 269 aa, Unidentified
AQSVPWGISRVQAPAAHNRGLTGSGVKVAVLDTGISTHPDLNIRGGASFVPGEPSTQDGNGHGTHVAGTIAALDNSIGVLGVAPSAELYAVKVLGASGSGAISSIAQGMEWAGNNGMHVANLSLGSPSPSATLEQAVNSATSRGVLVVAASGNSGADSISYPARYANAMAVGATDQNNNRASFSQYGAGLDIVAPGVNVQSTYPGSTYASLNGTSMATPHVAGAAALVKQKNPSWSNVQIRNHLKNTATSLGSTNLYGSGLVNAEAATR

SEQ ID NO: 56580 - protein, 269 aa, Unidentified
AQSVPWGISRVQAPAAHNRGLTGSGVKVAVLDTGISTHPDLNIRGGASFVPGEPSTQDGEGHGTHVAGTIAALNNGIGVLGVAPSAELYAVKVLGASGSGSVSSIAQGLEWAGNNSMHVANLSLGSPSPSATLEQAVNSATSRGVLVVAASGNSGAGSISYPARYANAMAVGATDQNNNRADFSQYGAGLDIVAPGVNVQSTYPGSTYASLNGTSMATPHVAGAAALVKQKNPSWSNVQIRNRLKNTATSLGSTNLYGSGLVNAEAATR

SEQ ID NO: 56581 - protein, 269 aa, Unidentified
AQSVPWGISRVQAPAAHNRKLTGSGVKVAVLDTGISTHPDLNIRGGASFVPGEPSTQDGEGHGTHVAGTIAALNNNIGVLGVAPSAELYAVKVLGASGSGSVSSIAQGLEWAGNNGMHVANLSLGIPSPSATLEQAVNSATSRGVLVVAASGNSGAGSISYPARYANAMAVGATDQNNNRASFSQYGAGLDIVAPGVNVQSTYPGSTYASNNGTSMATPHVAGAAALVKQKNPSWSNVQIRNHLKNTATSLGSTNLYGSGLVNAEAATR

SEQ ID NO: 56582 - protein, 269 aa, Unidentified
AQSVPWGISRVQAPAAHNRGLTGSGVKVAVLDTGISTHPDLNIRGGASFVPGEPSTQDGNGHGTHVAGTIAALNNGIGVLGVAPSAELYAVKVLGASGSGSVSSIAQGLEWAGNNDMHVANLSLGSESPSATLEQAVNSATSRGVLVVAASGNSGAGSISYPARYANAMAVGATDQNNNRASFSQYGAGLDIVAPGVNVQSTYPGSTYASLNGTSMATPHVAGAAALVKQKNPSWSNVRIRDHLKNTATSLGSTNLYGSGLVNAEAATR

SEQ ID NO: 56583 - protein, 269 aa, Unidentified
AQSVPWGISRVQAPAAHRRGLTGSGVKVAVLDTGISTHPDLRITGGASFVPGEPSTQDGNGHGTHVAGTIAALNNSIGVLGVAPSAELYAVKVLGASGSGSVSSIAQGLEWAGNNGMHVANLSLGSPSPSATLEQAVNSATSRGVLVVAASGNSGAGSISYPARYANAMAVGATDQNNNRASFSQYGAGLDIVAPGVNVQSTYPGSTYASLNGTSMATPHVAGEAALVKQKNPSWRNVQIRNHLKNTATSLGSTNLYGSGLVNAEAATR

SEQ ID NO: 56584 - protein, 269 aa, Unidentified
AQSVPWGISRVQAPAAHNRGLTGSGVKVAVLDTGISTHPDLNIRGGASFVPGEPSTQDGEGHGTHVAGTIAALNNSIGVLGVAPSAELYAVKVLGASGAGSVSSIAQGLEWAGNNGMHVANLSLGSPSPSATLEQAVNSATSRGVLVVAASGNSGAGSISYPARYANAMAVGATDQNNNHADFSQYGAGLDIVAPGVNVQSTYPGSTYASLNGTSMATPHVAGAAALVKQKNPSWSNVQIRNRLKNTATSLGSTNLYGSGLVNAEAATR

SEQ ID NO: 56585 - protein, 270 aa, Synthetic construct
AQSVPWGISRVQAPAAHNRGLTGSGVKVAVLDTGIDSTHPDLNIRGGASFVPGEPSTQDGNGHGTHVAGTIAALNNSIGVLGVAPSAELYAVKVLGASGSGSYSSIAQGLEWAGNNGMDVANLSLGSPSPSATLEQAVNSATSRGVLVVAASGNSGAGSISYPARYANAMAVGATDQNNNRASFSQYGPELDIVAPGVNVQSTYPGSTYASLNGTSMATPHVAGAAALVLQKNPSWSNVQIRNHLKNTATSLGSTNLYGSGLVNAEAATR

SEQ ID NO: 56586 - protein, 269 aa, Unidentified
AQSVPWGIARVQAPAAHNRRLTGSGVKVAVLDTGISTHPDLRIRGGASFVPGEPSTQDGNGHGTHVAGTIAALNNRIGVLGVAPSAELYAVKVLGASGSGSVSSIAQGLEWAGNNGMHVANLSLGSPSPSATLEQAVNSATSRGVLVVAASGNSGAGSISYPARYANAMAVGATDQNNNRASFSQYGAGLDIVAPGVNVQSTYPGSTYASLNGTSMATPHVAGAAALVKQKNPSWRNVQIRNHLKNTATSLGSTNLYGSGLVNAEAATR

SEQ ID NO: 56587 - protein, 269 aa, Unidentified
AQSVPWGISRVQAPAAHNRRLTGRGVKVAVLDTGISTHPDLNIRGGASFVPGEPSTQDGEGHGTHVAGTIAALNNDIGVLGVAPSAELYAVKVLGASGSGSVSSIAQGLEWAGNNDMHVANLSLGSPSPSATLEQAVNSATSRGVLVVAASGNSGAGSISYPARYANAMAVGATDQNNNRASFSQYGAGLDIVAPGVNVQSTYPGSTYASLNGTSMATPHVAGAAALVKQKNPSWSNVQIRNHLKNTATSLGSTNLYGSGLVNAEAATR

SEQ ID NO: 56588 - protein, 269 aa, Unidentified
AQSVPWGISRVQAPAAHNRGLTGSGVKVAVLDTGISTHPDLRIRGGASFVPGEPSTQDGNGHGTHVAGTIAALNNSIGVLGVAPSAELYAVKVLGASGDGSVSSIAQGLEWAGNNGMHVANLSLGLPSPSATLEQAVNSATSRGVLVVAASGNSGAGSISYPARYANAMAVGATDQNNNRASFSQYGAGLDIVAPGVNVQSTYPGSTYASENGTSMATPHVAGAAALVKQKNPRWSNVQIRNHLKNTATSLGSTNLYGSGLVNAEAATR

SEQ ID NO: 56589 - protein, 269 aa, Unidentified
AQSVPWGISRVQAPAAHNRGLTGSGVKVAVLDTGISTHPDLNIRRGASFVPGEPSTQDGNGHGTHVAGTIAALNNSIGVLGVAPSAILYAVKVLGAFGSGSVSSIAQGLEWAGNNGMHVANLSLGSPSPSATLEQAVNSATSRGVLVVAASGNSGAGSISYPARYANAMAVGATDQNNNKASFSQYGAGLDIVAPGVNVQSTYPMSTYASLNGTSMATPHVAGAAALVKQKNPSWSNVQIRNHLKNTATSLGSTNLYGSGLVNAEAATR

SEQ ID NO: 56590 - protein, 269 aa, Unidentified
AQSVPWGISRVQAPAAHNRGLTGFGVKVAVLDTGISTHPDLNIRGGASFVPGEPSTQDGNGHGTHVAGTIAALNNSIGVLGVAPSAELYAVKVLGASGSGSVSSIAQGLEWAGNNRMHVANLSLGDPSPSATLEQAVNSATSRGVLVVAASGNSGAGSIDYPARYANAMAVGATDQNNNRASFSQYGAGLDIVAPGVNVQSTYPGSTYASENGTSMATPHVAGAAALVKQKNPSWSNVQIRNHLKNTATSLGSTNLYGSGLVNAEAATR

SEQ ID NO: 56591 - protein, 269 aa, Unidentified
AQSVPWGISRVQAPAAHNRGLTGSGVKVAVLDTGISTHPDLNIRGGASFVPGEPSTQDGNGHGTHVAGTIAALNNSIGVLGVAPSAELYAVKVLGASGSGSVSSIAQGLEWAGNNVMHVANLSLGLNVPSATLEQAVNSATSRGVLVVAASGNSGEGSISYPARYANAMAVGATDQNNNRASFSQYGAGLDIVAPGVNVQSTYPGSTYASLNGTSMATPHVAGAAALVKQKNPSWSNVQIRNHLKNTATSLGSTNLYGSGLVNAEAATR

SEQ ID NO: 56592 - protein, 270 aa, Synthetic construct
AQSVPWGISRVQAPAAHNRGLTGSGVKVAVLDTGIDSTHPDLNIRGGASFVPGEPSTQDGNGHGTHVAGTIAALNNSIGVLGVAPSAELYAVKVLNASGSGSVSSIAQGLEWAGNNGMDVANLSLGSPSPSATLEQAVNSATSRGVLVVAASGNSGAGSISYPARYANAMAVGATDQNNNRASFSQYGPELDIVAPGVNVQSTYPGSTYASLNGTSMATPHVAGAAALVLQKNPSWSNVQIRNHLKNTATSLGSTNLYGSGLVNAEAATR

SEQ ID NO: 56593 - protein, 269 aa, Synthetic construct
AQSVPWGISRVQAPAAHNRGLTGSGVKVAVLDTGISTHPDLNIRGGASFVPGEPSTQDGNGHGTHVAGTIAALNNSIGVLGVAPSAELYAVKVLGASGSGSVSSIAQGLEWAGNNGMHVANLSLGSPSPSATLEQAVNSATSRGVLVVAASGNSGAGSISYPARYANAMAVGATDQNNNRASFSQYGAGLDIVAPGVNVQSTYPGSTYASLNGTSMATPSVAGAAALVLQRNPSWSNVQIRNHLENTATSLGSTNLFGSGLVNAEAATR

SEQ ID NO: 56594 - protein, 269 aa, Unidentified
AQSVPWGISRVQAPAAHNRGLTGSGVKVAVLDTGISTHPDLNIRGGASFVPGEPSTQDGNGHGTHVAGTIAALNNSIGVLGVAPSAELYAVKVLGASGSGSLSSIAQGLEWAGNNGMFVANLSLGSPSPSATLEQAVNSATSRGVLVVAASGNSGAGSISYPARYANAMAVGATDQNNNKASFSQYGAGLDIVAPGVNVQSTYPGSTYAFLNGTSMATPHVAGAAALVKQKNPSWSNVQIRNHLKRTATSLGSTNLYGSGLVNAEAATR

SEQ ID NO: 56595 - protein, 269 aa, Unidentified
AQSVPWGISRVQAPAAHNRGLAGSGVKVAVLDTGISTHPDLNIRGGASFVPGEPSTQDGEGHGTHVAGTIAALNNSIGVLGVAPSAELYAVKVLGASGSGSVSSIAQGLEWAGLNGMHVANLSLGIPSPSATLEQAVNSATSRGVLVVAASGNSGEGSISYPARYANAMAVGATDQNNNRASFSQYGAGLDIVAPGVNVQSTYPGSTYASLNGTSMATPHVAGAAALVKQKNPSWSNVQIRNHLKNTATSLGSTNLYGSGLVNAEAATR

SEQ ID NO: 56596 - protein, 269 aa, Unidentified
AQSVPWGISRVQAPAAHNRGLTGSGVKVAVLDTGISTHEDLNIRGGASFVPGEPSTQDGNGHGTHVAGTIAALNNSIGVLGVAPSADLYAVKVLGASGRGSVSSIAQGLEWAGNNGMHVANLSLGTPSPSATLEQAVNSATSRGVLVVAASGNSGAGSISYPARYANAMAVGATDQNNNRASFSQYGAGLDIVAPGVNVQSTYPGSTYASLNGTSMATPHVAGAAALVKQKNPSWSNVQIRDHLKNTATSLGSTNLYGSGLVNAEAATR

SEQ ID NO: 56597 - protein, 269 aa, Unidentified
AQSVPWGISRVQAPAAHNRGLTGGGVKVAVLDTGISTHPDLNIRGGASFVPGEPSTQDGNGHGTHVAGTIAALNNSIGVLGVAPSAELYAVKVLAASGGGSVSSIAGGLEWAGNNGMHVANLSLGAPSPSATLEQAVNSATSRGVLVVAASGNSGAGSISYPARYANAMAVGATDQNNNRASFSQYGAGLDIVAPGVNVQSTYPGSTYASLNGTSMATPHVAGAAALVKQKNPSWSNVQIRNHLKNTATSLGSTNLYGSGLVNAEAATR

SEQ ID NO: 56598 - protein, 269 aa, Unidentified
AQSVPWGISRVQAPAAHNRGLAGSGVKVAVLDTGISTHPDLNIRGGASFVPGEPSTQDGNGHGTHVAGTIAALNNSIGVLGVAPSAELYAVKVLGASGAGAISSIAQGLEWAGNNGMHVANLSLGNPSPSATLEQAVNSATSRGVLVVAASGNSGAGSISYPARYANAMAVGATDQNNNRASFSQYGAGLDIVAPGVNVQSTYPGSTYASLNGTSMATPHVAGAAALVKQKNPSWSNVQIRNHLKNTATSLGSTNLYGSGLVNAEAATR

SEQ ID NO: 56599 - protein, 269 aa, Unidentified
AQSVPWGISRVQAPAAHNRRLTGSGVKVAVLDTGISTHPDLRIRGGASFVPGEPSTQDGNGHGTHVAGTIAALNNSIGVLGVAPSAELYAVKVLGASGAGSVSSIAQGLEWAGNNGMHVANLSLGSPSPSATLEQAVNSATSRGVLVVAASGNSGAGSISYPARYANAMAVGATDQNNNRASFSQYGAGLDIVAPGVNVQSTYIGSAYASLNGTSMATPHVAGAAALVKQKNPSWSNVQIRNHLKNTATSLGSTNLYGSGLVNAEAATR

SEQ ID NO: 56600 - protein, 269 aa, Unidentified
AQSVPWGISRVQAPAAHNRGLKGSGVKVAVLDTGISTHPDLNIRGGASFVPGEPSTQDGNGHGTHAAGTIAALDNSIGVLGVAPSAELYAVKVLGASGSGAISSIAQGLEWAGNNGMHVANLSLGSPSPSATLEQAVNSATSRGVLVVAASGNSGAGSISYPARYANAMAVGATDQNNNRASFSQYGAGLDIVAPGVNVQSTYPGSTYASLNGTSMATPHVAGAAALVKQKNPSWSNVQIRNHLKNTATSLGSTNLYGSGLVNAEAATR

SEQ ID NO: 56601 - protein, 269 aa, Unidentified
AQSVPWGISRVQAPAAHNRGLTGSGVKVAVLDTGISTHPDLRIRGGASFVPGEPSTQDGNGHGTHVAGTIAALNNSIGVLGVAPSAELYAVKVLGASGAGSVSSIAQGLEWAGNNGMHVANLSLGSPSPSATLEQAVNSATSRGVLVVAASGNSGAGSISYPARYANAMAVGATDQNNNRASFSQYGAGLDIVAPGVNVQSTYIQSAYASLNGTSMATPHVAGAAALVKQKNPSWSNVQIRNHLKNTATSLGSTNLYGSGLVNAEAATR

SEQ ID NO: 56602 - protein, 269 aa, Unidentified
AQSVPWGISRVQAPAAHNRGLTGSGVKVAVLDTGISTHPDLNIRGGASFVPGEPSTQDGNGHGTHVAGTIAALNNSIGVLGVAPSAELYAVKVLGADGRGAWSSIAQGLEWAGNNGMHVANLSLGSPSPSATLEQAVNSATSRGVLVVAASGNSGASSISYPARYANAMAVGATDQNNNRASFSQYGAGLDIVAPGVNVQSTYPGSTYASLNGTSMATPHVAGAAALVKQKNPSWSNVQIRNHLKNTATSLGSTNLYGSGLVNAEAATR

SEQ ID NO: 56603 - protein, 269 aa, Unidentified
AQSVPWGISRVQAPAAHNRGLTGSGVKVAVLDTGISTHPDLNIRGGASFVPGEPSTQDGNGHGTHVAGTIAALNNSIGVLGVAPSAELYAVKVLSASGQGSVSSIANGLEWAGNNGMHVANLSLGAPSPSATLEQAVNSATSRGVLVVAASGNSGAGSISYPARYANAMAVGATDQNNNRADFSQYGAGLDIVAPGVNVQSTYPGSTYASLNGTSMATPHVAGAAALVKQKNPSWSNVQIRNHLKNTATSLGSTNLYGSGLVNAEAATR

SEQ ID NO: 56604 - protein, 269 aa, Unidentified
AQSVPWGISRVQAPAAHNRGLTGRGVKVAVLDSGISTHPDLNIRGGASFVPGEPSTQDGNGHGTHVAGTIAALNNSIGVLGVAPSAELYAVKVLGASGSGSVSSIAQGLEWAGNNGMHVANLSLGSHSPSATLEQAVNSATSRGVLVVAASGNSGAGSISYPARYANAMAVGATDQNDNRASFSQYGAGLDIVAPGVNVQSTYPGSTYASLNGTSMATPHVAGAAALVKQKNPSWSNVQIRNHLKNMATSLGSTNLYGSGLVNAEAATR

SEQ ID NO: 56605 - protein, 269 aa, Unidentified
AQSVPWGISRVQAPAAHNRRLTGRGVKVAVLDTGISTHPDLNIRGGASFVPGEPSTQDGNGHGTHVAGTIAALNNSIGVLGVAPSAELYAVKVLGASGAGSVSSIAQGLEWAGLNGMHVANLSLGSPSPSATLEQAVNSATSRGVLVVAASGNSGAGSISYPARYANAMAVGATDQNNNRASFSQYGAGLDIVAPGVNVQSTYPGSTYASLNGTSMATPHVAGAAALVKQKNPSWSNVQIRNHLKNTATSLGSTNLYGSGLVNAHAATR

SEQ ID NO: 56606 - protein, 269 aa, Unidentified
AQSVPWGISRVQAPAAHNRGLTGRGVKVAVLDTGISTHPDLNIRGGASFVPGEPSTQDGEGHGTHVAGTIAALNNSIGVLGVAPSAELYAVKVLGASGSGSVSSIAQGLEWAGNNGMHVANLSLGSPSPSATLEQAVNSATSRGVLVVAASGNSGADSISYPARYANAMAVGATDQNNNRADFSQYGAGLDIVAPGVNVQSTYPGSTYASLNGTSMATPHVAGAAALVKQKNPSWSNVRIRNHLKNTATSLGSTNLYGSGLVNAEAATR

SEQ ID NO: 56607 - protein, 269 aa, Unidentified
AQSVPWGISRVQAPAAHNRGLTGSGVKVAVLDTGISTHPDLNIRGGASFVPGEPSTQDGEGHGTHVAGTIAALNNSIGVLGVAPSAELYAVKVLGASGSGSVSSIAQGLEWAGNNRMHVANLSLGSPSPSATLEQAVNSATSRGVLVVAASGNSGEGSIDYPARYANAMAVGATDQNNNRADFSQYGAGLDIVAPGVNVQSTYPGSTYASLNGTSMATPHVAGAAALVKQKNPSWSNVQIRNHLKNTATSLGSTNLYGSGLVNAEAATR

SEQ ID NO: 56608 - protein, 269 aa, Unidentified
AQSVPWGISRVQAPAAHNRGLLGFGVKVAVLDTGISTHPDLNIRGGASFVPGEPSTQDGNGHGTHVAGTIAALNNNIGVLGVAPSAELYAVKVLGASGSGSVSSIAQGLEWAGNNRMHVANLSLGSPSPSATLEQAVNSATSRGVLVVAASGNSGAGSISYPARYANAMAVGATDQNNNRASFSQYGAGLDIVAPGVNVQSTYPGSAYASLNGTSMATPHVAGAAALVKQKNPSWSNVQIRNHLKNTATSLGSTNLYGSGLVNAEAATR

SEQ ID NO: 56609 - protein, 269 aa, Unidentified
AQVVPWGISRVQAPAAHNRGLTGSGVKVAVLDTGISTHPDLNIRGGASFVPGEPSTQDGNGHGTHVAGTIAALDNSIGVLGVAPSAELYAVKVLGASGSGSVSSIAQGLEWAGNNRMHVANLSLGRPSPSATLEQAVNSATSRGVLVVAASGNSGAGSISYPARYANAMAVGATDQNNNRASFSQYGAGLDIVAPGVNVQSTYPGSTYASLNGTSMATPHVAGAAALVKQKNPSWSNVQIRNHLKNTATSLGSTNQYGSGLVNAEAATR

SEQ ID NO: 56610 - protein, 269 aa, Unidentified
AQSVPWGISRVQAPAAHNRKLTGFGVKVAVLDTGISTHPDLNIRGGASFVPGEPSTQDGNGHGTHVAGTIAALNNSIGVLGVAPSAELYAVKVLGASGSGSVSSIAQGLEWAGNNRMHVANLSLGSPSPSATLEQAVNSATSRGVLVVAASGNSGAGSIDYPARYANAMAVGATDQNNNRASFSQYGAGLDIVAPGVNVQSTYPGSTYASENGTSMATPHVAGAAALVKQKNPSWSNVQIRNHLKNTATSLGSTNLYGSGLVNAEAATR

SEQ ID NO: 56611 - protein, 269 aa, Unidentified
AQSVPWGISRVQAPAAHNRGLTGSGVKVAVLDTGISTHPDLNIRGGASFVPGEPSTQDGNGHGTHVAGTIAALNNRIGVLGVAPSAELYAVKVLGASGSGSVSSIAQGLEWAGNNRMHVANLSLGSESPSATLEQAVNSATSRGVLVVAASGNSGAGSISYPARYANAMAVGATDQNNNRADFSQYGAGLDIVAPGVNVQSTYPGSTYASLNGTSMATPHVAGAAALVKQKNPSWSNVQIRDHLKNTATSLGSTNLYGSGLVNAEAATR

SEQ ID NO: 56612 - protein, 269 aa, Unidentified
AQSVPWGISRVQAPAAHNRRLTGSGVKVAVLDTGISTHPDLNIRGGASFVPGEPSTQDGNGHGTHVAGTIAALNNDIGVLGVAPSAELYAVKVLGASGSGSVSSIAQGLEWAGNNDMHVANLSLGSPSPSATLEQAVNSATSRGVLVVAASGNSGAGSISYPARYANAMAVGATDQNNNRASFSQYGAGLDIVAPGVNVQSTYPGSTYASLNGTSMATPHVAGAAALVKQKNPSWSNVRIRDHLKNTATSLGSTNLYGSGLVNAEAATR

SEQ ID NO: 56613 - protein, 269 aa, Unidentified
AQVVPWGISRVQAPAAHNRGLTGSGVKVAVLDTGISTHEDLNIRGGASFVPGEPSTQDGNGHGTHVAGTIAALDNSIGVLGVAPSAELYAVKVLGASGSGSVSSIAQGLEWAGNNRMHVANLSLGSPSPSATLEQAVNSATSRGVLVVAASGNSGAGSISYPARYANAMAVGATDQNNNRASFSQYGAGLDIVAPGVNVQSTYPGSTYASLNGTSMATPHVAGAAALVKQKNPSWSNVQIRNHLKNTATSLGSTNQYGSGLVNAEAATR

SEQ ID NO: 56614 - protein, 269 aa, Unidentified
AQSVPWGISRVQAPAAHNRGLTGSRVKVAVLDTGISTHPDLNIRGGASFVPGEPSTQDGNGHGTHVAGTIAALNNSIGVLGVAPSAELYAVKVLGASGSGSVSSIAQGLEWAGANGMEVANLSLGSPSPSATLEQAVNSATSRGVLVVAASGNSGAGSISYPARYANAMAVGATDQNNNRASFSQYGAGLDIVAPGVNVQSTYPGSTYASLNGTSMAAPHVAGAAALVKQKNPSWSNVQIRNHLKNTATSLGSTNLYGSGLVNCEAATR

SEQ ID NO: 56615 - protein, 269 aa, Unidentified
AQSVPWGISRVQAPAAHNRGLTGSGVKVAVLDTGISTHPDLNIRGGASFVPGEPSTQDGNGHGTHVAGTIAALNNSIGVLGVAPSAELYAVKVLGQTGAGALSSIAQGLEWAGNNGMHVANLSLGSPSPSATLEQAVNSATSRGVLVVAASGNSGAGSISYPARYANAMAVGATDQNNNRASFSQYGAGLDIVAPGVNVQSTYPGSTYASLNGTSMATPHVAGAAALVKQKNPSWSNVQIRNHLKNTATSLGSTNLYGSGLVNAEAATR

SEQ ID NO: 56616 - protein, 269 aa, Unidentified
AQSVPWGISRVQAPAAHNRKLTGGGVKVAVLDTGISTHPDLNIRGGASFVPGEPSTQDGEGHGTHVAGTIAALNNSIGVLGVAPSAELYAVKVLGASGQGSVSSIAHGLEWAGLNGMHVANLSLGSPSPSATLEQAVNSATSRGVLVVAASGNSGAGSISYPARYANAMAVGATDQNNNRASFSQYGAGLDIVAPGVNVQSTYPGSTYASLNGTSSATPHVAGAAALVKQKNPSWSNVQIRNHLKNTATSLGSTNLYGSGLVNAEAATR

SEQ ID NO: 56617 - protein, 269 aa, Unidentified
AQVVPWGISRVQAPAAHNRGLTGSGVKVAVLDTGISTHEDLNIRGGASFVPGEPSTQDGNGHGTHVAGTIAALDNSIGVLGVAPSAELYAVKVLGASGSGSVSSIAQGLEWAGNNRMHVANLSLGSPSPSATLEQAVNSATSRGVLVVAASGNSGAGQISYPARYANAMAVGATDQNNNRASFSQYGAGLDIVAPGVNVQSTYPGSTYASLNGTSMATPHVAGAAALVKQKNPSWSNVQIRNHLKNTATSLGSTNLYGSGLVNAEAATR

SEQ ID NO: 56618 - protein, 269 aa, Unidentified
AQSVPWGISRVQAPAAHNRKLTGSGVKVAVLDTGISTHPDLNIRGGASFVPGEPSTQDGEGHGTHVAGTIAALNNSIGVLGVAPSAELYAVKVLGASGQGSVSSIAQGLEWAGLNGMHVANLSLGSPSPSATLEQAVNSATSRGVLVVAASGNSGAGSISYPARYANAMAVGATDQNNNRADFSQYGAGLDIVAPGVNVQSTYPGSTYASLNGTSMATPHVAGAAALVKQKNPSWSNVQIRNHLKNTATSLGSTNLYGSGLVNAEAATR

SEQ ID NO: 56619 - protein, 269 aa, Unidentified
AQSVPWGISRVQAPAAHRRGLTGSGVKVAVLDTGISTHPDLNIRGGASFVPGEPSTQDGNGHGTHVAGTIAALDNNIGVLGVAPSAELYAVKVLGASGSGSVSSIAQGLEWAGNNGMHVANLSLGSPSPSATLEQAVNSATSRGVLVVAASGNSGAGSISYPARYANAMAVGATDQNNNRASFSQYGAGLDIVAPGVNVLSTYPGSTYASLNGTSMATPHVAGAAALVKQKNPSWSNVQIRNRLKNTATSLGSTNLYGSGLVNAEAATR

SEQ ID NO: 56620 - protein, 269 aa, Unidentified
AQSVPWGISRVQAPAAHNRGLTGSGVKVAVLDTGISTHPDLNIRGGASFVPGEPSTQDGNGHGTHVAGTIAALNNDIGVLGVAPSAELYAVKVLGASGSGSVSSIAQGLEWAGNNSMHVANLSLGSESPSATLEQAVNSATSRGVLVVAASGNSGAGSISYPARYANAMAVGATDQNNNRASFSQYGAGLDIVAPGVNVQSTYPGSTYASLNGTSMATPHVAGAAALVKQKNPSWSNVRIRDHLKNTATSLGSTNLYGSGLVNAEAATR

SEQ ID NO: 56621 - protein, 269 aa, Unidentified
AQSVPWGISRVQAPAAHRRGLTGSGVKVAVLDTGISTHPDLRIRGGASFVPGEPSTQDGNGHGTHVAGTIAALDNSIGVLGVAPSAELYAVKVLGASGSGSVSSIAQGLEWAGNNGMHVANLSLGSPSPSATLEQAVNSATSRGVLVVAASGNSGAGSISYPARYANAMAVGATDQNNNRASFSQYGAGLDIVAPGVNVQSTYPGSTYASLNGTSMATPHVAGEAALVKQKNPSWSNVQIRNRLKNTATSLGSTNLYGSGLVNAEAATR

SEQ ID NO: 56622 - protein, 269 aa, Unidentified
AQSVPWGISRVQAPAAHRRGLTGRGVKVAVLDTGISTHPDLNIRGGASFVPGEPSTQDGNGHGTHVAGTIAALDNNIGVLGVAPSAELYAVKVLGASGSGSVSSIAQGLEWAGNNGMHVANLSLGSPSPSATLEQAVNSATSRGVLVVAASGNSGAGSISYPARYANAMAVGATDQNNNRASFSQYGAGLDIVAPGVNVQSTYPGSTYASLNGTSQATPHVAGAAALVKQKNPSWSNVQIRNRLKNTATSLGSTNLYGSGLVNAEAATR

SEQ ID NO: 56623 - protein, 269 aa, Unidentified
AQSVPWGISRVQAPAAHNRGLTGRGVKVAVLDTGISTHPDLNIRGGASFVPGEPSTQDGNGHGTHVAGTIAALNNDIGVLGVAPSAELYAVKVLGASGSGSVSSIAQGLEWAGNNSMHVANLSLGSPSPSATLEQAVNSATSRGVLVVAASGNSGAGSISYPARYANAMAVGATDQNNNRADFSQYGAGLDIVAPGVNVQSTYPGSTYASLNGTSMATPHVAGAAALVKQKNPSWSNVRIRNHLKNTATSLGSTNLYGSGLVNAEAATR

SEQ ID NO: 56624 - protein, 269 aa, Unidentified
AQSVPWGISRVQAPAAHNRRLTGSGVKVAVLDTGISTHPDLNIRGGASFVPGEPSTQDGEGHGTHVAGTIAALNNGIGVLGVAPSAELYAVKVLGASGSGSVSSIAQGLEWAGNNDMHVANLSLGSPSPSATLEQAVNSATSRGVLVVAASGNSGAGSISYPARYANAMAVGATDQNNNRADFSQYGAGLDIVAPGVNVQSTYPGSTYASLNGTSMATPHVAGAAALVKQKNPSWSNVQIRNHLKNTATSLGSTNLYGSGLVNAEAATR

SEQ ID NO: 56625 - protein, 269 aa, Unidentified
AQSVPWGISRVQAPAAHNRGLLGFGVKVAVLDTGISTHPDLNIRGGASFVPGEPSTQDGNGHGTHVAGTIAALNNSIGVLGVAPSAELYAVKVLGASGSGSVSSIAQGLEWAGNNRMHVANLSLGDPSPSATLEQAVNSATSRGVLVVAASGNSGAGSISYPARYANAMAVGATDQNNNRASFSQYGAGLDIVAPGVNVQSTYPGSAYASLNGTSMATPHVAGAAALVKQKNPSWSNVQIRNHLKNTATSLGSTNLYGSGLVNAEAATR

SEQ ID NO: 56626 - protein, 269 aa, Unidentified
AQSVPWGISRVQAPAAHNRKLTGSGVKVAVLDTGISTHPDLNIRGGASFVPGEPSTQDGEGHGTHVAGTIAALNNSIGVLGVAPSAELYAVKVLAASGNGSVSSIAQGLEWAGLNGMHVANLSLGSPSPSATLEQAVNSATSRGVLVVAASGNSGAGSISYPARYANAMAVGATDQNNNRASFSQYGAGLDIVAPGVNVQSTYPGSTYASLNGTSMATPHVAGAAALVKQKNPSWSNVQIRNHLKNTATSLGSTNLYGSGLVNAEAATR

SEQ ID NO: 56627 - protein, 269 aa, Unidentified
AQSVPWGISRVQAPAAHNRGLTGSGVKVAVLDTGISTHPDLNIRGGASFVPGEPSTQDGNGHGTHVAGTIAALNNGIGVLGVAPSAELYAVKVLGASGSGSVSSIAQGLEWAGNNDMHVANLSLGSESPSATLEQAVNSATSRGVLVVAASGNSGAGSISYPARYANAMAVGATDQNNNRADFSQYGAGLDIVAPGVNVQSTYPGSTYASLNGTSMATPHVAGAAALVKQKNPSWSNVRIRNHLKNTATSLGSTNLYGSGLVNAEAATR

SEQ ID NO: 56628 - protein, 269 aa, Unidentified
AQSVPWGISRVQAPASHNRGLTGSGVFVAVLDTGISTHPDLNIRGGASFVPGEPSTQDGEGHGTHVAGTIAALNNSIGVLGVAPSAELYAVKVLGASGSGSVSSIAQGLEWAGNNGMHVANLSLGSPSPSATLEQAVNSATSRGVLVVAASGNSGEGSISYPARYANAMAVGATDQNNNRASFSQYGAGLDIVAPGVNVQSTYPGSTYASLNGTSMATPHVAGAAALVKQKNPSWSNVQIRNRLKNTATSLGSTNLYGSGLVNAEAATR

SEQ ID NO: 56629 - protein, 269 aa, Unidentified
AQTVPWGISRVQAPAAHNRGLTGSGVKVAVLDTGISTHPDLNIRGGASFVPGEPSTQDGNGHGTHVAGTIAALNNSIGVLGVAPSAELYAVKVLGASGSGAISSIAQGLEWAGNNGMHVANLSLGSPSPSATLEQAVNSATSRGVLVVAASGNSGASSISYPARYANAMAVGATDQNNNRASFSQYGAGLDIVAPGVNIQSTYPGSTYASLNGTSMATPHVAGAAALVKQKNPSWSNVQIRNHLKNTATSLGSTNLYGSGLVNAEAATR

SEQ ID NO: 56630 - protein, 269 aa, Unidentified
AQSVPWGISRVQAPAAHNRRLTGSGVKVAVLDTGISTHPDLNIRGGASFVPGEPSTQDGNGHGTHVAGTIAALNNGIGVLGVAPSAELYAVKVLGASGSGSVSSIAQGLEWAGNNDMHVANLSLGSPSPSATLEQAVNSATSRGVLVVAASGNSGADSISYPARYANAMAVGATDQNNNRASFSQYGAGLDIVAPGVNVQSTYPGSTYASLNGTSMATPHVAGAAALVKQKNPSWSNVQIRDHLKNTATSLGSTNLYGSGLVNAEAATR

SEQ ID NO: 56631 - protein, 269 aa, Unidentified
AQSVPWGISRVQAPAAHNRGLTGSGVKVAVLDTGISTHPDLNIRGGASFVPGEPSTQDGNGHGTHVAGTIAALNNGIGVLGVAPSAELYAVKVLGASGSGSVSSIAQGLEWAGNNSMHVANLSLGSESPSATLEQAVNSATSRGVLVVAASGNSGAGSISYPARYANAMAVGATDQNNNRADFSQYGAGLDIVAPGVNVQSTYPGSTYASLNGTSMATPHVAGAAALVKQKNPSWSNVRIRNHLKNTATSLGSTNLYGSGLVNAEAATR

SEQ ID NO: 56632 - protein, 269 aa, Unidentified
AQVVPWGISRVQAPAAHNRGLTGSGVKVAVLDTGISTHEDLNIRGGASFVPGEPSTQDGNGHGTHVAGTIAALDNSIGVLGVAPSAELYAVKVLGASGSGSVSSIAQGLEWAGNNRMHVANLSLGSPSPSATLEQAVNSATSRGVLVVAASGNSGAGSISYPARYANAMAVGATDQNNNRASFSQYGAGLDIVAPGVNVQSTYPPSTYASLNGTSMATPHVAGAAALVKQKNPSWSNVQIRNHLKNTATSLGSTNLYGSGLVNAEAATR

SEQ ID NO: 56633 - protein, 269 aa, Unidentified
AQSVPWGISRVQAPAAHNRGLRGSGVKVAVLDTGISTHPDLNIRGGASFVPGEPSTQDGNGHGTHVAGTIAALNNSIGVLGVAPSAELYAVKVLGASGGGAVSSIAQGLEWAGNNGMHVANLSLGSPSPSATLEQAVNSATSRGVLVVAASGNSGAGSISYPARYANAMAVGATDQNNNRASFSQYGAGLDIVAPGVNVQSTYPGSTYASLNGTSMATPHVAGAAVLVKQKNPSWSNVRIRNHLKNTATSLGSTNLYGSGLVNAEAATR

SEQ ID NO: 56634 - protein, 269 aa, Unidentified
AQSVPWGISRVQAPAAHNRGLTGSGVKVAVLDTGISTHPDLNIRGGASFVPGEPSTQDGNGHGTHVAGTIAALNNSIGVLGVAPSAELYAVKVLGASGSGSLSSIAQGLEWAGNNGMHVANLSLGSPSPSATLEQAVNSATSRGVLVVAASGNSGEGSISYPARYANAMAVGATDQNNNHADFSQYGAGLDIVAPGVNVQSTYPGSTYASLNGTSMATPHVAGAAALVKQKNPSWSNVQIRNRLKNTATSLGSTNLYGSGLVNAEAATR

SEQ ID NO: 56635 - protein, 269 aa, Unidentified
AQSVPWGISRVQAPAAHNRGLTGSGVKVAVLDTGISTHPDLNIRGGASFVPGEPSTQDGNGHGTHVAGTIAALNNNIGVLGVAPSAELYAVKVLGASGDGSVSSIAQGLEWAGNNGMHVANLSLGQPSPSATLEQAVNSATSRGVLVVAASGNSGAGSISYPARYANAMAVGATDQNNNRASFSQYGAGLDIVAPGVNVQSTYPGSTYASENGTSMATPHVAGAAALVKQKNPRWSNVQIRNHLKNTATSLGSTNLYGSGLVNAEAATR

SEQ ID NO: 56636 - protein, 269 aa, Unidentified
AQSVPWGISRVQAPAAHNRRLTGRGVKVAVLDTGISTHPDLNIRGGASFVPGEPSTQDGNGHGTHVAGTIAALNNGIGVLGVAPSAELYAVKVLGASGSGSVSSIAQGLEWAGNNSMHVANLSLGSPSPSATLEQAVNSATSRGVLVVAASGNSGAGSISYPARYANAMAVGATDQNNNRADFSQYGAGLDIVAPGVNVQSTYPGSTYASLNGTSMATPHVAGAAALVKQKNPSWSNVQIRNHLKNTATSLGSTNLYGSGLVNAEAATR

SEQ ID NO: 56637 - protein, 269 aa, Unidentified
AQSVPWGISRVRAPAAHNRGLTGSGVKVAVLDTGISTHPDLNIRGGASFVPGEPSTQDGNGHGTHVAGTIAALDNSIGVLGVAPSAELYAVKVLGASGSGAISSIAQGLEWAGNNGMHVANLSLGSPSPSATLEQAVNSATSRGVLVVAASGNSGAGSISYPARYANAMAVGATDQNNNRASFSQYGAGLDIVAPGVNVQSTYTGSTYASLNGTSSATPHVAGAAALVKQKNPSWSNVRIRNHLKNTATSLGSTNLYGSGLVNAEAATR

SEQ ID NO: 56638 - protein, 269 aa, Unidentified
AQSVPWGISRVQAPAAHNRKLTGSGVKVAVLDTGISTHPDLNIRGGASFVPGEPSTQDGNGHGTHVAGTIAALNNSIGVLGVAPSAELYAVKVLGASGDASVSSIAQGLEWAGNNGMHVANLSLGSPSPSATLEQAVNSATSRGVLVVAASGNSGAGSISYPARYANAMAVGATDQNNNRASFSQYGAGLDIVAPGVNVQSTYPGSTYASENGTSMATPHVAGAAALVKQKNPRWSNVQIRNHLKNTATSLGSTNLYGSGLVNAEAATR

SEQ ID NO: 56639 - protein, 269 aa, Unidentified
AQSVPWGISRVQAPASHNRGLTGSGVKVAVLDTGISTHPDLNIRGGASFVPGEPSTQDGNGHGTHVAGTIAALNNSIGVLGVAPSAELYAVKVLGASGGGALSSIAQGLEWAGNNGMHVANLSLGSPSPSATLEQAVNSATSRGVIVVAASGNSGAGSISYPARYANAMAVGATDQNNNRASFSQYGAGLDIVAPGVNVQSTYPGSTYASLNGTSMATPHVAGAAALVKQKNPSWSNVQIRNHLKNTATSLGSTNLYGSGLVNAEAATR

SEQ ID NO: 56640 - protein, 269 aa, Unidentified
AQSVPWGISRVQAPAAHNRGLTGSGVKVAVLDTGISTHPDLNIRGGASFVPGEPSTQDGNGHGTHVAGTIAALNNSIGVLGVAPNAELYAVKVLGASGSGSVSSIAQGLEWAGNNVMHVANLSLGVMSPSATLEQAVNSATSRGVLVVAASGNSGAGSISYPARYANAMAVGATDQNNNRASFSQYGAGLDIVAPGVNVQSTGPGSTYASLNGTSMATPHVAGAAALVKQKNPSWSNVQIRNHLKNTATSLGSTNLYGSGLVNAEAATR

SEQ ID NO: 56641 - protein, 269 aa, Unidentified
AQSVPWGISRVQAPAAHNRGMTGSGVKVAVLDTGISTHPDLNIRGGASFVPGEPSTQDGNGHGTHVAGTIAALDNSIGVLGVAPSAELYAVKVLGASGSGAISSIAQGLEWAGNNGMHVANLSLGSPSPSATLEQAVNSATSRGVLVVAASGNSGAGSISYPARYANAMAVGATDQNNNRASFSQYGAGLDIVAPGVNVQSTYPGSTYASLNGTSSATPHVAGAAALVKQRNPSWSNVQIRNHLKNTATSLGSTNLFGSGLVNAEAATR

SEQ ID NO: 56642 - protein, 269 aa, Unidentified
AQSVPWGISRVQAPAAHRRGLTGRGVKVAVLDTGISTHPDLNIRGGASFVPGEPSTQDGNGHGTHVAGTIAALNNSIGVLGVAPSAELYAVKVLGASGSGSVSSIAQGLEWAGNNGMHVANLSLGSPSPSATLEQAVNSATSRGVLVVAASGNSGAGSIDYPARYANAMAVGATDQNNNRASFSQYGAGLDIVAPGVNVYSTYPGSTYASLNGTSMATPHVAGAAALVKQKNPSWSNVQIRNRLKNTATSLGSTNLYGSGLVNAEAATR

SEQ ID NO: 56643 - protein, 269 aa, Unidentified
AQSVPWGISRVQAPAAHNRGLTGRGVKVAVLDTGISTHPDLNIRGGASFVPGEPSTQDGNGHGTHVAGTIAALDNSIGVLGVAPSAELYAVKVLGASGSGAISSIAQGLEWAGNNGMHVANLSLGSPSPSATLEQAVNSATSRGVLVVAASGNSGAGSISYPARYANAMAVGATDQNNNRASFSQYGAGLDIVAPGVNVQSTYPGSTYASLNGTSMATPHVAGAAALVKQKNPSWSNVRIRNHLKNTATSLGSTNLYGSGLVNAEAATR

SEQ ID NO: 56644 - protein, 269 aa, Unidentified
AQSVPWGISRVQAPAAHRRGLTGRGVKVAVLDTGISTHPDLNIRGGASFVPGEPSTQDGNGHGTHVAGTIAALDNSIGVLGVAPSAELYAVKVLGASGSGSVSSIAQGLEWAGNNGMHVANLSLGSPSPSATLEQAVNSATSRGVLVVAASGNSGAGSISYPARYANAMAVGATDQNNNRASFSQYGAGLDIVAPGVNVQSTYPGSTYFSLNGTSMATPHVAGAAALVKQKNPSWSNVQIRNRLKNTATSLGSTNLYGSGLVNAEAATR

SEQ ID NO: 56645 - protein, 269 aa, Unidentified
AQSVPWGISRVQAPAAHNRGLAGRGVKVAVLDSGISTHPDLNIRGGASFVPGEPSTQDGEGHGTHVAGTIAALNNSIGVLGVAPSAELYAVKVLGASGSGSVSSIAQGLEWAGLNGMHVANLSLGSPSPSATLEQAVNSATSRGVLVVAASGNSGAGSISYPARYANAMAVGATDQNNNRASFSQYGAGLDIVAPGVNVQSTYPGSTYASLNGTSMATPHVAGAAALVKQKNPSWSNVQIRNHLKNTATSLGSTNLYGSGLVNAEAATR

SEQ ID NO: 56646 - protein, 269 aa, Unidentified
AQSVPWGISRVQAPAAHNRGLTGSGVKVAVLDTGISTHPDLNIRGGASFVPGEPSTQDGNGHGTHVAGTIAALNNGIGVLGVAPSAELYAVKVLGASGSGSVSSIAQGLEWAGNNDMHVANLSLGSESPSATLEQAVNSATSRGVLVVAASGNSGADSISYPARYANAMAVGATDQNNNRADFSQYGAGLDIVAPGVNVQSTYPGSTYASLNGTSMATPHVAGAAALVKQKNPSWSNVQIRNHLKNTATSLGSTNLYGSGLVNAEAATR

SEQ ID NO: 56647 - protein, 269 aa, Unidentified
AQSVPWGISRVQAPAAHNRGLTGSGVKVAVLDTGISTHPDLNIRGGASFVPGEPSTQDGNGHGTHVAGTIAALNNSIGVLGVAPSAELYAVKVLGASGAGGVSSIAQGLEWAGNNGMHVANLSLGSPSPSATLEQAVNSATSRGVLVVAASGNSGEGSISYPARYANAMAVGATDQNNNHASFSQYGAGLDIVAPGVNVQSTYPGSTYASLNGTSMATPHVAGAAALVKQKNPSWSNVQIRNRLKNTATSLGSTNLYGSGLVNAEAATR

SEQ ID NO: 56648 - protein, 269 aa, Unidentified
AQSVPWGISRVQAPAAHNRGLTGRGVKVAVLDTGISTHPDLNIRGGASFVPGEPSTQDGNGHGTHVAGTIAALNNGIGVLGVAPSAELYAVKVLGASGSGSVSSIAQGLEWAGNNDMHVANLSLGSPSPSATLEQAVNSATSRGVLVVAASGNSGAGSISYPARYANAMAVGATDQNNNRASFSQYGAGLDIVAPGVNVQSTYPGSTYASLNGTSMATPHVAGAAALVKQKNPSWSNVRIRNRLKNTATSLGSTNLYGSGLVNAEAATR

SEQ ID NO: 56649 - protein, 269 aa, Unidentified
AQSVPWGISRVQAPAAHNRGLTGGGVKVAVLDTGISTHPDLNIRGGASFVPGEPSTQDGNGHGTHVAGTIAALNNNIGVLGVAPSAELYAVKVLSASGNGSVSSIAQGLEWAGNNGMHVANLSLGSPSPSATLEQAVNSATSRGVLVVAASGNSGAGSISYPARYANAMAVGATDQNNNRADFSQYGAGLDIVAPGVNVQSTYPGSTYASLNGTSMATPHVAGAAALVKQKNPSWSNVQIRNHLKNTATSLGSTNLYGSGLVNAEAATR

SEQ ID NO: 56650 - protein, 269 aa, Unidentified
AQSVPWGISRVQAPAAHNRGLTGSGVKVAVLDTGISTHPDLRIRGGASFVPGEPSTQDGNGHGTHVAGTIAALNNNIGVLGVAPSAELYAVKVLGASGDGSVSSIAQGLEWAGNNGMHVANLSLGSPSPSATLEQAVNSATSRGVLVVAASGNSGAGSISYPARYANAMAVGATDQNNNRASFSQYGAGLDIVAPGVNVQSTYPGSTYASENGTSMATPHVAGAAALVKQKNPRWSNVQIRNHLKNTATSLGSTNLYGSGLVNAEAATR

SEQ ID NO: 56651 - protein, 269 aa, Synthetic construct
AQSVPWGISRVQAPAAHNRGLTGSGVKVAVLDTGISTHPDLNIRGGASFVPGEPSTQDGNGHGTHVAGTIAALNNSIGVLGVAPSAELYAVKVLGASGSGSVSSIAQGLEWAGNNGMHVANLSLGSPSPSATLEQAVNSATSRGVLVVAASGNSGAGSISYPARYANAMAVGATDQNNNRASFSQYGAGLDIVAPGVNVQSTYPGSTYASLNGTSMATPSVAGAAALVRQRNPSWSNVQIRNHLNNTATSLGSTNLFGSGLVNAEAATR

SEQ ID NO: 56652 - protein, 269 aa, Unidentified
AQSVPWGISRVQAPAAHNRGLLGFGVKVAVLDTGISTHPDLNIRGGASFVPGEPSTQDGNGHGTHVAGTIAALNNNIGVLGVAPSAELYAVKVLGASGSGSVSSIAQGLEWAGNNRMHVANLSLGDPSPSATLEQAVNSATSRGVLVVAASGNSGAGSISYPARYANAMAVGATDQNNNRASFSQYGAGLDIVAPGVNVQSTYPGSTYASLNGTSMATPHVAGAAALVKQKNPSWSNVQIRNHLKNTATSLGSTNLYGSGLVNAEAATR

SEQ ID NO: 56653 - protein, 269 aa, Unidentified
AQSVPWGISRVQAPAAHNRGLTGSGVKVAVLDTGISTHPDLNIRGGASFVPGEPSTQDGEGHGTHVAGTIAALNNGIGVLGVAPSAELYAVKVLGASGSGSVSSIAQGLEWAGNNDMHVANLSLGSPSPSATLEQAVNSATSRGVLVVAASGNSGAGSISYPARYANAMAVGATDQNNNRASFSQYGAGLDIVAPGVNVQSTYPGSTYASLNGTSMATPHVAGAAALVKQKNPSWSNVRIRDHLKNTATSLGSTNLYGSGLVNAEAATR

SEQ ID NO: 56654 - protein, 269 aa, Unidentified
AQSVPWGISRVQAPAAHNRGLAGSGVKVAVLDTGISTHPDLNIRGGASFVPGEPSTQDGEGHGTHVAGTIAALNNSIGVLGVAPSAELYAVKVLGASGSGSVSSIAQGLEWAGLNRMHVANLSLGSPSPSATLEQAVNSATSRGVLVVAASGNSGEGSISYPARYANAMAVGATDQNNNRASFSQYGAGLDIVAPGVNVQSTYPGSTYASLNGTSMATPHVAGAAALVKQKNPSWSNVQIRNHLKNTATSLGSTNLYGSGLVNAEAATR

SEQ ID NO: 56655 - protein, 269 aa, Unidentified
AQSVPWGISRVQAPAAHNRGLTGRGVKVAVLDTGISTHPDLNIRGGASFVPGEPSTQDGNGHGTHVAGTIAALNNGIGVLGVAPSAELYAVKVLGASGSGSVSSIAQGLEWAGNNDMHVANLSLGSESPSATLEQAVNSATSRGVLVVAASGNSGADSISYPARYANAMAVGATDQNNNRASFSQYGAGLDIVAPGVNVQSTYPGSTYASLNGTSMATPHVAGAAALVKQKNPSWSNVQIRNHLKNTATSLGSTNLYGSGLVNAEAATR

SEQ ID NO: 56656 - protein, 269 aa, Unidentified
AQSVPWGISRVQAPAAHNRGLTGSGVKVAVLDTGISTHPDLNIRGGASFVPGEPSTQDGNGHGTHVAGTIAALNNSIGVLGVAPSAELYAVKVLPQSGGASISSIAQGLEWAGNNGMHVANLSLGSPSPSATLEQAVNSATSRGVLVVAASGNSGAGSISYPARYANAMAVGATDQNNNRASFSQYGAGLDIVAPGVNVQSTYPGSTYASLNGTSMATPHVAGAAALVKQKNPSWSNVQIRNHLKNTATSLGSTNLYGSGLVNAEAATR

SEQ ID NO: 56657 - protein, 269 aa, Unidentified
AQSVPWGISRVQAPAAHNRGLTGSGVKVAVLDTGISTHPDLNIRGGASFVPGEPSTQDGNGHGTHVAGTIAALDNSIGVLGVAPSAELYAVKVLGARGSGAISSIAQGLEWAGNNGMHVANLSLGSPSPSATLEQAVNSATSRGVLVVAASGNSGAGSISYPARYANAMAVGATDQNNNRASFSQYGAGLDIVAPGVTVQSTYPGSTYASLNGTSMATPHVAGAAALVKQKNPSWSNVQIRNHLKNTATSLGSTNLYGSGLVNAEAATR

SEQ ID NO: 56658 - protein, 269 aa, Unidentified
AQSVPWGISRVQAPAAHNRGLAGSGVKVAVLDSGISTHPDLNIRGGASFVPGEPSTQDGNGHGTHVAGTIAALNNSIGVLGVAPSAELYAVKVLGASGSGSVSSIAQGLEWAGLNRMHVANLSLGSPSPSATLEQAVNSATSRGVLVVAASGNSGAGSISYPARYANAMAVGATDQNNNRADFSQYGAGLDIVAPGVNVQSTYPGSTYASLNGTSMATPHVAGAAALVKQKNPSWSNVQIRNHLKNTATSLGSTNLYGSGLVNAEAATR

SEQ ID NO: 56659 - protein, 269 aa, Unidentified
AQVVPWGISRVQAPAAHNRGLTGSGVKVAVLDTGISTHPDLNIRGGASFVPGEPSTQDGNGHGTHVAGTIAALDNSIGVLGVAPSAELYAVKVLGASGSGSVSSIAQGLEWAGNNRMHVANLSLGRPSPSATLEQAVNSATSRGVLVVAASGNSGAGSISYPARYANAMAVGATDQNNNRASFSQYGAGLDIVAPGVNVQSTYPGSTYASLNGTSMATPHVAGAAALVKQKNPSWSNVQIRNHLKNTATSLGSTILYGSGLVNAEAATR

SEQ ID NO: 56660 - protein, 269 aa, Unidentified
AQSVPWGISRVQAPAAHNRRLTGSGVKVAVLDTGISTHPDLNIRGGASFVPGEPSTQDGNGHGTHVAGTIAALNNDIGVLGVAPSAELYAVKVLGASGSGSVSSIAQGLEWAGNNDMHVANLSLGSESPSATLEQAVNSATSRGVLVVAASGNSGAGSISYPARYANAMAVGATDQNNNRADFSQYGAGLDIVAPGVNVQSTYPGSTYASLNGTSMATPHVAGAAALVKQKNPSWSNVQIRNHLKNTATSLGSTNLYGSGLVNAEAATR

SEQ ID NO: 56661 - protein, 269 aa, Unidentified
AQSVPWGISRVQAPAAHNRKLTGSGVKVAVLDTGISTHPDLNIRGGASFVPGEPSTQDGEGHGTHVAGTIAALNNNIGVLGVAPSAELYAVKVLSASGGGSVSSIAQGLEWAGLNGMHVANLSLGSPSPSATLEQAVNSATSRGVLVVAASGNSGAGSISYPARYANAMAVGATDQNNNRASFSQYGAGLDIVAPGVNVQSTYPGSTYASLNGTSSATPHVAGAAALVKQKNPSWSNVQIRNHLKNTATSLGSTNLYGSGLVNAEAATR

SEQ ID NO: 56662 - protein, 269 aa, Unidentified
AQSVPWGISRVQAPAAHNRGLTGSGVKVAVLDTGISTHPDLNIRGGASFVPGEPSTQDGNGHGTHVAGTIAALNNDIGVLGVAPSAELYAVKVLGASGSGSVSSIAQGLEWAGNNSMHVANLSLGSPSPSATLEQAVNSATSRGVLVVAASGNSGADSISYPARYANAMAVGATDQNNNRASFSQYGAGLDIVAPGVNVQSTYPGSTYASLNGTSMATPHVAGAAALVKQKNPSWSNVRIRDHLKNTATSLGSTNLYGSGLVNAEAATR

SEQ ID NO: 56663 - protein, 269 aa, Unidentified
AQSVPWGISRVQAPAAHNRKLTGSGVKVAVLDTGISTHPDLWIRGGASFVPGEPSTQDGNGHGTHVAGTIAALNNSIGVLGVAPSAELYAVKVLGASGSGSVSSIAQGLEWAGLNGMHVANLSLGSPSPSATLEQAVNSATSRGVLVVAASGNSGAGSISYPARYANAMAVGATDQNNNRADFSQYGAGLDIVAPGVNVQSTYPGSAYASLNGTSMATPHVAGAAALVKQKNPSWSNVQIRNHLKNTATSLGSTNLYGSGLVNAEAATR

SEQ ID NO: 56664 - protein, 269 aa, Unidentified
AQSVPWGISRVQAPAAHNRRLTGSGVKVAVLDTGISTHPDLNIRGGASFVPGEPSTQDGQGHGTHVAGTIAALNNSIGVLGVAPSAILYAVKVLGASGSGSVSSIAQGLEWAGNNGMHVANLSLGSPSPSATLEQAVNSATSRGVLVVAASGNSGAGSISYPARYANAMAVGATDQNNKRASFSQYGAGLDIVAPGVNVQSTYPMSTYASLNGTSMATPHVAGAAALVKQKNPSWSNVQIRNHLKNTATSLGSTNLYGSGLVNAEAATR

SEQ ID NO: 56665 - protein, 269 aa, Unidentified
AQSVPWGISRVQAPAAHNRGLLGSGVKVAVLDTGISTHPDLNIRGGASFVPGEPSTQDGNGHGTHVAGTIAALNNNIGVLGVAPSAELYAVKVLGASGSGSVSSIAQGLEWAGNNRMHVANLSLGDPSPSATLEQAVNSATSRGVLVVAASGNSGAGSISYPARYANAMAVGATDQNNNRASFSQYGAGLDIVAPGVNVQSTYPGSAYASLNGTSMATPHVAGAAALVKQKNPSWSNVQIRNHLKNTATSLGSTNLYGSGLVNAEAATR

SEQ ID NO: 56666 - protein, 269 aa, Unidentified
AQSVPWGISRVQAPAAHNRGLAGRGVKVAVLDTGISTHPDLNIRGGASFVPGEPSTQDGEGHGTHVAGTIAALNNSIGVLGVAPSAELYAVKVLGASGSGSVSSIAQGLEWAGLNGMHVANLSLGIPSPSATLEQAVNSATSRGVLVVAASGNSGAGSISYPARYANAMAVGATDQNNNRASFSQYGAGLDIVAPGVNVQSTYPGSTYASLNGTSMATPHVAGAAALVKQKNPSWSNVQIRNHLKNTATSLGSTNLYGSGLVNAEAATR

SEQ ID NO: 56667 - protein, 269 aa, Unidentified
AQSVPWGISRVQAPAAHNRGLTGRGVKVAVLDSGISTHPDLNIRGGASFVPGEPSTQDGNGHGTHVAGTIAALNNSIGVLGVAPSAELYAVKVLGASGSGSVSSIAQGLEWAGLNGMHVANLSLGIPSPSATLEQAVNSATSRGVLVVAASGNSGEGSISYPARYANAMAVGATDQNNNRASFSQYGAGLDIVAPGVNVQSTYPGSTYASLNGTSMATPHVAGAAALVKQKNPSWSNVQIRNHLKNTATSLGSTNLYGSGLVNAEAATR

SEQ ID NO: 56668 - protein, 269 aa, Unidentified
AQSVPWGISRVQAPAAHRRGLTGRGVKVAVLDTGISTHPDLNIRGGASFVPGEPSTQDGNGHGTHVAGTIAALDNSIGVLGVAPSAELYAVKVLGASGSGSVSSIAQGLEWAGNNGMHVANLSLGSPSPSATLEQAVNSATSRGVLVVAASGNSGAGSISYPARYANAMAVGATDQDNNRASFSQYGAGLDIVAPGVNVQSTYPGSTYASLNGTSMATPHVAGAAALVKQKNPSWSNVRIRNHLKNTATSLGSTNLYGSGLVNAEAATR

SEQ ID NO: 56669 - protein, 269 aa, Unidentified
AQSVPWGISRVQAPAAHNRGLTGSGVKVAVLDTGISTHPDLNIRGGASFVPGEPSTQDGNGHGTHVAGTIAALNNNIGVLGVAPSAELYAVKVLAASGGGSVSSIAGGLEWAGNNGMHVANLSLGAPSPSATLEQAVNSATSRGVLVVAASGNSGAGSISYPARYANAMAVGATDQNNNRASFSQYGAGLDIVAPGVNVQSTYPGSTYASLNGTSMATPHVAGAAALVKQKNPSWSNVQIRNHLKNTATSLGSTNLYGSGLVNAEAATR

SEQ ID NO: 56670 - protein, 269 aa, Unidentified
AQSVPWGISRVQAPAAHNRKLTGSGVKVAVLDTGISTHPDLNIRGGASFVPGEPSTQDGEGHGTHVAGTIAALNNNIGVLGVAPSAELYAVKVLGASGSGSVSSIAQGLEWAGNNGMHVANLSLGQPSPSATLEQAVNSATSRGVLVVAASGNSGAGSISYPARYANAMAVGATDQNNNRASFSQYGAGLDIVAPGVNVQSTYPGSAYASLNGTSMATPHVAGAAALVKQKNPSWSNVQIRNHLKNTATSLGSTNLYGSGLVNAEAATR

SEQ ID NO: 56671 - protein, 269 aa, Unidentified
AQSVPWGISRVQAPAAHNRGLTGSGVKVAVLDTGISTHPDLNIRGGASFVPGEPSTQDGNGHGTHVAGTIAALNNSIGVLGVAPSAILYAVKVLGASGSGSVSSIAQGLEWAGAFGMHVANLSLGSPSPSATLEQAVNSATSRGVLVVAASGNSGAGSISYPARYANAMAVGATDQNNNRASFSQYGAGLDIVAPGVNVQSTYPGSTYASLNGTSMAAPHVAGAAALVKQKNPSWSNVQIRNRLKNTATSLGSTNLYGSGLVNAEAATR

SEQ ID NO: 56672 - protein, 269 aa, Unidentified
AQSVPWGISRVQAPAAHNRGLTGSGVKVAVLDSGISTHPDLNIRGGASFVPGEPSTQDGNGHGTHVAGTIAALNNSIGVLGVAPSAELYAVKVLGASGSGSVSSIAQGLEWAGLNRMHVANLSLGIPSPSATLEQAVNSATSRGVLVVAASGNSGAGSIDYPARYANAMAVGATDQNNNRASFSQYGAGLDIVAPGVNVQSTYPGSTYASLNGTSMATPHVAGAAALVKQKNPSWSNVQIRNHLKNTATSLGSTNLYGSGLVNAEAATR

SEQ ID NO: 56673 - protein, 269 aa, Unidentified
AQSVPWGISRVQAPAAHNRGLTGSGVKVAVLDTGISTHPDLNIRGGASFVPGEPSTQDGNGHGTHVAGTIAALDNNIGVLGVAPSAELYAVKVLGASGSGSVSSIAQGLEWAGNNRMHVANLSLGSPSPSATLEQAVNSATSRGVLVVAASGNSGAGSISYPARYANAMAVGATDQNNNRASFSQYGAGLDIVAPGVNVQSTWPGSTYASLNGTSMATPHVAGAAALVKQKNPSWSNVQIRNRLKNTATSLGSTNLYGSGLVNAEAATR

SEQ ID NO: 56674 - protein, 269 aa, Unidentified
AQSVPWGISRVQAPAAHNRGLTGRGVKVAVLDTGISTHPDLKIRGGASFVPGEPSTQDGNGHGTHVAGTIAALNNSIGVLGVAPSAELYAVKVLGASGAGSVSSIAQGLEWAGNNGMHVANLSLGSPSPSATLEQAVNSATSRGVLVVAASGNSGAGSISYPARYANAMAVGATDQNNNRASFSQYGAGLDIVAPGVDVQSTYIGSTYASLNGTSMATPHVAGAAALVKQKNPSWSNVQIRNHLKNTATSLGSTNLYGSGLVNAEAATR

SEQ ID NO: 56675 - protein, 269 aa, Unidentified
AQVVPWGISRVQAPAAHNRGLTGSGVKVAVLDTGISTHEDLNIRGGASFVPGEPSTQDGNGHGTHVAGTIAALDNSIGVLGVAPSAELYAVKVLGASGSGSVSSIAQGLEWAGNNRMHVANLSLGSPSPSATLEQAVNSATSRGVLVVAASGNSGAGSISYPARYANAMAVGATDQNNNRASFSQYGAGLDIVAPGVNVQSTYPGSTYASLNGTSMATPHVAGAAALVKQKNPSWSNVQIRNHLKNTATSLGSTILYGSGLVNAEAATR

SEQ ID NO: 56676 - protein, 269 aa, Unidentified
AQSVPWGISRVQAPAAHNRGLTGRGVKVAVLDTGISTHPDLNIRGGASFVPGEPSTQDGNGHGTHVAGTIAALNNSIGVLGVAPSAELYAVKVLGASGSGSVSSIAQGLEWAGLNRMHVANLSLGIPSPSATLEQAVNSATSRGVLVVAASGNSGEGSISYPARYANAMAVGATDQNNNRASFSQYGAGLDIVAPGVNVQSTYPGSTYASLNGTSMATPHVAGAAALVKQKNPSWSNVQIRNHLKNTATSLGSTNLYGSGLVNAEAATR

SEQ ID NO: 56677 - protein, 269 aa, Unidentified
AQSVPWGISRVQAPAAHNRGLTGSGVKVAVLDTGISTHPDLNIRGGASFVPGEPSTQDGNGHGTHVAGTIAALNNSIGVLGVAPNAELYAVKVLGASGSGSVSSIAQGLEWAGNNVMHVANLSLGNSAPSATLEQAVNSATSRGVLVVAASGNSGAGSISYPARYANAMAVGATDQNNNRASFSQYGAGLDIVAPGVNVQSTYPGSTYASLNGTSQATPHVAGAAALVKQKNPSWSNVQIRNHLKNTATSLGSTNLYGSGLVNAEAATR

SEQ ID NO: 56678 - protein, 269 aa, Unidentified
AQSVPWGISRVQAPATHNRGLTGSGVKVAVLDTGISTHPDLNIRGGASFVPGEPSTQDGNGHGTHVAGTIAALDNSIGVLGVAPSAELYAVKVLGASGSGAISSIAQGLEWAGNNGMHVANLSLGSPSPSATLEQAVNSATSRGVLVVAASGNSGAGSISYPARYANAMAVGATDQNNNRASFSQYGAGLDIVAPGVNVQSTYPGSTYASLNGTSMATPHVAGAAALVKQKNPSWSNVQIRDHLKNTATSLGSTNLYGSGLVNAEAATR

SEQ ID NO: 56679 - protein, 269 aa, Unidentified
AQSVPWGISRVQAPAAHNRGLTGRGVKVAVLDTGISTHPDLNIRGGASFVPGEPSTQDGEGHGTHVAGTIAALNNSIGVLGVAPSAELYAVKVLGASGSGSVSSIAQGLEWAGLNRMHVANLSLGSPSPSATLEQAVNSATSRGVLVVAASGNSGAGSISYPARYANAMAVGATDQNNNRADFSQYGAGLDIVAPGVNVQSTYPGSTYASLNGTSMATPHVAGAAALVKQKNPSWSNVQIRNHLKNTATSLGSTNLYGSGLVNAEAATR

SEQ ID NO: 56680 - protein, 269 aa, Unidentified
AQSVPWGISRVQAPAAHNRGLTGGGVKVAVLDTGISTHPDLNIRGGASFVPGEPSTQDGNGHGTHVAGTIAALNNNIGVLGVAPSAELYAVKVLGASGNGSVSSIAGGLEWAGNNGMHVANLSLGSPSPSATLEQAVNSATSRGVLVVAASGNSGAGSISYPARYANAMAVGATDQNNNRADFSQYGAGLDIVAPGVNVQSTYPGSTYASQNGTSSATPHVAGAAALVKQKNPSWSNVQIRNHLKNTATSLGSTNLYGSGLVNAEAATR

SEQ ID NO: 56681 - protein, 269 aa, Unidentified
AQSVPWGISRVQAPAAHNRRLWGRGVKVAVLDTGISTHPDLNITGGASFVPGEPSTQDGNGHGTHVAGTIAALNNSIGVLGVAPSAELYAVKVLGASGAGSVSSIAQGLEWAGNNGMHVANLSLGSPSPSATLEQAVNSATSRGVLVVAASGNSGAGSISYPARYANAMAVGATDQNNNRASFSQYGAGLDIVAPGVNVQSTYPGSTYASLNGTSMATPHVAGAAALVKQKNPSWSNVQIRNHLKNTATSLGSTNLYGSGLVNAEAATR

SEQ ID NO: 56682 - protein, 269 aa, Unidentified
AQSVPWGISRVQAPAAHRRGLTGRGVKVAVLDTGISTHPDLNIRGGASFVPGEPSTQDGNGHGTHVAGTIAALDNSIGVLGVAPSAELYAVKVLGASGSGSVSSIAQGLEWAGNNGMHVANLSLGSPSPSATLEQAVNSATSRGVLVVAASGNSGAGSISYPARYANAMAVGATDQNNNRASFSQYGAGLDLVAPGVNVQSTYPGSTYASLNGTSMATPHVAGAAALVKQKNPSWSNVRIRNHLKNTATSLGSTNLYGSGLVNAEAATR

SEQ ID NO: 56683 - protein, 269 aa, Unidentified
AQSVPWGISRVQAPAAHNRGLTGRGVKVAVLDTGISTHPDLNIRGGASFVPGEPSTQDGNGHGTHVAGTIAALNNGIGVLGVAPSAELYAVKVLGASGSGSVSSIAQGLEWAGNNSMHVANLSLGSPSPSATLEQAVNSATSRGVLVVAASGNSGADSISYPARYANAMAVGATDQNNNRASFSQYGAGLDIVAPGVNVQSTYPGSTYASLNGTSMATPHVAGAAALVKQKNPSWSNVQIRDHLKNTATSLGSTNLYGSGLVNAEAATR

SEQ ID NO: 56684 - protein, 269 aa, Unidentified
AQSVPWGISRVQAPAAHNRGLTGSGVKVAVLDTGISTHPDLNIRGGASFVPGEPSTQDGEGHGTHVAGTIAALNNGIGVLGVAPSAELYAVKVLGASGSGSVSSIAQGLEWAGNNDMHVANLSLGSESPSATLEQAVNSATSRGVLVVAASGNSGAGSISYPARYANAMAVGATDQNNNRADFSQYGAGLDIVAPGVNVQSTYPGSTYASLNGTSMATPHVAGAAALVKQKNPSWSNVQIRNHLKNTATSLGSTNLYGSGLVNAEAATR

SEQ ID NO: 56685 - protein, 269 aa, Unidentified
AQSVPWGISRVQAPAAHNRGLTGSGVKVAVLDTGISTHPDLNIRGGASFVPGEPSTQDGNGHGTHVAGTIAALNNSIGVLGVAPSAELYAVKVLGASGSGSLSSIAQGLEWAGNNGMHVANLSLGNPSPSATLEQAVNSATSRGVLVVAASGNSGEGSISYPARYANAMAVGATDQNNNHASFSQYGAGLDIVAPGVNVQSTYPGSTYASLNGTSMATPHVAGAAALVKQKNPSWSNVQIRNHLKNTATSLGSTNLYGSGLVNAFAATR

SEQ ID NO: 56686 - protein, 269 aa, Unidentified
AQSVPWGISRVQAPAAHNRGLTGSGVKVAVLDTGISTHPDLNIRGGASFVPGEPSTQDGNGHGTHVAGTIAALDNSIGVLGVAPSAELYAVKVLGASGSGAISSIAQGLEWAGNNGMHVANLSLGSPSPSATLEQAVNSATSRGVLVVAASGNSGAGSISYPARYANAMAVGATDQNNNRASFSQYGAGLDIVAPGVNVQSTYPGSTYASLNGTSMATPHVAGAAALVKQENPSWSNVQIRNHLKNTATSLGSTNLYGSGLVNAEAAAR

SEQ ID NO: 56687 - protein, 269 aa, Unidentified
AQSVPWGISRVQAPAAHNRRLTGSGVKVAVLDTGISTHPDLNIRGGASFVPGEPSTQDGNGHGTHVAGTIAALNNSIGVLGVAPSAELYAVKVLGASGSGSVSSIAQGLEWAGNNRMHVANLSLGSESPSATLEQAVNSATSRGVLVVAASGNSGADSISYPARYANAMAVGATDQNNNRASFSQYGAGLDIVAPGVNVQSTYPGSTYASLNGTSMATPHVAGAAALVKQKNPSWSNVQIRNRLKNTATSLGSTNLYGSGLVNAEAATR

SEQ ID NO: 56688 - protein, 269 aa, Unidentified
AQVVPWGISRVQAPAAHNRGLTGSGVKVAVLDTGISTHEDLNIRGGASFVPGEPSTQDGNGHGTHVAGTIAALDNSIGVLGVAPSAELYAVKVLGASGSGSVSSIAQGLEWAGNNRMHVANLSLGSPSPSATLEQAVNSATSRGVLVVAASGNSGAGSISYPARYANAMAVGATDQNNNRASFSQYGAGLDIVAPGVNVQSTYPGSTYASKNGTSMATPHVAGAAALVKQKNPSWSNVQIRNHLKNTATSLGSTNLYGSGLVNAEAATR

SEQ ID NO: 56689 - protein, 269 aa, Unidentified
AQSVPWGISRVQAPAAHNRGLWGRGVKVAVLDTGISTHPDLRITGGASFVPGEPSTQDGNGHGTHVAGTIAALNNSIGVLGVAPSAELYAVKVLGASGAGSVSSIAQGLEWAGNNGMHVANLSLGSPSPSATLEQAVNSATSRGVLVVAASGNSGAGSISYPARYANAMAVGATDQNNNRASFSQYGAGLDIVAPGVNVQSTYPGSTYASLNGTSMATPHVAGAAALVKQKNPSWSNVQIRNHLKNTATSLGSTNLYGSGLVNAEAATR

SEQ ID NO: 56690 - protein, 269 aa, Unidentified
AQSVPWGISRVQAPAAHNRGLTGSGVKVAVLDTGISTHPDLNIRGGASFVPGEPSTQDGNGHGTHVAGTIAALNNSIGVLGVAPSAELYAVKVLGAFGSGSVTGIAQGLEWAGNNGMHVANLSLGSPSPSATLEQAVNSATSRGVLVVAASGNSGAGSISYPARYANAMAVGATDQNNNRASFSQYGFGLDIVAPGVNVQSTYPMSTYASLNGTSMATPHVAGAAALVKQKNPSWSNVQIRNHLKNTATSLGSTNLYGSGLVNAEAATR

SEQ ID NO: 56691 - protein, 269 aa, Unidentified
AQSVPWGISRVQAPAAHNRGLTGSGVKVAVLDTGISTHPDLNIRGGASFVPGEPSTQDGEGHGTHVAGTIAALNNGIGVLGVAPSAELYAVKVLGASGSGSVSSIAQGLEWAGNNDMHVANLSLGSPSPSATLEQAVNSATSRGVLVVAASGNSGADSISYPARYANAMAVGATDQNNNRASFSQYGAGLDIVAPGVNVQSTYPGSTYASLNGTSMATPHVAGAAALVKQKNPSWSNVQIRDHLKNTATSLGSTNLYGSGLVNAEAATR

SEQ ID NO: 56692 - protein, 269 aa, Unidentified
AQSVPWGISRVQAPAAHNRGLTGSGVKVAVLDTGISTHPDLNIRGGASFVPGEPSTQDGNGHGTHVAGTIAALNNDIGVLGVAPSAELYAVKVLGASGSGSVSSIAQGLEWAGNNDMHVANLSLGSESPSATLEQAVNSATSRGVLVVAASGNSGAGSISYPARYANAMAVGATDQNNNRASFSQYGAGLDIVAPGVNVQSTYPGSTYASLNGTSMATPHVAGAAALVKQKNPSWSNVRIRNRLKNTATSLGSTNLYGSGLVNAEAATR

SEQ ID NO: 56693 - protein, 269 aa, Unidentified
AQSVPWGISRVQAPAAHNRGLTGSGVKVAVLDTGISTHPDLNIRGGASFVPGEPSTQDGNGHGTHVAGTIAALNNSIGVLGVAPSAELYAVKVLGASGSGAISSIAQGLEWAGNNGMHVANLSLGSPSPSATLEQAVNSATSRGVLVVAASGNSGAGSISYPARYANAMAVGATDQNNNRASFSQYGAGLDIVAPGVNVQSTYPGSTYASLNGTSMATPHVAGAAVLVKHKNPSWSNVRIRNHLKNTATSLGSTNLYGSGLVNAEAATR

SEQ ID NO: 56694 - protein, 269 aa, Unidentified
AQSVPWGISRVQAPAAHNRGLTGRGVKVAVLDTGISTHPDLNIRGGASFVPGEPSTQDGEGHGTHVAGTIAALNNRIGVLGVAPSAELYAVKVLGASGSGSVSSIAQGLEWAGNNGMHVANLSLGSPSPSATLEQAVNSATSRGVLVVAASGNSGADSISYPARYANAMAVGATDQNNNRASFSQYGAGLDIVAPGVNVQSTYPGSTYASLNGTSMATPHVAGAAALVKQKNPSWSNVQIRDHLKNTATSLGSTNLYGSGLVNAEAATR

SEQ ID NO: 56695 - protein, 269 aa, Unidentified
AQVVPWGISRVQAPAAHNRGLTGSGVKVAVLDTGISTHPDLNIRGGASFVPGEPSTQDGNGHGTHVAGTIAALDNSIGVLGVAPSAELYAVKVLGASGSGSVSSIAQGLEWAGNNRMHVANLSLGRPSPSATLEQAVNSATSRGVLVVAASGNSGAGSISYPARYANAMAVGATDQNNNRASFSQYGAGLDIVAPGVNVQSTYIGSTYASLNGTSMATPHVAGAAALVKQKNPSWSNVQIRNHLKNTATSLGSTNLYGSGLVNAEAATR

SEQ ID NO: 56696 - protein, 269 aa, Unidentified
AQSVPWGISRVQAPAAHNRKLTGSGVKVAVLDTGISTHPDLNIRGGASFVPGEPSTQDGNGHGTHVAGTIAALNNNIGVLGVAPSAELYAVKVLGASGSGSVSSIAQGLEWAGNNGMHVANLSLGSPSPSATLEQAVNSATSRGVLVVAASGNSGAGSIDYPARYANAMAVGATDQNNNRASFSQYGAGLDIVAPGVNVQSTYPGSAYASENGTSMATPHVAGAAALVKQKNPSWSNVQIRNHLKNTATSLGSTNLYGSGLVNAEAATR

SEQ ID NO: 56697 - protein, 269 aa, Unidentified
AQSVPWGISRVQAPAAHNRGLTGRGVKVAVLDTGISTHPDLRITGGASFVPGEPSTQDGNGHGTHVAGTIAALNNSIGVLGVAPSAELYAVKVLGASGAGSVSSIAQGLEWAGNNGMHVANLSLGSPSPSATLEQAVNSATSRGVLVVAASGNSGAGSISYPARYANAMAVGATDQNNNRASFSQYGAGLDIVAPGVNVQSTYPQSTYASLNGTSMATPHVAGAAALVKQKNPSWSNVQIRNHLKNTATSLGSTNLYGSGLVNAEAATR

SEQ ID NO: 56698 - protein, 269 aa, Unidentified
AQSVPWGISRVQAPAAHNRRLTGSGVKVAVLDTGISTHPDLNIRGGASFVPGEPSTQDGNGHGTHVAGTIAALNNSIGVLGVAPSAELYAVKVLGASGSGSVSSIAQGLEWAGNNGMHVANLSLGSESPSATLEQAVNSATSRGVLVVAASGNSGAGSISYPARYANAMAVGATDQNNNRADFSQYGAGLDIVAPGVNVQSTYPGSTYASLNGTSMATPHVAGAAALVKQKNPSWSNVQIRDRLKNTATSLGSTNLYGSGLVNAEAATR

SEQ ID NO: 56699 - protein, 269 aa, Unidentified
AQSVPWGISRVQAPAAHNRRLTGSGVKVAVLDTGISTHPDLNIRGGASFVPGEPSTQDGNGHGTHVAGTIAALNNGIGVLGVAPSAELYAVKVLGASGSGSVSSIAQGLEWAGNNSMHVANLSLGSPSPSATLEQAVNSATSRGVLVVAASGNSGAGSISYPARYANAMAVGATDQNNNRADFSQYGAGLDIVAPGVNVQSTYPGSTYASLNGTSMATPHVAGAAALVKQKNPSWSNVQIRDHLKNTATSLGSTNLYGSGLVNAEAATR

SEQ ID NO: 56700 - protein, 269 aa, Unidentified
AQSVPWGISRVQAPASHNRGLTGSGVKVAVLDTGISTHPDLNIRGGASFVPGEPSTQDGNGHGTHVAGTIAALNNSIGVLGVAPSAELYAVKVLGASGGGGISSIAQGLEWAGNNGMHVANLSLGNPSPSATLEQAVNSATSRGVLVVAASGNSGAGSISYPARYANAMAVGATDQNNNRASFSQYGAGLDIVAPGVNVQSTYPGSTYASLNGTSMATPHVAGAAALVKQKNPSWSNVQIRNHLKNTATSLGSTNLYGSGLVNAEAATR

SEQ ID NO: 56701 - protein, 269 aa, Unidentified
AQSVPWGISRVQAPAAHNRGLTGSGVKVAVLDTGISTHPDLNIRGGASFVPGEPSTQDGNGHGTHVAGTIAALNNSIGVLGVAPSAELYAVKVLGASGAGSVSSIAQGLEWAGNNGMHVANLSLGNESPSATLEQAVNSATSRGVLVVAASGNSGAGSISYPARYANAMAVGATDQNNNHASFSQYGAGLDIVAPGVNVQSTYPGSTYASLNGTSMATPHVAGAAALVKQKNPSWSNVQIRNRLKNTATSLGSTNLYGSGLVNAEAATR

SEQ ID NO: 56702 - protein, 269 aa, Unidentified
AQSVPWGISRVQAPAAHNRGLTGSGVKVAVLDTGISTHPDLNIRGGASFVPGEPSTQDGNGHGTHVAGTIAALNNSIGVLGVAPSAELYAVKVLGASGMGSVSSIAQGLEWAGNNVMHVANLSLGLQAPSATLEQAVNSATSRGVLVVAASGNSGAGSISYPARYANAMAVGATDQNNNRASFSQYGAGLDIVAPGVNVQSTYPGSTYASLNGTSMATPHVAGAAALVKQKNPSWSNVQIRNHLKNTATSLGSTNLYGSGLVNAEAATR

SEQ ID NO: 56703 - protein, 269 aa, Unidentified
AQSVPWGISRVQAPAAHNRRLTGRGVKVAVLDTGISTHPDLNIRGGASFVPGEPSTQDGNGHGTHVAGTIAALNNSIGVLGVAPSAELYAVKVLGASGAGSVSSIAQGLEWTGLNGMHVANLSLGSPSPSATLEQAVNSATSRGVLVVAASGNSGAGSISYPARYANAMAVGATDQNNNRASFSQYGAGLDIVAPGVNVQSTYPGSTYASLNGTSMATPHVAGAAALVKQKNPSWSNVQIRNHLKNTATSLGSTNLYGSGLVNAEAATR

SEQ ID NO: 56704 - protein, 269 aa, Unidentified
AQSVPWGISRVQAPAAHNRRLTGRGVKVAVLDTGISTHPDLNIRGGASFVPGEPSTQDGNGHGTHVAGTIAALNNGIGVLGVAPSAELYAVKVLGASGSGSVSSIAQGLEWAGNNDMHVANLSLGSPSPSATLEQAVNSATSRGVLVVAASGNSGAGSISYPARYANAMAVGATDQNNNRASFSQYGAGLDIVAPGVNVQSTYPGSTYASLNGTSMATPHVAGAAALVKQKNPSWSNVRIRNHLKNTATSLGSTNLYGSGLVNAEAATR

SEQ ID NO: 56705 - protein, 269 aa, Unidentified
AQSVPWGISRVQAPAAHNRRLTGSGVKVAVLDTGISTHPDLNIRGGASFVPGEPSTQDGEGHGTHVAGTIAALNNDIGVLGVAPSAELYAVKVLGASGSGSVSSIAQGLEWAGNNSMHVANLSLGSPSPSATLEQAVNSATSRGVLVVAASGNSGAGSISYPARYANAMAVGATDQNNNRASFSQYGAGLDIVAPGVNVQSTYPGSTYASLNGTSMATPHVAGAAALVKQKNPSWSNVRIRNHLKNTATSLGSTNLYGSGLVNAEAATR

SEQ ID NO: 56706 - protein, 269 aa, Unidentified
AQSVPWGISRVQAPAAHNRRLWGSGVKVAVLDTGISTHPDLNITGGASFVPGEPSTQDGNGHGTHVAGTIAALNNSIGVLGVAPSAELYAVKVLGASGAGSVSSIAQGLEWAGNNGMHVANLSLGSPSPSATLEQAVNSATSRGVLVVAASGNSGAGSISYPARYANAMAVGATDQNNNRASFSQYGAGLDIVAPGVNVQSTYPQSTYASLNGTSMATPHVAGAAALVKQKNPSWSNVQIRNHLKNTATSLGSTNLYGSGLVNAEAATR

SEQ ID NO: 56707 - protein, 269 aa, Unidentified
AQSVPWGISRVQAPAAHRRGLTGRGVKVAVLDTGISTHPDLNIRGGASFVPGEPSTQDGNGHGTHVAGTIAALDNSIGVLGVAPSAELYAVKVLGASGGGSVSSIAQGLEWAGNNGMHVANLSLGSPSPSATLEQAVNSATSRGVLVVAASGNSGAGSISYPARYANAMAVGATDQNNNRASFSQYGAGLDIVAPGVNVQSTYPGSTYASLNGTSMATPHVAGAARLVKQKNPSWSNVQIRNHLKNTATSLGSTNLYGSGLVNAEAATR

SEQ ID NO: 56708 - protein, 269 aa, Synthetic construct
AQSVPWGISRVQAPAAHNRGLTGSGVRVAVLDTGISTHPDLNIRGGASFVPGEPSTQDGNGHGTHVAGTIAALDNSIGVLGVAPSAELYAVKVLGASGSGSYSSIAQGLEWAGNNGMHVASLSLGSPSPSATLEQAVNSATSRGVLVVAASGNSGAGSISYPARYANAMAVGATDQNNNRASFSQYGAGLDIVAPGVNVQSTYPGSTYASLNGTSMAAPHVAGAAALVKQKNPSWSNVQIRNHLKNTATSLGSTNLYGSGLVNAEAATR

SEQ ID NO: 56709 - protein, 268 aa, Unidentified
AQSVPWGISRVQAPAAHNRGTGSGVKVAVLDTGISTHPDLNIRGGASFVPGEPSTQDGNGHGTHVAGTIAALNNDIGVLGVAPSAELYAVKVLGASGSGSVSSIAQGLEWAGNNDMHVANLSLGSPSPSATLEQAVNSATSRGVLVVAASGNSGADSISYPARYANAMAVGATDQNNNRASFSQYGAGLDIVAPGVNVQSTYPGSTYASLNGTSMATPHVAGAAALVKQKNPSWSNVRIRNRLKNTATSLGSTNLYGSGLVNAEAATR

SEQ ID NO: 56710 - protein, 268 aa, Unidentified
AQSVPWGISRVQAPAAHNRGLTGRGVKVAVLDTGISTHPDLNIRGGASFVPGEPSTQDGEGHGTHVAGTIAALNNIGVLGVAPSAELYAVKVLGASGSGSVSSIAQGLEWAGNNSMHVANLSLGSPSPSATLEQAVNSATSRGVLVVAASGNSGADSISYPARYANAMAVGATDQNNNRASFSQYGAGLDIVAPGVNVQSTYPGSTYASLNGTSMATPHVAGAAALVKQKNPSWSNVRIRNHLKNTATSLGSTNLYGSGLVNAEAATR

SEQ ID NO: 56711 - protein, 268 aa, Unidentified
AQSVPWGISRVQAPAAHNRGLAGRGVKVAVLDGISTHPDLNIRGGASFVPGEPSTQDGNGHGTHVAGTIAALNNSIGVLGVAPSAELYAVKVLGASGSGSVSSIAQGLEWAGLNRMHVANLSLGIPSPSATLEQAVNSATSRGVLVVAASGNSGAGSISYPARYANAMAVGATDQNNNRASFSQYGAGLDIVAPGVNVQSTYPGSTYASLNGTSMATPHVAGAAALVKQKNPSWSNVQIRNHLKNTATSLGSTNLYGSGLVNAEAATR

SEQ ID NO: 56712 - protein, 268 aa, Unidentified
AQSVPWGISRVQAPAAHNRRLTGRGVKVAVLDTGISTHPDLNIRGGASFVPGEPSTQDGEGHGTHVAGTIAALNNIGVLGVAPSAELYAVKVLGASGSGSVSSIAQGLEWAGNNDMHVANLSLGSPSPSATLEQAVNSATSRGVLVVAASGNSGAGSISYPARYANAMAVGATDQNNNRASFSQYGAGLDIVAPGVNVQSTYPGSTYASLNGTSMATPHVAGAAALVKQKNPSWSNVQIRNRLKNTATSLGSTNLYGSGLVNAEAATR

SEQ ID NO: 56713 - protein, 268 aa, Unidentified
AQSVPWGISRVQAPAHNRGLAGSGVKVAVLDTGISTHPDLNIRGGASFVPGEPSTQDGNGHGTHVAGTIAALNNSIGVLGVAPSAELYAVKVLGASGAGGISSIAQGLEWAGNNGMHVANLSLGSPSPSATLEQAVNSATSRGVIVVAASGNSGAGSISYPARYANAMAVGATDQNNNRASFSQYGAGLDIVAPGVNVQSTYPGSTYASLNGTSMATPHVAGAAALVKQKNPSWSNVQIRNHLKNTATSLGSTNLYGSGLVNAEAATR

SEQ ID NO: 56714 - protein, 268 aa, Unidentified
AQSVPWGISRVQAPAAHNRGLTGRGVKVAVLDTGISTHPDLNIRGGASFVPGEPSTQDGEGHGTHVAGTIAALNNSIGVLGVAPSAELYAVKVLGASGSGSVSSIAQGLEWAGLNGMHVANLSLGPSPSATLEQAVNSATSRGVLVVAASGNSGAGSIDYPARYANAMAVGATDQNNNRADFSQYGAGLDIVAPGVNVQSTYPGSTYASLNGTSMATPHVAGAAALVKQKNPSWSNVQIRNHLKNTATSLGSTNLYGSGLVNAEAATR

SEQ ID NO: 56715 - protein, 268 aa, Unidentified
AQSVPWGISRVQAPAAHNRGLTGRGVKVAVLDTGISTHPDLNIRGGASFVPGEPSTQDGEGHGTHVAGTIAALNNIGVLGVAPSAELYAVKVLGASGSGSVSSIAQGLEWAGNNSMHVANLSLGSESPSATLEQAVNSATSRGVLVVAASGNSGAGSISYPARYANAMAVGATDQNNNRASFSQYGAGLDIVAPGVNVQSTYPGSTYASLNGTSMATPHVAGAAALVKQKNPSWSNVRIRNHLKNTATSLGSTNLYGSGLVNAEAATR

SEQ ID NO: 56716 - protein, 268 aa, Bacillus lentus
AQTVPWGIRRVQAPAAHNLGLTGSGVKVAVLDTGISTHPDLNIRGGASFVPGEPSTQDGDGHGTHVAGTIAALNNSIGVLGVAPSAELYAVKVLGASGSGSVSSIAQGLEWAGNNGMHVANLSLGSPSSATLEQAVNSATSRGVLVVAASGNSGAGSISYPARYANAMAVGATDQNNNRASFSQYGPGLDIVAPGVNVQSTYPGSTYASLNGTSMATPHVAGAAALVKQKNPSWSNVQIRNHLKNTATSLGSTNLYGSGLVNAEAATR

SEQ ID NO: 56717 - protein, 268 aa, Unidentified
AQSVPWGISRVQAPAAHNRRLWGRGVKVAVLDTGISTHPDLNITGGASFVPGEPSTQDGNGHGTHVAGTIAALNNSIGVLGVAPSAELYAVKVLGASGAGSVSSIAQGLEWAGNNGMHVANLSLGSPSPSATLEQAVNSATSRGVLVVAASGNSGAGSISYPARYANAMAVGATDQNNNRASFSQYGAGLDIVAPGVNVQSTYGSTYASLNGTSMATPHVAGAAALVKQKNPSWSNVQIRNHLKNTATSLGSTNLYGSGLVNAEAATR

SEQ ID NO: 56718 - protein, 268 aa, Unidentified
AQSVPWGISRVQAPAAHNRRLTGRGVKVAVLDTGISTHPDLRIRGGASFVPGEPSTQDGNGHGTHVAGTIAALNNSIGVLGVAPSAELYAVKVLGASGAGSVSSIAQGLEWAGNNGMHVANLSLGSPSPSATLEQAVNSATSRGVLVVAASGNSGAGSISYPARYANAMAVGATDQNNNRASFSQYGAGLDIVAPGVNVQSTYQSTYASLNGTSMATPHVAGAAALVKQKNPSWSNVQIRNHLKNTATSLGSTNLYGSGLVNAEAATR

SEQ ID NO: 56719 - protein, 268 aa, Bacillus lentus
AQSVPWGIRRVQAPAAHNLGLTGSGVKVAVLDTGISTHPDLRIRGGASFVPGEPSTQDGDGHGTHVAGTIAALDNSIGVLGVAPSAELYAVKVLGASGSGSVSSIAQGLEWAGNNGMHVANLSLGSPSSATLEQAVNSATSRGVLVVAASGNSGAGSISYPARYANAMAVGATDQNNNRASFSQYGAGLDIVAPGVNVQSTYPGSTYASLNGTSMATPHVAGAAALVKQKNPSWSNVQIRNHLKNTATSLGSTNLYGSGLVNAEAATR

SEQ ID NO: 56720 - protein, 268 aa, Bacillus lentus
AQSVPWGIRRVQAPAAHNLGLTGSGVKVAVLDTGISTHPDLNIRGGASFVPGEPSTQDGDGHGTHVAGTIAALNNSIGVLGVAPSAELYAVKVLGASGSGSVSSIAQGLEWAGNNGMHVANLSLGSPSSATLEQAVNSATSRGVLVVAASGNSGAGSISYPARYANAMAVGATDQNNNRASFSQYGAGLDIVAPGVNVQSTYPGSTYASLNGTSMATPHVAGAAALVKQKNPSWSNVRIRNHLKNTATSLGDTNLYGSGLVNAEAATR

SEQ ID NO: 56721 - protein, 268 aa, Unidentified
AQSVPWGISRVQAPAAHNRGLTGRGAKVAVLDTGISTHPDLRIRGGASFVPGEPSTQDGNGHGTHVAGTIAALNNSIGVLGVAPSAELYAVKVLGASGAGSVSSIAQGLEWAGNNGMHVANLSLGSPSPSATLEQAVNSATSRGVLVVAASGNSGAGSISYPARYANAMAVGATDQNNNRASFSQYGAGLDIVAPGVNVQSTYQSTYASLNGTSMATPHVAGAAALVKQKNPSWSNVQIRNHLKNTATSLGSTNLYGSGLVNAEAATR

SEQ ID NO: 56722 - protein, 268 aa, Unidentified
AQSVPWGISRVQAPAAHNRGLAGRGVKVAVLDGISTHPDLNIRGGASFVPGEPSTQDGNGHGTHVAGTIAALNNSIGVLGVAPSAELYAVKVLGASGSGSVSSIAQGLEWAGLNGMHVANLSLGIPSPSATLEQAVNSATSRGVLVVAASGNSGAGSISYPARYANAMAVGATDQNNNRADFSQYGAGLDIVAPGVNVQSTYPGSTYASLNGTSMATPHVAGAAALVKQKNPSWSNVQIRNHLKNTATSLGSTNLYGSGLVNAEAATR

SEQ ID NO: 56723 - protein, 268 aa, Bacillus lentus
AQAVPWGIRRVQAPAAHNLGLTGSGVKVAVLDTGISTHPDLNIRGGASFVPGEPSTQDGDGHGTHVAGTIAALNNSIGVLGVAPSAELYAVKVLGASGSGSVSSIAQGLEWAGNNGMHVANLSLGSPSSATLEQAVNSATSRGVLVVAASGNSGAGSISYPARYANAMAVGATDQNNNRASFSQYGPGLDIVAPGVNVQSTYPGSTYASLNGTSMATPHVAGAAALVKQKNPSWSNVQIRNHLKNTATSLGSTNLYGSGLVNAEAATR

SEQ ID NO: 56724 - protein, 268 aa, Unidentified
AQSVPWGISRVQAPAAHNRGLTGSGVKVAVLDTGISTHPDLNIRGGASFVPGEPSTQDGNGHGTHVAGTIAALNNSIGVLGVAPSAELYAVKVLGASGSGSVSSIAQGLEWAGNNRMHVANLSLGIPSPSATLEQANSATSRGVLVVAASGNSGEGSIDYPARYANAMAVGATDQNNNRADFSQYGAGLDIVAPGVNVQSTYPGSTYASLNGTSMATPHVAGAAALVKQKNPSWSNVQIRNHLKNTATSLGSTNLYGSGLVNAEAATR

SEQ ID NO: 56725 - protein, 268 aa, Unidentified
AQSVPWGISRVQAPAAHNRGLWGRGVKVAVLDTGISTHPDLRIRGGASFVPGEPSTQDGNGHGTHVAGTIAALNNSIGVLGVAPSAELYAVKVLGASGAGSVSSIAQGLEWAGNNGMHVANLSLGSPSPSATLEQAVNSATSRGVLVVAASGNSGAGSISYPARYANAMAVGATDQNNNRASFSQYGAGLDIVAPGVNVQSTYQSTYASLNGTSMATPHVAGAAALVKQKNPSWSNVQIRNHLKNTATSLGSTNLYGSGLVNAEAATR

SEQ ID NO: 56726 - protein, 268 aa, Unidentified
AQSVPWGISRVQAPAAHNRGLRGSGVKVAVLDTGISTHPDLNIRGGASFVPGEPSTQDGNGHGTHVAGTIAALNNSIGVLGVAPSAELYAVKVLGASGTGNSSIAQGLEWAGNNGMHVANLSLGSPSPSATLEQAVNSATSRGVLVVAASGNSGAGSISYPARYANAMAVGATDQNNNRASFSQYGAGLDIVAPGVNVQSTYPGSTYASLNGTSMATPHVAGAALLVKQKNPSWSNVRIRNHLKNTATSLGSTNLYGSGLVNAEAATR

SEQ ID NO: 56727 - protein, 268 aa, Unidentified
AQSVPWGISRVQAPASHNRGLAGSGVKVAVLDTGISTHPDLNIRGGASFVPGEPSTQDGNGHGTHVAGTIAALNNSIGVLGVAPSAELYAVKVLGASGGGISSIAQGLEWAGNNGMHVANLSLGSPSPSATLEQAVNSATSRGVIVVAASGNSGAGSISYPARYANAMAVGATDQNNNRASFSQYGAGLDIVAPGVNVQSTYPGSTYASLNGTSMATPHVAGAAALVKQKNPSWSNVQIRNHLKNTATSLGSTNLYGSGLVNAEAATR

SEQ ID NO: 56728 - protein, 268 aa, Bacillus lentus
AQSVPWGISRVQAPAAHNRGLTGSGVKVAVLDTGISTHPDLNIRGGASEVPGEPSTQDGNGHGTHVAGTIAALNNSIGVLGVAPNAELYAVKVLGASGSGSVSSIAQGLEWAGNNGMHVANLSLGSPSPSATLEQAVNSATSRGVLVVAASGNSGAGSISYPARYANAMAVGATDQNNNRASFSQYGAGLDIVAPGVNWSTYPGSTYASINGTSKATPHVAGAAALVKQENPSWSNVQIRNHLKNTATSLGSTNLYGSGLVNAEAATR

SEQ ID NO: 56729 - protein, 268 aa, Unidentified
AQSVPWGISRVQAPAAHNRGLTGSGVKVAVLDTGISTHPDLNIRGGASFVPGEPSTQDGNGHGTHVAGTIAALNNSIGVLGVAPSAELYAVKVLGADGRGAISSIAQGLEWAGNNGMHVANLSLGSPSPSATLEQAVNSATSRGVLVVAASGNSGASSISYPARYANAMAVGATDQNNNRASFSQYGAGLDIVAPGVNVQSTYPGSTYASLNGTSMATPHVAGAAALVKQKNPSWSNVQIRNHLKNTATSLGSTNLYGSGLVNAEAAT

SEQ ID NO: 56730 - protein, 268 aa, Unidentified
QSVPWGISRVQAPAAHNRGLTGSGVKVAVLDTGISTHPDLNIRGGASFVPGEPSTQDGNGHGTHVAGTIAALNNSIGVLGVAPSAELYAVKVLGASGGGAISSIAQGLEWAGNNGMHVANLSLGSPSPSATLEQAVNSATSRGVLVVAASGNSGAGSISYPARYANAMAVGATDQNNNRASFSQYGAGLDIVAPGVNVQSTYPGSTYASLNGTSMATPHVAGAAVLVKQKNPSWSNVRIRNHLKNTATSLGSTNLYGSGLVNAEAATR

SEQ ID NO: 56731 - protein, 266 aa, Unidentified
AQSVPWGISRVQAPAAHNRGLTGSGVKVAVLDTGISTHPDLNIRGGASFVVGGSTMDVQGHHVAGTIAALNNSIGVLGVAPSAELYAVKVLGASGSGSVSSIAQGLEWAGNNGMHVANLSLGSPSPSATLEQAVNSATSRGVLVVAASGNSGAGSISYPARYANAMAVGATDQNNNRASFSQYGAGLDIVAPGVNVQSTYPGSTYASLNGTSMATPHVAGAAALVKQKNPSWSNVQIRNHLKNTATSLGSTNLYGSGLVNAEAATR

SEQ ID NO: 56732 - protein, 353 aa, Unidentified
AEEAKEKYLIGFNEQEAVSEFVEQVEANDEVAILSEEEEVEIELLHEFETIPVLSVELSPEDVDALELDPAISYIEEDAEVTTMAQSVPWGISRVQAPAAHNRGLTGSGVKVAVLDTGISTHPDLNIRGGASFVPGEPSTQDGNGHGTHVAGTIAALDNSIGVLGVAPRAELYAVKVLGASGSGSVSSIAQGLEWAGNNGMHVANLSLGLQAPSATLEQAVNSATSRGVLVVAASGNSGAGSISYPARYANAMAVGATDQNNNRADFSQYGAGLDIVAPGVNVQSTYPGSTYASLNGTSMATPHVAGAAALVKQKNPSWSNVQIRRHLKNTATSLGSTNLYGSGLVNAEAATR

SEQ ID NO: 56733 - protein, 263 aa, Unidentified
AQSVPWGIRRVQAPTAHNRGLTGSGVKVAVLDTGISTHPDLNIRGGASFVPGEPSTQDGNGHGTHAAGTIAALNNSIGVLGVAPSAELYAVKVLGASGSGSVSSIAQGLEWAGNNGMHVANLSLGSPSPSATLEQAVNSATSRGVLVVAASGNSGAGSISYPARYANAMAVGATDQNNNRASFSQYGAGLDIVAPGVNVQSTYPGSTYASLDGTSMATPHVAGAAALVKQKNPSWSNVRIRNHLKNTATSLGSTNLYGSGLVN

SEQ ID NO: 56734 - protein, 301 aa, Unidentified
AEEAKEKYLIGFNEQEAVSEFVEQVEANDEVAILSEEEEVEIELLHEFETIPVLSVELSPEDVDALELDPAISYIEEDAEVTTMAQSVPWGISRVQAPAAHNRGLTGSGVKVAVLDTGISTHPDLNIRGGASFVPGEPSTQDGNGHGTHVAGTIAALNNSIGVLGVAPSAELYAVKVLGASGSGSVSSIAQGLEWAGNNGMHVANLSLGSPSPSATLEQAVNSATSRGVLVVAASGNSGAGSISYPARYANAMAVGATDQNNNRASFSQYGAGLDIVAPGVNVQSTYPGCVTADTRLATQH

SEQ ID NO: 56735 - protein, 301 aa, Unidentified
AEEAKEKYLIGFNEQEAVSEFVEQVEANDEVAILSEEEEVEIELLHEFETIPVLSVELSPEDVDALELDPAISYIEEDAEVTTMAQSVPWGISRVQAPAAHNRGLTGSGVKVAVLDTGISTHPDLNIRGGASFVPGEPSTQDGNGHGTHVAGTIAALNNSIGVLGVAPSAELYAVKVLGASGSGSVSSIAQGLEWAGNNGMHVANLSLGSPSPSATLEQAVNSATSRGVLVVAASGNSGAGSISYPARYANAMAVGATDQNNNRASFSQYGAGLDIVAPGVNVQSTYPGCQPYDALVSTPS

SEQ ID NO: 56736 - protein, 262 aa, Unidentified
PETHNFIAPNGLVLHNSGVKVAVLDTGISTHPDLNIRGGASFVPGEPSTQDGNGHGTHVAGTIAALNNSIGVLGVAPSAELYAVKVLGASGSGSVSSIAQGLEWAGNNGMHVANLSLGSPSPSATLEQAVNSATSRGVLVVAASGNSGAGSISYPARYANAMAVGATDQNNNRASFSQYGAGLDIVAPGVNVQSTYPGSTYASLNGTSMATPHVAGAAALVKQKNPSWSNVQIRNHLKNTATSLGSTNLYGSGLVNAEAATR

SEQ ID NO: 56737 - protein, 260 aa, Unidentified
SAHNFIANGIVVHNSGVKVAVLDTGISTHPDLNIRGGASFVPGEPSTQDGNGHGTHVAGTIAALNNSIGVLGVAPSAELYAVKVLGASGSGSVSSIAQGLEWAGNNGMHVANLSLGSPSPSATLEQAVNSATSRGVLVVAASGNSGAGSISYPARYANAMAVGATDQNNNRASFSQYGAGLDIVAPGVNVQSTYPGSTYASLNGTSMATPHVAGAAALVKQKNPSWSNVQIRNHLKNTATSLGSTNLYGSGLVNAEAATR

SEQ ID NO: 56738 - protein, 256 aa, Unidentified
AAQKPFFTGNSGVKVAVLDTGISTHPDLNIRGGASFVPGEPSTQDGNGHGTHVAGTIAALNNSIGVLGVAPSAELYAVKVLGASGSGSVSSIAQGLEWAGNNGMHVANLSLGSPSPSATLEQAVNSATSRGVLVVAASGNSGAGSISYPARYANAMAVGATDQNNNRASFSQYGAGLDIVAPGVNVQSTYPGSTYASLNGTSMATPHVAGAAALVKQKNPSWSNVQIRNHLKNTATSLGSTNLYGSGLVNAEAATR

SEQ ID NO: 56739 - protein, 254 aa, Bacillus licheniformis
VRGTVVHNSGVKVAVLDTGISTHPDLNIRGGASFVPGEPSTQDGNGHGTHVAGTIAALNNSIGVLGVAPSAELYAVKVLGASGSGSVSSIAQGLEWAGNNGMHVANLSLGSPSPSATLEQAVNSATSRGVLVVAASGNSGAGSISYPARYANAMAVGATDQNNNRASFSQYGAGLDIVAPGVNVQSTYPGSTYASLNGTSMATPHVAGAAALVKQKNPSWSNVQIRNHLKNTATSLGSTNLYGSGLVNAEAATR

SEQ ID NO: 56740 - protein, 207 aa, Unidentified
AQSVPWGISRVQAPAAHNRGLTGSGVKVAVLDTGISTHPDLNIRGGASFVPGEPSTQDGNGHGTHVAGTIAALNNSIGVLGVAPSAELYAVKVLGADGRGAISSIAQGLEWAGNNGMHVANLSLGSPSPSATLEQAVNSATSRGVLVVAASGNSGASSISYPARYANAMAVGATDQNNNRASFSQYGAGLDIVAPGVNVQSTYPGST

SEQ ID NO: 56741 - protein, 353 aa, Unidentified
AEEAKEKYLIGFNEQEAVSEFVEQVEANDEVAILSEEEEVEIELLHEFETIPVLSVELSPEDVDALELDPAISYIEEDAEVTTMAQSVPWGISRVQAPAAHNRGLTGSGVKVAVLDTGISTHPDLNIRGGASFVPGEPSTQDGNGHGTHVAGTIAALDNSIGVLGVAPRAELYAVKVLGASGSGSVSSIAQGLEWAGNNRMHVANLSLGLQAPSATLEQAVNSATSRGVLVVAASGNSGAGSISYPARYANAMAVGATDQNNNRADFSQYGAGLDIVAPGVNVQSTYPGSTYASLNGTSMATPHVAGAAALVKQKNPSWSNRQIRNHLKNTATSLGSTNLYGSGLVNAEAATR

SEQ ID NO: 56742 - protein, 274 aa, Bacillus licheniformis
AQTVPYGIPLIKADKVQAQGFKGANVKVAVLDTGIQASHPDLNVVGGASFVAGEAYNTDGNGHGTHVSGTVAALDNNTGVLGVAPSVSLYAVKVLNSSGSGSYSGIVSGIEWATTNGMDVINMSLGGPSGSTAMKQAVDNAYARGVVVVAAAGNSGSSGNTNTIQYPAKYDSVIAVGAVDSNSQRASFSSVGAELEVMAPGAGVYSTYPTNTYATLSGTSMASPHVAGAAALILSKHPNLSASQVRNRLSSTATYLGDSFYYGKGLINVEAAAQ

SEQ ID NO: 56743 - protein, 274 aa, Bacillus licheniformis
AQTVPYGIELIKADKVQAQGFKGANVKVAVLDTGIQASHPDLNVVGGASFVAGEAYNTDGNGHGTHVAGTVAALDNNTGVLGVAPSVSLYAVKVLSSSGSGSYSGIVSGIEWATTNGMDVINMSLGGASGSTAMKQAVDNAYARGVVVVAAAGNSGSSGNTNTIEYPAKYDSVIAVGAVDSNSNRASFSSVGAELEVMAPGAEVYSTYPPNTYATLNGTSMASPHVAGAAALILSKHPNLSASQVRNRLGSTATYLGSSFYYGKGLINVEAAAQ

SEQ ID NO: 56744 - protein, 274 aa, Bacillus subtilis
AQTVPYGIPLIKADKLHAQGFKGANVKGAVLATGIPTSHPDLNVVGGASFVAGEAYNTDGNGHGTHVAGTVAALDNTTGVLGVAPSVSLYAVKVLNSSGSGSYSGIVSGIEWATTNGMDVINMSLGGASGSTAMKQAVDNAYAKGVVVVAAAGNSGSSGNTNTIGYPAKYDSVIAVGAVDSNSNRASFSSVGAELEVMAPGAGVYSTYPTNTYATLNGTSMASPHVAGAAALILSKHPNLSASQVRNRLSSTATYLGSSFYYGKGLINVEAAAQ

SEQ ID NO: 56745 - protein, 274 aa, Bacillus licheniformis
AQTVPYGIPLIKADKVQAQGFKGANVKVAVLDTGIQASHPDLNVVGGASFVAGEAYNTDGNGHGTHVSGTVAALDNNTGVLGVAPSVSLYAVKVLNSSGSGSYSGIVSGIEWATTNGMDVINMSLGTPSGSTAMKQAVDNAYARGVVVVAAAGNSGSSGNTNTIQYPAKYDSVIAVGAVDSNSQRASFSSVGAELEVMAPGAGVYSTYPTNTYATLSGTSMASPHVAGAAALILSKHPNLSASQVRNRLSSTATYLGSSFYYGKGLINVEAAAQ

SEQ ID NO: 56746 - protein, 274 aa, Bacillus licheniformis
AQTVPYGIPLIKADKVQAQGFKGANVKVAVLDTGIQASHPDLNVVGGASFVAGEAYNADGNGHGTHVAGTVAALDNTTGVLGVAPSVSLYAVKVLNSSGSGTYSGIVSGIEWATTNDMDVINMSLGGPSGSTAMKQAVDNAYARGVVVVAAAGNSGSSGNTNTIGYPAKYDSVIAVGAVDSNSNRASFSSVGAELEVMAPGAGVYSTYPTSTYATWDGTSMASPHVAGAAALILSKHPNLSASQVRNRLSSTATYLGSSFYYGKGLINVEAAAQ

SEQ ID NO: 56747 - protein, 274 aa, Synthetic construct
AQTVPYGIPLIKADKVQAQGFKGANVKVAVLDTGIQASHPDLNVVGGASFVAGEAYNTDGNGHGTHVAGTVAALDNTTGVLGVAPSVSLYAVKVLNSSGSGSYSGIVSGIEWATTNGMDVINMSLGGASGSTAMKQAVDNAYARGVVVVAAAGNSGNSGSTNTIGYPAKYDSVIAVGAVDSNSNRASFSSVGAELEVMANGNGGYSTYPTDTYATLNGGSMASPHVAGAAALILSKHPNLSASQVRNRLSSTATYLGSSFYYGKGLINVEAAAQ

SEQ ID NO: 56748 - protein, 274 aa, Bacillus licheniformis
AQVVPYGIPLIKADKVQAQGFKGANVKVAVLDTGIQASHPDLNVVGGASFVAGEAYNTDGNGHGTHVSGTVAALDNNTGVLGVAPSVSLYAVKVLNSSGSGSYSGIVSGIEWATTNGMDVINMSLGGPSGSTAMKQAVDNAYARGVVVVAAAGNSGSSGNTNTIQYPAKYDSVIAVGAVDSNSQRASFSSVGAELEVMAPGAGVYSTYPTNTYATLSGTSMASPHVAGAAALILSKHPNLSASQVRNRLSSTATYLGSSFYYGKGLINVEAAAQ

SEQ ID NO: 56749 - protein, 274 aa, Bacillus licheniformis
AQTVPYGIPLIKADKVQAQGFKGANVKVAVLDTGIQASHPDLNVVGGASFVAGEAYNTDGNGHGTHVSGTVAALDNNTGVLGVAPSVSLYAVKVLNSSQSGSYSGIVSGIEWATTNGMDVINMSLGGPSGSTAMKQAVDNAYARGVVVVAAAGNSGSSGNTNTIQYPAKYDSVIAVGAVDSNSQRASFSSVGAELEVMAPGAGVYSTYPTNTYATLSGTSMASPHVAGAAALILSKHPNLSASQVRNRLSSTATYLGSSFYYGKGLINVEAAAQ

SEQ ID NO: 56750 - protein, 274 aa, Bacillus licheniformis
AQTVPYGIPLIKADKVQAQGFKGANVKVAVLDTGIQASHPDLNVVGGASFVAGEAYNTDGNGHGTHVAGTVAALDNNTGVLGVAPSVSLYAVKVLNSSGSGSYSGIVSGIEWATTNGMDVINMSLQGASGSTAMKQAVDNAYARGVVVVAAAGNSGSSGNTNTIQYPAKYDSVIAVGAVDSNSNRASFSSVGAELEVMAPGAGVYSTYPPNTYATLSGTSMASPHVAGAAALIWSKHPNLSASQVRNRLSSTATYLGPSFYYGKGLINVEAAAQ

SEQ ID NO: 56751 - protein, 274 aa, Bacillus licheniformis
AQTVPYGIPLIKADKVQAQGYKGANVKVAVLDTGIQASHPDLNVVGGASYVAGEAYNTDGNGHGTHVAGTVAALDNTTGVLGVAPNVSLYAVKVLNSSGSGSYSGIVSGIEWATTNGMDVINMSLGGPSGSTAMKQAVDNAYARGVVVVAAAGNSGSSGNTNTIGYPAKYDSVIAVGAVDSNSNRASYSSVGAELEVMAPGAGVYSTYPTSTYATLNGTSMASPHVAGAAALILSKHPNLSASQVRNRLSSTATYLGSSWYYGKGLINVEAAAQ

SEQ ID NO: 56752 - protein, 274 aa, Bacillus licheniformis
AQTVPYGIPLIKADKVQAQGFKGANVKVAVLDTGAQASHPDLNVVGGASFVAGEAYNTDGNGHGTHVSGTVAALDNNTGVLGVAPSVSLYAVKVLNSSGSGSYSGIVSGIEWATTNGMDVINMSLGGPSGSTAMKQAVDNAYARGVVVVAAAGNGGSSGNTNTIQYPAKYDSVIAVGAVDSNSNRASFSSVGAELEVMAPGAGVYSTYPTNTYATLNGTSMASPHVAGAAALILSKHPNLSGSQVRNRLSSTATYLGSSFYYGKGLINVEAAAQ

SEQ ID NO: 56753 - protein, 274 aa, Bacillus licheniformis
AQTVPYGIPLIKADKVQAQGYKGANVKVAVLDTGIQASHPDLNVVGGASCVAGEAYNTDGNGHGTHVAGTVAALDNTTGVLGVAPNVSLYAVKVLNSSGSGSYSGIVSGIEWATTNGMDVINMSLGGPSGSTAMKQAVDNAYARGVVVVAAAGNSGSSGNTNTIGYPAKYDSVIAVGAVDSNSNRASYSSVGAELEVMAPGAGVYSTYPTSTYATLNGTSMASPHVAGAAALILSKHPNLSASQVRNRLSSTATYLGSSWYYGKGLINVEAAAQ

SEQ ID NO: 56754 - protein, 274 aa, Bacillus licheniformis
AQTVPYGIPLIKADKVQAQGFKGANVKVAVLDTGIQASHPDLNVVGGASFVAGEAYNTDGNGHGTHVSGTVAALDNNTGVLGVAPSVSLYAVKVLNSSSSGSYSGIVSGIEWATTNGMDVINMSLGGPSGSTAMKQAVDNAYARGVVVVAAAGNSGSSGNTNTIQYPAKYDSVIAVGAVDSNSQRASFSSVGAELEVMAPGAGVYSTYPTNTYATLSGTSMASPHVAGAAALILSKHPNLSASQVRNRLSSTATYLGSSFYYGKGLINVEAAAQ

SEQ ID NO: 56755 - protein, 274 aa, Bacillus licheniformis
AQTVPYGIPLIKADIVQAQGFKGANVKVAVLDTGIQASHPDLNVVGGASFVAGEAYNTDGNGHGTHVAGTVAALDNTTGVLGVAPSVSLYAVKVQNSSGSGSYSGIVKGIEWATTNGMDVINMSLGGASGSTAMKQAVDNAYARGVVVVAAAGNSGSSGNTNTISYPAKYDSVIAVGAVDSNSNRASFSSVGAELEVMAPGAEVYSTYPPNTYATLSGTSMASPHVAGAAALILSKHPNLSASQVRNRLSSTATYLGSSFYYGKGLINVEAAAQ

SEQ ID NO: 56756 - protein, 274 aa, Bacillus licheniformis
AQTVPYGIPLIKADKVQAQGFKGANVKVAVLDTGIQASHPDLNVVGGASFVAGEAYNTDGNGHGTHVAGTVAALDNSTGVLGVAPSSSLYAVKVLNSSGSGSYSGIVSGIEWATTNGMDVINISLGGASGSTAMKRAVDNAYARGVVVVAAAGNSGSSGNTNTIQYPAKYDSVIAVGAVDSNSNRAPFSSVGAELEVMAPGAGVYSTYPTNTYATLNGTSMASPHVAGAAALILSKHPNLSASQVRNRLSSTATYLGPSFYYGKGLINVEAAAQ

SEQ ID NO: 56757 - protein, 274 aa, Bacillus licheniformis
AQTVPYGIPLIKADKVQAQGFKGANVKVAVLDTGIQASHPDLNVVGGASFVAGEAYNTDGNGHGTHVSGTAAALDNNTGVLGVAPSVSLYAVKVLNSSGSGSYSGIVSGIEWATTNGMDVINMSLGGSSGSTAMKQAVDNAYARGVVVVAAAGNSGSSGNTNTIQYPAKYDSVIAVGAVDSNSNRASFSSVGAELEVMAPGAGVYSTYPPNTYATLSGTSMASPHVAGAAALILSKHPNLSASQVRNRLSSTATYLGSSFYYGKGLINVEAAAQ

SEQ ID NO: 56758 - protein, 274 aa, Bacillus licheniformis
AQTVPYGIPLIKADKVQAQGFKGANVKVAVLDTGIQASHPDLNVVGGASFVAGEAYNTDGNGHGTHVSGTVAALDNNTGVLGVAPSVSLYAVKVLNSSGSGSYSGIVSGIEWATTNGMDVINMSLGGRSGSTAMKQAVDNAYARGVVVVAAAGNSGSSGNTNTIQYPAKYDSVIAVGAVDSNSQRASFSSVGAELEVMAPGAEVYSTYPTNTYATLNGTSMASPHVAGAAALILSKHPNLSASQVRNRLSSTATYLGDSFYYGKGLINVEAAAQ

SEQ ID NO: 56759 - protein, 274 aa, Bacillus licheniformis
AQTVPYGIPLIKADKVQAQGFKGANVKVAVLDTGIQASHPDLNVVGGASFVAGEAYNTDGNGHGTHVSGTVAALDNNTGVLGVAPSSSLYAVKVLNSSGSGSYSGIVSGIEWATTNGMDVINMSLGGPSGSTAMKQAVDNAYARGVVVVAAAGNGGSSGNTNTIQYPAKYDSVIAVGAVDSNSNRASFSSVGAELEVMAPGAGVYSTYPTNTYATLSGTSMASPHVAGAAALILSKHPNLSASQVRNRLSSTATYLGSSFYYGKGLINVEAAAQ

SEQ ID NO: 56760 - protein, 274 aa, Synthetic construct
AQTVPYGIPLIKAKKVQAQGFKGANVKVAVLDTGIQASHPDLNVVGGASFVAGEAYNTDGNGHGTHVAGTVAALDNTTGVLGVAPSVSLYAVKVLGASGSGSYSGIVSGLEWATTNGMDVINMSLGGASGSTAMKQAVDNAYARGVVVVAAAGNSGNSGSTNTIGYPAKYDSVIAVGAVDSNSNRASFSSVGAELEVMAPGAGVYSTYPTNTYATLNGTSMASPHVAGAAALILSKHPNLSASQVRNRLSSTATYLGSSFYYGKGLINVEAAAR

SEQ ID NO: 56761 - protein, 274 aa, Bacillus licheniformis
AQTVPYGIPLIKADKVQAQGFKGANVKVAVLDTGAQASHPDLNVVGGASFVAGEAYNTDGNGHGTHVSGTVAALDNNTGVLGVAPSVSLYAVKVLNSSGSGSYSGIVSGIEWATTNGMDVINMSLGGPSGSTAMKQAVDNAYARGVLVVAAAGNSGSSGNTNTIQYPAKYDSVIAVGAVDSNSNRASFSSVGAELEVMAPGAGVYSTYPTNTYATLNGTSMASPHVAGAAALILSKHPNLSGSQVRNRLSSTATYLGSSFYYGKGLINVEAAAQ

SEQ ID NO: 56762 - protein, 274 aa, Bacillus licheniformis
AQTVPYGIPLIKADKVQAQGFKGANVKVAVLDTGIQASHPDLNVVGGASFVAGEAYNTDGNGHGTHVSGTVAALDNNTGVLGVAPSSSLYAVKVLNSSGSGSYSGIVSGIEWATTNGMDVINMSLGGPSGSTAMKQAVDNAYARGVLVVAAAGNEGSSGNTNTIQYPAKYDSVIAVGAVDSNSNRASFSSVGAELEVMAPGAGVYSTYPTNTYATLNGTSMASPHVAGAAALILSKHPNLSASQVRNRLSSTATYLGSSFYYGKGLINVEAAAQ

SEQ ID NO: 56763 - protein, 274 aa, Bacillus licheniformis
AQTVPYGIELIKADKVQAQGFKGANVKVAVLDTGIQASHPDLNVVGGASFVAGEAYNTDGNGHGTHVAGTVAALDNTTGVLGVAPSVSLYAVKVLNSSGSGSYSGIVSGIEWATTNGMDVINMSLGGASGSTAMKQAVDNAYARGSVVVAAAGNSGSSGNTNTIGYPAKYDSVIAVGAVDSNSQRASFSSVGAELEVMAPGAEVYSTYPPNTYATLNGTSMASPHVAGAAALILSKHRSLSASQVRNRLSSTATYLGSSFYYGKGLINVEAAAQ

SEQ ID NO: 56764 - protein, 274 aa, Synthetic construct
AQTVPYGIPLIKADKVQAQGFKGANVKVAVLDTGIQASHPDLNVVGGASFVAGEAYNTDGNGHGTHVAGTVAALDNTTGVLGVAPSVSLYAVKVLNSSGSGSCSGIVSGIEWATTNGMDVINMSLGGASGSTAMKQAVDNAYARGVVVVAAAGNSENSGSTNTIGYPAKYDSVIAVGAVDSNSNRASFSSVGAELEVMAPGQGVYSTYPTNGYATQNGTSMASPHVAGAAALILSKHPNLSASQVRNRLSSTATYLGSSFYYGKGLINVEAAAQ

SEQ ID NO: 56765 - protein, 274 aa, Bacillus licheniformis
AQTVPYGIPLIKADKVQAQGFKGANVKVAVLDTGIQASHPDLNVVGGASFVAGEAYNTDGNGHGTHVSGTVAALDNNTGVLGVAPSVSLYAVKVLNSSGSGSYSGIVSGIEWATTNGMDVINMSLGGPSGSTAMKQAVDNAYARGVVVVAAAGNSGSSGNTNTIQYPAKYDSVIAVGAVDSNSQRASFSSVGAELEVMAPGAGVYSTYPPNTYATLSGTSMASPHVAGAAALILSKHPNLSASQVRNRLSSTATYLGSSFYYGKGLINVEAAAQ

SEQ ID NO: 56766 - protein, 274 aa, Bacillus licheniformis
AQTVPYGIPLIKADKVQAQGFKGANVKVAVLDTGAQASHPDLNVVGGASFVAGEAYNTDGNGHGTHVSGTVAALDNNTGVLGVAPSVSLYAVKVLNSSGSGSYSGIVSGIEWATTNGMDVINMSLGGPSGSTAMKQAVDNAYARGVLVVAAAGNSGSSGNTNTIQYPAKYDSVIAVGAVDSNSNRASFSSVGAELEVMAPGAGVYSTYPTNTYATLSGTSMASPHVAGAAALILSKHPNLSASQVRNRLSSTATYLGSSFYYGKGLINVEAAAQ

SEQ ID NO: 56767 - protein, 274 aa, Bacillus licheniformis
AQTVPYGIPLIKADKVQAQGFKGANVKVAVLDTGIQASHPDLNVVGGASFVAGEAYNADGNGHGTHVAGTVAALDNTTGVLGVAPSVSSYAVKVLNSSGSGTYSGIVSGIEWATTNGMDVINMSLGGPSGSTAMKQAVDNAYARGVVVVAAAGNSGSSGNTNTIGYPAKYDSVIAVGAVDSNSNRASFSSVGAELEVMAPGAGVYSTYPTSTYATWDGTSMASPHVAGAAALILSKHPNLSASQVRNRLSSTATYLGSSFYYGKGLINVEAAAQ

SEQ ID NO: 56768 - protein, 274 aa, Bacillus licheniformis
AQTVPYGIPLIKADKVQAQGFKGANVKVAVLDTGIQASHPDLNVVGGASFVAGEAYNTDGNGHGTHVSGTVAALDNNTGVLGVAPSSSLYAVKVLNSSGSGSYSGIVSGIEWATTNGMDVINMSLGGPSGSTAMKQAVDNAYARGVVVVAAAGNGGSSGNTNTIQYPAKYDSVIAVGAVDSNSNRASFSSVGAELEVMAPGAGVYSTYPTNTYATLNGTSMASPHVAGAAALILSKHPNLSGSQVRNRLSSTATYLGSSFYYGKGLINVEAAAQ

SEQ ID NO: 56769 - protein, 274 aa, Bacillus licheniformis
AQTVPYGIPLIKADKVQAQGFKGANVKVAVLDTGIQASHPDLNVVGGASFVAGEAYNTDGNGHGTHVAGTVAALDNHTGVLGVAPSTSLYAVKVLNSSGSGSYSGIVSGIEWATTNGMDVINISLGGASGSTAMKRAVDNAYARGVVVVAAAGNSGSSGNTNTIQYPAKYDSVIAVGAVDSNSQRASFSSVGAELEVMAPGAGVYSTYPTNTYATLNGTSMASPHVAGAAALILSKHPSLSASQVRNRLSSTATYLGSSFYYGKGLINVEAAAQ

SEQ ID NO: 56770 - protein, 274 aa, Bacillus licheniformis
AQTVPYGIPLIKADKVQAQGFKGANVKVAVLDTGIQASHPDLNVVGGASFVAGEAYNTDGNGHGTHVSGTVAALDNNTGVLGVAPSVSLYAVKVLNSSGSGSYSGIVSGIEWANTNGMDVINMSLGGPSGSTAMKQAVDNAYARGVVVVAAAGNSGSSGNTNTIQYPAKYDSVIAVGAVDSNSQRASFSSVGAELEVMAPGAGVYSTYPTNTYATLSGTSMASPHVAGAAALILSKHPNLSASQVRNRLSSTATYLGSSFYYGKGLINVEAAAQ

SEQ ID NO: 56771 - protein, 274 aa, Bacillus licheniformis
AQTVPYGIPLIKADKVQAQGFKGANVKVAVLDTGIQASHPDLNVVGGASFVAGEAYNADGNGHGTHVAGTVAALDNTTGVLGVAPSVSSYAVKVLDSSGSGTYSGIVSGIEWATTNGMDVINMSLGGPSGSTAMKQAVDNAYARGVVVVAAAGNSGSSGNTNTIGYPAKYDSVIAVGAVDSNSNRASFSSVGAELEVMAPGAGVYSTYPTSTYATWNGTSMASPHVAGAAALILSKHPNLSASQVRNRLSSTATYLGSSFYYGKGLINVEAAAQ

SEQ ID NO: 56772 - protein, 274 aa, Bacillus licheniformis
AQTVPYGIPLIKADKVQAQGFKGANVKVAVLDTGIQASHPDLNVVGGASFVAGEAYNTDGNGHGTHVSGTVAALDNNTGVLGVAPSVSLYAVKVLNSSGSGSYSGIVSGIEWATTNGMDVINMSLGGPSGSTAMKQAVDNAYARGVVVVAAAGNSGSSGNTNTIQYPAKYDSVIAVGAVDSNSQRASFSSVGAELEVMAPGVGVYSTYPTNTYATLSGTSMASPHVAGAAALILSKHPNLSASQVRNRLSSTATYLGSSFYYGKGLINVEAAAQ

SEQ ID NO: 56773 - protein, 274 aa, Bacillus licheniformis
AQTVPYGIPLIKADKVQAQGFKGANVKVAVLDTGIQASHPDLNVVGGASFVAGEAYNTDGNGHGTHVSGTVAALDNNTGVLGVAPSVSLYAVKVLNSSGSGSYSGIVHGIEWATTNGMDVINMSLGGPSGSTAMKQAVDNAYARGVVVVAAAGNSGSSGNTNTIQYPAKYDSVIAVGAVDSNSQRASFSSVGAELEVMAPGAGVYSTYPTNTYATLSGTSMASPHVAGAAALILSKHPNLSASQVRNRLSSTATYLGSSFYYGKGLINVEAAAQ

SEQ ID NO: 56774 - protein, 274 aa, Synthetic construct
AQTVPYGIPLIKADKVQAQGFKGANVKVAVLDTGIQASHPDLNVVGGASFVAGEAYNTDGNGHGTHVAGTVAALDNTTGVLGVAPSVSLYAVKVLNSSGSGSYSNIVSGIEWATTNGMDVINMSLSGASGSTAMKQAVDNAYARGVVVVAAAGNSGNSGENNTIGYPAKYDSVIAVGAVDSNSNRASFSSVGAELEVMAPGAGVVSTYPTNTYATLNNTSMASPHVAGAAALILSKHPNLSASQVRNRLSSTATYLGSSFYYGKGLINVEAAAQ

SEQ ID NO: 56775 - protein, 274 aa, Bacillus licheniformis
AQTVPYGIPLIKADIVQAQGFKGANVKVAVLDTGIQASHPDLNVVGGASFVAGEAYNTDGNGHGTHVAGTVAALDKTTGVLGVAPSVSLYAVKVLNSSGSGSYSGIVSGIEWATTNGMDVINISLGGASGSTAMKQAVDNAYARGSVVVAAAGNSGSSGNTNTISYPAKYDSVIAVGAVDSNSNRASFSSVGAELEVMAPGAGVYSTYPPNTYATLNGTSMASPHVAGAAALILSKHPSLSASQVRNRLSSTATYLGSSFYYGKGLINVEAAAQ

SEQ ID NO: 56776 - protein, 274 aa, Bacillus licheniformis
AQTVPYGIPLIKADKVQAQGFKGANVKVAVLDTGIQASHPDLNVVGGASFVAGEAYNTDGNGHGTHVSGTVAALDNNTGVLGVAPSVSLYAVKVLNSSGSGSYSGIVSGIEWATTNGMDVINISLGGPSGSTAMKQAVDNAYARGVVVVAAAGNSGSSGNTNTIQYPAKYDSVIAVGAVDSNSQRASFSSVGAELEVMAPGAGVYSTYPTNTYATLSGTSMASPHVAGAAALILSKHPNLSASQVRNRLSSTATYLGSSFYYGKGLINVEAAAQ

SEQ ID NO: 56777 - protein, 274 aa, Bacillus licheniformis
AQTVPYGIPLIKADKVQAQGFKGANVKVAVLDTGIQASHPDLNVVGGASFVAGEAYNTDGNGHGTHVSGTVAALDNNTGVLGVAPSVSLYAVKVLNSSGSGSYSGIVSGIEWATTNGMDVINMSLGGPSGSTAMKQAVDNAYARGVVVVAAAGNSGSSGNTNTIQYPAKYDSVIAVGAVDSNSQRASFSSVGAELEVMAPGAGVYSTYPTNTYATLSGTSMASPHVAGAAALILSKHPNLSASQVRNRLSSTATYLGPSFYYGKGLINVEAAAQ

SEQ ID NO: 56778 - protein, 274 aa, Bacillus licheniformis
AQTVPYGIPLIKADKVQAQGFKGANVKVAVLDTGIQASHPDLNVVGGASFVAGEAYNTDGNGHGTHVAGTVAALDNSTGVLGVAPSSSLYAVKVLNSSGSGSYSGIVSGIEWATTNGMDVINISLGGASGSTAMKRAVDNAYARGVVVVAAAGNSGSSGCTNTIGYPAKYDSVIAVGAVDSNSNRAPFSSVGAELEVMAPGAGVYSTYPTNTYATLNGTSMASPHVAGAAALILSKHPNLSASQVRNRLSSTATYLGPSFYYGKGLINVEAAAQ

SEQ ID NO: 56779 - protein, 274 aa, Bacillus licheniformis
AQTVPYGIPLIKADKVQAQGFKGANVKVAVLDTGIQASHPDLNVVGGASFVAGEAYNTDGNGHGTHVSGTVAALDNNTGVLGVAPSSSLYAVKVLNSSGSGSYSGIVSGIEWATTNGMDVINMSLGGPSGSTAMKQAVDNAYARGVVVVAAAGNEGSSGNTNTIQYPAKYDSVIAVGAVDSNSNRASFSSVGAELEVMAPGAGVYSTYPTNTYATLSGTSMASPHVAGAAALILSKHPNLSASQVRNRLSSTATYLGSSFYYGKGLINVEAAAQ

SEQ ID NO: 56780 - protein, 273 aa, Bacillus licheniformis
AQTVPYGIPLIKADKVQAQGFKGANVKVAVLDTGIQASHPDLNVVGGASFVAGEAYITDGNGHGTHVAGTVAALDNTTGVLGVAPSVSLYAVKVLNSSGSGSYSGIVSGIEWATTNGMDVINMSLGGASGSTAMKQAVDNAYAKRVVVVAVGNSGSSGNTNTIGYPAKYESVIAVGAVDSNSNRASFSSVGAELEVMAPGAGVYSTYPTSTYATLNGTSMASPHVAGAAALILSKHPNLSASQVRNRLSSAATYLGSSFYYGKGLINVEAAAQ

SEQ ID NO: 56781 - protein, 273 aa, Bacillus licheniformis
AQTVPYGIPLIKADKVQAQQFKGANVKVAVLDTGIQASHPDLNVVGGASFVAGEAYNTDGNGMGTHVAGTVAALDNTTGVLGVAPSVSLYAVKVLNSSGSGSYSGIVSGIEWATTNGMDVINMSLGGASGSTAMKQAVDNAYAKRVVVVAVGNSGSSGNTNTIGYPAKYESVIAVGAVDSNSNRASFSSVGAELEVMAPGAGVYSTYPTSTYATLNGTSMASPHVAGAAALILSKHPNLSASQVRNRLSSTATYLGSSFYYGKGLINVEAAAQ

SEQ ID NO: 56782 - protein, 273 aa, Bacillus licheniformis
QVVPYGIPLIKADKVQAQGFKGANVKVAVLDTGIQASHPDLNVVGGASFVAGEAYNTDGNGHGTHVAGTVAALDNTTGVLGVAPHVSLYAVKVLNSSGSGSYSGIVSGIEWATTNGMDVINMSLGGASGSTAMKQAVDNAYARGVVVVAAAGNSGSSGNTNTIQYPAKYDSVIAVGAVDSNSQRASFSSVGAELEVMAPGAGVYSTYPTNTYATLNGTSMASPHVAGAAALILSKHPSLSASQVRNRLGSTATYLGPSFYYGKGLINVEAAAQ

SEQ ID NO: 56783 - protein, 273 aa, Bacillus licheniformis
QTVPYGIPLIKADKVQAQGFKGANVKVAVLDTGIQASHPDLNVVGGASFVAGEAYNTDGNGHGTHVAGTVAALDNNTGVLGVAPHVSLYAVKVLNSSGSGSYSGIVSGIEWATTNGMDVINMSLGGASGSTAMKQAVDNAYARGVLVVAGAGNSGSSGNTNTIGYPAKYDSVIAVGAVDSNSQRASFSSVGAELEVMAPGAGVYSTYPTNTYATLSGTSMASPHVAGAAALILSKHPNLSASQVRNRLSSTATYLGPSFYYGKGLINVEAAAQ

SEQ ID NO: 56784 - protein, 156 aa, unidentified
AQSVPWGISRVQAPAAHNRGLTGSGVKVAVLDTGISTHPDLNIRGGASFVPGEPSTQDGNGHGTHVAGTIAALNNSIGVLGVAPSAELYAVKVLGADGEGAISSIAQGLEWAGNNGMHVANLSLGSPSPSATLEQAVNSATSRGVLVVAASGNSGA

SEQ ID NO: 56785 - protein, 269 aa, Unidentified
AQSVPWGISRVQAPAAHNRGLTGRGVKVAVLDTGISTHPDLNIRGGASFVPGEPSTQDGNGHGTHVAGTIAALNNDIGVLGVAPSAELYAVKVLGASGSGSVSSIAQGLEWAGNNSMHVANLSLGSESPSATLEQAVNSATSRGVLVVAASGNSGADSISYPARYANAMAVGATDQNNNRASFSQYGAGLDIVAPGVNVQSTYPGSTYASLNGTSMATPHVAGAAALVKQKNPSWSNVQIRDHLKNTATSLGSTNLYGSGLVNAEAATR

SEQ ID NO: 56786 - protein, 269 aa, Unidentified
AQSVPWGISRVQAPAAHNRGLQGSGVKVAVLDTGISTHPDLNIRGGASFVPGEPSTQDGNGHGTHVAGTIAALNNSIGVLGVAPSAELYAVKVLGASGTGNISSIAQGLEWAGNNGMHVANLSLGSPSPSATLEQAVNSATSRGVLVVAASGNSGAGSISYPARYANAMAVGATDQNNNRASFSQYGAGLDIVAPGVNVQSTYPGSTYASLNGTSMATPHVAGAAMLVKQKNPSWSNVWIRNHLKNTATSLGSTNLYGSGLVNAEAATR

SEQ ID NO: 56787 - protein, 269 aa, Unidentified
AQSVPWGISRVRAPAAHNRGLTGSGVKVAVLDTGISTHPDLNIRGGASFVPGEPSTQDGNGHGTHVAGTIAALDNSIGVLGVAPSAELYAVKVLGASGSGATSSIAQGLEWAGNNGMHVANLSLGSPTPSATLEQAVNSATSRGVLVVAASGNSGAGSISYPARYANAMAVGATDQNNNRASFSQYGAGLDIVAPGVNVQSTYPGSTYTSLNGTSSATPHVAGAAALVKQKNPSWSNVRIRNHLKNTATSLGSTNLYGSGLVNAEAATR

SEQ ID NO: 56788 - protein, 269 aa, Unidentified
AQSVPWGISRVQAPAAHNRGLTGRGVKVAVLDTGISTHPDLNIRGGASFVPGEPSTQDGNGHGTHVAGTIAALNNDIGVLGVAPSAELYAVKVLGASGSGSVSSIAQGLEWAGNNDMHVANLSLGSPSPSATLEQAVNSATSRGVLVVAASGNSGAGSISYPARYANAMAVGATDQNNNRADFSQYGAGLDIVAPGVNVQSTYPGSTYASLNGTSMATPHVAGAAALVKQKNPSWSNVQIRDRLKNTATSLGSTNLYGSGLVNAEAATR

SEQ ID NO: 56789 - protein, 269 aa, Lederbergia lentus
AQSVPWGISSVQAPAAHNRGLTGSGVKVAVLDTGISTHPDLNIRGGASFVPGEPSTQDGNGHGTHVAGTIAALNNSIGVLGVAPSAELYAVKVLGADGEGAISSIAQGLEWAGNNGMHVANLSLGSPSPSATLEQAVNSATSRGVLVVAASGNSGASSISYPARYANAMAVGATDQNNNRASFSQYGAGLDIVAPGVNVQSTYPGSTYASLNGTSMATPHVAGAAALVKQKNPSWSNVQIRNHLKNTATSLGSTNLYGSGLVNAEAATR

SEQ ID NO: 56790 - protein, 269 aa, Unidentified
AQSVPWGISRVQAPAAHNRGLTGSGVKVAVLDSGISTHPDLNIRGGASFVPGEPSTQDGNGHGTHVAGTIAALNNSIGVLGVAPSAELYAVKVLGASGSGSVSSIAQGLEWAGNNRMHVANLSLGIPSPSATLEQAVNSATSRGVLVVAASGNSGEGSIDYPARYANAMAVGATDQNNNRADFSQYGAGLDIVAPGVNVQSTYPGSTYASLNGTSMATPHVAGAAALVKQKNPSWSNVQIRNHLKNTATSLGSTNLYGSGLVNAEAATR

SEQ ID NO: 56791 - protein, 269 aa, Unidentified
AQSVPWGISRVQAPAAHNRGLTGSGVKVAVLDTGISTHPDLNIRGGASFVPGEPSTQDGNGHGTHVAGTIAALNNSIGVLGVAPSAELYAVKVLGADGEGAISSIAQGLEWAGNNGMHVANLSLGSPSPSATLEQAVNSATSRGVLVVAASGNSGASSISYPARYANAMAVGATDQNNNRASFSQYGLGLDIVAPGVNVQSTYPGSTYASLNGTSMATPHVAGAAALVKQKNPSWSNVQIRNHLKNTATSLGSTNLYGSGLVNAEAATR

SEQ ID NO: 56792 - protein, 269 aa, Unidentified
AQSVPWGISRVQAPAAHNRGLQGSGVKVAVLDTGISTHPDLNIRGGASFVPGEPSTQDGNGHGTHVAGTIAALNNSIGVLGVAPSAELYAVKVLGASGTGGLSSIAQGLEWAGNNGMHVANLSLGSPSPSATLEQAVNSATSRGVLVVAASGNSGAGSISYPARYANAMAVGATDQNNNRASFSQYGAGLDIVAPGVNVQSTYPGSTYASLNGTSMATPHVAGAATLVKQKNPSWSNVRIRNHLKNTATSLGSTNLYGSGLVNAEAATR

SEQ ID NO: 56793 - protein, 269 aa, Unidentified
AQSVPWGISRVQAPAAHNRGLTGRGVKVAVLDTGISTHPDLNIRGGASFVPGEPSTQDGNGHGTHVAGTIAALNNGIGVLGVAPSAELYAVKVLGASGSGSVSSIAQGLEWAGNNDMHVANLSLGSPSPSATLEQAVNSATSRGVLVVAASGNSGADSISYPARYANAMAVGATDQNNNRASFSQYGAGLDIVAPGVNVQSTYPGSTYASLNGTSMATPHVAGAAALVKQKNPSWSNVRIRNRLKNTATSLGSTNLYGSGLVNAEAATR

SEQ ID NO: 56794 - protein, 269 aa, Unidentified
AQSVPWGISRVQAPAAHNRGLTGSGVKVAVLDTGISTHPDLNIRGGASFVPGEPSTQDGNGHGTHVAGTIAALDNNIGVLGVAPRAELYAVKVLGASGSGSVSSIAQGLEWAGNNRMHVANLSLGSQSPSATLEQAVNSATSRGVLVVAASGNSGAGSISYPARYANAMAVGATDQNNNRASFSQYGAGLDIVAPGVNVLSTYPGSTYASLNGTSQATPHVAGAAALVKQKNPSWSNVQIRNHLKNTATSLGSTNLYGSGLVNAEAATR

SEQ ID NO: 56795 - protein, 269 aa, Unidentified
AQSVPWGISRVQAPAAHNRRLTGRGVKVAVLDTGISTHPDLNIRGGASFVPGEPSTQDGEGHGTHVAGTIAALNNGIGVLGVAPSAELYAVKVLGASGSGSVSSIAQGLEWAGNNDMHVANLSLGSPSPSATLEQAVNSATSRGVLVVAASGNSGAGSISYPARYANAMAVGATDQNNNRASFSQYGAGLDIVAPGVNVQSTYPGSTYASLNGTSMATPHVAGAAALVKQKNPSWSNVRIRNHLKNTATSLGSTNLYGSGLVNAEAATR

SEQ ID NO: 56796 - protein, 269 aa, Unidentified
AQSVPWGISRVQAPAAHNRGLTGRGVKVAVLDTGISTHPDLNIRGGASFVPGEPSTQDGNGHGTHVAGTIAALDNSIGVLGVAPSAELYAVKVLGASGGGAISSIAQGLEWAGNNGMHVANLSLGSPSPSATLEQAVNSATSRGVLVVAASGNSGAGSISYPARYANAMAVGATDQNNNRASFSQYGAGLDIVAPGVNVQSTYPGSTYASLNGTSMATPHVAGAAALVKQKNPSWSNVRIRNHLKNTATSLGSTNLYGSGLVNAEAATR

SEQ ID NO: 56797 - protein, 269 aa, Unidentified
AQSVPWGISRVQAPAAHNRRLWGRGVKVAVLDTGISTHPDLNITGGASFVPGEPSTQDGNGHGTHVAGTIAALNNSIGVLGVAPSAELYAVKVLGASGAGSVSSIAQGLEWAGNNGMHVANLSLGSPSPSATLEQAVNSATSRGVLVVAASGNSGAGSISYPARYANAMAVGATDQNNNRASFSQYGAGLDIVAPGVNVQSTYPQSTYASLNGTSMATPHVAGAAALVKQKNPSWSNVQIRNHLKNTATSLGSTNLYGSGLVNAEAATR

SEQ ID NO: 56798 - protein, 269 aa, Unidentified
AQSVPWGISRVQAPAAHRRGLTGRGVKVAVLDTGISTHPDLRIRGGASFVPGEPSTQDGNGHGTHVAGTIAALDNSIGVLGVAPSAELYAVKVLGASGSGSVSSIAQGLEWAGNNGMHVANLSLGSPSPSATLEQAVNSATSRGVLVVAASGNSGAGSISYPARYANAMAVGATDQNNNRASFSQYGAGLDIVAPGVNVQSTYPGSTYASENGTSMATPHVAGAAALVKQKNPSWSNVQIRNRLKNTATSLGSTNLYGSGLVNAEAATR

SEQ ID NO: 56799 - protein, 269 aa, Unidentified
AQSVPWGISRVQAPAAHNRGLRGSGVKVAVLDTGISTHPDLNIRGGASFVPGEPSTQDGNGHGTHVAGTIAALNNSIGVLGVAPSAELYAVKVLGASGTGNLSSIAQGLEWAGNNGMHVANLSLGSPSPSATLEQAVNSATSRGVLVVAASGNSGAGSISYPARYANAMAVGATDQNNNRASFSQYGAGLDIVAPGVNVQSTYPGSTYASLNGTSMATPHVAGAAVLVKQKNPSWSNVSIRNHLKNTATSLGSTNLYGSGLVNAEAATR

SEQ ID NO: 56800 - protein, 269 aa, Unidentified
AQSVPWGISRVQAPAAHNRGLQGSGVKVAVLDTGISTHPDLNIRGGASFVPGEPSTQDGNGHGTHVAGTIAALNNSIGVLGVAPSAELYAVKVLGASGGGALSSIAQGLEWAGNNGMHVANLSLGSPSPSATLEQAVNSATSRGVLVVAASGNSGAGSISYPARYANAMAVGATDQNNNRASFSQYGAGLDIVAPGVNVQSTYPGSTYASLNGTSMATPHVAGAATLVKQKNPSWSNVRIRNHLKNTATSLGSTNLYGSGLVNAEAATR

SEQ ID NO: 56801 - protein, 269 aa, Unidentified
AQSVPWGISRVQAPAAHNRRLTGRGVKVAVLDTGISTHPDLRITGGASFVPGEPSTQDGNGHGTHVAGTIAALNNSIGVLGVAPSAELYAVKVLGASGAGSVSSIAQGLEWAGNNGMHVANLSLGSPSPSATLEQAVNSATSRGVLVVAASGNSGAGSISYPARYANAMAVGATDQNNNRASFSQYGAGLDIVAPGVNVQSTYPGSTYASLNGTSMATPHVAGAAALVKQKNPSWSNVQIRNHLKNTATSLGSTNLYGSGLVRAEAATR

SEQ ID NO: 56802 - protein, 269 aa, Unidentified
AQSVPWGISRVQAPAAHNRGLTGRGVKVAVLDTGISTHPDLNIRGGASFVPGEPSTQDGNGHGTHVAGTIAALDNNIGVLGVAPRAELYAVKVLGASGSGSVSSIAQGLEWAGNNRMHVANLSLGSPSPSATLEQAVNSATSRGVLVVAASGNSGAGSISYPARYANAMAVGATDQNNNRASFSQYGAGLDIVAPGVNVLSTYPGSTYASLNGTSQATPHVAGAAALVKQKNPSWSNVQIRNHLKNTATSLGSTNLYGSGLVNAEAATR

SEQ ID NO: 56803 - protein, 269 aa, Unidentified
AQSVPWGISRVQAPAAHNRGLYGSGVKVAVLDTGISTHPDLNIRGGASFVPGEPSTQDGNGHGTHVAGTIAALNNSIGVLGVAPSAELYAVKVLGASGTGNLSSIAQGLEWAGNNGMHVANLSLGSPSPSATLEQAVNSATSRGVLVVAASGNSGAGSISYPARYANAMAVGATDQNNNRASFSQYGAGLDIVAPGVNVQSTYPGSTYASLNGTSMATPHVAGAAVLVKQKNPSWSNVRIRNHLKNTATSLGSTNLYGSGLVNAEAATR

SEQ ID NO: 56804 - protein, 269 aa, Unidentified
AQSVPWGISRVQAPAAHNRGLAGSGVKVAVLDTGISTHPDLNIRGGASFVPGEPSTQDGNGHGTHVAGTIAALNNSIGVLGVAPSAELYAVKVLGASGTGGISSIAQGLEWAGNNGMHVANLSLGSPSPSATLEQAVNSATSRGVLVVAASGNSGAGSISYPARYANAMAVGATDQNNNRASFSQYGAGLDIVAPGVNVQSTYPGSTYASLNGTSMATPHVAGAAVLVKQKNPSWSNVRIRNHLKNTATSLGSTNLYGSGLVNAEAATR

SEQ ID NO: 56805 - protein, 269 aa, Unidentified
AQSVPWGISRVQAPAAHNRGLQGSGVKVAVLDTGISTHPDLNIRGGASFVPGEPSTQDGNGHGTHVAGTIAALNNSIGVLGVAPSAELYAVKVLGASGTGALSSIAQGLEWAGNNGMHVANLSLGSPSPSATLEQAVNSATSRGVLVVAASGNSGAGSISYPARYANAMAVGATDQNNNRASFSQYGAGLDIVAPGVNVQSTYPGSTYASLNGTSMATPHVAGAAVLVKQKNPSWSNVRIRNHLKNTATSLGSTNLYGSGLVNAEAATR

SEQ ID NO: 56806 - protein, 269 aa, Unidentified
AQSVPWGISRVQAPAAHNRKLTGSGVKVAVLDTGISTHPDLRIRGGASFVPGEPSTQDGNGHGTHVAGTIAALNNNIGVLGVAPSAELYAVKVLGASSSGSVSSIAQGLEWAGNNGMHVANLSLGSPSPSATLEQAVNSATSRGVLVVAASGNSGAGSISYPARYANAMAVGATDQNNNRASFSQYGAGLDIVAPGVNVQSTYPGSTYASEDGTSMATPHVAGAAALVKQKNPSWSNVQIRNHLKNTATSLGSTNLYGSGLVNAEAATR

SEQ ID NO: 56807 - protein, 269 aa, Unidentified
AQSVPWGISRVQAPAAHNRGLTGGGVKVAVLDTGISTHPDLNIRGGASFVPGEPSTQDGNGHGTHVAGTIAALNNSIGVLGVAPSAELYAVKVLSASGNGSVSSIAGGLEWAGNNGMHVANLSLGSPSPSATLEQAVNSATSRGVLVVAASGNSGAGSISYPARYANAMAVGATDQNNNRADFSQYGAGLDIVAPGVNVQSTYPGSTYASQNGTSMATPHVAGAAALVKQKNPSWSNVQIRNHLKNTATSLGSTNLYGSGLVNAEAATR

SEQ ID NO: 56808 - protein, 269 aa, Unidentified
AQSVPWGISRVQAPAAHNRGLAGRGVKVAVLDTGISTHPDLNIRGGASFVPGEPSTQDGEGHGTHVAGTIAALNNSIGVLGVAPSAELYAVKVLGASGSGSVSSIAQGLEWAGLNRMHVANLSLGSPSPSATLEQAVNSATSRGVLVVAASGNSGEGSISYPARYANAMAVGATDQNNNRASFSQYGAGLDIVAPGVNVQSTYPGSTYASLNGTSMATPHVAGAAALVKQKNPSWSNVQIRNHLKNTATSLGSTNLYGSGLVNAEAATR

SEQ ID NO: 56809 - protein, 269 aa, Unidentified
AQSVPWGISRVQAPAAHNRRLTGSGVKVAVLDTGISTHPDLNIRGGASFVPGEPSTQDGNGHGTHVAGTIAALNNSIGVLGVAPSAELYAVKVLGASGGGALSSIAQGLEWAGNNGMHVANLSLGSPSPSATLEQAVNSATSRGVLVVAASGNSGAGSISYPARYANAMAVGATDQNNNRASFSQYGAGLDIVAPGVNVQSTYPGSTYASLNGTSMATPHVAGAAVLVKQKNPSWSNVRIRNHLKNTATSLGSTNLYGSGLVNAEAATR

SEQ ID NO: 56810 - protein, 269 aa, Unidentified
AQSVPWGISRVQAPAAHNRGLTGRGVKVAVLDTGISTHPDLNIRGGASFVPGEPSTQDGNGHGTHVAGTIAALDNSIGVLGVAPSAELYAVKVLGASGGGSISSIAQGLEWAGNNGMHVANLSLGSPSPSATLEQAVNSATSRGVLVVAASGNSGAGSISYPARYANAMAVGATDQNNNRASFSQYGAGLDIVAPGVNVQSTYPGSTYASLNGTSMATPHVAGAAVLVKQKNPSWSNVQIRNRLKNTATSLGSTNLYGSGLVNAEAATR

SEQ ID NO: 56811 - protein, 269 aa, Unidentified
AQSVPWGISRVQAPAAHNRGLAGSGVKVAVLDTGISTHPDLNIRGGASFVPGEPSTQDGNGHGTHVAGTIAALNNSIGVLGVAPSAELYAVKVLGASGTGNISSIAQGLEWAGNNGMHVANLSLGSPSPSATLEQAVNSATSRGVLVVAASGNSGAGSISYPARYANAMAVGATDQNNNRASFSQYGAGLDIVAPGVNVQSTYPGSTYASLNGTSMATPHVAGAATLVKQKNPSWSNVRIRNHLKNTATSLGSTNLYGSGLVNAEAATR

SEQ ID NO: 56812 - protein, 269 aa, Unidentified
AQSVPWGISRVQAPAAHNRRLTGSGVKVAVLDTGISTHPDLNIRGGASFVPGEPSTQDGEGHGTHVAGTIAALNNDIGVLGVAPSAELYAVKVLGASGSGSVSSIAQGLEWAGNNSMHVANLSLGSPSPSATLEQAVNSATSRGVLVVAASGNSGADSISYPARYANAMAVGATDQNNNRASFSQYGAGLDIVAPGVNVQSTYPGSTYASLNGTSMATPHVAGAAALVKQKNPSWSNVQIRDHLKNTATSLGSTNLYGSGLVNAEAATR

SEQ ID NO: 56813 - protein, 269 aa, Unidentified
AQSVPWGISRVQAPAAHNRGLRGSGVKVAVLDTGISTHPDLNIRGGASFVPGEPSTQDGNGHGTHVAGTIAALNNSIGVLGVAPSAELYAVKVLGASGAGAISSIAQGLEWAGNNGMHVANLSLGSPSPSATLEQAVNSATSRGVLVVAASGNSGAGSISYPARYANAMAVGATDQNNNRASFSQYGAGLDIVAPGVNVQSTYPGSTYASLNGTSMATPHVAGAAMLVKQKNPSWSNVSIRNHLKNTATSLGSTNLYGSGLVNAEAATR

SEQ ID NO: 56814 - protein, 269 aa, Unidentified
AQSVPWGISRVQAPAAHNRGLRGSGVKVAVLDTGISTHPDLNIRGGASFVPGEPSTQDGNGHGTHVAGTIAALNNSIGVLGVAPSAELYAVKVLGASGAGGISSIAQGLEWAGNNGMHVANLSLGSPSPSATLEQAVNSATSRGVLVVAASGNSGAGSISYPARYANAMAVGATDQNNNRASFSQYGAGLDIVAPGVNVQSTYPGSTYASLNGTSMATPHVAGAATLVKQKNPSWSNVSIRNHLKNTATSLGSTNLYGSGLVNAEAATR

SEQ ID NO: 56815 - protein, 269 aa, Unidentified
AQSVPWGISRVQAPAAHNRGLTGSGVKVAVLDTGISTHPDLNITGGASFVPGEPSTQDGNGHGTHVAGTIAALNNSIGVLGVAPSAELYAVKVLGASGGGAISSIAQGLEWAGNNGMHVANLSLGSPSPSATLEQAVNSATSRGVLVVAASGNSGAGSISYPARYANAMAVGATDQNNNRASFSQYGAGLDIVAPGVNVQSTYPGSTYASLNGTSMATPHVAGAAVLVKQKNPSWSNVRIRNHLKNTATSLGSTNLYGSGLVNAEAATR

SEQ ID NO: 56816 - protein, 269 aa, Unidentified
AQSVPWGISRVQAPAAHNRRLTGSGVKVAVLDTGISTHPDLNIRGGASFVPGEPSTQDGEGHGTHVAGTIAALNNDIGVLGVAPSAELYAVKVLGASGSGSVSSIAQGLEWAGNNDMHVANLSLGSPSPSATLEQAVNSATSRGVLVVAASGNSGADSISYPARYANAMAVGATDQNNNRADFSQYGAGLDIVAPGVNVQSTYPGSTYASLNGTSMATPHVAGAAALVKQKNPSWSNVQIRNHLKNTATSLGSTNLYGSGLVNAEAATR

SEQ ID NO: 56817 - protein, 269 aa, Unidentified
AQSVPWGISRVQAPAAHNRRLTGRGVKVAVLDTGISTHPDLNITGGASFVPGEPSTQDGNGHGTHVAGTIAALDNSIGVLGVAPSAELYAVKVLGASGSGSVSSIAQGLEWAGNNGMHVANLSLGSPSPSATLEQAVNSATSRGVLVVAASGNSGAGSISYPARYANAMAVGATDQNNNRASFSQYGAGLDIVAPGVNVQSTYPGSTYASLNGTSMATPHVAGAAALVKQKNPSWRNVQIRNRLKNTATSLGSTNLYGSGLVNAEAATR

SEQ ID NO: 56818 - protein, 269 aa, Unidentified
AQSVPWGISRVQAPAAHNRGLKGSGVKVAVLDTGISTHPDLNIRGGASFVPGEPSTQDGNGHGTHVAGTIAALNNSIGVLGVAPSAELYAVKVLGASGNGGISSIAQGLEWAGNNGMHVANLSLGSPSPSATLEQAVNSATSRGVLVVAASGNSGAGSISYPARYANAMAVGATDQNNNRASFSQYGAGLDIVAPGVNVQSTYPGSTYASLNGTSMATPHVAGAAVLVKQKNPSWSNVWIRNHLKNTATSLGSTNLYGSGLVNAEAATR

SEQ ID NO: 56819 - protein, 269 aa, Unidentified
AQSVPWGISRVQAPAAHRRRLTGRGVKVAVLDTGISTHPDLNIRGGASFVPGEPSTQDGNGHGTHVAGTIAALDNSIGVLGVAPSAELYAVKVLGASGSGSVSSIAQGLEWAGNNGMHVANLSLGSPSPSATLEQAVNSATSRGVLVVAASGNSGAGSISYPARYANAMAVGATDQNNNRASFSQYGAGLDIVAPGVNVQSTYPQSTYASLNGTSMATPHVAGAAALVKQKNPSWSNVQIRNRLKNTATSLGSTNLYGSGLVNAEAATR

SEQ ID NO: 56820 - protein, 269 aa, Unidentified
AQSVPWGISRVQAPAAHRRGLTGRGVKVAVLDTGISTHPDLNIRGGASFVPGEPSTQDGNGHGTHVAGTIAALDNSIGVLGVAPDAELYAVKVLGASGSGSVSSIAQGLEWAGNNGMHVANLSLGSPSPSATLEQAVNSATSRGVLVLAASGNSGAGSISYPARYANAMAVGATDQNNNRASFSQYGAGLDIVAPGVNVQSTYPGSTYASLNGTSMATPHVAGAAALVKQKNPSWSNVQIRNRLKNTATSLGSTNLYGSGLVNAEAATR

SEQ ID NO: 56821 - protein, 269 aa, Unidentified
AQSVPWGISRVQAPAAHRRRLTGRGVKVAVLDTGISTHPDLRIRGGASFVPGEPSTQDGNGHGTHVAGTIAALDNSIGVLGVAPSAELYAVKVLGASGSGSVSSIAQGLEWAGNNGMHVANLSLGSPSPSATLEQAVNSATSRGVLVVAASGNSGAGSISYPARYANAMAVGATDQNNNRASFSQYGAGLDIVAPGVNVQSTYPGSTYASLNGTSMATPHVAGAAALVKQKNPSWSNVQIRNRLKNTATSLGSTNLYGSGLVNAEAATR

SEQ ID NO: 56822 - protein, 269 aa, Unidentified
AQSVPWGISRVQAPAAHNRKLTGGGVKVAVLDTGISTHPDLNIRGGASFVPGEPSTQDGEGHGTHVAGTIAALNNSIGVLGVAPSAELYAVKVLGASGQGSVSSIANGLEWAGLNGMHVANLSLGSPSPSATLEQAVNSATSRGVLVVAASGNSGAGSISYPARYANAMAVGATDQNNNRASFSQYGAGLDIVAPGVNVQSTYPGSTYASLNGTSMATPHVAGAAALVKQKNPSWSNVQIRNHLKNTATSLGSTNLYGSGLVNAEAATR

SEQ ID NO: 56823 - protein, 269 aa, Unidentified
AQSVPWGISRVQAPAAHNRGLTGSGVKVAVLDTGISTHPDLNIRGGASFVPGEPSTQDGNGHGTHVAGTIAALNNGIGVLGVAPSAELYAVKVLGASGSGSVSSIAQGLEWAGNNDMHVANLSLGSESPSATLEQAVNSATSRGVLVVAASGNSGADSISYPARYANAMAVGATDQNNNRASFSQYGAGLDIVAPGVNVQSTYPGSTYASLNGTSMATPHVAGAAALVKQKNPSWSNVRIRNRLKNTATSLGSTNLYGSGLVNAEAATR

SEQ ID NO: 56824 - protein, 269 aa, Unidentified
AQSVPWGISRVQAPAAHNRGLQGSGVKVAVLDTGISTHPDLNIRGGASFVPGEPSTQDGNGHGTHVAGTIAALNNSIGVLGVAPSAELYAVKVLGASGGGAISSIAQGLEWAGNNGMHVANLSLGSPSPSATLEQAVNSATSRGVLVVAASGNSGAGSISYPARYANAMAVGATDQNNNRASFSQYGAGLDIVAPGVNVQSTYPGSTYASLNGTSMATPHVAGAAVLVKQKNPSWSNVRIRNHLKNTATSLGSTNLYGSGLVNAEAATR

SEQ ID NO: 56825 - protein, 269 aa, Unidentified
AQSVPWGISRVQAPAAHNRGLAGSGVKVAVLDTGISTHPDLNIRGGASFVPGEPSTQDGNGHGTHVAGTIAALNNSIGVLGVAPSAELYAVKVLGASGNGNLSSIAQGLEWAGNNGMHVANLSLGSPSPSATLEQAVNSATSRGVLVVAASGNSGAGSISYPARYANAMAVGATDQNNNRASFSQYGAGLDIVAPGVNVQSTYPGSTYASLNGTSMATPHVAGAATLVKQKNPSWSNVRIRNHLKNTATSLGSTNLYGSGLVNAEAATR

SEQ ID NO: 56826 - protein, 269 aa, Unidentified
AQSVPWGISRVQAPAAHNRGLAGSGVKVAVLDTGISTHPDLNIRGGASFVPGEPSTQDGNGHGTHVAGTIAALNNSIGVLGVAPSAELYAVKVLGASGGGNISSIAQGLEWAGNNGMHVANLSLGSPSPSATLEQAVNSATSRGVLVVAASGNSGAGSISYPARYANAMAVGATDQNNNRASFSQYGAGLDIVAPGVNVQSTYPGSTYASLNGTSMATPHVAGAAMLVKQKNPSWSNVSIRNHLKNTATSLGSTNLYGSGLVNAEAATR

SEQ ID NO: 56827 - protein, 269 aa, Unidentified
AQSVPWGISRVQAPAAHNRGLYGSGVKVAVLDTGISTHPDLNIRGGASFVPGEPSTQDGNGHGTHVAGTIAALNNSIGVLGVAPSAELYAVKVLGASGGGAISSIAQGLEWAGNNGMHVANLSLGSPSPSATLEQAVNSATSRGVLVVAASGNSGAGSISYPARYANAMAVGATDQNNNRASFSQYGAGLDIVAPGVNVQSTYPGSTYASLNGTSMATPHVAGAATLVKQKNPSWSNVRIRNHLKNTATSLGSTNLYGSGLVNAEAATR

SEQ ID NO: 56828 - protein, 269 aa, Unidentified
AQSVPWGISRVQAPAAHNRRLTGRGVKVAVLDTGISTHPDLDIRGGASFVPGEPSTQDGNGHGTHVAGTIAALDNSIGVLGVAPSAELYAVKVLGASGSGSVSSIAQGLEWAGNNGMHVANLSLGSPSPSATLEQAVNSATSRGVLVVAASGNSGAGSISYPARYANAMAVGATDQNNNRASFSQYGAGLDIVAPGVNVQSTYPGSTYASLNGTSMATPHVAGAAALVKQKNPSWRNVQIRNRLKNTATSLGSTNLYGSGLVNAEAATR

SEQ ID NO: 56829 - protein, 269 aa, Unidentified
AQSVPWGISRVQAPAAHNRGLQGSGVKVAVLDTGISTHPDLNIRGGASFVPGEPSTQDGNGHGTHVAGTIAALNNSIGVLGVAPSAELYAVKVLGASGNGAISSIAQGLEWAGNNGMHVANLSLGSPSPSATLEQAVNSATSRGVLVVAASGNSGAGSISYPARYANAMAVGATDQNNNRASFSQYGAGLDIVAPGVNVQSTYPGSTYASLNGTSMATPHVAGAAMLVKQKNPSWSNVRIRNHLKNTATSLGSTNLYGSGLVNAEAATR

SEQ ID NO: 56830 - protein, 269 aa, Unidentified
AQSVPWGISRVQAPAAHNRGLKGSGVKVAVLDTGISTHPDLNIRGGASFVPGEPSTQDGNGHGTHVAGTIAALNNSIGVLGVAPSAELYAVKVLGASGNGAISSIAQGLEWAGNNGMHVANLSLGSPSPSATLEQAVNSATSRGVLVVAASGNSGAGSISYPARYANAMAVGATDQNNNRASFSQYGAGLDIVAPGVNVQSTYPGSTYASLNGTSMATPHVAGAAVLVKQKNPSWSNVRIRNHLKNTATSLGSTNLYGSGLVNAEAATR

SEQ ID NO: 56831 - protein, 269 aa, Unidentified
AQSVPWGISRVQAPAAHRRGLWGRGVKVAVLDTGISTHPDLNIRGGASFVPGEPSTQDGNGHGTHVAGTIAALDNSIGVLGVAPSAELYAVKVLGASGSGSVSSIAQGLEWAGNNGMHVANLSLGSPSPSATLEQAVNSATSRGVLVVAASGNSGAGSISYPARYANAMAVGATDQNNNRASFSQYGAGLDLVAPGVNVQSTYPGSTYASLNGTSMATPHVAGAAALVKQKNPSWSRVQIRNHLKNTATSLGSTNLYGSGLVNAEAATR

SEQ ID NO: 56832 - protein, 269 aa, Unidentified
AQSVPWGISRVQAPAAHNRGLTGSGVKVAVLDTGISTHPDLNIRGGASFVPGEPSTQDGNGHGTHVAGTIAALNNDIGVLGVAPSAELYAVKVLGASGSGSVSSIAQGLEWAGNNSMHVANLSLGSPSPSATLEQAVNSATSRGVLVVAASGNSGAGSISYPARYANAMAVGATDQNNNRADFSQYGAGLDIVAPGVNVQSTYPGSTYASLNGTSMATPHVAGAAALVKQKNPSWSNVRIRDRLKNTATSLGSTNLYGSGLVNAEAATR

SEQ ID NO: 56833 - protein, 269 aa, Unidentified
AQSVPWGISRVQAPAAHNRGLAGRGVKVAVLDTGISTHPDLNIRGGASFVPGEPSTQDGNGHGTHVAGTIAALNNSIGVLGVAPSAELYAVKVLGASGSGSVSSIAQGLEWAGLNRMHVANLSLGIPSPSATLEQAVNSATSRGVLVVAASGNSGEGSISYPARYANAMAVGATDQNNNRASFSQYGAGLDIVAPGVNVQSTYPGSTYASLNGTSMATPHVAGAAALVKQKNPSWSNVQIRNHLKNTATSLGSTNLYGSGLVNAEAATR

SEQ ID NO: 56834 - protein, 269 aa, Unidentified
AQSVPWGISRVQAPAAHNRGLTGGGVKVAVLDTGISTHPDLNIRGGASFVPGEPSTQDGNGHGTHVAGTIAALNNNIGVLGVAPSAELYAVKVLAASGNGSVSSIANGLEWAGNNGMHVANLSLGAPSPSATLEQAVNSATSRGVLVVAASGNSGAGSISYPARYANAMAVGATDQNNNRASFSQYGAGLDIVAPGVNVQSTYPGSTYASLNGTSMATPHVAGAAALVKQKNPSWSNVQIRNHLKNTATSLGSTNLYGSGLVNAEAATR

SEQ ID NO: 56835 - protein, 269 aa, Unidentified
AQSVPWGISRVQAPAAHNRKLTGFGVKVAVLDTGISTHPDLNIRGGASFVPGEPSTQDGNGHGTHVAGTIAALNNNIGVLGVAPSAELYAVKVLGASGSGSVSSIAQGLEWAGNNRMHVANLSLGSPSPSATLEQAVNSATSRGVLVVAASGNSGAGSISYPARYANAMAVGATDQNNNRASFSQYGAGLDIVAPGVNVQSTYPGSAYASENGTSMATPHVAGAAALVKQKNPSWSNVQIRNHLKNTATSLGSTNLYGSGLVNAEAATR

SEQ ID NO: 56836 - protein, 269 aa, Unidentified
AQSVPWGISRVQAPAAHNRRLTGSGVKVAVLDTGISTHPDLNIRGGASFVPGEPSTQDGEGHGTHVAGTIAALNNGIGVLGVAPSAELYAVKVLGASGSGSVSSIAQGLEWAGNNDMHVANLSLGSPSPSATLEQAVNSATSRGVLVVAASGNSGAGSISYPARYANAMAVGATDQNNNRADFSQYGAGLDIVAPGVNVQSTYPGSTYASLNGTSMATPHVAGAAALVKQKNPSWSNVQIRNRLKNTATSLGSTNLYGSGLVNAEAATR

SEQ ID NO: 56837 - protein, 269 aa, Unidentified
AQSVPWGISRVQAPAAHRRRLTGRGVKVAVLDTGISTHPDLNIRGGASFVPGEPSTQDGNGHGTHVAGTIAALDNSIGVLGVAPSAELYAVKVLGASGSGSVSSIAQGLEWAGANGMHVANLSLGSPSPSATLEQAVNSATSRGVLVVAASGNSGAGSISYPARYANAMAVGATDQNNNRASFSQYGAGLDIVAPGVNVQSTYPGSTYASLNGTSMATPHVAGAAALVKQKNPSWSRVQIRNHLKNTATSLGSTNLYGSGLVNAEAATR

SEQ ID NO: 56838 - protein, 269 aa, Bacillus subtilis
AQSVPWGISRVQAPAAHNRGLTGSGVKVAVLDTGISTHPDLNIRGGASFVPGEPSTQDGNGHGTLVAGTIAALNNSIGVLGVAPSAELYAVKVLGASGSGSVESIAQGLEWAGNNGMHVANLSLVSPSPSATLEQAVNSATSRGVLVLAASGNSGAGSISYPARYANAMAVGATDQNNNRASFSQYGAGLDIVAPGVNVQSTYPVSRYASLNGTSMATPHVAGAAALVKQKNPSWSNVQIRNHLKNTATSLGSTNLYGSGLVNAEAATR

SEQ ID NO: 56839 - protein, 269 aa, Unidentified
AQSVPWGISRVQAPAAHRRGLTGRGVKVAVLDTGISTHPDLDIRGGASFVPGEPSTQDGNGHGTHVAGTIAALDNSIGVLGVAPDAELYAVKVLGASGSGSVSSIAQGLEWAGNNGMHVANLSLGSPSPSATLEQAVNSATSRGVLVVAASGNSGAGSISYPARYANAMAVGATDQNNNRASFSQYGAGLDIVAPGVNVQSTYPGSTYASLNGTSMATPHVAGAAALVKQKNPSWSNVQIRNRLKNTATSLGSTNLYGSGLVNAEAATR

SEQ ID NO: 56840 - protein, 269 aa, Unidentified
AQSVPWGISRVQAPAAHRRGLTGRGVKVAVLDTGISTHPDLNIRGGASFVPGEPSTQDGNGHGTHVAGTIAALDNSIGVLGVAPSAELYAVKVLGASGAGSVSSIAQGLEWAGNNGMHVANLSLGSPSPSATLEQAVNSATSRGVLVVAASGNSGAGSISYPARYANAMAVGATDQNNNRASFSQYGAGLDIVAPGVNVQSTYPQSTYASLNGTSMATPHVAGAAALVKQKNPSWSNVQIRNRLKNTATSLGSTNLYGSGLVNAEAATR

SEQ ID NO: 56841 - protein, 269 aa, Unidentified
AQSVPWGISRVQAPAAHNRGLAGSGVKVAVLDTGISTHPDLNIRGGASFVPGEPSTQDGNGHGTHVAGTIAALNNSIGVLGVAPSAELYAVKVLGASGAGNISSIAQGLEWAGNNGMHVANLSLGSPSPSATLEQAVNSATSRGVLVVAASGNSGAGSISYPARYANAMAVGATDQNNNRASFSQYGAGLDIVAPGVNVQSTYPGSTYASLNGTSMATPHVAGAALLVKQKNPSWSNVSIRNHLKNTATSLGSTNLYGSGLVNAEAATR

SEQ ID NO: 56842 - protein, 269 aa, Unidentified
AQSVPWGISRVQAPAAHNRGLTGGGVKVAVLDTGISTHPDLNIRGGASFVPGEPSTQDGNGHGTHVAGTIAALNNNIGVLGVAPSAELYAVKVLAASGGGSVSSIAQGLEWAGNNGMHVANLSLGAPSPSATLEQAVNSATSRGVLVVAASGNSGAGSISYPARYANAMAVGATDQNNNRADFSQYGAGLDIVAPGVNVQSTYPGSTYASLNGTSMATPHVAGAAALVKQKNPSWSNVQIRNHLKNTATSLGSTNLYGSGLVNAEAATR

SEQ ID NO: 56843 - protein, 269 aa, Unidentified
AQSVPWGISRVQAPAAHNRGLTGGGVKVAVLDTGISTHPDLNIRGGASFVPGEPSTQDGNGHGTHVAGTIAALNNSIGVLGVAPSAELYAVKVLSASGGGSVSSIAQGLEWAGNNGMHVANLSLGAPSPSATLEQAVNSATSRGVLVVAASGNSGAGSISYPARYANAMAVGATDQNNNRADFSQYGAGLDIVAPGVNVQSTYPGSTYASQNGTSMATPHVAGAAALVKQKNPSWSNVQIRNHLKNTATSLGSTNLYGSGLVNAEAATR

SEQ ID NO: 56844 - protein, 269 aa, Unidentified
AQSVPWGISRVQAPAAHRRGLTGSGVKVAVLDTGISTHPDLNIRGGASFVPGEPSTQDGNGHGTHVAGTIAALNNSIGVLGVAPSAELYAVKVLGASGGGAISSIAQGLEWAGNNGMHVANLSLGSPSPSATLEQAVNSATSRGVLVVAASGNSGAGSISYPARYANAMAVGATDQNNNRASFSQYGAGLDIVAPGVNVQSTYPGSTYASLNGTSMATPHVAGAAVLVKQKNPSWSNVRIRNHLKNTATSLGSTNLYGSGLVNAEAATR

SEQ ID NO: 56845 - protein, 269 aa, Unidentified
AQSVPWGISRVQAPAAHNRGLTGSGVKVAVLDTGISTHPDLNIRGGASFVPGEPSTQDGNGHGTHVAGTIAALNNSIGVLGVAPSAELYAVKVLGADGRGAISSIAQGLEWAGNNGMHVANLSLGSPSPSATLEQAVNSATSRGVLVVAASGNSGASSISYPARYANAMAVGATDQNNNRASFSQYGAGLDIVAPGVNVQSTYPGSTYASLNGTSMATPHVAGAAALVKQKNPSWANVQIRNHLKNTATSLGSTNLYGSGLVNAEAATR

SEQ ID NO: 56846 - protein, 269 aa, Unidentified
AQSVPWGISRVQAPAAHNRKLTGFGVKVAVLDTGISTHPDLNIRGGASFVPGEPSTQDGNGHGTHVAGTIAALNNNIGVLGVAPSAELYAVKVLGASGSGSVSSIAQGLEWAGNNRMHVANLSLGSPSPSATLEQAVNSATSRGVLVVAASGNSGAGSIDYPARYANAMAVGATDQNNNRASFSQYGAGLDIVAPGVNVQSTYPGSAYASLNGTSMATPHVAGAAALVKQKNPSWSNVQIRNHLKNTATSLGSTNLYGSGLVNAEAATR

SEQ ID NO: 56847 - protein, 269 aa, Unidentified
AQSVPWGISRVQAPAAHNRRLTGRGVKVAVLDTGISTHPDLNIRGGASFVPGEPSTQDGNGHGTHVAGTIAALNNSIGVLGVAPSAELYAVKVLGASGSGSVSSIAQGLEWAGNNGMHVANLSLGSESPSATLEQAVNSATSRGVLVVAASGNSGADSISYPARYANAMAVGATDQNNNRADFSQYGAGLDIVAPGVNVQSTYPGSTYASLNGTSMATPHVAGAAALVKQKNPSWSNVQIRNRLKNTATSLGSTNLYGSGLVNAEAATR

SEQ ID NO: 56848 - protein, 269 aa, Unidentified
AQSVPWGISRVQAPAAHNRRLTGRGVKVAVLDTGISTHPDLNIRGGASFVPGEPSTQDGNGHGTHVAGTIAALNNDIGVLGVAPSAELYAVKVLGASGSGSVSSIAQGLEWAGNNSMHVANLSLGSPSPSATLEQAVNSATSRGVLVVAASGNSGAGSISYPARYANAMAVGATDQNNNRADFSQYGAGLDIVAPGVNVQSTYPGSTYASLNGTSMATPHVAGAAALVKQKNPSWSNVQIRDHLKNTATSLGSTNLYGSGLVNAEAATR

SEQ ID NO: 56849 - protein, 269 aa, Unidentified
AQSVPWGISRVQAPAAHRRGLTGRGVKVAVLDTGISTHPDLNIRGGASFVPGEPSTQDGNGHGTHVAGTIAALDNRIGVLGVAPSAELYAVKVLGASGSGSVSSIAQGLEWAGNNGMHVANLSLGSPSPSATLEQAVNSATSRGVLVLAASGNSGAGSISYPARYANAMAVGATDQNNNRASFSQYGAGLDIVAPGVNVQSTYPGSTYASLNGTSMATPHVAGAAALVKQKNPSWSNVQIRNRLKNTATSLGSTNLYGSGLVNAEAATR

SEQ ID NO: 56850 - protein, 269 aa, Unidentified
AQSVPWGISRVQAPAAHNRGLAGSGVKVAVLDTGISTHPDLNIRGGASFVPGEPSTQDGNGHGTHVAGTIAALNNSIGVLGVAPSAELYAVKVLGASGGGNLSSIAQGLEWAGNNGMHVANLSLGSPSPSATLEQAVNSATSRGVLVVAASGNSGAGSISYPARYANAMAVGATDQNNNRASFSQYGAGLDIVAPGVNVQSTYPGSTYASLNGTSMATPHVAGAALLVKQKNPSWSNVRIRNHLKNTATSLGSTNLYGSGLVNAEAATR

SEQ ID NO: 56851 - protein, 269 aa, Unidentified
AQSVPWGISRVQAPAAHNRRLWGSGVKVAVLDTGISTHPDLNITGGASFVPGEPSTQDGNGHGTHVAGTIAALNNSIGVLGVAPSAELYAVKVLGASGAGSVSSIAQGLEWAGNNGMHVANLSLGSPSPSATLEQAVNSATSRGVLVVAASGNSGAGSISYPARYANAMAVGATDQNNNRASFSQYGAGLDIVAPGVNVQSTYPQSAYASLNGTSMATPHVAGAAALVKQKNPSWSNVQIRNHLKNTATSLGSTNLYGSGLVNAEAATR

SEQ ID NO: 56852 - protein, 269 aa, Unidentified
AQSVPWGISRVQAPAAHNRGLTGSGVKVAVLDTGISTHPDLNIRGGASFVPGEPSTQDGNGHGTHVAGTIAALNNSIGVLGVAPSAELYAVKVLGADGRGAISSIAQGLEWAGNNGMHVANLSLGSPSPSATLEQAVNSATSRGVLVVAASGNSGASSISYPARYANAMAVGATDQNNNRASFSQYGAGLDIVAPGVNIQSTYPGSTYASLNGTSMATPHVAGAAALVKQKNPSWSNVQIRNHLKNTATSLGSTNLYGSGLVNAEAATR

SEQ ID NO: 56853 - protein, 269 aa, Unidentified
AQSVPWGISRVQAPAAHNRKLTGSGVKVAVLDTGISTHPDLRIRGGASFVPGEPSTQDGEGHGTHVAGTIAALNNNIGVLGVAPSAELYAVKVLGASGSGSVSSIAQGLEWAGNNGMHVANLSLGLPSPSATLEQAVNSATSRGVLVVAASGNSGAGSISYPARYANAMAVGATDQNNNRASFSQYGAGLDIVAPGVNVQSTYPGSTYASENGTSMATPHVAGAAALVKQKNPSWSNVQIRNHLKNTATSLGSTNLYGSGLVNAEAATR

SEQ ID NO: 56854 - protein, 269 aa, Unidentified
AQSVPWGISRVQAPAAHNRGLAGSGVKVAVLDTGISTHPDLNIRGGASFVPGEPSTQDGEGHGTHVAGTIAALNNSIGVLGVAPSAELYAVKVLGASGSGSVSSIAQGLEWAGLNRMHVANLSLGSPSPSATLEQAVNSATSRGVLVVAASGNSGEGSIDYPARYANAMAVGATDQNNNRASFSQYGAGLDIVAPGVNVQSTYPGSTYASLNGTSMATPHVAGAAALVKQKNPSWSNVQIRNHLKNTATSLGSTNLYGSGLVNAEAATR

SEQ ID NO: 56855 - protein, 269 aa, Unidentified
AQSVPWGISRVQAPAAHNRGLTGSGVKVAVLDTGISTHPDLNIRGGASFVPGEPSTQDGNGHGTHVAGTIAALNNSIGVLGVAPSAELYAVKVLGADGRGAISSIAQGLEWAGNNGMHVANLSLGSPSPSATLEQAVNSATSRGVLVVAASGNSGASSISYPARYANAMAVGATDQNNNRASFSQYGAGLDIVAPGVNVQSTYPGSTYASGNGTSMATPHVAGAAALVKQKNPSWSNVQIRNHLKNTATSLGSTNLYGSGLVNAEAATR

SEQ ID NO: 56856 - protein, 269 aa, Unidentified
AQSVPWGISRVQAPAAHNRGLLASGVRVAVLDTGISTHPDLNIRGGASFVPGEPSTQDGNGHGTHVAGTIAALNNSIGVLGVAPSAELYAVKVLGASGDGSLSSIAQGLEWAGNNGMHVANLSLGSPSPSATLEQAVNSATSRGVLVVAASGNSGAGSISYPARYANAMAVGATDQNNNRASFSQYGAGLDIVAPGVNVQSTYPGSTYAFLNGTSMATPHVAGAAALVKQKNPSWSNVQIRNHLKNTATSLGSTNLYGSGLVNAEAATR

SEQ ID NO: 56857 - protein, 269 aa, Unidentified
AQSVPWGISRVQAPAAHNRRLTGSGVKVAVLDTGISTHPDLNIRGGASFVPGEPSTQDGEGHGTHVAGTIAALNNDIGVLGVAPSAELYAVKVLGASGSGSVSSIAQGLEWAGNNSMHVANLSLGSESPSATLEQAVNSATSRGVLVVAASGNSGAGSISYPARYANAMAVGATDQNNNRASFSQYGAGLDIVAPGVNVQSTYPGSTYASLNGTSMATPHVAGAAALVKQKNPSWSNVQIRNRLKNTATSLGSTNLYGSGLVNAEAATR

SEQ ID NO: 56858 - protein, 269 aa, Unidentified
AQSVPWGISRVQAPAAHNRGLTGSGVKVAVLDTGISTHPDLDIRGGASFVPGEPSTQDGNGHGTHVAGTIAALNNSIGVLGVAPSAELYAVKVLGASGGGAISSIAQGLEWAGNNGMHVANLSLGSPSPSATLEQAVNSATSRGVLVVAASGNSGAGSISYPARYANAMAVGATDQNNNRASFSQYGAGLDIVAPGVNVQSTYPGSTYASLNGTSMATPHVAGAAVLVKQKNPSWSNVRIRNHLKNTATSLGSTNLYGSGLVNAEAATR

SEQ ID NO: 56859 - protein, 269 aa, Unidentified
AQSVPWGISRVQAPAAHNRGLRGSGVKVAVLDTGISTHPDLNIRGGASFVPGEPSTQDGNGHGTHVAGTIAALNNSIGVLGVAPSAELYAVKVLGASGNGGLSSIAQGLEWAGNNGMHVANLSLGSPSPSATLEQAVNSATSRGVLVVAASGNSGAGSISYPARYANAMAVGATDQNNNRASFSQYGAGLDIVAPGVNVQSTYPGSTYASLNGTSMATPHVAGAAVLVKQKNPSWSNVRIRNHLKNTATSLGSTNLYGSGLVNAEAATR

SEQ ID NO: 56860 - protein, 269 aa, Unidentified
AQSVPWGISRVQAPAAHNRGLTGSGVKVAVLDTGISTHPDLNIRGGASFVPGEPSTQDGNGHGTHVAGTIAALNNSIGVLGVAPSAELYAVKVLGASGGGAISSIARGLEWAGNNGMHVANLSLGSPSPSATLEQAVNSATSRGVLVVAASGNSGAGSISYPARYANAMAVGATDQNNNRASFSQYGAGLDIVAPGVNVQSTYPGSTYASLNGTSMATPHVAGAAVLVKQKNPSWSNVRIRNHLKNTATSLGSTNLYGSGLVNAEAATR

SEQ ID NO: 56861 - protein, 269 aa, Unidentified
AQSVPWGISRVQAPAAHRRRLTGRGVKVAVLDTGISTHPDLNIRGGASFVPGEPSTQDGNGHGTHVAGTIAALDNSIGVLGVAPSAELYAVKVLGASGSGSVSSIAQGLEWAGNNGMHVANLSLGSPSPSATLEQAVNSATSRGVLVVAASGNSGAGSISYPARYANAMAVGATDQNNNRASFSQYGAGLDIVAPGVNVQSTYPGSTYFSLNGTSMATPHVAGAAALVKQKNPSWSNVQIRNRLKNTATSLGSTNLYGSGLVNAEAATR

SEQ ID NO: 56862 - protein, 269 aa, Unidentified
AQSVPWGISRVQAPAAHNRGLQGSGVKVAVLDTGISTHPDLNIRGGASFVPGEPSTQDGNGHGTHVAGTIAALNNSIGVLGVAPSAELYAVKVLGASGTGGISSIAQGLEWAGNNGMHVANLSLGSPSPSATLEQAVNSATSRGVLVVAASGNSGAGSISYPARYANAMAVGATDQNNNRASFSQYGAGLDIVAPGVNVQSTYPGSTYASLNGTSMATPHVAGAAMLVKQKNPSWSNVRIRNHLKNTATSLGSTNLYGSGLVNAEAATR

SEQ ID NO: 56863 - protein, 269 aa, Unidentified
AQSVPWGISRVQAPAAHNRGLTGSGVKVAVLDTGISTHPDLNIRGGASFVPGEPSTQDGEGHGTHVAGTIAALNNGIGVLGVAPSAELYAVKVLGASGSGSVSSIAQGLEWAGNNDMHVANLSLGSPSPSATLEQAVNSATSRGVLVVAASGNSGAGSISYPARYANAMAVGATDQNNNRADFSQYGAGLDIVAPGVNVQSTYPGSTYASLNGTSMATPHVAGAAALVKQKNPSWSNVRIRDHLKNTATSLGSTNLYGSGLVNAEAATR

SEQ ID NO: 56864 - protein, 269 aa, Unidentified
AQSVPWGISRVQAPAAHNRGLTGGGVKVAVLDTGISTHPDLNIRGGASFVPGEPSTQDGNGHGTHVAGTIAALNNSIGVLGVAPSAELYAVKVLAASGQGSVSSIANGLEWAGNNGMHVANLSLGAPSPSATLEQAVNSATSRGVLVVAASGNSGAGSISYPARYANAMAVGATDQNNNRADFSQYGAGLDIVAPGVNVQSTYPGSTYASQNGTSSATPHVAGAAALVKQKNPSWSNVQIRNHLKNTATSLGSTNLYGSGLVNAEAATR

SEQ ID NO: 56865 - protein, 269 aa, Unidentified
AQSVPWGISRVQAPAAHNRRLWGSGVKVAVLDTGISTHPDLNITGGASFVPGEPSTQDGNGHGTHVAGTIAALNNSIGVLGVAPSAELYAVKVLGASGAGSVSSIAQGLEWAGNNGMHVANLSLGSPSPSATLEQAVNSATSRGVLVVAASGNSGAGSISYPARYANAMAVGATDQNNNRASFSQYGAGLDIVAPGVNVQSTYIGSAYASLNGTSMATPHVAGAAALVKQKNPSWSNVQIRNHLKNTATSLGSTNLYGSGLVNAEAATR

SEQ ID NO: 56866 - protein, 269 aa, Unidentified
AQSVPWGISRVQAPAAHNRKLTGSGVKVAVLDTGISTHPDLNIRGGASFVPGEPSTQDGEGHGTHVAGTIAALNNSIGVLGVAPSAELYAVKVLAASGNGSVSSIAQGLEWAGLNGMHVANLSLGAPSPSATLEQAVNSATSRGVLVVAASGNSGAGSISYPARYANAMAVGATDQNNNRASFSQYGAGLDIVAPGVNVQSTYPGSTYASQNGTSSATPHVAGAAALVKQKNPSWSNVQIRNHLKNTATSLGSTNLYGSGLVNAEAATR

SEQ ID NO: 56867 - protein, 269 aa, Unidentified
AQSVPWGISRVQAPAAHRRRLTGRGVKVAVLDTGISTHPDLDIRGGASFVPGEPSTQDGNGHGTHVAGTIAALDNSIGVLGVAPSAELYAVKVLGASGSGSVSSIAQGLEWAGNNGMHVANLSLGSPSPSATLEQAVNSATSRGVLVVAASGNSGAGSISYPARYANAMAVGATDQNNNRASFSQYGAGLDIVAPGVNVQSTYPGSTYASLNGTSMATPHVAGAAALVKQKNPSWRNVQIRNHLKNTATSLGSTNLYGSGLVNAEAATR

SEQ ID NO: 56868 - protein, 269 aa, Unidentified
AQSVPWGISRVQAPAAHRRGLRGRGVKVAVLDTGISTHPDLRIRGGASFVPGEPSTQDGNGHGTHVAGTIAALDNSIGVLGVAPSAELYAVKVLGASGSGSVSSIAQGLEWAGNNGMHVANLSLGSPSPSATLEQAVNSATSRGVLVVAASGNSGAGSISYPARYANAMAVGATDQNNNRASFSQYGAGLDIVAPGVNVQSTYPGSTYASLNGTSMATPHVAGAAALVKQKNPSWSNVQIRNRLKNTATSLGSTNLYGSGLVNAEAATR

SEQ ID NO: 56869 - protein, 269 aa, Unidentified
AQSVPWGISRVQAPAAHNRGLTGSGVKVAVLDTGISTHPDLNIRGGASFVPGEPSTQDGEGHGTHVAGTIAALNNDIGVLGVAPSAELYAVKVLGASGSGSVSSIAQGLEWAGNNDMHVANLSLGSPSPSATLEQAVNSATSRGVLVVAASGNSGAGSISYPARYANAMAVGATDQNNNRASFSQYGAGLDIVAPGVNVQSTYPGSTYASLNGTSMATPHVAGAAALVKQKNPSWSNVRIRDRLKNTATSLGSTNLYGSGLVNAEAATR

SEQ ID NO: 56870 - protein, 269 aa, Unidentified
AQSVPWGISRVQAPAAHNRGLAGSGVKVAVLDTGISTHPDLNIRGGASFVPGEPSTQDGNGHGTHVAGTIAALNNSIGVLGVAPSAELYAVKVLGASGAGNLSSIAQGLEWAGNNGMHVANLSLGSPSPSATLEQAVNSATSRGVLVVAASGNSGAGSISYPARYANAMAVGATDQNNNRASFSQYGAGLDIVAPGVNVQSTYPGSTYASLNGTSMATPHVAGAAVLVKQKNPSWSNVRIRNHLKNTATSLGSTNLYGSGLVNAEAATR

SEQ ID NO: 56871 - protein, 269 aa, Unidentified
AQSVPWGISRVQAPAAHNRGLAGSGVKVAVLDTGISTHPDLNIRGGASFVPGEPSTQDGNGHGTHVAGTIAALNNSIGVLGVAPSAELYAVKVLGASGTGGISSIAQGLEWAGNNGMHVANLSLGSPSPSATLEQAVNSATSRGVLVVAASGNSGAGSISYPARYANAMAVGATDQNNNRASFSQYGAGLDIVAPGVNVQSTYPGSTYASLNGTSMATPHVAGAATLVKQKNPSWSNVSIRNHLKNTATSLGSTNLYGSGLVNAEAATR

SEQ ID NO: 56872 - protein, 269 aa, Unidentified
AQSVPWGISRVQAPAAHNRGLKGSGVKVAVLDTGISTHPDLNIRGGASFVPGEPSTQDGNGHGTHVAGTIAALNNSIGVLGVAPSAELYAVKVLGASGTGALSSIAQGLEWAGNNGMHVANLSLGSPSPSATLEQAVNSATSRGVLVVAASGNSGAGSISYPARYANAMAVGATDQNNNRASFSQYGAGLDIVAPGVNVQSTYPGSTYASLNGTSMATPHVAGAAVLVKQKNPSWSNVWIRNHLKNTATSLGSTNLYGSGLVNAEAATR

SEQ ID NO: 56873 - protein, 269 aa, Unidentified
AQSVPWGISRVQAPAAHRRRLWGRGVKVAVLDTGISTHPDLNIRGGASFVPGEPSTQDGNGHGTHVAGTIAALDNSIGVLGVAPSAELYAVKVLGASGSGSVSSIAQGLEWAGNNGMHVANLSLGSPSPSATLEQAVNSATSRGVLVVAASGNSGAGSISYPARYANAMAVGATDQNNNRASFSQYGAGLDIVAPGVNVQSTYPGSTYASLNGTSMATPHVAGAAALVKQKNPSWSNVQIRNRLKNTATSLGSTNLYGSGLVNAEAATR

SEQ ID NO: 56874 - protein, 269 aa, Unidentified
AQSVPWGISRVQAPAAHNRGLKGSGVKVAVLDTGISTHPDLNIRGGASFVPGEPSTQDGNGHGTHVAGTIAALNNSIGVLGVAPSAELYAVKVLGASGAGNLSSIAQGLEWAGNNGMHVANLSLGSPSPSATLEQAVNSATSRGVLVVAASGNSGAGSISYPARYANAMAVGATDQNNNRASFSQYGAGLDIVAPGVNVQSTYPGSTYASLNGTSMATPHVAGAATLVKQKNPSWSNVRIRNHLKNTATSLGSTNLYGSGLVNAEAATR

SEQ ID NO: 56875 - protein, 269 aa, Unidentified
AQSVPWGISRVQAPAAHNRRLTGSGVKVAVLDTGISTHPDLNIRGGASFVPGEPSTQDGNGHGTHVAGTIAALNNGIGVLGVAPSAELYAVKVLGASGSGSVSSIAQGLEWAGNNSMHVANLSLGSPSPSATLEQAVNSATSRGVLVVAASGNSGAGSISYPARYANAMAVGATDQNNNRADFSQYGAGLDIVAPGVNVQSTYPGSTYASLNGTSMATPHVAGAAALVKQKNPSWSNVRIRDHLKNTATSLGSTNLYGSGLVNAEAATR

SEQ ID NO: 56876 - protein, 269 aa, Unidentified
AQSVPWGISRVQAPAAHNRRLTGRGVKVAVLDTGISTHPDLNIRGGASFVPGEPSTQDGNGHGTHVAGTIAALNNGIGVLGVAPSAELYAVKVLGASGSGSVSSIAQGLEWAGNNSMHVANLSLGSPSPSATLEQAVNSATSRGVLVVAASGNSGAGSISYPARYANAMAVGATDQNNNRADFSQYGAGLDIVAPGVNVQSTYPGSTYASLNGTSMATPHVAGAAALVKQKNPSWSNVRIRNHLKNTATSLGSTNLYGSGLVNAEAATR

SEQ ID NO: 56877 - protein, 269 aa, Unidentified
AQSVPWGISRVQAPAAHNRRLTGRGVKVAVLDTGISTHPDLNIRGGASFVPGEPSTQDGNGHGTHVAGTIAALNNNIGVLGVAPSAELYAVKVLGASGNGSVSSIANGLEWAGLNGMHVANLSLGSPSPSATLEQAVNSATSRGVLVVAASGNSGAGSISYPARYANAMAVGATDQNNNRASFSQYGAGLDIVAPGVNVQSTYPGSTYASLNGTSMATPHVAGAAALVKQKNPSWSNVQIRNHLKNTATSLGSTNLYGSGLVNAEAATR

SEQ ID NO: 56878 - protein, 269 aa, Unidentified
AQSVPWGISRVQAPAAHNRGLTGSGVKVAVLDTGISTHPDLNIRGGASFVPGEPSTQDGNGHGTHVAGTIAALDNSIGVLGVAPSAELYAVKVLGASGAGAISSIAQGLEWAGNNGMHVANLSLGSPSPSATLEQAVNSATSRGVLVVAASGNSGAGSISYPARYANAMAVGATDQNNNRASFSQYGAGLDIVAPGVNVQSTYIGSTYASLNGTSSATPHVAGAAVLVKQKNPSWSNVRIRNHLKNTATSLGSTNLYGSGLVNAEAATR

SEQ ID NO: 56879 - protein, 269 aa, Unidentified
AQSVPWGISRVQAPAAHNRGLRGSGVKVAVLDTGISTHPDLNIRGGASFVPGEPSTQDGNGHGTHVAGTIAALNNSIGVLGVAPSAELYAVKVLGASGNGAISSIAQGLEWAGNNGMHVANLSLGSPSPSATLEQAVNSATSRGVLVVAASGNSGAGSISYPARYANAMAVGATDQNNNRASFSQYGAGLDIVAPGVNVQSTYPGSTYASLNGTSMATPHVAGAAVLVKQKNPSWSNVSIRNHLKNTATSLGSTNLYGSGLVNAEAATR

SEQ ID NO: 56880 - protein, 269 aa, Unidentified
AQSVPWGISRVQAPAAHNRGLYGSGVKVAVLDTGISTHPDLNIRGGASFVPGEPSTQDGNGHGTHVAGTIAALNNSIGVLGVAPSAELYAVKVLGASGNGAISSIAQGLEWAGNNGMHVANLSLGSPSPSATLEQAVNSATSRGVLVVAASGNSGAGSISYPARYANAMAVGATDQNNNRASFSQYGAGLDIVAPGVNVQSTYPGSTYASLNGTSMATPHVAGAAVLVKQKNPSWSNVRIRNHLKNTATSLGSTNLYGSGLVNAEAATR

SEQ ID NO: 56881 - protein, 269 aa, Lederbergia lentus
AQSVPWGISQVQAPAAHNRGLTGSGVKVAVLDTGISTHPDLNIRGGASFVPGEPSTQDGNGHGTHVAGTIAALNNSIGVLGVAPSAELYAVKVLGADGEGAISSIAQGLEWAGNNGMHVANLSLGSPSPSATLEQAVNSATSRGVLVVAASGNSGASSISYPARYANAMAVGATDQNNNRASFSQYGAGLDIVAPGVNVQSTYPGSTYASLNGTSMATPHVAGAAALVKQKNPSWSNVQIRNHLKNTATSLGSTNLYGSGLVNAEAATR

SEQ ID NO: 56882 - protein, 269 aa, Unidentified
AQSVPWGISRVQAPAAHNRRLTGSGVKVAVLDTGISTHPDLNIRGGASFVPGEPSTQDGNGHGTHVAGTIAALNNDIGVLGVAPSAELYAVKVLGASGSGSVSSIAQGLEWAGNNDMHVANLSLGSESPSATLEQAVNSATSRGVLVVAASGNSGAGSISYPARYANAMAVGATDQNNNRASFSQYGAGLDIVAPGVNVQSTYPGSTYASLNGTSMATPHVAGAAALVKQKNPSWSNVRIRDHLKNTATSLGSTNLYGSGLVNAEAATR

SEQ ID NO: 56883 - protein, 269 aa, Unidentified
AQSVPWGISRVQAPAAHNRGLTGGGVKVAVLDTGISTHPDLNIRGGASFVPGEPSTQDGNGHGTHVAGTIAALNNSIGVLGVAPSAELYAVKVLAASGQGSVSSIANGLEWAGNNGMHVANLSLGAPSPSATLEQAVNSATSRGVLVVAASGNSGAGSISYPARYANAMAVGATDQNNNRADFSQYGAGLDIVAPGVNVQSTYPGSTYASLNGTSMATPHVAGAAALVKQKNPSWSNVQIRNHLKNTATSLGSTNLYGSGLVNAEAATR

SEQ ID NO: 56884 - protein, 269 aa, Unidentified
AQSVPWGISRVQAPAAHNRGLWGRGVKVAVLDTGISTHPDLNITGGASFVPGEPSTQDGNGHGTHVAGTIAALNNSIGVLGVAPSAELYAVKVLGASGAGSVSSIAQGLEWAGNNGMHVANLSLGSPSPSATLEQAVNSATSRGVLVVAASGNSGAGSISYPARYANAMAVGATDQNNNRASFSQYGAGLDIVAPGVNVQSTYPQSAYASLNGTSMATPHVAGAAALVKQKNPSWSNVQIRNHLKNTATSLGSTNLYGSGLVNAEAATR

SEQ ID NO: 56885 - protein, 269 aa, Unidentified
AQSVPWGISRVQAPAAHNRGLTGGGVKVAVLDTGISTHPDLNIRGGASFVPGEPSTQDGNGHGTHVAGTIAALNNNIGVLGVAPSAELYAVKVLSASGNGSVSSIAGGLEWAGNNGMHVANLSLGAPSPSATLEQAVNSATSRGVLVVAASGNSGAGSISYPARYANAMAVGATDQNNNRASFSQYGAGLDIVAPGVNVQSTYPGSTYASQNGTSSATPHVAGAAALVKQKNPSWSNVQIRNHLKNTATSLGSTNLYGSGLVNAEAATR

SEQ ID NO: 56886 - protein, 269 aa, Unidentified
AQSVPWGISRVQAPAAHNRKLLGFGVKVAVLDTGISTHPDLNIRGGASFVPGEPSTQDGNGHGTHVAGTIAALNNNIGVLGVAPSAELYAVKVLGASGSGSVSSIAQGLEWAGNNGMHVANLSLGSPSPSATLEQAVNSATSRGVLVVAASGNSGAGSISYPARYANAMAVGATDQNNNRASFSQYGAGLDIVAPGVNVQSTYPGSAYASENGTSMATPHVAGAAALVKQKNPSWSNVQIRNHLKNTATSLGSTNLYGSGLVNAEAATR

SEQ ID NO: 56887 - protein, 269 aa, Unidentified
AQSVPWGISRVQAPAAHNRGLTGSGVKVAVLDTGISTHPDLNIRGGASFVPGEPSTQDGNGHGTHVAGTIAALNNGIGVLGVAPSAELYAVKVLGASGSGSVSSIAQGLEWAGNNSMHVANLSLGSESPSATLEQAVNSATSRGVLVVAASGNSGAGSISYPARYANAMAVGATDQNNNRADFSQYGAGLDIVAPGVNVQSTYPGSTYASLNGTSMATPHVAGAAALVKQKNPSWSNVQIRDRLKNTATSLGSTNLYGSGLVNAEAATR

SEQ ID NO: 56888 - protein, 269 aa, Unidentified
AQSVPWGISRVQAPAAHNRRLTGRGVKVAVLDTGISTHPDLNIRGGASFVPGEPSTQDGNGHGTHVAGTIAALNNSIGVLGVAPSAELYAVKVLGASGGGSVSSIANGLEWAGLNGMHVANLSLGSPSPSATLEQAVNSATSRGVLVVAASGNSGAGSISYPARYANAMAVGATDQNNNRASFSQYGAGLDIVAPGVNVQSTYPGSTYVSLNGTSMATPHVAGAAALVKQKNPSWSNVQIRNHLKNTATSLGSTNLYGSGLVNAEAATR

SEQ ID NO: 56889 - protein, 269 aa, Lederbergia lentus
AQSVPWGISRVQAPAAHNRGLTGSGVEVAVLDTGISTHPDLNIRGGASFVPGEPSTQDGNGHGTHVAGTIAALNNSIGVLGVAPSAELYAVKVLGADGEGAISSIAQGLEWAGNNGMHVANLSLGSPSPSATLEQAVNSATSRGVLVVAASGNSGASSISYPARYANAMAVGATDQNNNRASFSQYGAGLDIVAPGVNVQSTYPGSTYASLNGTSMATPHVAGAAALVKQKNPSWSNVQIRNHLKNTATSLGSTNLYGSGLVNAEAATR

SEQ ID NO: 56890 - protein, 269 aa, Unidentified
AQSVPWGISRVQAPAAHNRRLTGRGVKVAVLDTGISTHPDLNIRGGASFVPGEPSTQDGNGHGTHVAGTIAALNNSIGVLGVAPSAELYAVKVLSASGNGSVSSIANGLEWAGNNGMHVANLSLGAPSPSATLEQAVNSATSRGVLVVAASGNSGAGSISYPARYANAMAVGATDQNNNRASFSQYGAGLDIVAPGVNVQSTYPGSTYASLNGTSMATPHVAGAAALVKQKNPSWSNVQIRNHLKNTATSLGSTNLYGSGLVNAEAATR

SEQ ID NO: 56891 - protein, 269 aa, Unidentified
AQSVPWGISRVQAPAAHNRGLTGSGVKVAVLDTGISTHPDLNIRGGASFVPGEPSTQDGNGHGTHVAGTIAALDNNIGVLGVAPRAELYAVKVLGASGSGSVSSIAQGLEWAGNNRMHVANLSLGKPSPSATLEQAVNSATSRGVLVTAASGNSGAGSISYPARYANAMAVGATDQNNNRASFSQYGAGLDIVAPGVNVQSTYPGSTYASLNGTSMATPHVAGAAALVKQKNPSWSNVQIRNHLKNTATSLGSTNLYGSGLVNAEAATR

SEQ ID NO: 56892 - protein, 269 aa, Unidentified
AQSVPWGISRVQAPAAHNRGLTGGGVKVAVLDTGISTHPDLNIRGGASFVPGEPSTQDGNGHGTHVAGTIAALNNSIGVLGVAPSAELYAVKVLSASGQGSVSSIAGGLEWAGNNGMHVANLSLGSPSPSATLEQAVNSATSRGVLVVAASGNSGAGSISYPARYANAMAVGATDQNNNRADFSQYGAGLDIVAPGVNVQSTYPGSTYASQNGTSMATPHVAGAAALVKQKNPSWSNVQIRNHLKNTATSLGSTNLYGSGLVNAEAATR

SEQ ID NO: 56893 - protein, 269 aa, Unidentified
AQSVPWGISRVQAPAAHRRGLTGRGVKVAVLDTGISTHPDLNIRGGASFVPGEPSTQDGNGHGTHVAGTIAALDNSIGVLGVAPSAELYAVKVLGASGSGSVSSIAQGLEWAGNNGMHVANLSLGSPSPSATLEQAVNSATSRGVLVLAASGNSGAGSISYPARYANAMAVGATDQNNNRASFSQYGAGLDIVAPGVNVQSTYPGSTYASLNGTSMATPHVAGAAALVKQKNPSWRNVQIRNRLKNTATSLGSTNLYGSGLVNAEAATR

SEQ ID NO: 56894 - protein, 269 aa, Unidentified
AQSVPWGISRVQAPAAHNRGLRGSGVKVAVLDTGISTHPDLNIRGGASFVPGEPSTQDGNGHGTHVAGTIAALNNSIGVLGVAPSAELYAVKVLGASGNGGISSIAQGLEWAGNNGMHVANLSLGSPSPSATLEQAVNSATSRGVLVVAASGNSGAGSISYPARYANAMAVGATDQNNNRASFSQYGAGLDIVAPGVNVQSTYPGSTYASLNGTSMATPHVAGAAVLVKQKNPSWSNVRIRNHLKNTATSLGSTNLYGSGLVNAEAATR

SEQ ID NO: 56895 - protein, 269 aa, Unidentified
AQSVPWGISRVQAPAAHNRGLTGSGVKVAVLDTGISTHPDLNIRGGASFVPGEPSTQDGNGHGTHVAGTIAALNNDIGVLGVAPSAELYAVKVLGASGSGSVSSIAQGLEWAGNNSMHVANLSLGSPSPSATLEQAVNSATSRGVLVVAASGNSGADSISYPARYANAMAVGATDQNNNRADFSQYGAGLDIVAPGVNVQSTYPGSTYASLNGTSMATPHVAGAAALVKQKNPSWSNVQIRDRLKNTATSLGSTNLYGSGLVNAEAATR

SEQ ID NO: 56896 - protein, 269 aa, Unidentified
AQSVPWGISRVQAPAAHNRRLTGSGVKVAVLDTGISTHPDLNIRGGASFVPGEPSTQDGNGHGTHVAGTIAALNNGIGVLGVAPSAELYAVKVLGASGSGSVSSIAQGLEWAGNNSMHVANLSLGSESPSATLEQAVNSATSRGVLVVAASGNSGAGSISYPARYANAMAVGATDQNNNRASFSQYGAGLDIVAPGVNVQSTYPGSTYASLNGTSMATPHVAGAAALVKQKNPSWSNVQIRDRLKNTATSLGSTNLYGSGLVNAEAATR

SEQ ID NO: 56897 - protein, 269 aa, Unidentified
AQSVPWGISRVQAPAAHNRGLTGRGVKVAVLDTGISTHPDLNIRGGASFVPGEPSTQDGNGHGTHVAGTIAALNNGIGVLGVAPSAELYAVKVLGASGSGSVSSIAQGLEWAGNNSMHVANLSLGSESPSATLEQAVNSATSRGVLVVAASGNSGAGSISYPARYANAMAVGATDQNNNRASFSQYGAGLDIVAPGVNVQSTYPGSTYASLNGTSMATPHVAGAAALVKQKNPSWSNVQIRDRLKNTATSLGSTNLYGSGLVNAEAATR

SEQ ID NO: 56898 - protein, 269 aa, Unidentified
AQSVPWGISRVQAPAAHNRGLRGSGVKVAVLDTGISTHPDLNIRGGASFVPGEPSTQDGNGHGTHVAGTIAALNNSIGVLGVAPSAELYAVKVLGASGTGGISSIAQGLEWAGNNGMHVANLSLGSPSPSATLEQAVNSATSRGVLVVAASGNSGAGSISYPARYANAMAVGATDQNNNRASFSQYGAGLDIVAPGVNVQSTYPGSTYASLNGTSMATPHVAGAALLVKQKNPSWSNVSIRNHLKNTATSLGSTNLYGSGLVNAEAATR

SEQ ID NO: 56899 - protein, 269 aa, Unidentified
AQSVPWGISRVQAPAAHNRRLTGRGVKVAVLDTGISTHPDLNIRGGASFVPGEPSTQDGNGHGTHVAGTIAALNNSIGVLGVAPSAELYAVKVLGASGSGSVSSIAQGLEWAGNNGMHVANLSLGSESPSATLEQAVNSATSRGVLVVAASGNSGADSISYPARYANAMAVGATDQNNNRASFSQYGAGLDIVAPGVNVQSTYPGSTYASLNGTSMATPHVAGAAALVKQKNPSWSNVQIRDRLKNTATSLGSTNLYGSGLVNAEAATR

SEQ ID NO: 56900 - protein, 269 aa, Unidentified
AQSVPWGISRVQAPAAHNRGLQGSGVKVAVLDTGISTHPDLNIRGGASFVPGEPSTQDGNGHGTHVAGTIAALNNSIGVLGVAPSAELYAVKVLGASGTGAISSIAQGLEWAGNNGMHVANLSLGSPSPSATLEQAVNSATSRGVLVVAASGNSGAGSISYPARYANAMAVGATDQNNNRASFSQYGAGLDIVAPGVNVQSTYPGSTYASLNGTSMATPHVAGAATLVKQKNPSWSNVRIRNHLKNTATSLGSTNLYGSGLVNAEAATR

SEQ ID NO: 56901 - protein, 269 aa, Unidentified
AQSVPWGISRVQAPAAHNRRLTGSGVKVAVLDTGISTHPDLNIRGGASFVPGEPSTQDGEGHGTHVAGTIAALNNGIGVLGVAPSAELYAVKVLGASGSGSVSSIAQGLEWAGNNDMHVANLSLGSPSPSATLEQAVNSATSRGVLVVAASGNSGADSISYPARYANAMAVGATDQNNNRADFSQYGAGLDIVAPGVNVQSTYPGSTYASLNGTSMATPHVAGAAALVKQKNPSWSNVQIRNHLKNTATSLGSTNLYGSGLVNAEAATR

SEQ ID NO: 56902 - protein, 269 aa, Unidentified
AQSVPWGISRVQAPAAHRRGLWGRGVKVAVLDTGISTHPDLNIRGGASFVPGEPSTQDGNGHGTHVAGTIAALDNSIGVLGVAPSAELYAVKVLGASGSGSVSSIAQGLEWAGNNGMHVANLSLGSPSPSATLEQAVNSATSRGVLVVAASGNSGAGSISYPARYANAMAVGATDQNNNRASFSQYGAGLDLVAPGVNVQSTYPGSTYASLNGTSMATPHVAGAAALVKQKNPSWSNVQIRNRLKNTATSLGSTNLYGSGLVNAEAATR

SEQ ID NO: 56903 - protein, 269 aa, Unidentified
AQSVPWGISRVQAPAAHNRGLTGRGVKVAVLDTGISTHPDLNIRGGASFVPGEPSTQDGNGHGTHVAGTIAALNNGIGVLGVAPSAELYAVKVLGASGSGSVSSIAQGLEWAGNNSMHVANLSLGSESPSATLEQAVNSATSRGVLVVAASGNSGADSISYPARYANAMAVGATDQNNNRASFSQYGAGLDIVAPGVNVQSTYPGSTYASLNGTSMATPHVAGAAALVKQKNPSWSNVQIRDHLKNTATSLGSTNLYGSGLVNAEAATR

SEQ ID NO: 56904 - protein, 269 aa, Unidentified
AQSVPWGISRVQAPAAHNRKLLGSGVKVAVLDTGISTHPDLNIRGGASFVPGEPSTQDGNGHGTHVAGTIAALNNNIGVLGVAPSAELYAVKVLGASGSGSVSSIAQGLEWAGNNGMHVANLSLGDPSPSATLEQAVNSATSRGVLVVAASGNSGAGSIDYPARYANAMAVGATDQNNNRASFSQYGAGLDIVAPGVNVQSTYPGSAYASLNGTSMATPHVAGAAALVKQKNPSWSNVQIRNHLKNTATSLGSTNLYGSGLVNAEAATR

SEQ ID NO: 56905 - protein, 269 aa, Unidentified
AQSVPWGISRVQAPAAHNRGLTGSGVKVAVLDTGISTHPDLNIRGGASFVPGEPSTQDGNRHGTHVAGTIAALNNSIGVLGVAPSAELYAVKVLGADGRGAISSIAQGLEWAGNNGMHVANLSLGSPSPSATLEQAVNSATSRGVLVVAASGNSGASSISYPARYANAMAVGATDQNNNRASFSQYGAGLDIVAPGVNVQSTYPGSTYASLNGTSMATPHVAGAAALVKQKNPSWSNVQIRNHLKNTATSLGSTNLYGSGLVNAEAATR

SEQ ID NO: 56906 - protein, 269 aa, Unidentified
AQSVPWGISRVQAPAAHNRGLAGSGVKVAVLDTGISTHPDLNIRGGASFVPGEPSTQDGNGHGTHVAGTIAALNNSIGVLGVAPSAELYAVKVLGASGNGNISSIAQGLEWAGNNGMHVANLSLGSPSPSATLEQAVNSATSRGVLVVAASGNSGAGSISYPARYANAMAVGATDQNNNRASFSQYGAGLDIVAPGVNVQSTYPGSTYASLNGTSMATPHVAGAAVLVKQKNPSWSNVRIRNHLKNTATSLGSTNLYGSGLVNAEAATR

SEQ ID NO: 56907 - protein, 269 aa, Unidentified
AQSVPWGISRVQAPAAHNRGLQGSGVKVAVLDTGISTHPDLNIRGGASFVPGEPSTQDGNGHGTHVAGTIAALNNSIGVLGVAPSAELYAVKVLGASGGGNLSSIAQGLEWAGNNGMHVANLSLGSPSPSATLEQAVNSATSRGVLVVAASGNSGAGSISYPARYANAMAVGATDQNNNRASFSQYGAGLDIVAPGVNVQSTYPGSTYASLNGTSMATPHVAGAAMLVKQKNPSWSNVRIRNHLKNTATSLGSTNLYGSGLVNAEAATR

SEQ ID NO: 56908 - protein, 269 aa, Unidentified
AQSVPWGISRVQAPAAHNRGLQGSGVKVAVLDTGISTHPDLNIRGGASFVPGEPSTQDGNGHGTHVAGTIAALNNSIGVLGVAPSAELYAVKVLGASGAGNISSIAQGLEWAGNNGMHVANLSLGSPSPSATLEQAVNSATSRGVLVVAASGNSGAGSISYPARYANAMAVGATDQNNNRASFSQYGAGLDIVAPGVNVQSTYPGSTYASLNGTSMATPHVAGAALLVKQKNPSWSNVWIRNHLKNTATSLGSTNLYGSGLVNAEAATR

SEQ ID NO: 56909 - protein, 269 aa, Unidentified
AQSVPWGISRVQAPAAHNRGLWGRGVKVAVLDTGISTHPDLRIRGGASFVPGEPSTQDGNGHGTHVAGTIAALNNSIGVLGVAPSAELYAVKVLGASGAGSVSSIAQGLEWAGNNGMHVANLSLGSPSPSATLEQAVNSATSRGVLVVAASGNSGAGSISYPARYANAMAVGATDQNNNRASFSQYGAGLDIVAPGVNVQSTYIGSAYASLNGTSMATPHVAGAAALVKQKNPSWSNVQIRNHLKNTATSLGSTNLYGSGLVNAEAATR

SEQ ID NO: 56910 - protein, 269 aa, Unidentified
AQSVPWGISRVQAPAAHNRGLTGRGVKVAVLDTGISTHPDLNIRGGASFVPGEPSTQDGNGHGTHVAGTIAALNNGIGVLGVAPSAELYAVKVLGASGSGSVSSIAQGLEWAGNNDMHVANLSLGSESPSATLEQAVNSATSRGVLVVAASGNSGAGSISYPARYANAMAVGATDQNNNRASFSQYGAGLDIVAPGVNVQSTYPGSTYASLNGTSMATPHVAGAAALVKQKNPSWSNVQIRDRLKNTATSLGSTNLYGSGLVNAEAATR

SEQ ID NO: 56911 - protein, 269 aa, Unidentified
AQSVPWGISRVQAPAAHNRGLRGSGVKVAVLDTGISTHPDLNIRGGASFVPGEPSTQDGNGHGTHVAGTIAALNNSIGVLGVAPSAELYAVKVLGASGGGNISSIAQGLEWAGNNGMHVANLSLGSPSPSATLEQAVNSATSRGVLVVAASGNSGAGSISYPARYANAMAVGATDQNNNRASFSQYGAGLDIVAPGVNVQSTYPGSTYASLNGTSMATPHVAGAATLVKQKNPSWSNVWIRNHLKNTATSLGSTNLYGSGLVNAEAATR

SEQ ID NO: 56912 - protein, 269 aa, Unidentified
AQSVPWGISRVQAPAAHNRKLTGSGVKVAVLDTGISTHPDLNIRGGASFVPGEPSTQDGEGHGTHVAGTIAALNNSIGVLGVAPSAELYAVKVLGASGNGSVSSIAGGLEWAGLNGMHVANLSLGSPSPSATLEQAVNSATSRGVLVVAASGNSGAGSISYPARYANAMAVGATDQNNNRASFSQYGAGLDIVAPGVNVQSTYPGSTYASQNGTSMATPHVAGAAALVKQKNPSWSNVQIRNHLKNTATSLGSTNLYGSGLVNAEAATR

SEQ ID NO: 56913 - protein, 269 aa, Unidentified
AQSVPWGISRVQAPAAHNRRLTGRGVKVAVLDTGISTHPDLNIRGGASFVPGEPSTQDGNGHGTHVAGTIAALNNSIGVLGVAPSADLYAVKVLGASGAGSVSSIANGLEWAGLNGMHVANLSLGSPSPSATLEQAVNSATSRGVLVVAASGNSGAGSISYPARYANAMAVGATDQNNNRASFSQYGAGLDIVAPGVNVQSTYPGSTYASLNGTSMATPHVAGAAALVKQKNPSWSNVQIRNHLKNTATSLGSTNLYGSGLVNAEAATR

SEQ ID NO: 56914 - protein, 269 aa, Unidentified
AQSVPWGISRVQAPAAHNRGLTGRGVKVAVLDSGISTHPDLNIRGGASFVPGEPSTQDGEGHGTHVAGTIAALNNSIGVLGVAPSAELYAVKVLGASGSGSVSSIAQGLEWAGLNRMHVANLSLGSPSPSATLEQAVNSATSRGVLVVAASGNSGAGSISYPARYANAMAVGATDQNNNRADFSQYGAGLDIVAPGVNVQSTYPGSTYASLNGTSMATPHVAGAAALVKQKNPSWSNVQIRNHLKNTATSLGSTNLYGSGLVNAEAATR

SEQ ID NO: 56915 - protein, 269 aa, Unidentified
AQSVPWGISRVQAPAAHNRGLTGSGVKVAVLDTGISTHPDLNIRGGASFVPGEPSTQDGNGHGTHVAGTIAALNNGIGVLGVAPSAELYAVKVLGASGSGSVSSIAQGLEWAGNNSMHVANLSLGSPSPSATLEQAVNSATSRGVLVVAASGNSGAGSISYPARYANAMAVGATDQNNNRADFSQYGAGLDIVAPGVNVQSTYPGSTYASLNGTSMATPHVAGAAALVKQKNPSWSNVRIRDRLKNTATSLGSTNLYGSGLVNAEAATR

SEQ ID NO: 56916 - protein, 269 aa, Unidentified
AQSVPWGISRVQAPAAHNRGLAGRGVKVAVLDTGISTHPDLNIRGGASFVPGEPSTQDGNGHGTHVAGTIAALNNSIGVLGVAPSAELYAVKVLGASGSGSVSSIAQGLEWAGLNGMHVANLSLGIPSPSATLEQAVNSATSRGVLVVAASGNSGEGSISYPARYANAMAVGATDQNNNRADFSQYGAGLDIVAPGVNVQSTYPGSTYASLNGTSMATPHVAGAAALVKQKNPSWSNVQIRNHLKNTATSLGSTNLYGSGLVNAEAATR

SEQ ID NO: 56917 - protein, 269 aa, Unidentified
AQSVPWGISRVQAPAAHNRRLTGRGVKVAVLDTGISTHPDLNIRGGASFVPGEPSTQDGNGHGTHVAGTIAALNNDIGVLGVAPSAELYAVKVLGASGSGSVSSIAQGLEWAGNNSMHVANLSLGSESPSATLEQAVNSATSRGVLVVAASGNSGAGSISYPARYANAMAVGATDQNNNRADFSQYGAGLDIVAPGVNVQSTYPGSTYASLNGTSMATPHVAGAAALVKQKNPSWSNVQIRNHLKNTATSLGSTNLYGSGLVNAEAATR

SEQ ID NO: 56918 - protein, 269 aa, Unidentified
AQSVPWGISRVQAPAAHNRGLTGRGVKVAVLDTGISTHPDLNIRGGASFVPGEPSTQDGEGHGTHVAGTIAALNNDIGVLGVAPSAELYAVKVLGASGSGSVSSIAQGLEWAGNNDMHVANLSLGSPSPSATLEQAVNSATSRGVLVVAASGNSGAGSISYPARYANAMAVGATDQNNNRASFSQYGAGLDIVAPGVNVQSTYPGSTYASLNGTSMATPHVAGAAALVKQKNPSWSNVQIRDRLKNTATSLGSTNLYGSGLVNAEAATR

SEQ ID NO: 56919 - protein, 269 aa, Unidentified
AQSVPWGISRVQAPAAHRRGLTGRGVKVAVLDTGISTHPDLNIRGGASFVPGEPSTQDGNGHGTHVAGTIAALDNSIGVLGVAPSAELYAVKVLGASGAGSVSSIAQGLEWAGNNGMHVANLSLGSPSPSATLEQAVNSATSRGVLVVAASGNSGAGSISYPARYANAMAVGATDQNNNRASFSQYGAGLDIVAPGVNVQSTYPGSTYFSLNGTSMATPHVAGAAALVKQKNPSWSNVQIRNRLKNTATSLGSTNLYGSGLVNAEAATR

SEQ ID NO: 56920 - protein, 269 aa, Unidentified
AQSVPWGISRVQAPAAHNRRLTGSGVKVAVLDTGISTHPDLNIRGGASFVPGEPSTQDGNGHGTHVAGTIAALNNSIGVLGVAPSAELYAVKVLGASGSGSVSSIAQGLEWAGNNRMHVANLSLGSESPSATLEQAVNSATSRGVLVVAASGNSGADSISYPARYANAMAVGATDQNNNRASFSQYGAGLDIVAPGVNVQSTYPGSTYASLNGTSMATPHVAGAAALVKQKNPSWSNVRIRDHLKNTATSLGSTNLYGSGLVNAEAATR

SEQ ID NO: 56921 - protein, 269 aa, Unidentified
AQSVPWGISRVQAPAAHRRRLTGRGVKVAVLDTGISTHPDLNIRGGASFVPGEPSTQDGNGHGTHVAGTIAALDNSIGVLGVAPSAELYAVKVLGASGSGSVSSIAQGLEWAGNNGMHVANLSLGSPSPSATLEQAVNSATSRGVLVLAASGNSGAGSISYPARYANAMAVGATDQNNNRASFSQYGAGLDIVAPGVNVQSTYPGSTYASLNGTSMATPHVAGAAALVKQKNPSWSNVQIRNRLKNTATSLGSTNLYGSGLVNAEAATR

SEQ ID NO: 56922 - protein, 269 aa, Unidentified
AQSVPWGISRVQAPAAHNRRLTGSGVKVAVLDTGISTHPDLNIRGGASFVPGEPSTQDGEGHGTHVAGTIAALNNGIGVLGVAPSAELYAVKVLGASGSGSVSSIAQGLEWAGNNSMHVANLSLGSPSPSATLEQAVNSATSRGVLVVAASGNSGADSISYPARYANAMAVGATDQNNNRASFSQYGAGLDIVAPGVNVQSTYPGSTYASLNGTSMATPHVAGAAALVKQKNPSWSNVRIRNHLKNTATSLGSTNLYGSGLVNAEAATR

SEQ ID NO: 56923 - protein, 269 aa, Unidentified
AQSVPWGISRVQAPAAHNRGLKGSGVKVAVLDTGISTHPDLNIRGGASFVPGEPSTQDGNGHGTHVAGTIAALNNSIGVLGVAPSAELYAVKVLGASGAGALSSIAQGLEWAGNNGMHVANLSLGSPSPSATLEQAVNSATSRGVLVVAASGNSGAGSISYPARYANAMAVGATDQNNNRASFSQYGAGLDIVAPGVNVQSTYPGSTYASLNGTSMATPHVAGAAMLVKQKNPSWSNVRIRNHLKNTATSLGSTNLYGSGLVNAEAATR

SEQ ID NO: 56924 - protein, 269 aa, Unidentified
AQSVPWGISRVQAPAAHNRGLRGSGVKVAVLDTGISTHPDLNIRGGASFVPGEPSTQDGNGHGTHVAGTIAALNNSIGVLGVAPSAELYAVKVLGASGNGNISSIAQGLEWAGNNGMHVANLSLGSPSPSATLEQAVNSATSRGVLVVAASGNSGAGSISYPARYANAMAVGATDQNNNRASFSQYGAGLDIVAPGVNVQSTYPGSTYASLNGTSMATPHVAGAAVLVKQKNPSWSNVRIRNHLKNTATSLGSTNLYGSGLVNAEAATR

SEQ ID NO: 56925 - protein, 269 aa, Bacillus Lentus
AQVVPWGISRVQAPTAHNRGLTGSGVKVAVLDTGISTHPDLNIRGGASFVPGEPSTQDGNGHGTHAAGTIAALNNSIGVLGVAPSAELYAVKVLGASGSGSVSSIAQGLEWAGNNGMHVANLSLGSPSPSATLEQAVNSATSRGVLVVAASGNSGAGSISYPARYANAMAVGATDQNNNRASFSQYGPGLDIVAPGVNVQSTYPGSTYASLNGTSMATPHVAGAAALVKQKNPSWSNVRIRNHLKNTATSLGSTDLYGSGLVNAEAATR

SEQ ID NO: 56926 - protein, 269 aa, Unidentified
AQSVPWGISRVQAPAAHNRRLTGRGVKVAVLDTGISTHPDLNIRGGASFVPGEPSTQDGNGHGTHVAGTIAALNNGIGVLGVAPSAELYAVKVLGASGSGSVSSIAQGLEWAGNNSMHVANLSLGSPSPSATLEQAVNSATSRGVLVVAASGNSGADSISYPARYANAMAVGATDQNNNRADFSQYGAGLDIVAPGVNVQSTYPGSTYASLNGTSMATPHVAGAAALVKQKNPSWSNVQIRNHLKNTATSLGSTNLYGSGLVNAEAATR

SEQ ID NO: 56927 - protein, 269 aa, Unidentified
AQSVPWGISRVQAPAAHNRGLYGSGVKVAVLDTGISTHPDLNIRGGASFVPGEPSTQDGNGHGTHVAGTIAALNNSIGVLGVAPSAELYAVKVLGASGTGNISSIAQGLEWAGNNGMHVANLSLGSPSPSATLEQAVNSATSRGVLVVAASGNSGAGSISYPARYANAMAVGATDQNNNRASFSQYGAGLDIVAPGVNVQSTYPGSTYASLNGTSMATPHVAGAAVLVKQKNPSWSNVRIRNHLKNTATSLGSTNLYGSGLVNAEAATR

SEQ ID NO: 56928 - protein, 269 aa, Unidentified
AQSVPWGISRVQAPAAHRRGLTGRGVKVAVLDTGISTHPDLNIRGGASFVPGEPSTQDGNGHGTHVAGTIAALDNSIGVLGVAPSAELYAVKVLGASGAGSVSSIAQGLEWAGANGMHVANLSLGSPSPSATLEQAVNSATSRGVLVVAASGNSGAGSISYPARYANAMAVGATDQNNNRASFSQYGAGLDIVAPGVNVQSTYPGSTYASLNGTSMATPHVAGAAALVKQKNPSWSNVQIRNRLKNTATSLGSTNLYGSGLVNAEAATR

SEQ ID NO: 56929 - protein, 269 aa, Unidentified
AQSVPWGISRVQAPAAHNRKLLGFGVKVAVLDTGISTHPDLNIRGGASFVPGEPSTQDGNGHGTHVAGTIAALNNNIGVLGVAPSAELYAVKVLGASGSGSVSSIAQGLEWAGNNGMHVANLSLGDPSPSATLEQAVNSATSRGVLVVAASGNSGAGSISYPARYANAMAVGATDQNNNRASFSQYGAGLDIVAPGVNVQSTYPGSAYASLNGTSMATPHVAGAAALVKQKNPSWSNVQIRNHLKNTATSLGSTNLYGSGLVNAEAATR

SEQ ID NO: 56930 - protein, 269 aa, Unidentified
AQSVPWGISRVQAPAAHNRGLTGSGVKVAVLDTGISTHPDLNIRGGASFVPGEPSTQDGNGHGTHVAGTIAALNNGIGVLGVAPSAELYAVKVLGASGSGSVSSIAQGLEWAGNNSMHVANLSLGSESPSATLEQAVNSATSRGVLVVAASGNSGADSISYPARYANAMAVGATDQNNNRADFSQYGAGLDIVAPGVNVQSTYPGSTYASLNGTSMATPHVAGAAALVKQKNPSWSNVRIRNHLKNTATSLGSTNLYGSGLVNAEAATR

SEQ ID NO: 56931 - protein, 269 aa, Unidentified
AQSVPWGISRVQAPAAHNRGLYGSGVKVAVLDTGISTHPDLNIRGGASFVPGEPSTQDGNGHGTHVAGTIAALNNSIGVLGVAPSAELYAVKVLGASGNGNLSSIAQGLEWAGNNGMHVANLSLGSPSPSATLEQAVNSATSRGVLVVAASGNSGAGSISYPARYANAMAVGATDQNNNRASFSQYGAGLDIVAPGVNVQSTYPGSTYASLNGTSMATPHVAGAATLVKQKNPSWSNVRIRNHLKNTATSLGSTNLYGSGLVNAEAATR

SEQ ID NO: 56932 - protein, 269 aa, Unidentified
AQSVPWGISRVQAPAAHNRGLAGSGVKVAVLDSGISTHPDLNIRGGASFVPGEPSTQDGEGHGTHVAGTIAALNNSIGVLGVAPSAELYAVKVLGASGSGSVSSIAQGLEWAGNNRMHVANLSLGSPSPSATLEQAVNSATSRGVLVVAASGNSGAGSIDYPARYANAMAVGATDQNNNRADFSQYGAGLDIVAPGVNVQSTYPGSTYASLNGTSMATPHVAGAAALVKQKNPSWSNVQIRNHLKNTATSLGSTNLYGSGLVNAEAATR

SEQ ID NO: 56933 - protein, 269 aa, Unidentified
AQSVPWGISRVQAPAAHRRGLTGRGVKVAVLDTGISTHPDLNIRGGASFVPGEPSTQDGNGHGTHVAGTIAALDNSIGVLGVAPSAELYAVKVLGASGSGSVSSIAQGLEWAGNNGMHVANLSLGSPSPSATLEQAVNSATSRGVLVVAASGNSGAGSISYPARYANAMAVGATDQDNNRASFSQYGAGLDLVAPGVNVQSTYPGSTYASLNGTSMATPHVAGAAALVKQKNPSWSNVQIRNRLKNTATSLGSTNLYGSGLVNAEAATR

SEQ ID NO: 56934 - protein, 269 aa, Unidentified
AQSVPWGISRVQAPAAHNRGLTGRGVKVAVLDTGISTHPDLNIRGGASFVPGEPSTQDGEGHGTHVAGTIAALNNGIGVLGVAPSAELYAVKVLGASGSGSVSSIAQGLEWAGNNDMHVANLSLGSPSPSATLEQAVNSATSRGVLVVAASGNSGAGSISYPARYANAMAVGATDQNNNRADFSQYGAGLDIVAPGVNVQSTYPGSTYASLNGTSMATPHVAGAAALVKQKNPSWSNVRIRNHLKNTATSLGSTNLYGSGLVNAEAATR

SEQ ID NO: 56935 - protein, 269 aa, Synthetic construct
AQSVPWGISRVQAPAAHNRGLTGSGVRVAVLDTGISTHPDLNIRGGASFVPGEPSTQDGNGHGTHVAGTIAALDNSIGVLGVAPSAELYAVKVLGASGSGSYSSIAQGLEWAGNNGMHVASLSLGSPSPSATLEQAVNSATSRGVLVVAASGNSGAGSISYPARYANAMAVGATDQNNNRASFSQYGAGLDIVAPGVNVQSTYPGSTYASLSGTSMATPHVAGAAALVKQKNPSWSNVQIRNHLKNTATSLGSTNLYGSGLVNAEAAAR

SEQ ID NO: 56936 - protein, 269 aa, Unidentified
AQSVPWGISRVQAPAAHNRGLLGSGVKVAVLDTGISTHPDLNIRGGASFVPGEPSTQDGNGHGTHVAGTIAALNNNIGVLGVAPSAELYAVKVLGASGSGSVSSIAQGLEWAGNNRMHVANLSLGDPSPSATLEQAVNSATSRGVLVVAASGNSGAGSIDYPARYANAMAVGATDQNNNRASFSQYGAGLDIVAPGVNVQSTYPGSAYASLNGTSMATPHVAGAAALVKQKNPSWSNVQIRNHLKNTATSLGSTNLYGSGLVNAEAATR

SEQ ID NO: 56937 - protein, 269 aa, Unidentified
AQSVPWGISRVQAPAAHNRGLAGSGVKVAVLDTGISTHPDLNIRGGASFVPGEPSTQDGNGHGTHVAGTIAALNNSIGVLGVAPSAELYAVKVLGASGGGNISSIAQGLEWAGNNGMHVANLSLGSPSPSATLEQAVNSATSRGVLVVAASGNSGAGSISYPARYANAMAVGATDQNNNRASFSQYGAGLDIVAPGVNVQSTYPGSTYASLNGTSMATPHVAGAAVLVKQKNPSWSNVRIRNHLKNTATSLGSTNLYGSGLVNAEAATR

SEQ ID NO: 56938 - protein, 269 aa, Unidentified
AQSVPWGISRVQAPAAHNRGLRGSGVKVAVLDTGISTHPDLNIRGGASFVPGEPSTQDGNGHGTHVAGTIAALNNSIGVLGVAPSAELYAVKVLGASGTGALSSIAQGLEWAGNNGMHVANLSLGSPSPSATLEQAVNSATSRGVLVVAASGNSGAGSISYPARYANAMAVGATDQNNNRASFSQYGAGLDIVAPGVNVQSTYPGSTYASLNGTSMATPHVAGAATLVKQKNPSWSNVRIRNHLKNTATSLGSTNLYGSGLVNAEAATR

SEQ ID NO: 56939 - protein, 269 aa, Unidentified
AQSVPWGISRVQAPAAHNRGLRGSGVKVAVLDTGISTHPDLNIRGGASFVPGEPSTQDGNGHGTHVAGTIAALNNSIGVLGVAPSAELYAVKVLGASGNGNLSSIAQGLEWAGNNGMHVANLSLGSPSPSATLEQAVNSATSRGVLVVAASGNSGAGSISYPARYANAMAVGATDQNNNRASFSQYGAGLDIVAPGVNVQSTYPGSTYASLNGTSMATPHVAGAAMLVKQKNPSWSNVWIRNHLKNTATSLGSTNLYGSGLVNAEAATR

SEQ ID NO: 56940 - protein, 269 aa, Unidentified
AQSVPWGISRVQAPAAHNRGLTGRGVKVAVLDTGISTHPDLNIRGGASFVPGEPSTQDGNGHGTHVAGTIAALDNNIGVLGVAPDAELYAVKVLGASGSGSVSSIAQGLEWAGNNRMHVANLSLGSPSPSATLEQAVNSATSRGVLVVAASGNSGAGSISYPARYANAMAVGATDQNNNRASFSQYGAGLDIVAPGVNVQSTYPGSTYASLNGTSQATPHVAGAAALVKQKNPSWSNVQIRNRLKNTATSLGSTNLYGSGLVNAEAATR

SEQ ID NO: 56941 - protein, 269 aa, Unidentified
AQSVPWGISRVQAPAAHNRGLTGRGVKVAVLDSGISTHPDLNIRGGASFVPGEPSTQDGEGHGTHVAGTIAALNNSIGVLGVAPSAELYAVKVLGASGSGSVSSIAQGLEWAGLNGMHVANLSLGIPSPSATLEQAVNSATSRGVLVVAASGNSGEGSISYPARYANAMAVGATDQNNNRASFSQYGAGLDIVAPGVNVQSTYPGSTYASLNGTSMATPHVAGAAALVKQKNPSWSNVQIRNHLKNTATSLGSTNLYGSGLVNAEAATR

SEQ ID NO: 56942 - protein, 269 aa, Unidentified
AQSVPWGISRVQAPAAHNRGLQGSGVKVAVLDTGISTHPDLNIRGGASFVPGEPSTQDGNGHGTHVAGTIAALNNSIGVLGVAPSAELYAVKVLGASGGGAISSIAQGLEWAGNNGMHVANLSLGSPSPSATLEQAVNSATSRGVLVVAASGNSGAGSISYPARYANAMAVGATDQNNNRASFSQYGAGLDIVAPGVNVQSTYPGSTYASLNGTSMATPHVAGAAMLVKQKNPSWSNVSIRNHLKNTATSLGSTNLYGSGLVNAEAATR

SEQ ID NO: 56943 - protein, 269 aa, Unidentified
AQSVPWGISRVQAPAAHNRRLTGSGVKVAVLDTGISTHPDLNIRGGASFVPGEPSTQDGNGHGTHVAGTIAALNNGIGVLGVAPSAELYAVKVLGASGSGSVSSIAQGLEWAGNNSMHVANLSLGSPSPSATLEQAVNSATSRGVLVVAASGNSGADSISYPARYANAMAVGATDQNNNRADFSQYGAGLDIVAPGVNVQSTYPGSTYASLNGTSMATPHVAGAAALVKQKNPSWSNVQIRNRLKNTATSLGSTNLYGSGLVNAEAATR

SEQ ID NO: 56944 - protein, 269 aa, Unidentified
AQSVPWGISRVQAPAAHNRGLTGRGVKVAVLDTGISTHPDLNIRGGASFVPGEPSTQDGNGHGTHVAGTIAALNNDIGVLGVAPSAELYAVKVLGASGSGSVSSIAQGLEWAGNNDMHVANLSLGSESPSATLEQAVNSATSRGVLVVAASGNSGAGSISYPARYANAMAVGATDQNNNRASFSQYGAGLDIVAPGVNVQSTYPGSTYASLNGTSMATPHVAGAAALVKQKNPSWSNVRIRNRLKNTATSLGSTNLYGSGLVNAEAATR

SEQ ID NO: 56945 - protein, 269 aa, Unidentified
AQSVPWGISRVQAPAAHNRRLTGRGVKVAVLDTGISTHPDLNIRGGASFVPGEPSTQDGNGHGTHVAGTIAALNNNIGVLGVAPSAELYAVKVLGASGQGSVSSIANGLEWAGLNGMHVANLSLGSPSPSATLEQAVNSATSRGVLVVAASGNSGAGSISYPARYANAMAVGATDQNNNRASFSQYGAGLDIVAPGVNVQSTYPGSTYASLNGTSMATPHVAGAAALVKQKNPSWSNVQIRNHLKNTATSLGSTNLYGSGLVNAEAATR

SEQ ID NO: 56946 - protein, 269 aa, Unidentified
AQSVPWGISRVQAPAAHNRRLTGSGVKVAVLDTGISTHPDLNIRGGASFVPGEPSTQDGNGHGTHVAGTIAALNNGIGVLGVAPSAELYAVKVLGASGSGSVSSIAQGLEWAGNNSMHVANLSLGSPSPSATLEQAVNSATSRGVLVVAASGNSGADSISYPARYANAMAVGATDQNNNRASFSQYGAGLDIVAPGVNVQSTYPGSTYASLNGTSMATPHVAGAAALVKQKNPSWSNVRIRNRLKNTATSLGSTNLYGSGLVNAEAATR

SEQ ID NO: 56947 - protein, 269 aa, Unidentified
AQSVPWGISRVQAPAAHNRGLTGRGVKVAVLDTGISTHPDLNIRGGASFVPGEPSTQDGNGHGTHVAGTIAALNNGIGVLGVAPSAELYAVKVLGASGSGSVSSIAQGLEWAGNNDMHVANLSLGSESPSATLEQAVNSATSRGVLVVAASGNSGAGSISYPARYANAMAVGATDQNNNRADFSQYGAGLDIVAPGVNVQSTYPGSTYASLNGTSMATPHVAGAAALVKQKNPSWSNVRIRNHLKNTATSLGSTNLYGSGLVNAEAATR

SEQ ID NO: 56948 - protein, 269 aa, Unidentified
AQSVPWGISRVQAPAAHNRGLYGSGVKVAVLDTGISTHPDLNIRGGASFVPGEPSTQDGNGHGTHVAGTIAALNNSIGVLGVAPSAELYAVKVLGASGAGAISSIAQGLEWAGNNGMHVANLSLGSPSPSATLEQAVNSATSRGVLVVAASGNSGAGSISYPARYANAMAVGATDQNNNRASFSQYGAGLDIVAPGVNVQSTYPGSTYASLNGTSMATPHVAGAATLVKQKNPSWSNVSIRNHLKNTATSLGSTNLYGSGLVNAEAATR

SEQ ID NO: 56949 - protein, 269 aa, Unidentified
AQSVPWGISRVQAPAAHNRRLTGSGVKVAVLDTGISTHPDLNIRGGASFVPGEPSTQDGNGHGTHVAGTIAALNNDIGVLGVAPSAELYAVKVLGASGSGSVSSIAQGLEWAGNNDMHVANLSLGSESPSATLEQAVNSATSRGVLVVAASGNSGAGSISYPARYANAMAVGATDQNNNRADFSQYGAGLDIVAPGVNVQSTYPGSTYASLNGTSMATPHVAGAAALVKQKNPSWSNVRIRNHLKNTATSLGSTNLYGSGLVNAEAATR

SEQ ID NO: 56950 - protein, 269 aa, Unidentified
AQSVPWGISRVQAPAAHNRGLTGSGVKVAVLDTGISTHPDLNIRGGASFVPGEPSTQDGNGHGTHVAGTIAALNNSIGVLGVAPNAELYAVKVLGASGSGSVSSIAQGLEWAGNNVMHVANLSLGLQAPSATLEQAVNSATSRGVLVVAASGNSGAGSIDYPARYANAMAVGATDQNNNRASFSQYGAGLDIVAPGVNVQSTYPGSTYASLNGTSMATPHVAGAAALVKQKNPSWSNVQIRNHLKNTATSLGSTNLYGSGLVNAEAATR

SEQ ID NO: 56951 - protein, 269 aa, Unidentified
AQSVPWGISRVQAPAAHNRGLTGSGVKVAVLDTGISTHPDLNIRGGASFVPGEPSTQDGNGHGTHVAGTIAALDNSIGVLGVAPSAELYAVKVLGASGGGAISSIAQGLEWAGNNGMHVANLSLGSPSPSATLEQAVNSATSRGVLVVAASGNSGAGSISYPARYANAMAVGATDQNNNRASFSQYGAGLDIVAPGVNVQSTYPGSTYASLNGTSMATPHVAGAAVLVKQKNPSWSNVRIRNHLKNTATSLGSTNLYGSGLVNAEAATR

SEQ ID NO: 56952 - protein, 269 aa, Unidentified
AQSVPWGISRVQAPAAHRRGLTGRGVKVAVLDTGISTHPDLNIRGGASFVPGEPSTQDGNGHGTHVAGTIAALNNSIGVLGVAPRAELYAVKVLGASGSGSVSSIAQGLEWAGNNGMHVANLSLGSPSPSATLEQAVNSATSRGVLVVAASGNSGAGSISYPARYANAMAVGATDQNNNRASFSQYGAGLDIVAPGVNVLSTWPGSAYASLNGTSMATPHVAGAAALVKQKNPSWSNVQIRNHLKNTATSLGSTNLYGSGLVNAEAATR

SEQ ID NO: 56953 - protein, 269 aa, Unidentified
AQSVPWGISRVQAPAAHNRGLTGSGVKVAVLDSGISTHPDLNIRGGASFVPGEPSTQDGNGHGTHVAGTIAALNNSIGVLGVAPSAELYAVKVLGASGSGSVSSIAQGLEWAGLNRMHVANLSLGSPSPSATLEQAVNSATSRGVLVVAASGNSGEGSIDYPARYANAMAVGATDQNNNRADFSQYGAGLDIVAPGVNVQSTYPGSTYASLNGTSMATPHVAGAAALVKQKNPSWSNVQIRNHLKNTATSLGSTNLYGSGLVNAEAATR

SEQ ID NO: 56954 - protein, 269 aa, Unidentified
AQSVPWGISRVQAPAAHNRGLTGGGVKVAVLDTGISTHPDLNIRGGASFVPGEPSTQDGNGHGTHVAGTIAALNNNIGVLGVAPSAELYAVKVLGASGGGSVSSIAGGLEWAGNNGMHVANLSLGAPSPSATLEQAVNSATSRGVLVVAASGNSGAGSISYPARYANAMAVGATDQNNNRASFSQYGAGLDIVAPGVNVQSTYPGSTYASQNGTSMATPHVAGAAALVKQKNPSWSNVQIRNHLKNTATSLGSTNLYGSGLVNAEAATR

SEQ ID NO: 56955 - protein, 269 aa, Unidentified
AQSVPWGISRVQAPAAHNRGLAGSGVKVAVLDTGISTHPDLNIRGGASFVPGEPSTQDGNGHGTHVAGTIAALNNSIGVLGVAPSAELYAVKVLGASGGGNLSSIAQGLEWAGNNGMHVANLSLGSPSPSATLEQAVNSATSRGVLVVAASGNSGAGSISYPARYANAMAVGATDQNNNRASFSQYGAGLDIVAPGVNVQSTYPGSTYASLNGTSMATPHVAGAATLVKQKNPSWSNVRIRNHLKNTATSLGSTNLYGSGLVNAEAATR

SEQ ID NO: 56956 - protein, 269 aa, Unidentified
AQSVPWGISRVQAPAAHNRGLTGSGVKVAVLDTGISTHPDLNIRGGASFVPGEPSTQDGNGHGTHVAGTIAALNNSIGVLGVAPSAELYAVKVLGADGRGAISSIAQGLEWAGNNGMHVANLSLGSPSPSATLEQAVNSATSRGVLVVAASGNSGASSISYPARYANAMAVGATDQNNNRASFSQYGAGLDIVAPGVNVQSTYPGSTYASLNGTSMATPHVAGVAALVKQKNPSWSNVQIRNHLKNTATSLGSTNLYGSGLVNAEAATR

SEQ ID NO: 56957 - protein, 269 aa, Unidentified
AQSVPWGISRVQAPAAHNRGLTGRGVKVAVLDTGISTHPDLNIRGGASFVPGEPSTQDGEGHGTHVAGTIAALNNDIGVLGVAPSAELYAVKVLGASGSGSVSSIAQGLEWAGNNSMHVANLSLGSPSPSATLEQAVNSATSRGVLVVAASGNSGAGSISYPARYANAMAVGATDQNNNRADFSQYGAGLDIVAPGVNVQSTYPGSTYASLNGTSMATPHVAGAAALVKQKNPSWSNVQIRDHLKNTATSLGSTNLYGSGLVNAEAATR

SEQ ID NO: 56958 - protein, 269 aa, Unidentified
AQSVPWGISRVQAPAAHNRGLTGSGVKVAVLDTGISTHPDLNIRGGASFVPGEPSTQDGNGHGTHVAGTIAALNNNIGVLGVAPSAELYAVKVLAASGGGSVSSIAGGLEWAGNNGMHVANLSLGSPSPSATLEQAVNSATSRGVLVVAASGNSGAGSISYPARYANAMAVGATDQNNNRADFSQYGAGLDIVAPGVNVQSTYPGSTYASQNGTSMATPHVAGAAALVKQKNPSWSNVQIRNHLKNTATSLGSTNLYGSGLVNAEAATR

SEQ ID NO: 56959 - protein, 269 aa, Unidentified
AQSVPWGISRVQAPAAHNRRLTGSGVKVAVLDTGISTHPDLNIRGGASFVPGEPSTQDGEGHGTHVAGTIAALNNDIGVLGVAPSAELYAVKVLGASGSGSVSSIAQGLEWAGNNSMHVANLSLGSPSPSATLEQAVNSATSRGVLVVAASGNSGAGSISYPARYANAMAVGATDQNNNRADFSQYGAGLDIVAPGVNVQSTYPGSTYASLNGTSMATPHVAGAAALVKQKNPSWSNVQIRDHLKNTATSLGSTNLYGSGLVNAEAATR

SEQ ID NO: 56960 - protein, 269 aa, Unidentified
AQSVPWGISRVQAPAAHNRKLLGFGVKVAVLDTGISTHPDLNIRGGASFVPGEPSTQDGNGHGTHVAGTIAALNNSIGVLGVAPSAELYAVKVLGASGSGSVSSIAQGLEWAGNNGMHVANLSLGDPSPSATLEQAVNSATSRGVLVVAASGNSGAGSIDYPARYANAMAVGATDQNNNRASFSQYGAGLDIVAPGVNVQSTYPGSTYASENGTSMATPHVAGAAALVKQKNPSWSNVQIRNHLKNTATSLGSTNLYGSGLVNAEAATR

SEQ ID NO: 56961 - protein, 269 aa, Unidentified
AQSVPWGISRVQAPAAHNRKLTGSGVKVAVLDTGISTHPDLNIRGGASFVPGEPSTQDGEGHGTHVAGTIAALNNSIGVLGVAPSAELYAVKVLSASGNGSVSSIAQGLEWAGLNGMHVANLSLGSPSPSATLEQAVNSATSRGVLVVAASGNSGAGSISYPARYANAMAVGATDQNNNRASFSQYGAGLDIVAPGVNVQSTYPGSTYASQNGTSMATPHVAGAAALVKQKNPSWSNVQIRNHLKNTATSLGSTNLYGSGLVNAEAATR

SEQ ID NO: 56962 - protein, 269 aa, Unidentified
AQSVPWGISRVQAPAAHNRKLTASGVKVAVLDTGISTHPDLNIRGGASFVPGEPSTQDGEGHGTHVAGTIAALNNSIGVLGVAPSAELYAVKVLGASGSGSVSSIAQGLEWAGLNGMHVANLSLGSPSPSATLEQAVNSATSRGVLVVAASGNSGAGSISYPARYANAMAVGATDQNNNRADFSQYGAGLDIVAPGVNVQSTYPGSAYASLNGTSMATPHVAGAAALVKQKNPSWSNVQIRNHLKNTATSLGSTNLYGSGLVNAEAATR

SEQ ID NO: 56963 - protein, 269 aa, Unidentified
AQSVPWGISRVQAPAAHNRRLWGRGVKVAVLDTGISTHPDLNIRGGASFVPGEPSTQDGNGHGTHVAGTIAALNNSIGVLGVAPSAELYAVKVLGASGAGSVSSIAQGLEWAGNNGMHVANLSLGSPSPSATLEQAVNSATSRGVLVVAASGNSGAGSISYPARYANAMAVGATDQNNNRASFSQYGAGLDIVAPGVNVQSTYIGSAYASLNGTSMATPHVAGAAALVKQKNPSWSNVQIRNHLKNTATSLGSTNLYGSGLVNAEAATR

SEQ ID NO: 56964 - protein, 269 aa, Unidentified
AQSVPWGISRVQAPAAHNRRLTGRGVKVAVLDTGISTHPDLNIRGGASFVPGEPSTQDGNGHGTHVAGTIAALNNSIGVLGVAPSAELYAVKVLAASGGGSVSSIANGLEWAGNNGMHVANLSLGAPSPSATLEQAVNSATSRGVLVVAASGNSGAGSISYPARYANAMAVGATDQNNNRASFSQYGAGLDIVAPGVNVQSTYPGSTYASLNGTSMATPHVAGAAALVKQKNPSWSNVQIRNHLKNTATSLGSTNLYGSGLVNAEAATR

SEQ ID NO: 56965 - protein, 269 aa, Unidentified
AQSVPWGISRVQAPAAHNRRLTGSGVKVAVLDTGISTHPDLNIRGGASFVPGEPSTQDGEGHGTHVAGTIAALNNDIGVLGVAPSAELYAVKVLGASGSGSVSSIAQGLEWAGNNDMHVANLSLGSESPSATLEQAVNSATSRGVLVVAASGNSGAGSISYPARYANAMAVGATDQNNNRASFSQYGAGLDIVAPGVNVQSTYPGSTYASLNGTSMATPHVAGAAALVKQKNPSWSNVRIRNHLKNTATSLGSTNLYGSGLVNAEAATR

SEQ ID NO: 56966 - protein, 269 aa, Unidentified
AQSVPWGISRVQAPAAHNRKLTGGGVKVAVLDTGISTHPDLNIRGGASFVPGEPSTQDGEGHGTHVAGTIAALNNSIGVLGVAPSAELYAVKVLSASGQGSVSSIAQGLEWAGLNGMHVANLSLGSPSPSATLEQAVNSATSRGVLVVAASGNSGAGSISYPARYANAMAVGATDQNNNRASFSQYGAGLDIVAPGVNVQSTYPGSTYASLNGTSMATPHVAGAAALVKQKNPSWSNVQIRNHLKNTATSLGSTNLYGSGLVNAEAATR

SEQ ID NO: 56967 - protein, 269 aa, Unidentified
AQSVPWGISRVQAPAAHNRGLTGSGVKVAVLDTGISTHPDLNIRGGASFVPGEPSTQDGNGHGTHVAGTIAALNNSIGVLGVAPSAELYAVKVLGASGGGAISSIAQGLEWAGNNGMHVANLSLGSPSPSATLEQAVNSATSRGVLVVAASGNSGAGSISYPARYANAMAVGATDQNNNRASFSQYGAGLDIVAPGVNVQSTYPGFTYASLNGTSMATPHVAGAAVLVKQKNPSWSNVRIRNHLKNTATSLGSTNLYGSGLVNAEAATR

SEQ ID NO: 56968 - protein, 269 aa, Unidentified
AQSVPWGISRVQAPAAHNRGLYGSGVKVAVLDTGISTHPDLNIRGGASFVPGEPSTQDGNGHGTHVAGTIAALNNSIGVLGVAPSAELYAVKVLGASGAGAISSIAQGLEWAGNNGMHVANLSLGSPSPSATLEQAVNSATSRGVLVVAASGNSGAGSISYPARYANAMAVGATDQNNNRASFSQYGAGLDIVAPGVNVQSTYPGSTYASLNGTSMATPHVAGAAMLVKQKNPSWSNVSIRNHLKNTATSLGSTNLYGSGLVNAEAATR

SEQ ID NO: 56969 - protein, 269 aa, Unidentified
AQSVPWGISRVQAPAAHNRGLQGSGVKVAVLDTGISTHPDLNIRGGASFVPGEPSTQDGNGHGTHVAGTIAALNNSIGVLGVAPSAELYAVKVLGASGNGALSSIAQGLEWAGNNGMHVANLSLGSPSPSATLEQAVNSATSRGVLVVAASGNSGAGSISYPARYANAMAVGATDQNNNRASFSQYGAGLDIVAPGVNVQSTYPGSTYASLNGTSMATPHVAGAALLVKQKNPSWSNVRIRNHLKNTATSLGSTNLYGSGLVNAEAATR

SEQ ID NO: 56970 - protein, 269 aa, Unidentified
AQSVPWGISRVQAPAAHNRRLTGSGVKVAVLDTGISTHPDLNIRGGASFVPGEPSTQDGEGHGTHVAGTIAALNNGIGVLGVAPSAELYAVKVLGASGSGSVSSIAQGLEWAGNNSMHVANLSLGSPSPSATLEQAVNSATSRGVLVVAASGNSGADSISYPARYANAMAVGATDQNNNRASFSQYGAGLDIVAPGVNVQSTYPGSTYASLNGTSMATPHVAGAAALVKQKNPSWSNVQIRNRLKNTATSLGSTNLYGSGLVNAEAATR

SEQ ID NO: 56971 - protein, 269 aa, Unidentified
AQSVPWGISRVQAPAAHNRGLTGSGVKVAVLDTGISTHPDLNIRGGASFVPGEPSTQDGNGHGTHVAGTIAALNNSIGVLGVAPSAELYAVKVLGADGRGAISSIAQGLEWAGNNGMHVANLSLGSPSPSATLEQAVNSATSRGVLVVAASGNSGASSISYPARYANAMAVGATDQNNNRASFSQYGAGLDIVAPGVNVQSTYPGSTYASLNGTSMATPHVAGAAALVKQKNPSWSNPQIRNHLKNTATSLGSTNLYGSGLVNAEAATR

SEQ ID NO: 56972 - protein, 269 aa, Unidentified
AQSVPWGISRVQAPAAHNRGLRGSGVKVAVLDTGISTHPDLNIRGGASFVPGEPSTQDGNGHGTHVAGTIAALNNSIGVLGVAPSAELYAVKVLGASGTGNISSIAQGLEWAGNNGMHVANLSLGSPSPSATLEQAVNSATSRGVLVVAASGNSGAGSISYPARYANAMAVGATDQNNNRASFSQYGAGLDIVAPGVNVQSTYPGSTYASLNGTSMATPHVAGAATLVKQKNPSWSNVSIRNHLKNTATSLGSTNLYGSGLVNAEAATR

SEQ ID NO: 56973 - protein, 269 aa, Unidentified
AQSVPWGISRVQAPAAHNRGLQGSGVKVAVLDTGISTHPDLNIRGGASFVPGEPSTQDGNGHGTHVAGTIAALNNSIGVLGVAPSAELYAVKVLGASGAGNISSIAQGLEWAGNNGMHVANLSLGSPSPSATLEQAVNSATSRGVLVVAASGNSGAGSISYPARYANAMAVGATDQNNNRASFSQYGAGLDIVAPGVNVQSTYPGSTYASLNGTSMATPHVAGAATLVKQKNPSWSNVRIRNHLKNTATSLGSTNLYGSGLVNAEAATR

SEQ ID NO: 56974 - protein, 269 aa, Unidentified
AQSVPWGISRVQAPAAHNRGLQGSGVKVAVLDTGISTHPDLNIRGGASFVPGEPSTQDGNGHGTHVAGTIAALNNSIGVLGVAPSAELYAVKVLGASGAGAISSIAQGLEWAGNNGMHVANLSLGSPSPSATLEQAVNSATSRGVLVVAASGNSGAGSISYPARYANAMAVGATDQNNNRASFSQYGAGLDIVAPGVNVQSTYPGSTYASLNGTSMATPHVAGAALLVKQKNPSWSNVRIRNHLKNTATSLGSTNLYGSGLVNAEAATR

SEQ ID NO: 56975 - protein, 269 aa, Unidentified
AQSVPWGISRVQAPAAHNRGLYGSGVKVAVLDTGISTHPDLNIRGGASFVPGEPSTQDGNGHGTHVAGTIAALNNSIGVLGVAPSAELYAVKVLGASGNGNISSIAQGLEWAGNNGMHVANLSLGSPSPSATLEQAVNSATSRGVLVVAASGNSGAGSISYPARYANAMAVGATDQNNNRASFSQYGAGLDIVAPGVNVQSTYPGSTYASLNGTSMATPHVAGAAVLVKQKNPSWSNVRIRNHLKNTATSLGSTNLYGSGLVNAEAATR

SEQ ID NO: 56976 - protein, 269 aa, Unidentified
AQSVPWGISRVQAPAAHNRKLLGFGVKVAVLDTGISTHPDLNIRGGASFVPGEPSTQDGNGHGTHVAGTIAALNNSIGVLGVAPSAELYAVKVLGASGSGSVSSIAQGLEWAGNNGMHVANLSLGDPSPSATLEQAVNSATSRGVLVVAASGNSGAGSIDYPARYANAMAVGATDQNNNRASFSQYGAGLDIVAPGVNVQSTYPGSAYASLNGTSMATPHVAGAAALVKQKNPSWSNVQIRNHLKNTATSLGSTNLYGSGLVNAEAATR

SEQ ID NO: 56977 - protein, 269 aa, Unidentified
AQSVPWGISRVQAPAAHNRGLRGSGVKVAVLDTGISTHPDLNIRGGASFVPGEPSTQDGNGHGTHVAGTIAALNNSIGVLGVAPSAELYAVKVLGASGTGAISSIAQGLEWAGNNGMHVANLSLGSPSPSATLEQAVNSATSRGVLVVAASGNSGAGSISYPARYANAMAVGATDQNNNRASFSQYGAGLDIVAPGVNVQSTYPGSTYASLNGTSMATPHVAGAATLVKQKNPSWSNVSIRNHLKNTATSLGSTNLYGSGLVNAEAATR

SEQ ID NO: 56978 - protein, 269 aa, Unidentified
AQSVPWGISRVQAPAAHNRGLAGSGVKVAVLDTGISTHPDLNIRGGASFVPGEPSTQDGNGHGTHVAGTIAALNNSIGVLGVAPSAELYAVKVLGASGAGAISSIAQGLEWAGNNGMHVANLSLGSPSPSATLEQAVNSATSRGVLVVAASGNSGAGSISYPARYANAMAVGATDQNNNRASFSQYGAGLDIVAPGVNVQSTYPGSTYASLNGTSMATPHVAGAAMLVKQKNPSWSNVSIRNHLKNTATSLGSTNLYGSGLVNAEAATR

SEQ ID NO: 56979 - protein, 269 aa, Unidentified
AQSVPWGISRVQAPAAHNRGLTGSGVKVAVLDTGISTHPDLNIRGGASFVPGEPSTQDGNGHGTHVAGTIAALNNSIGVLGVAPSAELYAVKVLGADGRGAISSIAQGLEWAGNNGMHVANLSLGSPSPSATLEQAVNSATSRGVLVVAASGNEGASSISYPARYANAMAVGATDQNNNRASFSQYGAGLDIVAPGVNVQSTYPGSTYASLNGTSMATPHVAGAAALVKQKNPSWSNVQIRNHLKNTATSLGSTNLYGSGLVNAEAATR

SEQ ID NO: 56980 - protein, 269 aa, Unidentified
AQSVPWGISRVQAPAAHNRGLRGSGVKVAVLDTGISTHPDLNIRGGASFVPGEPSTQDGNGHGTHVAGTIAALNNSIGVLGVAPSAELYAVKVLGASGNGGISSIAQGLEWAGNNGMHVANLSLGSPSPSATLEQAVNSATSRGVLVVAASGNSGAGSISYPARYANAMAVGATDQNNNRASFSQYGAGLDIVAPGVNVQSTYPGSTYASLNGTSMATPHVAGAAVLVKQKNPSWSNVWIRNHLKNTATSLGSTNLYGSGLVNAEAATR

SEQ ID NO: 56981 - protein, 269 aa, Unidentified
AQSVPWGISRVQAPAAHNRRLTGRGVKVAVLDTGISTHPDLNIRGGASFVPGEPSTQDGNGHGTHVAGTIAALNNGIGVLGVAPSAELYAVKVLGASGSGSVSSIAQGLEWAGNNDMHVANLSLGSPSPSATLEQAVNSATSRGVLVVAASGNSGAGSISYPARYANAMAVGATDQNNNRADFSQYGAGLDIVAPGVNVQSTYPGSTYASLNGTSMATPHVAGAAALVKQKNPSWSNVQIRNRLKNTATSLGSTNLYGSGLVNAEAATR

SEQ ID NO: 56982 - protein, 269 aa, Unidentified
AQSVPWGISRVQAPAAHNRGLLGFGVKVAVLDTGISTHPDLHIRGGASFVPGEPSTQDGNGHGTHVAGTIAALNNSIGVLGVAPSAELYAVKVLGASGSGSVSSIAQGLEWAGNNRMHVANLSLGDPSPSATLEQAVNSATSRGVLVVAASGNSGAGSIDYPARYANAMAVGATDQNNNRASFSQYGAGLDIVAPGVNVQSTYPGSTYASLNGTSMATPHVAGAAALVKQKNPSWSNVQIRNHLKNTATSLGSTNLYGSGLVNAEAATR

SEQ ID NO: 56983 - protein, 269 aa, Unidentified
AQSVPWGISRVQAPAAHNRKLLGFGVKVAVLDTGISTHPDLNIRGGASFVPGEPSTQDGNGHGTHVAGTIAALNNNIGVLGVAPSAELYAVKVLGASGSGSVSSIAQGLEWAGNNGMHVANLSLGDPSPSATLEQAVNSATSRGVLVVAASGNSGAGSIDYPARYANAMAVGATDQNNNRASFSQYGAGLDIVAPGVNVQSTYPGSTYASLNGTSMATPHVAGAAALVKQKNPSWSNVQIRNHLKNTATSLGSTNLYGSGLVNAEAATR

SEQ ID NO: 56984 - protein, 269 aa, Unidentified
AQSVPWGISRVQAPAAHNRGLTAFGVKVAVLDTGISTHPDLNIRGGASFVPGEPSTQDGNGHGTHVAGTIAALNNSIGVLGVAPSAELYAVKVLGASGSGSVSSIAQGLEWAGLNRMHVANLSLGSPSPSATLEQAVNSATSRGVLVVAASGNSGAGSISYPARYANAMAVGATDQNNNRADFSQYGAGLDIVAPGVNVQSTYPGSAYASLNGTSMATPHVAGAAALVKQKNPSWSNVQIRNHLKNTATSLGSTNLYGSGLVNAEAATR

SEQ ID NO: 56985 - protein, 269 aa, Unidentified
AQSVPWGISRVQAPAAHNRGLKGSGVKVAVLDTGISTHPDLNIRGGASFVPGEPSTQDGNGHGTHVAGTIAALNNSIGVLGVAPSAELYAVKVLGASGAGAISSIAQGLEWAGNNGMHVANLSLGSPSPSATLEQAVNSATSRGVLVVAASGNSGAGSISYPARYANAMAVGATDQNNNRASFSQYGAGLDIVAPGVNVQSTYPGSTYASLNGTSMATPHVAGAAVLVKQKNPSWSNVWIRNHLKNTATSLGSTNLYGSGLVNAEAATR

SEQ ID NO: 56986 - protein, 269 aa, Unidentified
AQSVPWGISRVQAPAAHNRGLYGSGVKVAVLDTGISTHPDLNIRGGASFVPGEPSTQDGNGHGTHVAGTIAALNNSIGVLGVAPSAELYAVKVLGASGGGAISSIAQGLEWAGNNGMHVANLSLGSPSPSATLEQAVNSATSRGVLVVAASGNSGAGSISYPARYANAMAVGATDQNNNRASFSQYGAGLDIVAPGVNVQSTYPGSTYASLNGTSMATPHVAGAAMLVKQKNPSWSNVRIRNHLKNTATSLGSTNLYGSGLVNAEAATR

SEQ ID NO: 56987 - protein, 269 aa, Unidentified
AQSVPWGISRVQAPAAHNRGLRGSGVKVAVLDTGISTHPDLNIRGGASFVPGEPSTQDGNGHGTHVAGTIAALNNSIGVLGVAPSAELYAVKVLGASGNGNLSSIAQGLEWAGNNGMHVANLSLGSPSPSATLEQAVNSATSRGVLVVAASGNSGAGSISYPARYANAMAVGATDQNNNRASFSQYGAGLDIVAPGVNVQSTYPGSTYASLNGTSMATPHVAGAAMLVKQKNPSWSNVRIRNHLKNTATSLGSTNLYGSGLVNAEAATR

SEQ ID NO: 56988 - protein, 269 aa, Unidentified
AQSVPWGISRVQAPAAHNRGLYGSGVKVAVLDTGISTHPDLNIRGGASFVPGEPSTQDGNGHGTHVAGTIAALNNSIGVLGVAPSAELYAVKVLGASGAGGISSIAQGLEWAGNNGMHVANLSLGSPSPSATLEQAVNSATSRGVLVVAASGNSGAGSISYPARYANAMAVGATDQNNNRASFSQYGAGLDIVAPGVNVQSTYPGSTYASLNGTSMATPHVAGAAMLVKQKNPSWSNVRIRNHLKNTATSLGSTNLYGSGLVNAEAATR

SEQ ID NO: 56989 - protein, 269 aa, Unidentified
AQSVPWGISRVQAPAAHNRGLTGFGVKVAVLDTGISTHPDLNIRGGASFVPGEPSTQDGNGHGTHVAGTIAALNNSIGVLGVAPSAELYAVKVLGASGSASVSSIAQGLEWAGNNGMHVANLSLGSPSPSATLEQAVNSATSRGVLVVAASGNSGAGSISYPARYANAMAVGATDQNNNKASFSQYGAGLDIVAPGVNVQSTYPGSAYASENGTSMATPHVAGAAALVKQKNPSWSFVQIRNHLKNTATSLGSTNLYGSGLVNAEAATR

SEQ ID NO: 56990 - protein, 269 aa, Unidentified
AQSVPWGISRVQAPAAHNRGLQGSGVKVAVLDTGISTHPDLNIRGGASFVPGEPSTQDGNGHGTHVAGTIAALNNSIGVLGVAPSAELYAVKVLGASGGGALSSIAQGLEWAGNNGMHVANLSLGSPSPSATLEQAVNSATSRGVLVVAASGNSGAGSISYPARYANAMAVGATDQNNNRASFSQYGAGLDIVAPGVNVQSTYPGSTYASLNGTSMATPHVAGAAMLVKQKNPSWSNVRIRNHLKNTATSLGSTNLYGSGLVNAEAATR

SEQ ID NO: 56991 - protein, 269 aa, Unidentified
AQSVPWGISRVQAPAAHNRGLAGSGVKVAVLDTGISTHPDLNIRGGASFVPGEPSTQDGNGHGTHVAGTIAALNNSIGVLGVAPSAELYAVKVLGASGNGNISSIAQGLEWAGNNGMHVANLSLGSPSPSATLEQAVNSATSRGVLVVAASGNSGAGSISYPARYANAMAVGATDQNNNRASFSQYGAGLDIVAPGVNVQSTYPGSTYASLNGTSMATPHVAGAATLVKQKNPSWSNVRIRNHLKNTATSLGSTNLYGSGLVNAEAATR

SEQ ID NO: 56992 - protein, 269 aa, Unidentified
AQSVPWGISRVQAPAAHNRGLTGRGVKVAVLDTGISTHPDLNIRGGASFVPGEPSTQDGNGHGTHVAGTIAALNNDIGVLGVAPSAELYAVKVLGASGSGSVSSIAQGLEWAGNNSMHVANLSLGSESPSATLEQAVNSATSRGVLVVAASGNSGADSISYPARYANAMAVGATDQNNNRASFSQYGAGLDIVAPGVNVQSTYPGSTYASLNGTSMATPHVAGAAALVKQKNPSWSNVRIRNHLKNTATSLGSTNLYGSGLVNAEAATR

SEQ ID NO: 56993 - protein, 269 aa, Unidentified
AQSVPWGISRVQAPAAHNRGLAGSGVKVAVLDSGISTHPDLNICGGASFVPGEPSTQDGNGHGTHVAGTIAALNNSIGVLGVAPSAELYAVKVLGASGSGSVSSIAQGLEWAGNNRMHVANLSLGSPSPSATLEQAVNSATSRGVLVVAASGNSGEGSISYPARYANAMAVGATDQNNNRADFSQYGAGLDIVAPGVNVQSTYPGSTYASLNGTSMATPHVAGAAALVKQKNPSWSNVQIRNHLKNTATSLGSTNLYGSGLVNAEAATR

SEQ ID NO: 56994 - protein, 269 aa, Unidentified
AQSVPWGISRVQAPAAHNRRLTGSGVKVAVLDTGISTHPDLNIRGGASFVPGEPSTQDGNGHGTHVAGTIAALNNRIGVLGVAPSAELYAVKVLGASGSGSVSSIAQGLEWAGNNGMHVANLSLGSESPSATLEQAVNSATSRGVLVVAASGNSGADSISYPARYANAMAVGATDQNNNRADFSQYGAGLDIVAPGVNVQSTYPGSTYASLNGTSMATPHVAGAAALVKQKNPSWSNVQIRNRLKNTATSLGSTNLYGSGLVNAEAATR

SEQ ID NO: 56995 - protein, 269 aa, Unidentified
AQSVPWGISRVQAPAAHNRGLQGSGVKVAVLDTGISTHPDLNIRGGASFVPGEPSTQDGNGHGTHVAGTIAALNNSIGVLGVAPSAELYAVKVLGASGNGALSSIAQGLEWAGNNGMHVANLSLGSPSPSATLEQAVNSATSRGVLVVAASGNSGAGSISYPARYANAMAVGATDQNNNRASFSQYGAGLDIVAPGVNVQSTYPGSTYASLNGTSMATPHVAGAATLVKQKNPSWSNVRIRNHLKNTATSLGSTNLYGSGLVNAEAATR

SEQ ID NO: 56996 - protein, 269 aa, Unidentified
AQSVPWGISRVQAPAAHNRGLAGSGVKVAVLDTGISTHPDLNIRGGASFVPGEPSTQDGNGHGTHVAGTIAALNNSIGVLGVAPSAELYAVKVLGASGSGSVSSIAQGLEWAGLNRMHVANLSLGIPSPSATLEQAVNSATSRGVLVVAASGNSGEGSIDYPARYANAMAVGATDQNNNRASFSQYGAGLDIVAPGVNVQSTYPGSTYASLNGTSMATPHVAGAAALVKQKNPSWSNVQIRNHLKNTATSLGSTNLYGSGLVNAEAATR

SEQ ID NO: 56997 - protein, 269 aa, Unidentified
AQSVPWGISRVQAPAAHNRGLKGSGVKVAVLDTGISTHPDLNIRGGASFVPGEPSTQDGNGHGTHVAGTIAALNNSIGVLGVAPSAELYAVKVLGASGTGAISSIAQGLEWAGNNGMHVANLSLGSPSPSATLEQAVNSATSRGVLVVAASGNSGAGSISYPARYANAMAVGATDQNNNRASFSQYGAGLDIVAPGVNVQSTYPGSTYASLNGTSMATPHVAGAAMLVKQKNPSWSNVRIRNHLKNTATSLGSTNLYGSGLVNAEAATR

SEQ ID NO: 56998 - protein, 269 aa, Unidentified
AQSVPWGISRVQAPAAHNRGLTGGGVKVAVLDTGISTHPDLNIRGGASFVPGEPSTQDGNGHGTHVAGTIAALNNSIGVLGVAPSAELYAVKVLAASGQGSVSSIANGLEWAGNNGMHVANLSLGSPSPSATLEQAVNSATSRGVLVVAASGNSGAGSISYPARYANAMAVGATDQNNNRADFSQYGAGLDIVAPGVNVQSTYPGSTYASQNGTSMATPHVAGAAALVKQKNPSWSNVQIRNHLKNTATSLGSTNLYGSGLVNAEAATR

SEQ ID NO: 56999 - protein, 269 aa, Unidentified
AQSVPWGISRVQAPAAHNRKLLGSGVKVAVLDTGISTHPDLNIRGGASFVPGEPSTQDGNGHGTHVAGTIAALNNNIGVLGVAPSAELYAVKVLGASGSGSVSSIAQGLEWAGNNGMHVANLSLGDPSPSVTLEQAVNSATSRGVLVVAASGNSGAGSISYPARYANAMAVGATDQNNNRASFSQYGAGLDIVAPGVNVQSTYPGSAYASLNGTSMATPHVAGAAALVKQKNPSWSNVQIRNHLKNTATSLGSTNLYGSGLVNAEAATR

SEQ ID NO: 57000 - protein, 269 aa, Unidentified
AQSVPWGISRVQAPAAHNRGLTGGGVKVAVLDTGISTHPDLNIRGGASFVPGEPSTQDGNGHGTHVAGTIAALNNSIGVLGVAPSAELYAVKVLGASGNGSVSSIAGGLEWAGNNGMHVANLSLGAPSPSATLEQAVNSATSRGVLVVAASGNSGAGSISYPARYANAMAVGATDQNNNRADFSQYGAGLDIVAPGVNVQSTYPGSTYASQNGTSMATPHVAGAAALVKQKNPSWSNVQIRNHLKNTATSLGSTNLYGSGLVNAEAATR

SEQ ID NO: 57001 - protein, 269 aa, Unidentified
AQSVPWGISRVQAPAAHNRGLRGSGVKVAVLDTGISTHPDLNIRGGASFVPGEPSTQDGNGHGTHVAGTIAALNNSIGVLGVAPSAELYAVKVLGASGAGGISSIAQGLEWAGNNGMHVANLSLGSPSPSATLEQAVNSATSRGVLVVAASGNSGAGSISYPARYANAMAVGATDQNNNRASFSQYGAGLDIVAPGVNVQSTYPGSTYASLNGTSMATPHVAGAAMLVKQKNPSWSNVRIRNHLKNTATSLGSTNLYGSGLVNAEAATR

SEQ ID NO: 57002 - protein, 269 aa, Unidentified
AQSVPWGISRVQAPAAHRRGLTGRGVKVAVLDTGISTHPDLNIRGGASFVPGEPSTQDGNGHGTHVAGTIAALDNSIGVLGVAPSAELYAVKVLGASGSGSVSSIAQGLEWAGNNGMHVANLSLGSPSPSATLEQAVNSATSRGVLVVAASGNSGAGSISYPARYANAMAVGATDQDNNRASFSQYGAGLDIVAPGVNVQSTYPGSTYASLNGTSMATPHVAGAAALVKQKNPSWSNVQIRTRLKNTATSLGSTNLYGSGLVNAEAATR

SEQ ID NO: 57003 - protein, 269 aa, Unidentified
AQSVPWGISRVQAPAAHNRRLTGSGVKVAVLDTGISTHPDLNIRGGASFVPGEPSTQDGNGHGTHVAGTIAALNNDIGVLGVAPSAELYAVKVLGASGSGSVSSIAQGLEWAGNNSMHVANLSLGSPSPSATLEQAVNSATSRGVLVVAASGNSGAGSISYPARYANAMAVGATDQNNNRADFSQYGAGLDIVAPGVNVQSTYPGSTYASLNGTSMATPHVAGAAALVKQKNPSWSNVRIRNRLKNTATSLGSTNLYGSGLVNAEAATR

SEQ ID NO: 57004 - protein, 269 aa, Unidentified
AQSVPWGISRVQAPASHNRGLTGSGVKVAVLDTGISTHPDLNIRGGASFVPGEPSTQDGEGHGTHVAGTIAALNNSIGVLGVAPSAELYAVKVLGASGSGSLSSIAQGLEWAGNNGMHVANLSLGSPSPSATLEQAVNSATSRGVLVVAASGNSGAGSISYPARYANAMAVGATDQNNNHADFSQYGAGLDIVAPGVNVQSTYPGSTYASLNGTSMATPHVAGAAALVKQKNPSWSNVQIRNHLKNTATSLGSTNLYGSGLVNAFAATR

SEQ ID NO: 57005 - protein, 269 aa, Unidentified
AQSVPWGISRVQAPAAHNRRLTGRGVKVAVLDTGISTHPDLNIRGGASFVPGEPSTQDGEGHGTHVAGTIAALNNGIGVLGVAPSAELYAVKVLGASGSGSVSSIAQGLEWAGNNDMHVANLSLGSESPSATLEQAVNSATSRGVLVVAASGNSGAGSISYPARYANAMAVGATDQNNNRASFSQYGAGLDIVAPGVNVQSTYPGSTYASLNGTSMATPHVAGAAALVKQKNPSWSNVQIRNHLKNTATSLGSTNLYGSGLVNAEAATR

SEQ ID NO: 57006 - protein, 269 aa, Unidentified
AQSVPWGISRVQAPAAHNRGLTGRGVKVAVLDTGISTHPDLNIRGGASFVPGEPSTQDGEGHGTHVAGTIAALNNGIGVLGVAPSAELYAVKVLGASGSGSVSSIAQGLEWAGNNDMHVANLSLGSESPSATLEQAVNSATSRGVLVVAASGNSGADSISYPARYANAMAVGATDQNNNRASFSQYGAGLDIVAPGVNVQSTYPGSTYASLNGTSMATPHVAGAAALVKQKNPSWSNVQIRNHLKNTATSLGSTNLYGSGLVNAEAATR

SEQ ID NO: 57007 - protein, 269 aa, Lederbergia lentus
AQSVPWGISRVQAPAAHNRGLTGSGVNVAVLDTGISTHPDLNIRGGASFVPGEPSTQDGNGHGTHVAGTIAALNNSIGVLGVAPSAELYAVKVLGADGEGAISSIAQGLEWAGNNGMHVANLSLGSPSPSATLEQAVNSATSRGVLVVAASGNSGASSISYPARYANAMAVGATDQNNNRASFSQYGAGLDIVAPGVNVQSTYPGSTYASLNGTSMATPHVAGAAALVKQKNPSWSNVQIRNHLKNTATSLGSTNLYGSGLVNAEAATR

SEQ ID NO: 57008 - protein, 269 aa, Unidentified
AQSVPWGISRVQAPAAHNRRLTGRGVKVAVLDTGISTHPDLNIRGGASFVPGEPSTQDGNGHGTHVAGTIAALNNSIGVLGVAPSAELYAVKVLAASGAGSVSSIAGGLEWAGLNGMHVANLSLGSPSPSATLEQAVNSATSRGVLVVAASGNSGAGSISYPARYANAMAVGATDQNNNRASFSQYGAGLDIVAPGVNVQSTYPGSTYASLNGTSMATPHVAGAAALVKQKNPSWSNVQIRNHLKNTATSLGSTNLYGSGLVNAEAATR

SEQ ID NO: 57009 - protein, 269 aa, Unidentified
AQSVPWGISRVQAPAAHNRGLAGSGVKVAVLDTGISTHPDLNIRGGASFVPGEPSTQDGNGHGTHVAGTIAALNNSIGVLGVAPSAELYAVKVLGASGNGALSSIAQGLEWAGNNGMHVANLSLGSPSPSATLEQAVNSATSRGVLVVAASGNSGAGSISYPARYANAMAVGATDQNNNRASFSQYGAGLDIVAPGVNVQSTYPGSTYASLNGTSMATPHVAGAAMLVKQKNPSWSNVRIRNHLKNTATSLGSTNLYGSGLVNAEAATR

SEQ ID NO: 57010 - protein, 269 aa, Unidentified
AQSVPWGISRVQAPAAHNRRLTGRGVKVAVLDTGISTHPDLNIRGGASFVPGEPSTQDGNGHGTHVAGTIAALNNNIGVLGVAPSAELYAVKVLGASGAGSVSSIAGGLEWAGNNGMHVANLSLGAPSPSATLEQAVNSATSRGVLVVAASGNSGAGSISYPARYANAMAVGATDQNNNRASFSQYGAGLDIVAPGVNVQSTYPGSTYASLNGTSMATPHVAGAAALVKQKNPSWSNVQIRNHLKNTATSLGSTNLYGSGLVNAEAATR

SEQ ID NO: 57011 - protein, 269 aa, Unidentified
AQSVPWGISRVQAPAAHNRGLTGSGVKVAVLDTGISTHPDLNIRGGASFVPGEPSTQDGNGHGTHVAGTIAALNNSIGVLGVAPSAELYAVKVLPQTGAASISSIAQGLEWAGNNGMHVANLSLGSPSPSATLEQAVNSATSRGVLVVAASGNSGAGSISYPARYANAMAVGATDQNNNRASFSQYGAGLDIVAPGVNVQSTYPGSTYASLNGTSMATPHVAGAAALVKQKNPSWSNVQIRNHLKNTATSLGSTNLYGSGLVNAEAATR

SEQ ID NO: 57012 - protein, 269 aa, Unidentified
AQSVPWGISRVQAPAAHNRKLTGSGVLVAVLDTGISTHPDLNIRGGASFVPGEPSTQDGNGHGTHVAGTIAALNNNIGVLGVAPSAELYAVKVLGASGDGSVSSIAQGLEWAGNNGMHVANLSLGQPSPSATLEQAVNSATSRGVLVVAASGNSGAGSISYPARYANAMAVGATDQNNNRASFSQYGAGLDIVAPGVNVQSTYPGSTYASENGTSMATPHVAGAAALVKQKNPSWSNVQIRNHLKNTATSLGSTNLYGSGLVNAEAATR

SEQ ID NO: 57013 - protein, 269 aa, Unidentified
AQSVPWGISRVQAPAAHNRGLQGSGVKVAVLDTGISTHPDLNIRGGASFVPGEPSTQDGNGHGTHVAGTIAALNNSIGVLGVAPSAELYAVKVLGASGGGAISSIAQGLEWAGNNGMHVANLSLGSPSPSATLEQAVNSATSRGVLVVAASGNSGAGSISYPARYANAMAVGATDQNNNRASFSQYGAGLDIVAPGVNVQSTYPGSTYASLNGTSMATPHVAGAAMLVKQKNPSWSNVWIRNHLKNTATSLGSTNLYGSGLVNAEAATR

SEQ ID NO: 57014 - protein, 269 aa, Unidentified
AQSVPWGISRVQAPAAHNRKLTGFGVKVAVLDTGISTHPDLWIRGGASFVPGEPSTQDGEGHGTHVAGTIAALNNSIGVLGVAPSAELYAVKVLGASGSGSVSSIAQGLEWAGLNGMHVANLSLGSPSPSATLEQAVNSATSRGVLVVAASGNSGAGSISYPARYANAMAVGATDQNNNRASFSQYGAGLDIVAPGVNVQSTYPGSAYASLNGTSMATPHVAGAAALVKQKNPSWSNVQIRNHLKNTATSLGSTNLYGSGLVNAEAATR

SEQ ID NO: 57015 - protein, 269 aa, Lederbergia lentus
AQSVPWGISNVQAPAAHNRGLTGSGVKVAVLDTGISTHPDLNIRGGASFVPGEPSTQDGNGHGTHVAGTIAALNNSIGVLGVAPSAELYAVKVLGADGEGAISSIAQGLEWAGNNGMHVANLSLGSPSPSATLEQAVNSATSRGVLVVAASGNSGASSISYPARYANAMAVGATDQNNNRASFSQYGAGLDIVAPGVNVQSTYPGSTYASLNGTSMATPHVAGAAALVKQKNPSWSNVQIRNHLKNTATSLGSTNLYGSGLVNAEAATR

SEQ ID NO: 57016 - protein, 269 aa, Unidentified
AQSVPWGISRVQAPAAHNRGLQGSGVKVAVLDTGISTHPDLNIRGGASFVPGEPSTQDGNGHGTHVAGTIAALNNSIGVLGVAPSAELYAVKVLGASGAGNISSIAQGLEWAGNNGMHVANLSLGSPSPSATLEQAVNSATSRGVLVVAASGNSGAGSISYPARYANAMAVGATDQNNNRASFSQYGAGLDIVAPGVNVQSTYPGSTYASLNGTSMATPHVAGAAMLVKQKNPSWSNVRIRNHLKNTATSLGSTNLYGSGLVNAEAATR

SEQ ID NO: 57017 - protein, 269 aa, Unidentified
AQSVPWGISRVQAPAAHNRKLLGSGVKVAVLDTGISTHPDLNIRGGASFVPGEPSTQDGNGHGTHVAGTIAALNNNIGVLGVAPSAELYAVKVLGASGSGSVSSIAQGLEWAGNNRMHVANLSLGSPSPSATLEQAVNSATSRGVLVVAASGNSGAGSIDYPARYANAMAVGATDQNNNRASFSQYGAGLDIVAPGVNVQSTYPGSTYASENGTSMATPHVAGAAALVKQKNPSWSNVQIRNHLKNTATSLGSTNLYGSGLVNAEAATR

SEQ ID NO: 57018 - protein, 269 aa, Unidentified
AQSVPWGISRVQAPAAHNRGLRGSGVKVAVLDTGISTHPDLNIRGGASFVPGEPSTQDGNGHGTHVAGTIAALNNSIGVLGVAPSAELYAVKVLGASGTGNISSIAQGLEWAGNNGMHVANLSLGSPSPSATLEQAVNSATSRGVLVVAASGNSGAGSISYPARYANAMAVGATDQNNNRASFSQYGAGLDIVAPGVNVQSTYPGSTYASLNGTSMATPHVAGAALLVKQKNPSWSNVSIRNHLKNTATSLGSTNLYGSGLVNAEAATR

SEQ ID NO: 57019 - protein, 269 aa, Unidentified
AQSVPWGISRVQAPAAHNRKLTGSGVKVAVLDTGISTHPDLNIRGGASFVPGEPSTQDGNGHGTHVAGTIAALNNNIGVLGVAPSAELYAVKVLGASGDASVSSIAQGLEWAGNNGMHVANLSLGSPSPSATLEQAVNSATSRGVLVVAASGNSGAGSISYPARYANAMAVGATDQNNNRASFSQYGAGLDIVAPGVNVQSTYPGSTYASENGTSMATPHVAGAAALVKQKNPRWSNVQIRNHLKNTATSLGSTNLYGSGLVNAEAATR

SEQ ID NO: 57020 - protein, 269 aa, Unidentified
AQSVPWGISRVQAPAAHNRGLTGRGVKVAVLDSGISTHPDLNIRGGASFVPGEPSTQDGNGHGTHVAGTIAALNNSIGVLGVAPSAELYAVKVLGASGSGSVSSIAQGLEWAGLNGMHVANLSLGIPSPSATLEQAVNSATSRGVLVVAASGNSGEGSISYPARYANAMAVGATDQNNNRADFSQYGAGLDIVAPGVNVQSTYPGSTYASLNGTSMATPHVAGAAALVKQKNPSWSNVQIRNHLKNTATSLGSTNLYGSGLVNAEAATR

SEQ ID NO: 57021 - protein, 269 aa, Unidentified
AQSVPWGISRVQAPAAHNRGLTGRGVKVAVLDSGISTHPDLNIRGGASFVPGEPSTQDGEGHGTHVAGTIAALNNSIGVLGVAPSAELYAVKVLGASGSGSVSSIAQGLEWAGLNGMHVANLSLGSPSPSATLEQAVNSATSRGVLVVAASGNSGEGSIDYPARYANAMAVGATDQNNNRASFSQYGAGLDIVAPGVNVQSTYPGSTYASLNGTSMATPHVAGAAALVKQKNPSWSNVQIRNHLKNTATSLGSTNLYGSGLVNAEAATR

SEQ ID NO: 57022 - protein, 269 aa, Unidentified
AQSVPWGISRVQAPAAHNRKLTGSGVKVAVLDTGISTHPDLNIRGGASFVPGEPSTQDGEGHGTHVAGTIAALNNNIGVLGVAPSAELYAVKVLGASGGGSVSSIANGLEWAGLNGMHVANLSLGSPSPSATLEQAVNSATSRGVLVVAASGNSGAGSISYPARYANAMAVGATDQNNNRASFSQYGAGLDIVAPGVNVQSTYPGSTYASLNGTSMATPHVAGAAALVKQKNPSWSNVQIRNHLKNTATSLGSTNLYGSGLVNAEAATR

SEQ ID NO: 57023 - protein, 269 aa, Unidentified
AQSVPWGISRVQAPAAHNRGLTGSGVKVAVLDTGISTHPDLNIRGGASFVPGEPSTQDGNGHGTHVAGTIAALNNGIGVLGVAPSAELYAVKVLGASGSGSVSSIAQGLEWAGNNSMHVANLSLGSPSPSATLEQAVNSATSRGVLVVAASGNSGADSISYPARYANAMAVGATDQNNNRADFSQYGAGLDIVAPGVNVQSTYPGSTYASLNGTSMATPHVAGAAALVKQKNPSWSNVQIRDRLKNTATSLGSTNLYGSGLVNAEAATR

SEQ ID NO: 57024 - protein, 269 aa, Unidentified
AQSVPWGISRVQAPAAHNRRLTGSGVKVAVLDTGISTHPDLNIRGGASFVPGEPSTQDGEGHGTHVAGTIAALNNGIGVLGVAPSAELYAVKVLGASGSGSVSSIAQGLEWAGNNSMHVANLSLGSPSPSATLEQAVNSATSRGVLVVAASGNSGAGSISYPARYANAMAVGATDQNNNRADFSQYGAGLDIVAPGVNVQSTYPGSTYASLNGTSMATPHVAGAAALVKQKNPSWSNVRIRNHLKNTATSLGSTNLYGSGLVNAEAATR

SEQ ID NO: 57025 - protein, 269 aa, Unidentified
AQSVPWGISRVQAPAAHNRKLTGFGVKVAVLDTGISTHPDLNIRGGASFVPGEPSTQDGNGHGTHVAGTIAALNNSIGVLGVAPSAELYAVKVLGASGSGSVSSIAQGLEWAGNNGMHVANLSLGDPSPSATLEQAVNSATSRGVLVVAASGNSGAGSIDYPARYANAMAVGATDQNNNRASFSQYGAGLDIVAPGVNVQSTYPGSAYASENGTSMATPHVAGAAALVKQKNPSWSNVQIRNHLKNTATSLGSTNLYGSGLVNAEAATR

SEQ ID NO: 57026 - protein, 269 aa, Unidentified
AQSVPWGISRVQAPASHNRGLAGSGVKVAVLDTGISTHPDLNIRGGASFVPGEPSTQDGNGHGTHVAGTIAALNNSIGVLGVAPSAELYAVKVLGASGGGGISSIAQGLEWAGNNGMHVANLSLGNPSPSATLEQAVNSATSRGVLVVAASGNSGAGSISYPARYANAMAVGATDQNNNRASFSQYGAGLDIVAPGVNVQSTYPGSTYASLNGTSMATPHVAGAAALVKQKNPSWSNVQIRNHLKNTATSLGSTNLYGSGLVNAEAATR

SEQ ID NO: 57027 - protein, 269 aa, Unidentified
AQSVPWGISRVQAPAAHNRGLAGRGVKVAVLDTGISTHPDLNIRGGASFVPGEPSTQDGEGHGTHVAGTIAALNNSIGVLGVAPSAELYAVKVLGASGSGSVSSIAQGLEWAGLNRMHVANLSLGSPSPSATLEQAVNSATSRGVLVVAASGNSGAGSIDYPARYANAMAVGATDQNNNRASFSQYGAGLDIVAPGVNVQSTYPGSTYASLNGTSMATPHVAGAAALVKQKNPSWSNVQIRNHLKNTATSLGSTNLYGSGLVNAEAATR

SEQ ID NO: 57028 - protein, 269 aa, Unidentified
AQSVPWGISRVQAPAAHNRGLTGSGVKVAVLDTGISTHPDLNIRGGASFVPGEPSTQDGEGHGTHVAGTIAALNNDIGVLGVAPSAELYAVKVLGASGSGSVSSIAQGLEWAGNNSMHVANLSLGSESPSATLEQAVNSATSRGVLVVAASGNSGAGSISYPARYANAMAVGATDQNNNRASFSQYGAGLDIVAPGVNVQSTYPGSTYASLNGTSMATPHVAGAAALVKQKNPSWSNVQIRDRLKNTATSLGSTNLYGSGLVNAEAATR

SEQ ID NO: 57029 - protein, 269 aa, Unidentified
AQSVPWGISRVQAPAAHRRGLTGRGVKVAVLDTGISTHPDLNIRGGASFVPGEPSTQDGNGHGTHVAGTIAALDNSIGVLGVAPSAELYAVKVLGASGSGSVSSIAQGLEWAGNNGMHVANLSLGSPSPSATLEQAVNSATSRGVLVVAASGNSGAGSISYPARYANAMAVGATDQNNNRASFSQYGAGLDLVAPGVNVQSTYPGSTYFSLNGTSMATPHVAGAAALVKQKNPSWSNVQIRNRLKNTATSLGSTNLYGSGLVNAEAATR

SEQ ID NO: 57030 - protein, 269 aa, Unidentified
AQSVPWGISRVQAPAAHNRGLTGSGVKVAVLDTGISTHPDLNIRGGASFVPGEPSTQDGNGHGTHVAGTIAALNNSIGVLGVAPSAELYAVKVLGADGEGAISSIAQGLEWAGNNGMHVANLSLGSPSPSATLEQAVNSATSRGVLVVAASGNSGASSISYPARYANAMAVGATDQNNNRASFSQYGAGLDIVAPGVNVQSTYPGSTYASLNGTSMATPHVAGAAALVKQKNPSWSNWQIRNHLKNTATSLGSTNLYGSGLVNAEAATR

SEQ ID NO: 57031 - protein, 269 aa, Unidentified
AQSVPWGISRVQAPAAHNRRLTGSGVKVAVLDTGISTHPDLNIRGGASFVPGEPSTQDGNGHGTHVAGTIAALNNDIGVLGVAPSAELYAVKVLGASGSGSVSSIAQGLEWAGNNDMHVANLSLGSPSPSATLEQAVNSATSRGVLVVAASGNSGAGSISYPARYANAMAVGATDQNNNRADFSQYGAGLDIVAPGVNVQSTYPGSTYASLNGTSMATPHVAGAAALVKQKNPSWSNVRIRDHLKNTATSLGSTNLYGSGLVNAEAATR

SEQ ID NO: 57032 - protein, 269 aa, Unidentified
AQSVPWGISRVQAPAAHRRGLTGSGVKVAVLDTGISTHPDLRITGGASFVPGEPSTQDGNGHGTHVAGTIAALDNSIGVLGVAPSAELYAVKVLGASGSGSVSSIAQGLEWAGNNGMHVANLSLGSPSPSATLEQAVNSATSRGVLVVAASGNSGAGSISYPARYANAMAVGATDQNNNRASFSQYGAGLDIVAPGVNVQSTYPGSTYASLNGTSMATPHVAGEAALVKQKNPSWRNVQIRNHLKNTATSLGSTNLYGSGLVNAEAATR

SEQ ID NO: 57033 - protein, 269 aa, Unidentified
AQSVPWGISRVQAPAAHNRGLAGRGVKVAVLDTGISTHPDLNIRGGASFVPGEPSTQDGEGHGTHVAGTIAALNNSIGVLGVAPSAELYAVKVLGASGSGSVSSIAQGLEWAGLNGMHVANLSLGSPSPSATLEQAVNSATSRGVLVVAASGNSGEGSIDYPARYANAMAVGATDQNNNRASFSQYGAGLDIVAPGVNVQSTYPGSTYASLNGTSMATPHVAGAAALVKQKNPSWSNVQIRNHLKNTATSLGSTNLYGSGLVNAEAATR

SEQ ID NO: 57034 - protein, 269 aa, Unidentified
AQSVPWGISRVQAPAAHNRGLTGSGVKVAVLDTGISTHPDLNIRGGASFVPGEPSTQDGEGHGTHVAGTIAALNNSIGVLGVAPSAELYAVKVLGASGAGSVSSIAQGLEWAGNNGMHVANLSLGSPSPSATLEQAVNSATSRGVLVVAASGNSGEGSISYPARYANAMAVGATDQNNNHASFSQYGAGLDIVAPGVNVQSTYPGSTYASLNGTSMATPHVAGAAALVKQKNPSWSNVQIRNRLKNTATSLGSTNLYGSGLVNAFAATR

SEQ ID NO: 57035 - protein, 269 aa, Unidentified
AQSVPWGISRVQAPAAHNRRLTGRGVKVAVLDTGISTHPDLNIRGGASFVPGEPSTQDGEGHGTHVAGTIAALNNGIGVLGVAPSAELYAVKVLGASGSGSVSSIAQGLEWAGNNSMHVANLSLGSPSPSATLEQAVNSATSRGVLVVAASGNSGAGSISYPARYANAMAVGATDQNNNRASFSQYGAGLDIVAPGVNVQSTYPGSTYASLNGTSMATPHVAGAAALVKQKNPSWSNVDIRNHLKNTATSLGSTNLYGSGLVNAEAATR

SEQ ID NO: 57036 - protein, 269 aa, Unidentified
AQSVPWGISRVQAPAAHNRRLTGRGVKVAVLDTGISTHPDLNIRGGASFVPGEPSTQDGNGHGTHVAGTIAALNNGIGVLGVAPSAELYAVKVLGASGSGSVSSIAQGLEWAGNNDMHVANLSLGSPSPSATLEQAVNSATSRGVLVVAASGNSGAGSISYPARYANAMAVGATDQNNNRASFSQYGAGLDIVAPGVNVQSTYPGSTYASLNGTSMATPHVAGAAALVKQKDPSWSNVQIRDHLKNTATSLGSTNLYGSGLVNAEAATR

SEQ ID NO: 57037 - protein, 269 aa, Unidentified
AQSVPWGISRVQAPAAHRRRLTGSGVKVAVLDTGISTHPDLRIRGGASFVPGEPSTQDGNGHGTHVAGTIAALDNSIGVLGVAPSAELYAVKVLGASGSGSVSSIAQGLEWAGNNGMHVANLSLGSPSPSATLEQAVNSATSRGVLVVAASGNSGAGSISYPARYANAMAVGATDQNNNRASFSQYGAGLDIVAPGVNVQSTYPGSTYASLNGTSMATPHVAGAAALVKQKNPSWRNVQIRNRLKNTATSLGSTNLYGSGLVNAEAATR

SEQ ID NO: 57038 - protein, 269 aa, Lederbergia lentus
AQSVPWGISRVQAPAAHNRGLTGSGVDVAVLDTGISTHPDLNIRGGASFVPGEPSTQDGNGHGTHVAGTIAALNNSIGVLGVAPSAELYAVKVLGADGEGAISSIAQGLEWAGNNGMHVANLSLGSPSPSATLEQAVNSATSRGVLVVAASGNSGASSISYPARYANAMAVGATDQNNNRASFSQYGAGLDIVAPGVNVQSTYPGSTYASLNGTSMATPHVAGAAALVKQKNPSWSNVQIRNHLKNTATSLGSTNLYGSGLVNAEAATR

SEQ ID NO: 57039 - protein, 269 aa, Unidentified
AQSVPWGISRVQAPAAHNRGLTGSGVKVAVLDTGISTHPDLNIRGGASFVPGEPSTQDGNGHGTHVAGTIAALNNSIGVLGVAPSAELYAVKVLGADGRGAISSIAQGLEWAGNNGMHVANLSLGSPSPSATLEQAVNSATSRGVLVVAASGNSGASSISYPARYANAMAVGATDQNNNRASFSQYGAGLDIVAPGVNVQSTYPGSTYASLNGTSMATPHVAGAAALVKQKNPSWSNAQIRNHLKNTATSLGSTNLYGSGLVNAEAATR

SEQ ID NO: 57040 - protein, 269 aa, Unidentified
AQSVPWGISRVQAPAAHNRGLRGSGVKVAVLDTGISTHPDLNIRGGASFVPGEPSTQDGNGHGTHVAGTIAALNNSIGVLGVAPSAELYAVKVLGASGTGAISSIAQGLEWAGNNGMHVANLSLGSPSPSATLEQAVNSATSRGVLVVAASGNSGAGSISYPARYANAMAVGATDQNNNRASFSQYGAGLDIVAPGVNVQSTYPGSTYASLNGTSMATPHVAGAALLVKQKNPSWSNVRIRNHLKNTATSLGSTNLYGSGLVNAEAATR

SEQ ID NO: 57041 - protein, 269 aa, Unidentified
AQSVPWGISRVQAPAAHNRGLQGSGVKVAVLDTGISTHPDLNIRGGASFVPGEPSTQDGNGHGTHVAGTIAALNNSIGVLGVAPSAELYAVKVLGASGGGGISSIAQGLEWAGNNGMHVANLSLGSPSPSATLEQAVNSATSRGVLVVAASGNSGAGSISYPARYANAMAVGATDQNNNRASFSQYGAGLDIVAPGVNVQSTYPGSTYASLNGTSMATPHVAGAAMLVKQKNPSWSNVRIRNHLKNTATSLGSTNLYGSGLVNAEAATR

SEQ ID NO: 57042 - protein, 269 aa, Unidentified
AQSVPWGISRVQAPAAHNRGLRGSGVKVAVLDTGISTHPDLNIRGGASFVPGEPSTQDGNGHGTHVAGTIAALNNSIGVLGVAPSAELYAVKVLGASGNGNLSSIAQGLEWAGNNGMHVANLSLGSPSPSATLEQAVNSATSRGVLVVAASGNSGAGSISYPARYANAMAVGATDQNNNRASFSQYGAGLDIVAPGVNVQSTYPGSTYASLNGTSMATPHVAGAATLVKQKNPSWSNVSIRNHLKNTATSLGSTNLYGSGLVNAEAATR

SEQ ID NO: 57043 - protein, 269 aa, Unidentified
AQSVPWGISRVQAPAAHNRGLTGSGVKVAVLDTGISTHPDLNIRGGASFVPGEPSTQDGNGHGTHVAGTIAALNNGIGVLGVAPSAELYAVKVLGASGSGSVSSIAQGLEWAGNNDMHVANLSLGSPSPSATLEQAVNSATSRGVLVVAASGNSGAGSISYPARYANAMAVGATDQNNNRADFSQYGAGLDIVAPGVNVQSTYPGSTYASLNGTSMATPHVAGAAALVKQKNPSWSNVRIRDRLKNTATSLGSTNLYGSGLVNAEAATR

SEQ ID NO: 57044 - protein, 269 aa, Unidentified
AQSVPWGISRVQAPAAHNRGLTAFGVKVAVLDTGISTHPDLWIRGGASFVPGEPSTQDGEGHGTHVAGTIAALNNSIGVLGVAPSAELYAVKVLGASGSGSVSSIAQGLEWAGLNRMHVANLSLGSPSPSATLEQAVNSATSRGVLVVAASGNSGAGSISYPARYANAMAVGATDQNNNRASFSQYGAGLDIVAPGVNVQSTYPGSTYASLNGTSMATPHVAGAAALVKQKNPSWSNVQIRNHLKNTATSLGSTNLYGSGLVNAEAATR

SEQ ID NO: 57045 - protein, 269 aa, Unidentified
AQSVPWGISRVQAPAAHNRKLTGSGVKVAVLDTGISTHPDLNIRGGASFVPGEPSTQDGEGHGTHVAGTIAALNNSIGVLGVAPSAELYAVKVLSASGQGSVSSIAQGLEWAGLNGMHVANLSLGAPSPSATLEQAVNSATSRGVLVVAASGNSGAGSISYPARYANAMAVGATDQNNNRASFSQYGAGLDIVAPGVNVQSTYPGSTYASLNGTSMATPHVAGAAALVKQKNPSWSNVQIRNHLKNTATSLGSTNLYGSGLVNAEAATR

SEQ ID NO: 57046 - protein, 269 aa, Unidentified
AQSVPWGISRVQAPAAHNRGLKGSGVKVAVLDTGISTHPDLNIRGGASFVPGEPSTQDGNGHGTHVAGTIAALNNSIGVLGVAPSAELYAVKVLGASGTGGISSIAQGLEWAGNNGMHVANLSLGSPSPSATLEQAVNSATSRGVLVVAASGNSGAGSISYPARYANAMAVGATDQNNNRASFSQYGAGLDIVAPGVNVQSTYPGSTYASLNGTSMATPHVAGAALLVKQKNPSWSNVRIRNHLKNTATSLGSTNLYGSGLVNAEAATR

SEQ ID NO: 57047 - protein, 269 aa, Unidentified
AQSVPWGISRVQAPAAHNRGLAGSGVKVAVLDTGISTHPDLNIRGGASFVPGEPSTQDGNGHGTHVAGTIAALNNSIGVLGVAPSAELYAVKVLGASGTGNLSSIAQGLEWAGNNGMHVANLSLGSPSPSATLEQAVNSATSRGVLVVAASGNSGAGSISYPARYANAMAVGATDQNNNRASFSQYGAGLDIVAPGVNVQSTYPGSTYASLNGTSMATPHVAGAALLVKQKNPSWSNVRIRNHLKNTATSLGSTNLYGSGLVNAEAATR

SEQ ID NO: 57048 - protein, 269 aa, Unidentified
AQTVPWGISRVQAPAAHNRGLTGSGVKVAVLDTGISTHPDLNIRGGASFVPGEPSTQDGNGHGTHVAGTIAALNNSIGVLGVAPSAELYAVKVLGADGRGAISSIAQGLEWAGNNGMHVANLSLGSPSPSATLEQAVNSATSRGVLVVAASGNSGASSISYPARYANAMAVGATDQNNNRASFSQYGAGLDIVAPGVNVQSTYPGSTYASLNGTSMATPHVAGAAALVKQKNPSWSNVQIRNHLKNTATSLGSTNLYGSGLVNAEAATR

SEQ ID NO: 57049 - protein, 269 aa, Unidentified
AQSVPWGISRVQAPAAHNRGLKGSGVKVAVLDTGISTHPDLNIRGGASFVPGEPSTQDGNGHGTHVAGTIAALNNSIGVLGVAPSAELYAVKVLGASGAGAISSIAQGLEWAGNNGMHVANLSLGSPSPSATLEQAVNSATSRGVLVVAASGNSGAGSISYPARYANAMAVGATDQNNNRASFSQYGAGLDIVAPGVNVQSTYPGSTYASLNGTSMATPHVAGAAVLVKQKNPSWSNVRIRNHLKNTATSLGSTNLYGSGLVNAEAATR

SEQ ID NO: 57050 - protein, 269 aa, Unidentified
AQSVPWGISRVQAPAAHNRGLTGSGVKVAVLDTGISTHPDLNIRGGASFVPGEPSTQDGNGHGTHVAGTIAALNNDIGVLGVAPSAELYAVKVLGASGSGSVSSIAQGLEWAGNNSMHVANLSLGSESPSATLEQAVNSATSRGVLVVAASGNSGADSISYPARYANAMAVGATDQNNNRASFSQYGAGLDIVAPGVNVQSTYPGSTYASLNGTSMATPHVAGAAALVKQKNPSWSNVRIRDHLKNTATSLGSTNLYGSGLVNAEAATR

SEQ ID NO: 57051 - protein, 269 aa, Unidentified
AQSVPWGISRVQAPAAHNRGLTGRGVKVAVLDSGISTHPDLNIRGGASFVPGEPSTQDGNGHGTHVAGTIAALNNSIGVLGVAPSAELYAVKVLGASGSGSVSSIAQGLEWAGLNRMHVANLSLGSPSPSATLEQAVNSATSRGVLVVAASGNSGEGSISYPARYANAMAVGATDQNNNRADFSQYGAGLDIVAPGVNVQSTYPGSTYASLNGTSMATPHVAGAAALVKQKNPSWSNVQIRNHLKNTATSLGSTNLYGSGLVNAEAATR

SEQ ID NO: 57052 - protein, 269 aa, Unidentified
AQSVPWGISRVQAPAAHRRGLTGSGVKVAVLDTGISTHPDLNIRGGASFVPGEPSTQDGNGHGTHVAGTIAALDNSIGVLGVAPSAELYAVKVLGASGGGSISSIAQGLEWAGNNGMHVANLSLGSPSPSATLEQAVNSATSRGVLVVAASGNSGAGSISYPARYANAMAVGATDQNNNRASFSQYGAGLDIVAPGVNVQSTYPGSTYASLNGTSMATPHVAGAAVLVKQKNPSWSNVRIRNHLKNTATSLGSTNLYGSGLVNAEAATR

SEQ ID NO: 57053 - protein, 269 aa, Unidentified
AQSVPWGISRVQAPAAHNRGLKGSGVKVAVLDTGISTHPDLNIRGGASFVPGEPSTQDGNGHGTHVAGTIAALNNSIGVLGVAPSAELYAVKVLGASGTGNISSIAQGLEWAGNNGMHVANLSLGSPSPSATLEQAVNSATSRGVLVVAASGNSGAGSISYPARYANAMAVGATDQNNNRASFSQYGAGLDIVAPGVNVQSTYPGSTYASLNGTSMATPHVAGAATLVKQKNPSWSNVWIRNHLKNTATSLGSTNLYGSGLVNAEAATR

SEQ ID NO: 57054 - protein, 269 aa, Unidentified
AQSVPWGISRVQAPAAHNRGLTGSGVKVAVLDTGISTHPDLNIRGGASFVPGEPSTQDGNGHGTHVAGTIAALNNSIGVLGVAPSAELYAVKVLGADGEGAISSIAQGLEWAGNNGMHVANLSLGSPSPSATLEQAVNSATSRGVLVVAASGNSGASSISYPARYANAMAVGATDQNNNRASFSQYGAGLDIVAPGVNVQSTYPGSTYASLNGTSMATPHVAGAAALVKQKNPSWSNSQIRNHLKNTATSLGSTNLYGSGLVNAEAATR

SEQ ID NO: 57055 - protein, 269 aa, Unidentified
AQSVPWGISRVQAPAAHNRGLQGSGVKVAVLDTGISTHPDLNIRGGASFVPGEPSTQDGNGHGTHVAGTIAALNNSIGVLGVAPSAELYAVKVLGASGTGNISSIAQGLEWAGNNGMHVANLSLGSPSPSATLEQAVNSATSRGVLVVAASGNSGAGSISYPARYANAMAVGATDQNNNRASFSQYGAGLDIVAPGVNVQSTYPGSTYASLNGTSMATPHVAGAATLVKQKNPSWSNVRIRNHLKNTATSLGSTNLYGSGLVNAEAATR

SEQ ID NO: 57056 - protein, 269 aa, Bacillus sp.
AQSVPWGISRVQAPAAHNRGLTGSGVKVAVLDTGISTHPDLNIRGGASFVPGEPSTQDGNGHGTHVAGTIAALNNSIGVLGVAPNAELYAVKVLGASGSGSVSSIAQGLEWAGNNVMHVANLSLGNSAPSATLEQAVNSATSRGVLVVAASGNSGAGSIDYPARYANAMAVGATDQNNNRASFSQYGAGLDIVAPGVNVQSTYPGSTYASLNGTSMATPHVAGAAALVKQKNPSWSNVQIRNHLKNTATSLGSTNLYGSGLVNAEAATR

SEQ ID NO: 57057 - protein, 269 aa, Unidentified
AQSVPWGISRVQAPAAHNRGLAGSGVKVAVLDTGISTHPDLNIRGGASFVPGEPSTQDGNGHGTHVAGTIAALNNSIGVLGVAPSAELYAVKVLGASGTGGISSIAQGLEWAGNNGMHVANLSLGSPSPSATLEQAVNSATSRGVLVVAASGNSGAGSISYPARYANAMAVGATDQNNNRASFSQYGAGLDIVAPGVNVQSTYPGSTYASLNGTSMATPHVAGAAVLVKQKNPSWSNVWIRNHLKNTATSLGSTNLYGSGLVNAEAATR

SEQ ID NO: 57058 - protein, 269 aa, Unidentified
AQSVPWGISRVQAPAAHNRKLLGSGVKVAVLDTGISTHPDLNIRGGASFVPGEPSTQDGNGHGTHVAGTIAALNNNIGVLGVAPSAELYAVKVLGASGSGSVSSIAQGLEWAGNNRMHVANLSLGDPSPSATLEQAVNSATSRGVLVVAASGNSGAGSIDYPARYANAMAVGATDQNNNRASFSQYGAGLDIVAPGVNVQSTYPGSTYASLNGTSMATPHVAGAAALVKQKNPSWSNVQIRNHLKNTATSLGSTNLYGSGLVNAEAATR

SEQ ID NO: 57059 - protein, 269 aa, Unidentified
AQSVPWGISRVQAPAAHNRGLAGSGVKVAVLDTGISTHPDLNIRGGASFVPGEPSTQDGNGHGTHVAGTIAALNNSIGVLGVAPSAELYAVKVLGASGNGAISSIAQGLEWAGNNGMHVANLSLGSPSPSATLEQAVNSATSRGVLVVAASGNSGAGSISYPARYANAMAVGATDQNNNRASFSQYGAGLDIVAPGVNVQSTYPGSTYASLNGTSMATPHVAGAAVLVKQKNPSWSNVRIRNHLKNTATSLGSTNLYGSGLVNAEAATR

SEQ ID NO: 57060 - protein, 269 aa, Unidentified
AQSVPWGISRVQAPAAHNRGLAGRGVKVAVLDTGISTHPDLNIRGGASFVPGEPSTQDGEGHGTHVAGTIAALNNSIGVLGVAPSAELYAVKVLGASGSGSVSSIAQGLEWAGNNGMHVANLSLGSPSPSATLEQAVNSATSRGVLVVAASGNSGEGSIDYPARYANAMAVGATDQNNNRADFSQYGAGLDIVAPGVNVQSTYPGSTYASLNGTSMATPHVAGAAALVKQKNPSWSNVQIRNHLKNTATSLGSTNLYGSGLVNAEAATR

SEQ ID NO: 57061 - protein, 269 aa, Unidentified
AQSVPWGISRVQAPAAHNRGLTGSGVKVAVLDTGISTHPDLNIRGGASFVPGEPSTQDGNGHGTHVAGTIAALNNSIGVLGVAPSAELYAVKVLGADGEGAISSIAQGLEWAGNNGMHVANLSLGSPSPSATLEQAVNSATSRGVLVVAASGNSGASSISYPARYANAMAVGATDQNNNRASFSQYGAGLDIVAPGVNVQSTYPGSTYASLNGTSMATPHVAGAAALVKQKNPSWSNRQIRNHLKNTATSLGSTNLYGSGLVNAEAATR

SEQ ID NO: 57062 - protein, 269 aa, Unidentified
AQSVPWGISRVQAPAAHNRKLTGSGVKVAVLDTGISTHPDLNIRGGASFVPGEPSTQDGEGHGTHVAGTIAALNNSIGVLGVAPSAELYAVKVLGASGGGSVSSIAQGLEWAGLNGMHVANLSLGSPSPSATLEQAVNSATSRGVLVVAASGNSGAGSISYPARYANAMAVGATDQNNNRADFSQYGAGLDIVAPGVNVQSTYPGSTYASQNGTSMATPHVAGAAALVKQKNPSWSNVQIRNHLKNTATSLGSTNLYGSGLVNAEAATR

SEQ ID NO: 57063 - protein, 269 aa, Unidentified
AQSVPWGISRVQAPAAHNRGLTGRGVKVAVLDTGISTHPDLNIRGGASFVPGEPSTQDGEGHGTHVAGTIAALNNSIGVLGVAPSAELYAVKVLGASGSGSVSSIAQGLEWAGLNGMHVANLSLGSPSPSATLEQAVNSATSRGVLVVAASGNSGEGSIDYPARYANAMAVGATDQNNNRADFSQYGAGLDIVAPGVNVQSTYPGSTYASLNGTSMATPHVAGAAALVKQKNPSWSNVQIRNHLKNTATSLGSTNLYGSGLVNAEAATR

SEQ ID NO: 57064 - protein, 269 aa, Unidentified
AQSVPWGISRVQAPAAHNRRLTGSGVKVAVLDTGISTHPDLNIRGGASFVPGEPSTQDGEGHGTHVAGTIAALNNDIGVLGVAPSAELYAVKVLGASGSGSVSSIAQGLEWAGNNDMHVANLSLGSPSPSATLEQAVNSATSRGVLVVAASGNSGAGSISYPARYANAMAVGATDQNNNRADFSQYGAGLDIVAPGVNVQSTYPGSTYASLNGTSMATPHVAGAAALVKQKNPSWSNVRIRNHLKNTATSLGSTNLYGSGLVNAEAATR

SEQ ID NO: 57065 - protein, 269 aa, Unidentified
AQSVPWGISRVQAPAAHRRRLTGRGVKVAVLDTGISTHPDLNIRGGASFVPGEPSTQDGNGHGTHVAGTIAALDNSIGVLGVAPSAELYAVKVLGASGSGSVSSIAQGLEWAGNNGMHVANLSLGSPSPSATLEQAVNSATSRGVLVVAASGNSGAGSISYPARYANAMAVGATDQNNNRASFSQYGAGLDIVAPGVNVQSTYPGSTYASENGTSMATPHVAGAAALVKQKNPSWSNVQIRNRLKNTATSLGSTNLYGSGLVNAEAATR

SEQ ID NO: 57066 - protein, 269 aa, Unidentified
AQSVPWGISRVQAPAAHNRGLTGRGVKVAVLDTGISTHPDLNIRGGASFVPGEPSTQDGEGHGTHVAGTIAALNNGIGVLGVAPSAELYAVKVLGASGSGSVSSIAQGLEWAGNNDMHVANLSLGSPSPSATLEQAVNSATSRGVLVVAASGNSGAGSISYPARYANAMAVGATDQNNNRADFSQYGAGLDIVAPGVNVQSTYPGSTYASLNGTSMATPHVAGAAALVKQKNPSWSNVQIRNRLKNTATSLGSTNLYGSGLVNAEAATR

SEQ ID NO: 57067 - protein, 269 aa, Unidentified
AQSVPWGISRVQAPAAHNRGLAGRGVKVAVLDSGISTHPDLNIRGGASFVPGEPSTQDGNGHGTHVAGTIAALNNNIGVLGVAPSAELYAVKVLGASGSGSVSSIAQGLEWAGNNGMHVANLSLGSPSPSATLEQAVNSATSRGVLVVAASGNSGAGSIDYPARYANAMAVGATDQNNNRADFSQYGAGLDIVAPGVNVQSTYPGSTYASLNGTSMATPHVAGAAALVKQKNPSWSNVQIRNHLKNTATSLGSTNLYGSGLVNAEAATR

SEQ ID NO: 57068 - protein, 269 aa, Unidentified
AQSVPWGISRVQAPAAHNRGLTGSGVKVAVLDTGISTHPDLNIRGGASFVPGEPSTQDGNGHGTHVAGTIAALNNGIGVLGVAPSAELYAVKVLGASGSGSVSSIAQGLEWAGNNDMHVANLSLGSESPSATLEQAVNSATSRGVLVVAASGNSGAGSISYPARYANAMAVGATDQNNNRADFSQYGAGLDIVAPGVNVQSTYPGSTYASLNGTSMATPHVAGAAALVKQKNPSWSNVRIRNRLKNTATSLGSTNLYGSGLVNAEAATR

SEQ ID NO: 57069 - protein, 269 aa, Unidentified
AQSVPWGISRVQAPAAHNRGLTGSGVKVAVLDTGISTHPDLNIRGGASFVPGEPSTQDGNGHGTHVAGTIAALNNSIGVLGVAPSAELYAVKVLGASGGGAISSIAQGLEWAGNNGMHVANLSLGSPSPSATLEQAVNSATSRGVLVVAASGNSGAGSISYPARYANAMAVGATDQNNNRASFSQYGAGLDIVAPGVNVQSTYPGSTYASLNGTSMATPHVAGAAVLVKQKNPSWRNVRIRNHLKNTATSLGSTNLYGSGLVNAEAATR

SEQ ID NO: 57070 - protein, 269 aa, Unidentified
AQSVPWGISRVQAPAAHNRGLRGSGVKVAVLDTGISTHPDLNIRGGASFVPGEPSTQDGNGHGTHVAGTIAALNNSIGVLGVAPSAELYAVKVLGASGAGNISSIAQGLEWAGNNGMHVANLSLGSPSPSATLEQAVNSATSRGVLVVAASGNSGAGSISYPARYANAMAVGATDQNNNRASFSQYGAGLDIVAPGVNVQSTYPGSTYASLNGTSMATPHVAGAATLVKQKNPSWSNVRIRNHLKNTATSLGSTNLYGSGLVNAEAATR

SEQ ID NO: 57071 - protein, 269 aa, Unidentified
AQSVPWGISRVQAPAAHNRGLTGSGVKVAVLDTGISTHPDLNIRGGASFVPGEPSTQDGNGHGTHVAGTIAALNNSIGVLGVAPSAELYAVKVLGADGRGAISSIAQGLEWAGNNGMFVANLSLGSPSPSATLEQAVNSATSRGVLVVAASGNSGASSISYPARYANAMAVGATDQNNNRASFSQYGAGLDIVAPGVNVQSTYPGSTYASLNGTSMATPHVAGAAALVKQKNPSWSNVQIRNHLKNTATSLGSTNLYGSGLVNAEAATR

SEQ ID NO: 57072 - protein, 269 aa, Unidentified
AQSVPWGISRVQAPAAHNRRLTGRGVKVAVLDTGISTHPDLNIRGGASFVPGEPSTQDGNGHGTHVAGTIAALNNDIGVLGVAPSAELYAVKVLGASGSGSVSSIAQGLEWAGNNSMHVANLSLGSESPSATLEQAVNSATSRGVLVVAASGNSGAGSISYPARYANAMAVGATDQNNNRASFSQYGAGLDIVAPGVNVQSTYPGSTYASLNGTSMATPHVAGAAALVKQKNPSWSNVQIRDHLKNTATSLGSTNLYGSGLVNAEAATR

SEQ ID NO: 57073 - protein, 269 aa, Unidentified
AQSVPWGISRVQAPAAHRRGLWGRGVKVAVLDTGISTHPDLNIRGGASFVPGEPSTQDGNGHGTHVAGTIAALDNSIGVLGVAPSAELYAVKVLGASGSGSVSSIAQGLEWAGNNGMHVANLSLGSPSPSATLEQAVNSATSRGVLVVAASGNSGAGSISYPARYANAMAVGATDQDNNRASFSQYGAGLDIVAPGVNVQSTYPGSTYASLNGTSMATPHVAGAAALVKQKNPSWSNVQIRNRLKNTATSLGSTNLYGSGLVNAEAATR

SEQ ID NO: 57074 - protein, 269 aa, Unidentified
AQSVPWGISRVQAPAAHNRKLLGFGVKVAVLDTGISTHPDLNIRGGASFVPGEPSTQDGNGHGTHVAGTIAALNNNIGVLGVAPSAELYAVKVLGASGSGSVSSIAQGLEWAGNNRMHVANLSLGSPSPSATLEQAVNSATSRGVLVVAASGNSGAGSISYPARYANAMAVGATDQNNNRASFSQYGAGLDIVAPGVNVQSTYPGSTYASENGTSMATPHVAGAAALVKQKNPSWSNVQIRNHLKNTATSLGSTNLYGSGLVNAEAATR

SEQ ID NO: 57075 - protein, 269 aa, Unidentified
AQSVPWGISRVQAPAAHNRGLTGRGVKVAVLDTGISTHPDLNIRGGASFVPGEPSTQDGNGHGTHVAGTIAALNNGIGVLGVAPSAELYAVKVLGASGSGSVSSIAQGLEWAGNNDMHVANLSLGSESPSATLEQAVNSATSRGVLVVAASGNSGADSISYPARYANAMAVGATDQNNNRASFSQYGAGLDIVAPGVNVQSTYPGSTYASLNGTSMATPHVAGAAALVKQKNPSWSNVQIRDHLKNTATSLGSTNLYGSGLVNAEAATR

SEQ ID NO: 57076 - protein, 269 aa, Unidentified
AQSVPWGISRVQAPAAHNRRLTGSGVKVAVLDTGISTHPDLNIRGGASFVPGEPSTQDGNGHGTHVAGTIAALNNGIGVLGVAPSAELYAVKVLGASGSGSVSSIAQGLEWAGNNDMHVANLSLGSPSPSATLEQAVNSATSRGVLVVAASGNSGAGSISYPARYANAMAVGATDQNNNRASFSQYGAGLDIVAPGVNVQSTYPGSTYASLNGTSMATPHVAGAAALVKQKNPSWSNVRIRDRLKNTATSLGSTNLYGSGLVNAEAATR

SEQ ID NO: 57077 - protein, 269 aa, Unidentified
AQSVPWGISRVQAPAAHNRRLTGRGVKVAVLDTGISTHPDLNIRGGASFVPGEPSTQDGEGHGTHVAGTIAALNNGIGVLGVAPSAELYAVKVLGASGSGSVSSIAQGLEWAGNNDMHVANLSLGSPSPSATLEQAVNSATSRGVLVVAASGNSGADSISYPARYANAMAVGATDQNNNRASFSQYGAGLDIVAPGVNVQSTYPGSTYASLNGTSMATPHVAGAAALVKQKNPSWSNVQIRNHLKNTATSLGSTNLYGSGLVNAEAATR

SEQ ID NO: 57078 - protein, 269 aa, Unidentified
AQSVPWGISRVQAPAAHNRGLTGRGVKVAVLDTGISTHPDLNIRGGASFVPGEPSTQDGEGHGTHVAGTIAALNNSIGVLGVAPSAELYAVKVLGASGSGSVSSIAQGLEWAGLNRMHVANLSLGIPSPSATLEQAVNSATSRGVLVVAASGNSGAGSISYPARYANAMAVGATDQNNNRADFSQYGAGLDIVAPGVNVQSTYPGSTYASLNGTSMATPHVAGAAALVKQKNPSWSNVQIRNHLKNTATSLGSTNLYGSGLVNAEAATR

SEQ ID NO: 57079 - protein, 269 aa, Unidentified
AQSVPWGISRVQAPAAHNRGLTGRGVKVAVLDTGISTHPDLNIRGGASFVPGEPSTQDGEGHGTHVAGTIAALNNSIGVLGVAPSAELYAVKVLGASGSGSVSSIAQGLEWAGLNRMHVANLSLGIPSPSATLEQAVNSATSRGVLVVAASGNSGEGSISYPARYANAMAVGATDQNNNRASFSQYGAGLDIVAPGVNVQSTYPGSTYASLNGTSMATPHVAGAAALVKQKNPSWSNVQIRNHLKNTATSLGSTNLYGSGLVNAEAATR

SEQ ID NO: 57080 - protein, 269 aa, Unidentified
AQSVPWGISRVQAPAAHNRGLAGRGVKVAVLDTGISTHPDLNIRGGASFVPGEPSTQDGEGHGTHVAGTIAALNNSIGVLGVAPSAELYAVKVLGASGSGSVSSIAQGLEWAGNNRMHVANLSLGIPSPSATLEQAVNSATSRGVLVVAASGNSGEGSISYPARYANAMAVGATDQNNNRASFSQYGAGLDIVAPGVNVQSTYPGSTYASLNGTSMATPHVAGAAALVKQKNPSWSNVQIRNHLKNTATSLGSTNLYGSGLVNAEAATR

SEQ ID NO: 57081 - protein, 269 aa, Unidentified
AQSVPWGISRVQAPAAHNRRLTGSGVKVAVLDTGISTHPDLRIRGGASFVPGEPSTQDGNGHGTHVAGTIAALNNSIGVLGVAPSAELYAVKVLAASGNGSVSSIAQGLEWAGLNGMHVANLSLGAPSPSATLEQAVNSATSRGVLVVAASGNSGAGSISYPARYANAMAVGATDQNNNRASFSQYGAGLDIVAPGVNVQSTYPGSTYASLNGTSMATPHVAGAAALVKQKNPSWSNVQIRNHLKNTATSLGSTNLYGSGLVNAEAATR

SEQ ID NO: 57082 - protein, 269 aa, Unidentified
AQSVPWGISRVQAPAAHNRGLKGSGVKVAVLDTGISTHPDLNIRGGASFVPGEPSTQDGNGHGTHVAGTIAALNNSIGVLGVAPSAELYAVKVLGASGTGAISSIAQGLEWAGNNGMHVANLSLGSPSPSATLEQAVNSATSRGVLVVAASGNSGAGSISYPARYANAMAVGATDQNNNRASFSQYGAGLDIVAPGVNVQSTYPGSTYASLNGTSMATPHVAGAATLVKQKNPSWSNVRIRNHLKNTATSLGSTNLYGSGLVNAEAATR

SEQ ID NO: 57083 - protein, 269 aa, Unidentified
AQSVPWGISRVQAPAAHNRGLTGSGVKVAVLDTGISTHPDLRIRGGASFVPGEPSTQDGNGHGTHVAGTIAALNNSIGVLGVAPSAELYAVKVLGASGGGAISSIAQGLEWAGNNGMHVANLSLGSPSPSATLEQAVNSATSRGVLVVAASGNSGAGSISYPARYANAMAVGATDQNNNRASFSQYGAGLDIVAPGVNVQSTYPGSTYASLNGTSMATPHVAGAAVLVKQKNPSWSNVRIRNHLKNTATSLGSTNLYGSGLVNAEAATR

SEQ ID NO: 57084 - protein, 269 aa, Unidentified
AQSVPWGISRVQAPAAHNRGLTGSGVKVAVLDTGISTHPDLDIRGGASFVPGEPSTQDGNGHGTHVAGTIAALNNSIGVLGVAPSAELYAVKVLGASGGGAISSIAQGLEWAGNNGMHVANLSLGSPSPSATLEQAVNSATSRGVLVVAASGNSGAGSISYPARYANAMAVGATDQNNNRASFSQYGAGLDIVAPGVNVQSTYPGSTYASLNGTSMATPHVAGAAVLVKQKNPSWRNVQIRNHLKNTATSLGSTNLYGSGLVNAEAATR

SEQ ID NO: 57085 - protein, 269 aa, Unidentified
AQSVPWGISRVQAPAAHNRGLTGRGVKVAVLDTGISTHPDLNIRGGASFVPGEPSTQDGNGHGTHVAGTIAALNNGIGVLGVAPSAELYAVKVLGASGSGSVSSIAQGLEWAGNNSMHVANLSLGSESPSATLEQAVNSATSRGVLVVAASGNSGADSISYPARYANAMAVGATDQNNNRASFSQYGAGLDIVAPGVNVQSTYPGSTYASLNGTSMATPHVAGAAALVKQKNPSWSNVQIRNRLKNTATSLGSTNLYGSGLVNAEAATR

SEQ ID NO: 57086 - protein, 269 aa, Unidentified
AQSVPWGISRVQAPAAHNRGLTGSGVRVAVLDTGISTHPDLNIRGGASFVPGEPSTQDGNGHGTHVAGTIAALNNSIGVLGVAPSAELYAVKVLGASSSGSVSSIAQGLEWAGNNRMHVANLSLGSPSPSATLEQAVNSATSRGVLVVAASGNSGAGDISYPARYANAMAVGATDQNNNRADFSQYGAGLDIVAPGVNVQSTYPGSTYASLNGTSMATPHVAGAAALVKQKNPSWSFVQIRNHLKNTATSLGSTNLYGSGLVNAEAATR

SEQ ID NO: 57087 - protein, 269 aa, Unidentified
AQSVPWGISRVQAPAAHNRGLTGSGVKVAVLDTGISTHPDLNIRGGASFVPGEPSTQDGNGHGTHVAGTIAALNNHIGVLGVAPSAELYAVKVLGADGRGAISSIAQGLEWAGNNGMHVANLSLGSPSPSATLEQAVNSATSRGVLVVAASGNSGASSISYPARYANAMAVGATDQNNNRASFSQYGAGLDIVAPGVNVQSTYPGSTYASLNGTSMATPHVAGAAALVKQKNPSWSNVQIRNHLKNTATSLGSTNLYGSGLVNAEAATR

SEQ ID NO: 57088 - protein, 269 aa, Unidentified
AQSVPWGISRVQAPAAHNRGLRGSGVKVAVLDTGISTHPDLNIRGGASFVPGEPSTQDGNGHGTHVAGTIAALNNSIGVLGVAPSAELYAVKVLGASGGGNLSSIAQGLEWAGNNGMHVANLSLGSPSPSATLEQAVNSATSRGVLVVAASGNSGAGSISYPARYANAMAVGATDQNNNRASFSQYGAGLDIVAPGVNVQSTYPGSTYASLNGTSMATPHVAGAAVLVKQKNPSWSNVRIRNHLKNTATSLGSTNLYGSGLVNAEAATR

SEQ ID NO: 57089 - protein, 269 aa, Unidentified
AQSVPWGISRVQAPAAHNRGLTGSGVKVAVLDTGISTHPDLNIRGGASFVPGEPSTQDGNGHGTHVAGTIAALNNSIGVLGVAPSAELYAVKVLGASGGGAISSIAQGLEWAGNNGMHVANLSLGSPSPSATLEQAVNSATSRGVLVVAASGNSGADSISYPARYANAMAVGATDQNNNRASFSQYGAGLDIVAPGVNVQSTYPGSTYASLNGTSMATPHVAGAAVLVKQKNPSWSNVRIRNHLKNTATSLGSTNLYGSGLVNAEAATR

SEQ ID NO: 57090 - protein, 269 aa, Unidentified
AQSVPWGISRVQAPAAHNRGLTGSGVKVAVLDTGISTHPDLNIRGGASFVPGEPSTQDGNGHGTHVAGTIAALNNSIGVLGVAPSARLYAVKVLGADGRGAISSIAQGLEWAGNNGMHVANLSLGSPSPSATLEQAVNSATSRGVLVVAASGNSGASSISYPARYANAMAVGATDQNNNRASFSQYGAGLDIVAPGVNVQSTYPGSTYASLNGTSMATPHVAGAAALVKQKNPSWSNVQIRNHLKNTATSLGSTNLYGSGLVNAEAATR

SEQ ID NO: 57091 - protein, 269 aa, Unidentified
AQSVPWGISRVQAPAAHNRGLTGRGVKVAVLDTGISTHPDLNIRGGASFVPGEPSTQDGNGHGTHVAGTIAALNNGIGVLGVAPSAELYAVKVLGASGSGSVSSIAQGLEWAGNNDMHVANLSLGSPSPSATLEQAVNSATSRGVLVVAASGNSGADSISYPARYANAMAVGATDQNNNRADFSQYGAGLDIVAPGVNVQSTYPGSTYASLNGTSMATPHVAGAAALVKQKNPSWSNVQIRDHLKNTATSLGSTNLYGSGLVNAEAATR

SEQ ID NO: 57092 - protein, 269 aa, Unidentified
AQSVPWGISRVQAPAAHNRGLRGSGVKVAVLDTGISTHPDLNIRGGASFVPGEPSTQDGNGHGTHVAGTIAALNNSIGVLGVAPSAELYAVKVLGASGTGGLSSIAQGLEWAGNNGMHVANLSLGSPSPSATLEQAVNSATSRGVLVVAASGNSGAGSISYPARYANAMAVGATDQNNNRASFSQYGAGLDIVAPGVNVQSTYPGSTYASLNGTSMATPHVAGAAVLVKQKNPSWSNVRIRNHLKNTATSLGSTNLYGSGLVNAEAATR

SEQ ID NO: 57093 - protein, 269 aa, Unidentified
AQSVPWGISRVQAPAAHNRRLTGRGVKVAVLDTGISTHPDLRIRGGASFVPGEPSTQDGNGHGTHVAGTIAALNNSIGVLGVAPSAELYAVKVLGASGAGSVSSIAQGLEWAGNNGMHVANLSLGSPSPSATLEQAVNSATSRGVLVVAASGNSGAGSISYPARYANAMAVGATDQNNNRASFSQYGAGLDIVAPGVNVQSTYIGSAYASLNGTSMATPHVAGAAALVKQKNPSWSNVQIRNHLKNTATSLGSTNLYGSGLVNAEAATR

SEQ ID NO: 57094 - protein, 269 aa, Unidentified
AQSVPWGISRVQAPAAHRRGLTGRGVKVAVLDTGISTHPDLNIRGGASFVPGEPSTQDGNGHGTHVAGTIAALDNSIGVLGVAPSAELYAVKVLGASGSGSVSSIAQGLEWAGNNGMHVANLSLGSPSPSATLEQAVNSATSRGVLVVAASGNSGAGSISYPARYANAMAVGATDQNNNRASFSQYGAGLDIVAPGVNVQSTYPQSAYASLNGTSMATPHVAGAAALVKQKNPSWSNVQIRNRLKNTATSLGSTNLYGSGLVNAEAATR

SEQ ID NO: 57095 - protein, 269 aa, Unidentified
AQSVPWGISRVQAPAAHNRRLTGSGVKVAVLDTGISTHPDLNIRGGASFVPGEPSTQDGNGHGTHVAGTIAALNNGIGVLGVAPSAELYAVKVLGASGSGSVSSIAQGLEWAGNNSMHVANLSLGSESPSATLEQAVNSATSRGVLVVAASGNSGAGSISYPARYANAMAVGATDQNNNRASFSQYGAGLDIVAPGVNVQSTYPGSTYASLNGTSMATPHVAGAAALVKQKNPSWSNVRIRDHLKNTATSLGSTNLYGSGLVNAEAATR

SEQ ID NO: 57096 - protein, 269 aa, Unidentified
AQSVPWGISRVQAPAAHNRKLTGSGVKVAVLDTGISTHPDLNIRGGASFVPGEPSTQDGEGHGTHVAGTIAALNNSIGVLGVAPSAELYAVKVLSASGQGSVSSIAQGLEWAGLNGMHVANLSLGSPSPSATLEQAVNSATSRGVLVVAASGNSGAGSISYPARYANAMAVGATDQNNNRASFSQYGAGLDIVAPGVNVQSTYPGSTYASQNGTSMATPHVAGAAALVKQKNPSWSNVQIRNHLKNTATSLGSTNLYGSGLVNAEAATR

SEQ ID NO: 57097 - protein, 269 aa, Unidentified
AQSVPWGISRVQAPAAHNRGLQGSGVKVAVLDTGISTHPDLNIRGGASFVPGEPSTQDGNGHGTHVAGTIAALNNSIGVLGVAPSAELYAVKVLGASGNGGISSIAQGLEWAGNNGMHVANLSLGSPSPSATLEQAVNSATSRGVLVVAASGNSGAGSISYPARYANAMAVGATDQNNNRASFSQYGAGLDIVAPGVNVQSTYPGSTYASLNGTSMATPHVAGAAVLVKQKNPSWSNVRIRNHLKNTATSLGSTNLYGSGLVNAEAATR

SEQ ID NO: 57098 - protein, 269 aa, Unidentified
AQSVPWGISRVQAPAAHNRRLTGRGVKVAVLDTGISTHPDLNIRGGASFVPGEPSTQDGNGHGTHVAGTIAALNNSIGVLGVAPSAELYAVKVLAASGAGSVSSIAQGLEWAGNNGMHVANLSLGAPSPSATLEQAVNSATSRGVLVVAASGNSGAGSISYPARYANAMAVGATDQNNNRASFSQYGAGLDIVAPGVNVQSTYPGSTYASQNGTSMATPHVAGAAALVKQKNPSWSNVQIRNHLKNTATSLGSTNLYGSGLVNAEAATR

SEQ ID NO: 57099 - protein, 269 aa, Unidentified
AQSVPWGISRVQAPAAHNRGLTGSGFKVAVLDTGISTHPDLNIRGGRSFVPGEPSTQDGNGHGTHVAGTIAALNNSIGVLGVAPSAELYAVKVLGASGSGSVTSIAQGLEWAGNNGMHVANLSLGSPSPSATLEQAVNSATSRGVLVVAASGNSGAGSISYPARYANAMAVGATDQNNNRASFSQYGAGLDIVAPGVNVQSTYPGSAYASLDGTSMAAPHVAGAAALVKQKNPSWSNVQIRNHLKNTATSLGSTNLYGSGLVNAEAATR

SEQ ID NO: 57100 - protein, 269 aa, Unidentified
AQSVPWGISRVQAPAAHNRGLTGSGVKVAVLDTGISTHPDLNIRGGASFVPGEPSTQDGEGHGTHVAGTIAALNNSIGVLGVAPSAELYAVKVLGASGSGSVSSIAQGLEWAGLNRMHVANLSLGIPSPSATLEQAVNSATSRGVLVVAASGNSGEGSISYPARYANAMAVGATDQNNNRADFSQYGAGLDIVAPGVNVQSTYPGSTYASLNGTSMATPHVAGAAALVKQKNPSWSNVQIRNHLKNTATSLGSTNLYGSGLVNAEAATR

SEQ ID NO: 57101 - protein, 269 aa, Unidentified
AQSVPWGISRVQAPAAHNRGLYGSGVKVAVLDTGISTHPDLNIRGGASFVPGEPSTQDGNGHGTHVAGTIAALNNSIGVLGVAPSAELYAVKVLGASGAGNISSIAQGLEWAGNNGMHVANLSLGSPSPSATLEQAVNSATSRGVLVVAASGNSGAGSISYPARYANAMAVGATDQNNNRASFSQYGAGLDIVAPGVNVQSTYPGSTYASLNGTSMATPHVAGAAVLVKQKNPSWSNVRIRNHLKNTATSLGSTNLYGSGLVNAEAATR

SEQ ID NO: 57102 - protein, 269 aa, Unidentified
AQSVPWGISRVQAPAAHNRGLTGSGVKVAVLDTGISTHPDLNIRGGASFVPGEPSTQDGEGHGTHVAGTIAALNNSIGVLGVAPSAELYAVKVLGASGSGSLSSIAQGLEWAGNNGMHVANLSLGSPSPSATLEQAVNSATSRGVLVVAASGNSGEGSISYPARYANAMAVGATDQNNNHADFSQYGAGLDIVAPGVNVQSTYPGSTYASLNGTSMATPHVAGAAALVKQKNPSWSNVQIRNRLKNTATSLGSTNLYGSGLVNAEAATR

SEQ ID NO: 57103 - protein, 269 aa, Unidentified
AQSVPWGISRVQAPAAHNRGLAGRGVKVAVLDTGISTHPDLNIRGGASFVPGEPSTQDGEGHGTHVAGTIAALNNSIGVLGVAPSAELYAVKVLGASGSGSVSSIAQGLEWAGLNRMHVANLSLGSPSPSATLEQAVNSATSRGVLVVAASGNSGAGSISYPARYANAMAVGATDQNNNRADFSQYGAGLDIVAPGVNVQSTYPGSTYASLNGTSMATPHVAGAAALVKQKNPSWSNVQIRNHLKNTATSLGSTNLYGSGLVNAEAATR

SEQ ID NO: 57104 - protein, 269 aa, Unidentified
AQSVPWGISRVQAPAAHNRGLTGSGVKVAVLDTGISTHPDLNIRGGASFVPGEPSTQDGNGHGTHVAGTIAALNNSIGVLGVAPSAELYAVKVLGADGRGAISSIAQGLEWAGNNGMHVANLSLGSPSPSATLEQAVNSATSRGVLVVAASGNSGASSISYPARYANAMAVGATDQNNNRASFSQYGLGLDIVAPGVNVQSTYPGSTYASLNGTSMATPHVAGAAALVKQKNPSWSNVQIRNHLKNTATSLGSTNLYGSGLVNAEAATR

SEQ ID NO: 57105 - protein, 269 aa, Unidentified
AQSVPWGISRVQAPAAHNRGLAGSGVKVAVLDTGISTHPDLNIRGGASFVPGEPSTQDGNGHGTHVAGTIAALNNSIGVLGVAPSAELYAVKVLGASGTGNISSIAQGLEWAGNNGMHVANLSLGSPSPSATLEQAVNSATSRGVLVVAASGNSGAGSISYPARYANAMAVGATDQNNNRASFSQYGAGLDIVAPGVNVQSTYPGSTYASLNGTSMATPHVAGAAVLVKQKNPSWSNVRIRNHLKNTATSLGSTNLYGSGLVNAEAATR

SEQ ID NO: 57106 - protein, 269 aa, Unidentified
AQSVPWGISRVQAPAAHRRRLTGSGVKVAVLDTGISTHPDLRITGGASFVPGEPSTQDGNGHGTHVAGTIAALDNSIGVLGVAPSAELYAVKVLGASGSGSVSSIAQGLEWAGNNGMHVANLSLGSPSPSATLEQAVNSATSRGVLVVAASGNSGAGSISYPARYANAMAVGATDQNNNRASFSQYGAGLDIVAPGVNVQSTYPGSTYASLNGTSMATPHVAGAAALVKQKNPSWSNVQIRNRLKNTATSLGSTNLYGSGLVNAEAATR

SEQ ID NO: 57107 - protein, 269 aa, Unidentified
AQSVPWGISRVQAPAAHNRGLKGSGVKVAVLDTGISTHPDLNIRGGASFVPGEPSTQDGNGHGTHVAGTIAALNNSIGVLGVAPSAELYAVKVLGASGGGNISSIAQGLEWAGNNGMHVANLSLGSPSPSATLEQAVNSATSRGVLVVAASGNSGAGSISYPARYANAMAVGATDQNNNRASFSQYGAGLDIVAPGVNVQSTYPGSTYASLNGTSMATPHVAGAALLVKQKNPSWSNVRIRNHLKNTATSLGSTNLYGSGLVNAEAATR

SEQ ID NO: 57108 - protein, 269 aa, Unidentified
AQSVPWGISRVQAPAAHNRGLQGSGVKVAVLDTGISTHPDLNIRGGASFVPGEPSTQDGNGHGTHVAGTIAALNNSIGVLGVAPSAELYAVKVLGASGNGAISSIAQGLEWAGNNGMHVANLSLGSPSPSATLEQAVNSATSRGVLVVAASGNSGAGSISYPARYANAMAVGATDQNNNRASFSQYGAGLDIVAPGVNVQSTYPGSTYASLNGTSMATPHVAGAAMLVKQKNPSWSNVWIRNHLKNTATSLGSTNLYGSGLVNAEAATR

SEQ ID NO: 57109 - protein, 269 aa, Unidentified
AQSVPWGISRVQAPAAHNRGLYGSGVKVAVLDTGISTHPDLNIRGGASFVPGEPSTQDGNGHGTHVAGTIAALNNSIGVLGVAPSAELYAVKVLGASGTGGISSIAQGLEWAGNNGMHVANLSLGSPSPSATLEQAVNSATSRGVLVVAASGNSGAGSISYPARYANAMAVGATDQNNNRASFSQYGAGLDIVAPGVNVQSTYPGSTYASLNGTSMATPHVAGAAVLVKQKNPSWSNVSIRNHLKNTATSLGSTNLYGSGLVNAEAATR

SEQ ID NO: 57110 - protein, 269 aa, Unidentified
AQSVPWGISRVQAPAAHNRGLTGSGVKVAVLDTGISTHPDLNIRGGASFVPGEPSTQDGNGHGTHVAGTIAALNNSIGVLGVAPSAELYAVKVLGADGEGAISSIAQGLEWAGNNGMHVANLSLGSPSPSATLEQAVNSATSRGVLVVAASGNSGASSISYPARYANAMAVGATDQNNNRASFSQYGAGLDIVAPGVNVQSTYPGSTYASLNGTSMATPHVAGAAALVKQKNPSWSNLQIRNHLKNTATSLGSTNLYGSGLVNAEAATR

SEQ ID NO: 57111 - protein, 269 aa, Unidentified
AQSVPWGISRVQAPAAHNRRLTGSGVKVAVLDTGISTHPDLNIRGGASFVPGEPSTQDGNGHGTHVAGTIAALNNGIGVLGVAPSAELYAVKVLGASGSGSVSSIAQGLEWAGNNSMHVANLSLGSPSPSATLEQAVNSATSRGVLVVAASGNSGADSISYPARYANAMAVGATDQNNNRASFSQYGAGLDIVAPGVNVQSTYPGSTYASLNGTSMATPHVAGAAALVKQKNPSWSNVRIRDHLKNTATSLGSTNLYGSGLVNAEAATR

SEQ ID NO: 57112 - protein, 269 aa, Unidentified
AQSVPWGISRVQAPAAHNRGLRGSGVKVAVLDTGISTHPDLNIRGGASFVPGEPSTQDGNGHGTHVAGTIAALNNSIGVLGVAPSAELYAVKVLGASGAGALSSIAQGLEWAGNNGMHVANLSLGSPSPSATLEQAVNSATSRGVLVVAASGNSGAGSISYPARYANAMAVGATDQNNNRASFSQYGAGLDIVAPGVNVQSTYPGSTYASLNGTSMATPHVAGAAVLVKQKNPSWSNVSIRNHLKNTATSLGSTNLYGSGLVNAEAATR

SEQ ID NO: 57113 - protein, 269 aa, Unidentified
AQSVPWGISRVQAPAAHNRRLTGRGVKVAVLDTGISTHPDLNITGGASFVPGEPSTQDGNGHGTHVAGTIAALNNSIGVLGVAPSAELYAVKVLGASGAGSVSSIAQGLEWAGNNGMHVANLSLGSPSPSATLEQAVNSATSRGVLVVAASGNSGAGSISYPARYANAMAVGATDQNNNRASFSQYGAGLDIVAPGVNVQSTYPQSAYASLNGTSMATPHVAGAAALVKQKNPSWSNVQIRNHLKNTATSLGSTNLYGSGLVNAEAATR

SEQ ID NO: 57114 - protein, 269 aa, Unidentified
AQSVPWGISRVQAPAAHNRRLWGRGVKVAVLDTGISTHPDLRITGGASFVPGEPSTQDGNGHGTHVAGTIAALNNSIGVLGVAPSAELYAVKVLGASGAGSVSSIAQGLEWAGNNGMHVANLSLGSPSPSATLEQAVNSATSRGVLVVAASGNSGAGSISYPARYANAMAVGATDQNNNRASFSQYGAGLDIVAPGVNVQSTYPGSTYASLNGTSMATPHVAGAAALVKQKNPSWSNVQIRNHLKNTATSLGSTNLYGSGLVNAEAATR

SEQ ID NO: 57115 - protein, 269 aa, Unidentified
AQSVPWGISRVQAPAAHNRRLTGSGVKVAVLDTGISTHPDLNIRGGASFVPGEPSTQDGEGHGTHVAGTIAALNNGIGVLGVAPSAELYAVKVLGASGSGSVSSIAQGLEWAGNNSMHVANLSLGSESPSATLEQAVNSATSRGVLVVAASGNSGADSISYPARYANAMAVGATDQNNNRASFSQYGAGLDIVAPGVNVQSTYPGSTYASLNGTSMATPHVAGAAALVKQKNPSWSNVQIRNHLKNTATSLGSTNLYGSGLVNAEAATR

SEQ ID NO: 57116 - protein, 269 aa, Unidentified
AQSVPWGISRVQAPASHNRGLTGSGVKVAVLDTGISTHPDLNIRGGASFVPGEPSTQDGEGHGTHVAGTIAALNNSIGVLGVAPSAELYAVKVLGASGSGSLSSIAQGLEWAGNNGMHVANLSLGSPSPSATLEQAVNSATSRGVLVVAASGNSGEGSISYPARYANAMAVGATDQNNNHASFSQYGAGLDIVAPGVNVQSTYPGSTYASLNGTSMATPHVAGAAALVKQKNPSWSNVQIRNHLKNTATSLGSTNLYGSGLVNAFAATR

SEQ ID NO: 57117 - protein, 269 aa, Unidentified
AQSVPWGISRVQAPAAHNRRLWGSGVKVAVLDTGISTHPDLNITGGASFVPGEPSTQDGNGHGTHVAGTIAALNNSIGVLGVAPSAELYAVKVLGASGAGSVSSIAQGLEWAGLNGMHVANLSLGSPSPSATLEQAVNSATSRGVLVVAASGNSGAGSISYPARYANAMAVGATDQNNNRASFSQYGAGLDIVAPGVNVQSTYIGSTYASLNGTSMATPHVAGAAALVKQKNPSWSNVQIRNHLKNTATSLGSTNLYGSGLVNAEAATR

SEQ ID NO: 57118 - protein, 269 aa, Unidentified
AQSVPWGISRVQAPAAHNRGLTGSGVKVAVLDTGISTHPDLNIRGGASFVPGEPSTQDGNGHGTHVAGTIAALDNSIGVLGVAPSAELYAVKVLGASGSGAISSIAQGLEWAGNNGMHVANLSLGSPSPSATLEQAVNSATSRGVLVVAASGNSGAGSISYPARYANAMAVGATDQNNNRASFSQYGAGLDIVAPGVNVQSTYPGPTYASLNGTSMATPHVAGAAALVKQKNPSWSNVLIRNHLKNTATSLGSTNLYGSGLVNAVAATR

SEQ ID NO: 57119 - protein, 269 aa, Unidentified
AQSVPWGISRVQAPAAHNRGLRGSGVKVAVLDTGISTHPDLNIRGGASFVPGEPSTQDGNGHGTHVAGTIAALNNSIGVLGVAPSAELYAVKVLGASGTGGISSIAQGLEWAGNNGMHVANLSLGSPSPSATLEQAVNSATSRGVLVVAASGNSGAGSISYPARYANAMAVGATDQNNNRASFSQYGAGLDIVAPGVNVQSTYPGSTYASLNGTSMATPHVAGAAMLVKQKNPSWSNVSIRNHLKNTATSLGSTNLYGSGLVNAEAATR

SEQ ID NO: 57120 - protein, 269 aa, Unidentified
AQSVPWGISRVQAPAAHRRGLTGRGVKVAVLDTGISTHPDLNIRGGASFVPGEPSTQDGNGHGTHVAGTIAALDNSIGVLGVAPSAELYAVKVLGASGSGSVSSIAQGLEWAGANGMHVANLSLGSPSPSATLEQAVNSATSRGVLVVAASGNSGAGSISYPARYANAMAVGATDQNNNRASFSQYGAGLDIVAPGVNVQSTYPGSAYASLNGTSMATPHVAGAAALVKQKNPSWSNVQIRNRLKNTATSLGSTNLYGSGLVNAEAATR

SEQ ID NO: 57121 - protein, 269 aa, Unidentified
AQSVPWGISRVQAPAAHNRRLTGSGVKVAVLDTGISTHPDLNIRGGASFVPGEPSTQDGNGHGTHVAGTIAALNNGIGVLGVAPSAELYAVKVLGASGSGSVSSIAQGLEWAGNNSMHVANLSLGSPSPSATLEQAVNSATSRGVLVVAASGNSGADSISYPARYANAMAVGATDQNNNRASFSQYGAGLDIVAPGVNVQSTYPGSTYASLNGTSMATPHVAGAAALVKQKNPSWSNVQIRDRLKNTATSLGSTNLYGSGLVNAEAATR

SEQ ID NO: 57122 - protein, 269 aa, Unidentified
AQSVPWGISRVQAPAAHNRGLTGSGVKVAVLDTGISTHPDLNIRGGASFVPGEPSTQDGNGHGTHVAGTIAALNNSIGVLGVAPSAELYAVKVLGASGSGSVSSIAQGLEWAGNNGMHVANLSLGSPSPSATLEQAVNSATSRGVLVVAASGNSGEGSISYPARYANAMAVGATDQNNNRADFSQYGAGLDIVAPGVNVQSTYPGSTYASLNGTSMATPHVAGAAVLVKQKNPSWSNVRIRDRLKNTATSLGSTNLYGSGLVNAEAATR

SEQ ID NO: 57123 - protein, 269 aa, Unidentified
AQSVPWGISRVQAPAAHNRGLTGRGVKVAVLDTGISTHPDLNIRGGASFVPGEPSTQDGNGHGTHVAGTIAALNNDIGVLGVAPSAELYAVKVLGASGSGSVSSIAQGLEWAGNNSMHVANLSLGSPSPSATLEQAVNSATSRGVLVVAASGNSGAGSISYPARYANAMAVGATDQNNNRADFSQYGAGLDIVAPGVNVQSTYPGSTYASLNGTSMATPHVAGAAALVKQKNPSWSNVRIRNRLKNTATSLGSTNLYGSGLVNAEAATR

SEQ ID NO: 57124 - protein, 269 aa, Unidentified
AQSVPWGISRVQAPAAHNRKLTGSGVKVAVLDTGISTHPDLNIRGGASFVPGEPSTQDGNGHGTHVAGTIAALNNSIGVLGVAPSAELYAVKVLGASGDGSVSSIAQGLEWAGLNGMHVANLSLGQPSPSATLEQAVNSATSRGVLVVAASGNSGAGSISYPARYANAMAVGATDQNNNRASFSQYGAGLDIVAPGVNVQSTYSGSAYASLNGTSMATPHVAGAAALVKQKNPSWSNVQIRNHLKNTATSLGSTNLYGSGLVNAEAATR

SEQ ID NO: 57125 - protein, 269 aa, Unidentified
AQSVPWGISRVQAPAAHNRGLRGSGVKVAVLDTGISTHPDLNIRGGASFVPGEPSTQDGNGHGTHVAGTIAALNNSIGVLGVAPSAELYAVKVLGASGNGALSSIAQGLEWAGNNGMHVANLSLGSPSPSATLEQAVNSATSRGVLVVAASGNSGAGSISYPARYANAMAVGATDQNNNRASFSQYGAGLDIVAPGVNVQSTYPGSTYASLNGTSMATPHVAGAATLVKQKNPSWSNVRIRNHLKNTATSLGSTNLYGSGLVNAEAATR

SEQ ID NO: 57126 - protein, 269 aa, Unidentified
AQSVPWGISRVQAPAAHNRGLAGSGVKVAVLDTGISTHPDLNIRGGASFVPGEPSTQDGNGHGTHVAGTIAALNNSIGVLGVAPSAELYAVKVLGASGNGALSSIAQGLEWAGNNGMHVANLSLGSPSPSATLEQAVNSATSRGVLVVAASGNSGAGSISYPARYANAMAVGATDQNNNRASFSQYGAGLDIVAPGVNVQSTYPGSTYASLNGTSMATPHVAGAALLVKQKNPSWSNVRIRNHLKNTATSLGSTNLYGSGLVNAEAATR

SEQ ID NO: 57127 - protein, 269 aa, Unidentified
AQSVPWGISRVQAPAAHNRGLTGSGVKVAVLDTGISTHPDLNIRGGTSFVPGEPSTQDGNGHGTHVAGTIAALDNSIGVLGVAPSAELYAVKVLGASGSGAISSIAQGLEWAGNNGMHVANLSLGSPSPSATLEQAVNSATSRGVLVVAASGNSGAGSISYPARYANAMAVGATDQNNNRASFSQYGAGLDIVAPGVNVESTYPGSTYASLNGTSMATPHVAGAAALVKQKNPSWSNVQIRNHLTNTATSLGSTNLYGSGLVNAEAATR

SEQ ID NO: 57128 - protein, 269 aa, Unidentified
AQSVPWGISRVQAPAAHNRGLAGSGVKVAVLDTGISTHPDLNIRGGASFVPGEPSTQDGNGHGTHVAGTIAALNNSIGVLGVAPSAELYAVKVLGASGAGNISSIAQGLEWAGNNGMHVANLSLGSPSPSATLEQAVNSATSRGVLVVAASGNSGAGSISYPARYANAMAVGATDQNNNRASFSQYGAGLDIVAPGVNVQSTYPGSTYASLNGTSMATPHVAGAATLVKQKNPSWSNVWIRNHLKNTATSLGSTNLYGSGLVNAEAATR

SEQ ID NO: 57129 - protein, 269 aa, Unidentified
AQSVPWGISRVQAPAAHNRGLTGGGVKVAVLDTGISTHPDLNIRGGASFVPGEPSTQDGNGHGTHVAGTIAALNNSIGVLGVAPSAELYAVKVLSASGNGSVSSIANGLEWAGNNGMHVANLSLGAPSPSATLEQAVNSATSRGVLVVAASGNSGAGSISYPARYANAMAVGATDQNNNRADFSQYGAGLDIVAPGVNVQSTYPGSTYASQNGTSSATPHVAGAAALVKQKNPSWSNVQIRNHLKNTATSLGSTNLYGSGLVNAEAATR

SEQ ID NO: 57130 - protein, 269 aa, Unidentified
AQSVPWGISRVQAPAAHNRGLTGSGVKVAVLDTGISTHPDLNIRGGASFVPGEPSTQDGNGHGTHVAGTIAALNNSIGVLGVAPNAELYAVKVLGASGMGSVSSIAQGLEWAGNNVMHVANLSLGLQAPSATLEQAVNSATSRGVLVVAASGNSGAGSISYPARYANAMAVGATDQNNNRASFSQYGAGLDIVAPGVNVQSTYPGSTYASLNGTSMATPHVAGAAALVKQKNPSWSNVQIRNHLKNTATSLGSTNLYGSGLVNAEAATR

SEQ ID NO: 57131 - protein, 269 aa, Unidentified
AQSVPWGISRVQAPAAHNRGLTGRGVKVAVLDTGISTHPDLNIRGGASFVPGEPSTQDGNGHGTHVAGTIAALNNDIGVLGVAPSAELYAVKVLGASGSGSVSSIAQGLEWAGNNSMHVANLSLGSESPSATLEQAVNSATSRGVLVVAASGNSGAGSISYPARYANAMAVGATDQNNNRADFSQYGAGLDIVAPGVNVQSTYPGSTYASLNGTSMATPHVAGAAALVKQKNPSWSNVRIRNHLKNTATSLGSTNLYGSGLVNAEAATR

SEQ ID NO: 57132 - protein, 269 aa, Unidentified
AQSVPWGISRVQAPAAHNRGLTGSGVKVAVLDTGISTHPDLNIRGGASFVPGEPSTQDGNGHGTHVAGTIAALDNSIGVLGVAPSAELYAVKVLGASGGGAISSIAQGLEWAGNNGMHVANLSLGSPSPSATLEQAVNSATSRGVLVVAASGNSGAGSISYPARYANAMAVGATDQNNNRASFSQYGAGLDIVAPGVNVQSTYPGSTYASLNGTSQATPHVAGAAVLVKQKNPSWSNVRIRNHLKNTATSLGSTNLYGSGLVNAEAATR

SEQ ID NO: 57133 - protein, 269 aa, Unidentified
AQSVPWGISRVQAPAAHNRGLRGSGVKVAVLDTGISTHPDLNIRGGASFVPGEPSTQDGNGHGTHVAGTIAALNNSIGVLGVAPSAELYAVKVLGASGTGNISSIAQGLEWAGNNGMHVANLSLGSPSPSATLEQAVNSATSRGVLVVAASGNSGAGSISYPARYANAMAVGATDQNNNRASFSQYGAGLDIVAPGVNVQSTYPGSTYASLNGTSMATPHVAGAATLVKQKNPSWSNVRIRNHLKNTATSLGSTNLYGSGLVNAEAATR

SEQ ID NO: 57134 - protein, 269 aa, Unidentified
AQSVPWGISRVQAPAAHNRGLTGGGVKVAVLDTGISTHPDLNIRGGASFVPGEPSTQDGNGHGTHVAGTIAALNNNIGVLGVAPSAELYAVKVLGASGNGSVSSIAGGLEWAGNNGMHVANLSLGAPSPSATLEQAVNSATSRGVLVVAASGNSGAGSISYPARYANAMAVGATDQNNNRASFSQYGAGLDIVAPGVNVQSTYPGSTYASQNGTSMATPHVAGAAALVKQKNPSWSNVQIRNHLKNTATSLGSTNLYGSGLVNAEAATR

SEQ ID NO: 57135 - protein, 269 aa, Unidentified
AQSVPWGISRVQAPAAHNRGLAGRGVKVAVLDTGISTHPDLNIRGGASFVPGEPSTQDGEGHGTHVAGTIAALNNSIGVLGVAPSAELYAVKVLGASGSGSVSSIAQGLEWAGLNGMHVANLSLGIPSPSATLEQAVNSATSRGVLVVAASGNSGEGSISYPARYANAMAVGATDQNNNRASFSQYGAGLDIVAPGVNVQSTYPGSTYASLNGTSMATPHVAGAAALVKQKNPSWSNVQIRNHLKNTATSLGSTNLYGSGLVNAEAATR

SEQ ID NO: 57136 - protein, 269 aa, Unidentified
AQSVPWGISRVQAPAAHNRKLTGSGVKVAVLDTGISTHPDLNIRGGASFVPGEPSTQDGEGHGTHVAGTIAALNNSIGVLGVAPSAELYAVKVLSASGGGSVSSIAQGLEWAGLNGMHVANLSLGSPSPSATLEQAVNSATSRGVLVVAASGNSGAGSISYPARYANAMAVGATDQNNNRADFSQYGAGLDIVAPGVNVQSTYPGSTYASLNGTSMATPHVAGAAALVKQKNPSWSNVQIRNHLKNTATSLGSTNLYGSGLVNAEAATR

SEQ ID NO: 57137 - protein, 269 aa, Unidentified
AQSVPWGISRVQAPAAHNRGLTGRGVKVAVLDTGISTHPDLNIRGGASFVPGEPSTQDGNGHGTHVAGTIAALNNRIGVLGVAPSAELYAVKVLGASGSGSVSSIAQGLEWAGNNRMHVANLSLGSESPSATLEQAVNSATSRGVLVVAASGNSGADSISYPARYANAMAVGATDQNNNRADFSQYGAGLDIVAPGVNVQSTYPGSTYASLNGTSMATPHVAGAAALVKQKNPSWSNVQIRNHLKNTATSLGSTNLYGSGLVNAEAATR

SEQ ID NO: 57138 - protein, 269 aa, Unidentified
AQSVPWGISRVQAPAAHRRGLTGRGVKVAVLDTGISTHPDLNIRGGASFVPGEPSTQDGNGHGTHVAGTIAALDNSIGVLGVAPSAELYAVKVLGASGSGSVSSIAQGLEWAGANGMHVANLSLGSPSPSATLEQAVNSATSRGVLVVAASGNSGAGSISYPARYANAMAVGATDQDNNRASFSQYGAGLDIVAPGVNVQSTYPGSTYASLNGTSMATPHVAGAAALVKQKNPSWSNVQIRNRLKNTATSLGSTNLYGSGLVNAEAATR

SEQ ID NO: 57139 - protein, 269 aa, Unidentified
AQSVPWGISRVQAPAAHNRGLTGSGVKVAVLDTGISTHPDLNIRGGASFVPGEPSTQDGNGHGTHVAGTIAALNNSIGVLGVAPSAELYAVKVLGADGEGAISSIAQGLEWAGNNGMHVANLSLGSPSPSATLEQAVNSATSRGVLVVAASGNSGASSISYPARYANAMAVGATDQNNNRASFSQYGAGLDIVAPGVNVQSTYPGSTYASLNGTSMATPHVAGAAALVKQKNPSWSNVQIRNHLNNTATSLGSTNLYGSGLVNAEAATR

SEQ ID NO: 57140 - protein, 269 aa, Unidentified
AQSVPWGISRVQAPAAHRRRLTGSGVKVAVLDTGISTHPDLDITGGASFVPGEPSTQDGNGHGTHVAGTIAALDNSIGVLGVAPSAELYAVKVLGASGSGSVSSIAQGLEWAGNNGMHVANLSLGSPSPSATLEQAVNSATSRGVLVVAASGNSGAGSISYPARYANAMAVGATDQNNNRASFSQYGAGLDIVAPGVNVQSTYPGSTYASLNGTSMATPHVAGAAALVKQKNPSWRNVQIRNHLKNTATSLGSTNLYGSGLVNAEAATR

SEQ ID NO: 57141 - protein, 269 aa, Unidentified
AQSVPWGISRVQAPAAHNRGLWGSGVKVAVLDTGISTHPDLRITGGASFVPGEPSTQDGNGHGTHVAGTIAALNNSIGVLGVAPSAELYAVKVLGASGAGSVSSIAQGLEWAGNNGMHVANLSLGSPSPSATLEQAVNSATSRGVLVVAASGNSGAGSISYPARYANAMAVGATDQNNNRASFSQYGAGLDIVAPGVNVQSTYPQSAYASLNGTSMATPHVAGAAALVKQKNPSWSNVQIRNHLKNTATSLGSTNLYGSGLVNAEAATR

SEQ ID NO: 57142 - protein, 269 aa, Unidentified
AQSVPWGISRVQAPAAHNRRLTGRGVKVAVLDTGISTHPDLNITGGTSFVPGEPSTQDGNGHGTHVAGTIAALNNSIGVLGVAPSAELYAVKVLGASGAGSVSSIAQGLEWAGNNGMHVANLSLGSPSPSATLEQAVNSATSRGVLVVAASGNSGAGSISYPARYANAMAVGATDQNNNRASFSQYGAGLDIVAPGVNVQSTYPQSTYASLNGTSMATPHVAGAAALVKQKNPSWSNVQIRNHLKNTATSLGSTNLYGSGLVNAEAATR

SEQ ID NO: 57143 - protein, 269 aa, Unidentified
AQSVPWGISRVQAPAAHNRGLAGSGVKVAVLDSGISTHPDLNIRGGASFVPGEPSTQDGNGHGTHVAGTIAALNNSIGVLGVAPSAELYAVKVLGASGSGSVSSIAQGLEWAGLNGMHVANLSLGIPSPSATLEQAVNSATSRGVLVVAASGNSGAGSIDYPARYANAMAVGATDQNNNRADFSQYGAGLDIVAPGVNVQSTYPGSTYASLNGTSMATPHVAGAAALVKQKNPSWSNVQIRNHLKNTATSLGSTNLYGSGLVNAEAATR

SEQ ID NO: 57144 - protein, 269 aa, Unidentified
AQSVPWGISRVQAPAAHNRGLTGRGVKVAVLDTGISTHPDLNIRGGASFVPGEPSTQDGNGHGTHVAGTIAALNNDIGVLGVAPSAELYAVKVLGASGSGSVSSIAQGLEWAGNNSMHVANLSLGSPSPSATLEQAVNSATSRGVLVVAASGNSGAGSISYPARYANAMAVGATDQNNNRADFSQYGAGLDIVAPGVNVQSTYPGSTYASLNGTSMATPHVAGAAALVKQKNPSWSNVQIRDRLKNTATSLGSTNLYGSGLVNAEAATR

SEQ ID NO: 57145 - protein, 269 aa, Unidentified
AQSVPWGISRVQAPAAHRRRLTGRGVKVAVLDTGISTHPDLDITGGASFVPGEPSTQDGNGHGTHVAGTIAALNNSIGVLGVAPSAELYAVKVLGASGSGSVSSIAQGLEWAGNNGMHVANLSLGSPSPSATLEQAVNSATSRGVLVVAASGNSGAGSISYPARYANAMAVGATDQNNNRASFSQYGAGLDIVAPGVNVQSTYPGSTYASLNGTSMATPHVAGAAALVKQKNPSWRNVQIRNHLKNTATSLGSTNLYGSGLVNAEAATR

SEQ ID NO: 57146 - protein, 269 aa, Unidentified
AQSVPWGISRVQAPAAHNRGLAGSGVKVAVLDTGISTHPDLNIRGGASFVPGEPSTQDGEGHGTHVAGTIAALNNSIGVLGVAPSAELYAVKVLGASGSGSVSSIAQGLEWAGLNRMHVANLSLGIPSPSATLEQAVNSATSRGVLVVAASGNSGAGSIDYPARYANAMAVGATDQNNNRASFSQYGAGLDIVAPGVNVQSTYPGSTYASLNGTSMATPHVAGAAALVKQKNPSWSNVQIRNHLKNTATSLGSTNLYGSGLVNAEAATR

SEQ ID NO: 57147 - protein, 269 aa, Unidentified
AQSVPWGISRVQAPAAHRRGLTGRGVKVAVLDTGISTHPDLNIRGGASFVPGEPSTQDGNGHGTHVAGTIAALNNSIGVLGVAPSAELYAVKVLGASGSGSVSSIAQGLEWAGNNGMHVANLSLGSPSPSATLEQAVNSATSRGVLVVAASGNSGAGSIDYPARYANAMAVGATDQNNNRASFSQYGAGLDIVAPGVNVYSTYPGSTYASLNGTSMATPHVAGAAALVKQKNPSWSNVQIRNRLKNTTTSLGSTNLYGSGLVNAEAATR

SEQ ID NO: 57148 - protein, 269 aa, Unidentified
AQSVPWGISRVQAPAAHNRGLTGRGVKVAVLDTGISTHPDLNIRGGASFVPGEPSTQDGNGHGTHVAGTIAALNNGIGVLGVAPSAELYAVKVLGASGSGSVSSIAQGLEWAGNNDMHVANLSLGSPSPSATLEQAVNSATSRGVLVVAASGNSGADSISYPARYANAMAVGATDQNNNRADFSQYGAGLDIVAPGVNVQSTYPGSTYASLNGTSMATPHVAGAAALVKQKNPSWSNVQIRNRLKNTATSLGSTNLYGSGLVNAEAATR

SEQ ID NO: 57149 - protein, 269 aa, Unidentified
AQSVPWGISRVQAPAAHNRRLTGSGVKVAVLDTGISTHPDLNIRGGASFVPGEPSTQDGNGHGTHVAGTIAALNNDIGVLGVAPSAELYAVKVLGASGSGSVSSIAQGLEWAGNNSMHVANLSLGSESPSATLEQAVNSATSRGVLVVAASGNSGAGSISYPARYANAMAVGATDQNNNRASFSQYGAGLDIVAPGVNVQSTYPGSTYASLNGTSMATPHVAGAAALVKQKNPSWSNVRIRNRLKNTATSLGSTNLYGSGLVNAEAATR

SEQ ID NO: 57150 - protein, 269 aa, Unidentified
AQSVPWGISRVQAPAAHNRGLAGSGVKVAVLDTGISTHPDLNIRGGASFVPGEPSTQDGNGHGTHVAGTIAALNNSIGVLGVAPSAELYAVKVLGASGGGNISSIAQGLEWAGNNGMHVANLSLGSPSPSATLEQAVNSATSRGVLVVAASGNSGAGSISYPARYANAMAVGATDQNNNRASFSQYGAGLDIVAPGVNVQSTYPGSTYASLNGTSMATPHVAGAATLVKQKNPSWSNVSIRNHLKNTATSLGSTNLYGSGLVNAEAATR

SEQ ID NO: 57151 - protein, 269 aa, Unidentified
AQSVPWGISRVQAPAAHNRGLAGSGVKVAVLDTGISTHPDLNIRGGASFVPGEPSTQDGNGHGTHVAGTIAALNNSIGVLGVAPSAELYAVKVLGASGGGAISSIAQGLEWAGNNGMHVANLSLGSPSPSATLEQAVNSATSRGVLVVAASGNSGAGSISYPARYANAMAVGATDQNNNRASFSQYGAGLDIVAPGVNVQSTYPGSTYASLNGTSMATPHVAGAAMLVKQKNPSWSNVRIRNHLKNTATSLGSTNLYGSGLVNAEAATR

SEQ ID NO: 57152 - protein, 269 aa, Unidentified
AQSVPWGISRVQAPAAHNRGLAGSGVKVAVLDTGISTHPDLNIRGGASFVPGEPSTQDGNGHGTHVAGTIAALNNSIGVLGVAPSAELYAVKVLGASGAGALSSIAQGLEWAGNNGMHVANLSLGSPSPSATLEQAVNSATSRGVLVVAASGNSGAGSISYPARYANAMAVGATDQNNNRASFSQYGAGLDIVAPGVNVQSTYPGSTYASLNGTSMATPHVAGAAVLVKQKNPSWSNVSIRNHLKNTATSLGSTNLYGSGLVNAEAATR

SEQ ID NO: 57153 - protein, 269 aa, Unidentified
AQSVPWGISRVQAPAAHNRRLTGSGVKVAVLDTGISTHPDLNIRGGASFVPGEPSTQDGEGHGTHVAGTIAALNNGIGVLGVAPSAELYAVKVLGASGSGSVSSIAQGLEWAGNNSMHVANLSLGSPSPSATLEQAVNSATSRGVLVVAASGNSGADSISYPARYANAMAVGATDQNNNRADFSQYGAGLDIVAPGVNVQSTYPGSTYASLNGTSMATPHVAGAAALVKQKNPSWSNVQIRNHLKNTATSLGSTNLYGSGLVNAEAATR

SEQ ID NO: 57154 - protein, 269 aa, Unidentified
AQSVPWGISRVQAPAAHNRGLTGSGVKVAVLDTGISTHPDLNIRGGASFVPGEPSTQDGNGHGTHVAGTIAALNNGIGVLGVAPSAELYAVKVLGASGSGSVSSIAQGLEWAGNNSMHVANLSLGSESPSATLEQAVNSATSRGVLVVAASGNSGADSISYPARYANAMAVGATDQNNNRASFSQYGAGLDIVAPGVNVQSTYPGSTYASLNGTSMATPHVAGAAALVKQKNPSWSNVRIRDHLKNTATSLGSTNLYGSGLVNAEAATR

SEQ ID NO: 57155 - protein, 269 aa, Unidentified
AQSVPWGISRVQAPAAHNRGLTASGVKVAVLDTGISTHPDLNIRGGASFVPGEPSTQDGEGHGTHVAGTIAALNNSIGVLGVAPSAELYAVKVLGASGSGSVSSIAQGLEWAGLNRMHVANLSLGSPSPSATLEQAVNSATSRGVLVVAASGNSGAGSISYPARYANAMAVGATDQNNNRADFSQYGAGLDIVAPGVNVQSTYPGSTYASLNGTSMATPHVAGAAALVKQKNGSWSNVQIRNHLKNTATSLGSTNLYGSGLVNAEAATR

SEQ ID NO: 57156 - protein, 269 aa, Unidentified
AQSVPWGISRVQAPAAHNRKLTGFGVKVAVLDTGISTHPDLNIRGGASFVPGEPSTQDGNGHGTHVAGTIAALNNSIGVLGVAPSAELYAVKVLGASGSGSVSSIAQGLEWAGNNRMHVANLSLGDPSPSATLEQAVNSATSRGVLVVAASGNSGAGSIDYPARYANAMAVGATDQNNNRASFSQYGAGLDIVAPGVNVQSTYPGSTYASENGTSMATPHVAGAAALVKQKNPSWSNVQIRNHLKNTATSLGSTNLYGSGLVNAEAATR

SEQ ID NO: 57157 - protein, 269 aa, Unidentified
AQSVPWGISRVQAPAAHNRGLYGSGVKVAVLDTGISTHPDLNIRGGASFVPGEPSTQDGNGHGTHVAGTIAALNNSIGVLGVAPSAELYAVKVLGASGAGGISSIAQGLEWAGNNGMHVANLSLGSPSPSATLEQAVNSATSRGVLVVAASGNSGAGSISYPARYANAMAVGATDQNNNRASFSQYGAGLDIVAPGVNVQSTYPGSTYASLNGTSMATPHVAGAATLVKQKNPSWSNVRIRNHLKNTATSLGSTNLYGSGLVNAEAATR

SEQ ID NO: 57158 - protein, 269 aa, Unidentified
AQVVPWGISRVQAPAAHNRGLTGSGVKVAVLDTGISTHEDLNIRGGASFVPGEPSTQDGNGHGTHVAGTIAALDNSIGVLGVAPSAELYAVKVLGASGSGSVSSIAQGLEWAGNNRMHVANLSLGRPSPSATLEQAVNSATSRGVLVVAASGNSGAGSISYPARYANAMAVGATDQNNNRASFSQYGAGLDIVAPGVNVQSTYPGSTYASLNGTSMATPHVAGAAALVKQKNPSWSNVQIRNHLKNTATSLGSTNQYGSGLVNAEAATR

SEQ ID NO: 57159 - protein, 269 aa, Unidentified
AQSVPWGISRVQAPAAHNRGLTGRGVKVAVLDTGISTHPDLNIRGGASFVPGEPSTQDGNGHGTHVAGTIAALNNDIGVLGVAPSAELYAVKVLGASGSGSVSSIAQGLEWAGNNSMHVANLSLGSESPSATLEQAVNSATSRGVLVVAASGNSGAGSISYPARYANAMAVGATDQNNNRADFSQYGAGLDIVAPGVNVQSTYPGSTYASLNGTSMATPHVAGAAALVKQKNPSWSNVQIRDHLKNTATSLGSTNLYGSGLVNAEAATR

SEQ ID NO: 57160 - protein, 269 aa, Synthetic construct
AQSVPWGISRVQAPAAHNRGLTGSGVRVAVLDTGISTHPDLNIRGGASFVPGEPSTQDGNGHGTHVAGTIAALDNSIGVLGVAPSAELYAVKVLGASGSGSYSSIAQGLEWAGNNGMHVASLSLGSPSPSATLEQAVNSATSRGVLVVAASGNSGAGSISYPARYANAMAVGATDQNNNRASFSQYGAGLDIVAPGVCVQSTYPGSTYASLSGTSMATPHVAGAAALVKQKNPSWSNVQIRNHLKNTATSLGSTNLYGSGLVNAEAATR

SEQ ID NO: 57161 - protein, 269 aa, Unidentified
AQSVPWGISRVQAPAAHNRGLTGRGVKVAVLDTGISTHPDLRIRGGASFVPGEPSTQDGNGHGTHVAGTIAALNNSIGVLGVAPSAELYAVKVLGASGAGSVSSIAQGLEWAGANGMHVANLSLGSPSPSATLEQAVNSATSRGVLVVAASGNSGAGSISYPARYANAMAVGATDQNNNRASFSQYGAGLDIVAPGVNVQSTYPGSTYFSLNGTSMATPHVAGAAALVKQKNPSWSNVQIRNHLKNTATSLGSTNLYGSGLVRAEAATR

SEQ ID NO: 57162 - protein, 269 aa, Unidentified
AQSVPWGISRVQAPAAHNRKLLGFGVKVAVLDTGISTHPDLNIRGGASFVPGEPSTQDGNGHGTHVAGTIAALNNNIGVLGVAPSAELYAVKVLGASGSGSVSSIAQGLEWAGNNRMHVANLSLGSPSPSATLEQAVNSATSRGVLVVAASGNSGAGSIDYPARYANAMAVGATDQNNNRASFSQYGAGLDIVAPGVNVQSTYPGSTYASLNGTSMATPHVAGAAALVKQKNPSWSNVQIRNHLKNTATSLGSTNLYGSGLVNAEAATR

SEQ ID NO: 57163 - protein, 269 aa, Unidentified
AQSVPWGISRVQAPAAHNRGLTGSGVKVAVLDTGISTHPDLNIRGGASFVPGEPSTQDGEGHGTHVAGTIAALNNSIGVLGVAPSAELYAVKVLGASGAGSLSSIAQGLEWAGNNGMHVANLSLGSPSPSATLEQAVNSATSRGVLVVAASGNSGEGSISYPARYANAMAVGATDQNNNHASFSQYGAGLDIVAPGVNVQSTYPGSTYASLNGTSMATPHVAGAAALVKQKNPSWSNVQIRNHLKNTATSLGSTNLYGSGLVNAFAATR

SEQ ID NO: 57164 - protein, 269 aa, Unidentified
AQSVPWGISRVQAPAAHNRGLYGSGVKVAVLDTGISTHPDLNIRGGASFVPGEPSTQDGNGHGTHVAGTIAALNNSIGVLGVAPSAELYAVKVLGASGGGNISSIAQGLEWAGNNGMHVANLSLGSPSPSATLEQAVNSATSRGVLVVAASGNSGAGSISYPARYANAMAVGATDQNNNRASFSQYGAGLDIVAPGVNVQSTYPGSTYASLNGTSMATPHVAGAALLVKQKNPSWSNVRIRNHLKNTATSLGSTNLYGSGLVNAEAATR

SEQ ID NO: 57165 - protein, 269 aa, Unidentified
AQSVPWGISRVQAPAAHNRRLWGSGVKVAVLDTGISTHPDLRIRGGASFVPGEPSTQDGNGHGTHVAGTIAALNNSIGVLGVAPSAELYAVKVLGASGAGSVSSIAQGLEWAGLNGMHVANLSLGSPSPSATLEQAVNSATSRGVLVVAASGNSGAGSISYPARYANAMAVGATDQNNNRASFSQYGAGLDIVAPGVNVQSTYPQSTYASLNGTSMATPHVAGAAALVKQKNPSWSNVQIRNHLKNTATSLGSTNLYGSGLVNAEAATR

SEQ ID NO: 57166 - protein, 269 aa, Unidentified
AQSVPWGISRVQAPAAHNRRLTGRGVKVAVLDTGISTHPDLNIRGGASFVPGEPSTQDGNGHGTHVAGTIAALNNSIGVLGVAPSAELYAVKVLGASGGGSVSSIAGGLEWAGLNGMHVANLSLGSPSPSATLEQAVNSATSRGVLVVAASGNSGAGSISYPARYANAMAVGATDQNNNRASFSQYGAGLDIVAPGVNVQSTYPGSTYASQNGTSMATPHVAGAAALVKQKNPSWSNVQIRNHLKNTATSLGSTNLYGSGLVNAEAATR

SEQ ID NO: 57167 - protein, 269 aa, Unidentified
AQSVPWGISRVQAPAAHNRGLTGRGVKVAVLDTGISTHPDLNIRGGASFVPGEPSTQDGNGHGTHVAGTIAALNNGIGVLGVAPSAELYAVKVLGASGSGSVSSIAQGLEWAGNNSMHVANLSLGSPSPSATLEQAVNSATSRGVLVVAASGNSGAGSISYPARYANAMAVGATDQNNNRADFSQYGAGLDIVAPGVNVQSTYPGSTYASLNGTSMATPHVAGAAALVKQKNPSWSNVQIRDRLKNTATSLGSTNLYGSGLVNAEAATR

SEQ ID NO: 57168 - protein, 269 aa, Unidentified
AQSVPWGISRVQAPAAHNRGLTGSGVKVAVLDTGISTHPDLNIRGGASFVPGEPSTQDGNGHGTHVAGTIAALNNSIGVLGVAPSAELYAVKVLGASGAGSVSSIAQGLEWAGNNGMHVANLSLGNPSPSATLEQAVNSATSRGVLVVAASGNSGEGSISYPARYANAMAVGATDQNNNRADFSQYGAGLDIVAPGVNVQSTEPGSTYASLNGTSMATPHVAGAAALVKQKNPSWSNVQIRNHLKNTATSLGSTNLYGSGLVNAFAATR

SEQ ID NO: 57169 - protein, 269 aa, Unidentified
AQSVPWGISRVQAPAAHNRGLQGSGVKVAVLDTGISTHPDLNIRGGASFVPGEPSTQDGNGHGTHVAGTIAALNNSIGVLGVAPSAELYAVKVLGASGNGNISSIAQGLEWAGNNGMHVANLSLGSPSPSATLEQAVNSATSRGVLVVAASGNSGAGSISYPARYANAMAVGATDQNNNRASFSQYGAGLDIVAPGVNVQSTYPGSTYASLNGTSMATPHVAGAALLVKQKNPSWSNVRIRNHLKNTATSLGSTNLYGSGLVNAEAATR

SEQ ID NO: 57170 - protein, 269 aa, Unidentified
AQSVPWGISRVQAPAAHNRGLTGSGVKVAVLDTGISTHPDLNIRGGASFVPGEPSTQDGNGHGTHVAGTIAALNNSIGVLGVAPSAELYAVKVLGASGGGAISSIAQGLEWAGNNGMHVANLSLGSPSPSATLEQAVNSATSRGVLVVAASGNSGAGSISYPARYANAMAVGATDQNNNRASFSQYGAGLDIVAPGVNVQSTYPGSTYASLNGTSMATPHVAGAAVLVKQKNPSWSNVRIRNHLKNTATSLGSTNLYGSGLVRAEAATR

SEQ ID NO: 57171 - protein, 269 aa, Unidentified
AQSVPWGISRVQAPAAHNRGLAGRGVKVAVLDTGISTHPDLNIRGGASFVPGEPSTQDGEGHGTHVAGTIAALNNSIGVLGVAPSAELYAVKVLGASGSGSVSSIAQGLEWAGLNRMHVANLSLGIPSPSATLEQAVNSATSRGVLVVAASGNSGAGSISYPARYANAMAVGATDQNNNRASFSQYGAGLDIVAPGVNVQSTYPGSTYASLNGTSMATPHVAGAAALVKQKNPSWSNVQIRNHLKNTATSLGSTNLYGSGLVNAEAATR

SEQ ID NO: 57172 - protein, 269 aa, Unidentified
AQSVPWGISRVQAPAAHNRGLTGRGVKVAVLDSGISTHPDLNIRGGASFVPGEPSTQDGNGHGTHVAGTIAALNNSIGVLGVAPSAELYAVKVLGASGSGSVSSIAQGLEWAGNNRMHVANLSLGIPSPSATLEQAVNSATSRGVLVVAASGNSGEGSIDYPARYANAMAVGATDQNNNRASFSQYGAGLDIVAPGVNVQSTYPGSTYASLNGTSMATPHVAGAAALVKQKNPSWSNVQIRNHLKNTATSLGSTNLYGSGLVNAEAATR

SEQ ID NO: 57173 - protein, 269 aa, Unidentified
AQSVPWGISRVQAPAAHNRRLTGRGVKVAVLDTGISTHPDLNIRGGASFVPGEPSTQDGNGHGTHVAGTIAALNNSIGVLGVAPSAELYAVKVLGASGSGSVSSIAQGLEWAGNNRMHVANLSLGSESPSATLEQAVNSATSRGVLVVAASGNSGADSISYPARYANAMAVGATDQNNNRASFSQYGAGLDIVAPGVNVQSTYPGSTYASLNGTSMATPHVAGAAALVKQKNPSWSNVQIRNRLKNTATSLGSTNLYGSGLVNAEAATR

SEQ ID NO: 57174 - protein, 269 aa, Unidentified
AQSVPWGISRVQAPAAHNRGLQGSGVKVAVLDTGISTHPDLNIRGGASFVPGEPSTQDGNGHGTHVAGTIAALNNSIGVLGVAPSAELYAVKVLGASGTGNISSIAQGLEWAGNNGMHVANLSLGSPSPSATLEQAVNSATSRGVLVVAASGNSGAGSISYPARYANAMAVGATDQNNNRASFSQYGAGLDIVAPGVNVQSTYPGSTYASLNGTSMATPHVAGAAVLVKQKNPSWSNVSIRNHLKNTATSLGSTNLYGSGLVNAEAATR

SEQ ID NO: 57175 - protein, 269 aa, Unidentified
AQSVPWGISRVQAPAAHNRGLTGSGVKVAVLDTGISTHPDLNIRGGASFVPGEPSTQDGNGHGTHVAGTIAALNNSIGVLGVAPSAELYAVKVLGASGSGAVSSIAQGLEWAGNNGMHVANLSLGSPSPSATLEQAVNSATSRGVLVVAASGNSGAESISYPARYANAMAVGATDQNNNRASFSQYGAGLDIVAPGVNVQSTYPGSTYASLNGTSMATPHVAGAAVLVKQKNPSWSNVRIRDRLKNTATSLGSTNLYGSGLVNAEAATR

SEQ ID NO: 57176 - protein, 269 aa, Unidentified
AQSVPWGISRVQAPAAHNRRLTGRGVKVAVLDTGISTHPDLNIRGGASFVPGEPSTQDGNGHGTHVAGTIAALNNSIGVLGVAPSAELYAVKVLAASGNGSVSSIAGGLEWAGNNGMHVANLSLGAPSPSATLEQAVNSATSRGVLVVAASGNSGAGSISYPARYANAMAVGATDQNNNRASFSQYGAGLDIVAPGVNVQSTYPGSTYASLNGTSMATPHVAGAAALVKQKNPSWSNVQIRNHLKNTATSLGSTNLYGSGLVNAEAATR

SEQ ID NO: 57177 - protein, 269 aa, Unidentified
AQSVPWGISRVQAPAAHNRRLTGRGVKVAVLDTGISTHPDLNIRGGASFVPGEPSTQDGNGHGTHVAGTIAALNNDIGVLGVAPSAELYAVKVLGASGSGSVSSIAQGLEWAGNNSMHVANLSLGSPSPSATLEQAVNSATSRGVLVVAASGNSGAGSISYPARYANAMAVGATDQNNNRADFSQYGAGLDIVAPGVNVQSTYPGSTYASLNGTSMATPHVAGAAALVKQKNPSWSNVRIRNHLKNTATSLGSTNLYGSGLVNAEAATR

SEQ ID NO: 57178 - protein, 269 aa, Unidentified
AQSVPWGISRVQAPAAHNRGLRGSGVKVAVLDTGISTHPDLNIRGGASFVPGEPSTQDGNGHGTHVAGTIAALNNSIGVLGVAPSAELYAVKVLGASGAGAISSIAQGLEWAGNNGMHVANLSLGSPSPSATLEQAVNSATSRGVLVVAASGNSGAGSISYPARYANAMAVGATDQNNNRASFSQYGAGLDIVAPGVNVQSTYPGSTYASLNGTSMATPHVAGAAMLVKQKNPSWSNVWIRNHLKNTATSLGSTNLYGSGLVNAEAATR

SEQ ID NO: 57179 - protein, 269 aa, Synthetic construct
AQSVPWGISRVQAPAAHNRGLTGSGVRVAVLDTGISTHPDLNIRGGASFVPGEPSTQDGNGHGTHVAGTIAALDNSIGVLGVAPSAELYAVKVLGASGSGSYSSIAQGLEWAGNNGMHVASLSLGSPSPSATLEQAVNSATSRGVLVVAASGNSGAGSISYPARYANAMAVGATDQNNNRASFSQYGAGLDIVAPGVNVQSTYPGSTYASLSGTSMATPHVAGAAALVKQKNPSWSNVQIRNHLKNTATSLGSPNLYGSGLVNAEAATR

SEQ ID NO: 57180 - protein, 269 aa, Unidentified
AQSVPWGISRVQAPAAHNRGLTGSGVKVAVLDTGISTHPDLNIRGGASFVPGEPSTQDGNGHGTHVAGTIAALNNSIGVLGVAPSAELYAVKVLGADGRGAISSIAQGLEWAGNNGMHVANLSLGSPSPSATLEQAVNSATSRGVLVVAASGNSGASSISYPARYANAMAVGATDQNNNRASFSQYGAGLDIVAPGVNVQSTYPGSTYASLNGTSMATPHVAGAAALVKQKNPSWSNWQIRNHLKNTATSLGSTNLYGSGLVNAEAATR

SEQ ID NO: 57181 - protein, 269 aa, Unidentified
AQSVPWGISRVQAPAAHNRGLKGSGVKVAVLDTGISTHPDLNIRGGASFVPGEPSTQDGNGHGTHVAGTIAALNNSIGVLGVAPSAELYAVKVLGASGTGALSSIAQGLEWAGNNGMHVANLSLGSPSPSATLEQAVNSATSRGVLVVAASGNSGAGSISYPARYANAMAVGATDQNNNRASFSQYGAGLDIVAPGVNVQSTYPGSTYASLNGTSMATPHVAGAAMLVKQKNPSWSNVRIRNHLKNTATSLGSTNLYGSGLVNAEAATR

SEQ ID NO: 57182 - protein, 269 aa, Unidentified
AQSVPWGISRVQAPAAHNRGLTGSGVKVAVLDTGISTHPDLNIRGGASFVPGEPSTQDGNGHGTHVAGTIAALNNSIGVLGVAPSAELYAVKVLGADGRGAISSIAQGLEWAGNNGMHVANLSLGSPSPSATLEQAVNSATSRGVLVVAASGNSGASSISYPARYANAMAVGATDQNNNRASFSQYGAGLDIVAPGVNVQSTYPGSTYASLNGTSMATPHVAGAAALVKQKNPSWSNVQIRNHLKNTATSLGSTPLYGSGLVNAEAATR

SEQ ID NO: 57183 - protein, 269 aa, Unidentified
AQSVPWGISRVQAPAAHNRGLYGSGVKVAVLDTGISTHPDLNIRGGASFVPGEPSTQDGNGHGTHVAGTIAALNNSIGVLGVAPSAELYAVKVLGASGTGNISSIAQGLEWAGNNGMHVANLSLGSPSPSATLEQAVNSATSRGVLVVAASGNSGAGSISYPARYANAMAVGATDQNNNRASFSQYGAGLDIVAPGVNVQSTYPGSTYASLNGTSMATPHVAGAALLVKQKNPSWSNVRIRNHLKNTATSLGSTNLYGSGLVNAEAATR

SEQ ID NO: 57184 - protein, 269 aa, Unidentified
AQSVPWGISRVQAPAAHNRGLAGSGVKVAVLDTGISTHPDLNIRGGASFVPGEPSTQDGNGHGTHVAGTIAALNNSIGVLGVAPSAELYAVKVLGASGAGGISSIAQGLEWAGNNGMHVANLSLGSPSPSATLEQAVNSATSRGVLVVAASGNSGAGSISYPARYANAMAVGATDQNNNRASFSQYGAGLDIVAPGVNVQSTYPGSTYASLNGTSMATPHVAGAALLVKQKNPSWSNVSIRNHLKNTATSLGSTNLYGSGLVNAEAATR

SEQ ID NO: 57185 - protein, 269 aa, Unidentified
AQSVPWGISRVQAPAAHNRRLTGRGVKVAVLDTGISTHPDLNIRGGASFVPGEPSTQDGNGHGTHVAGTIAALNNGIGVLGVAPSAELYAVKVLGASGSGSVSSIAQGLEWAGNNDMHVANLSLGSPSPSATLEQAVNSATSRGVLVVAASGNSGADSISYPARYANAMAVGATDQNNNRADFSQYGAGLDIVAPGVNVQSTYPGSTYASLNGTSMATPHVAGAAALVKQKNPSWSNVQIRNHLKNTATSLGSTNLYGSGLVNAEAATR

SEQ ID NO: 57186 - protein, 269 aa, Unidentified
AQSVPWGISRVQAPAAHRRRLTGRGVKVAVLDTGISTHPDLNIRGGASFVPGEPSTQDGNGHGTHVAGTIAALDNSIGVLGVAPSAELYAVKVLGASGSGSVSSIAQGLEWAGNNGMHVANLSLGSPSPSATLEQAVNSATSRGVLVVAASGNSGAGSISYPARYANAMAVGATDQNNNRASFSQYGAGLDLVAPGVNVQSTYPGSTYASLNGTSMATPHVAGAAALVKQKNPSWSNVQIRNRLKNTATSLGSTNLYGSGLVNAEAATR

SEQ ID NO: 57187 - protein, 269 aa, Unidentified
AQSVPWGISRVQAPAAHNRGLTGRGVKVAVLDSGISTHPDLNIRGGASFVPGEPSTQDGNGHGTHVAGTIAALNNSIGVLGVAPSAELYAVKVLGASGSGSVSSIAQGLEWAGLNRMHVANLSLGIPSPSATLEQAVNSATSRGVLVVAASGNSGEGSISYPARYANAMAVGATDQNNNRASFSQYGAGLDIVAPGVNVQSTYPGSTYASLNGTSMATPHVAGAAALVKQKNPSWSNVQIRNHLKNTATSLGSTNLYGSGLVNAEAATR

SEQ ID NO: 57188 - protein, 269 aa, Unidentified
AQSVPWGISRVQAPAAHNRRLTGRGVKVAVLDTGISTHPDLDITGGASFVPGEPSTQDGNGHGTHVAGTIAALNNSIGVLGVAPSAELYAVKVLGASGSGSVSSIAQGLEWAGNNGMHVANLSLGSPSPSATLEQAVNSATSRGVLVVAASGNSGAGSISYPARYANAMAVGATDQNNNRASFSQYGAGLDIVAPGVNVQSTYPGSTYASLNGTSMATPHVAGEAALVKQKNPSWRNVQIRNHLKNTATSLGSTNLYGSGLVNAEAATR

SEQ ID NO: 57189 - protein, 269 aa, Unidentified
AQSVPWGISRVQAPAAHNRGLAGSGVKVAVLDTGISTHPDLNIRGGASFVPGEPSTQDGNGHGTHVAGTIAALNNSIGVLGVAPSAELYAVKVLGASGTGAISSIAQGLEWAGNNGMHVANLSLGSPSPSATLEQAVNSATSRGVLVVAASGNSGAGSISYPARYANAMAVGATDQNNNRASFSQYGAGLDIVAPGVNVQSTYPGSTYASLNGTSMATPHVAGAALLVKQKNPSWSNVRIRNHLKNTATSLGSTNLYGSGLVNAEAATR

SEQ ID NO: 57190 - protein, 269 aa, Unidentified
AQSVPWGISRVQAPAAHNRGLTGGGVKVAVLDTGISTHPDLNIRGGASFVPGEPSTQDGNGHGTHVAGTIAALKNNIGVLGVAPSAELYAVKVLAASGGGSVSSIAQGLEWAGNNGMHVANLSLGAPSPSATLEQAVNSATSRGVLVVAASGNSGAGSISYPARYANAMAVGATDQNNNRADFSQYGAGLDIVAPGVNVQSTYPGSTYASLNGTSSATPHVAGAAALVKQKNPSWSNVQIRNHLKNTATSLGSTNLYGSGLVNAEAATR

SEQ ID NO: 57191 - protein, 269 aa, Unidentified
AQSVPWGISRVQAPAAHNRGLRGSGVKVAVLDTGISTHPDLNIRGGASFVPGEPSTQDGNGHGTHVAGTIAALNNSIGVLGVAPSAELYAVKVLGASGTGGISSIAQGLEWAGNNGMHVANLSLGSPSPSATLEQAVNSATSRGVLVVAASGNSGAGSISYPARYANAMAVGATDQNNNRASFSQYGAGLDIVAPGVNVQSTYPGSTYASLNGTSMATPHVAGAATLVKQKNPSWSNVWIRNHLKNTATSLGSTNLYGSGLVNAEAATR

SEQ ID NO: 57192 - protein, 269 aa, Unidentified
AQSVPWGISRVQAPAAHNRGLTGSGVKVAVLDTGISTHPDLNIRGGASFVPGEPSTQDGNGHGTHVAGTIAALNNSIGVLGVAPSAELYAVKVLGASGSGSLSSIAQGLEWAGNNGMHVANLSLGNPSPSATLEQAVNSATSRGVLVVAASGNSGEGSISYPARYANAMAVGATDQNNNHADFSQYGAGLDIVAPGVNVQSTYPGSTYASLNGTSMATPHVAGAAALVKQKNPSWSNVQIRNHLKNTATSLGSTNLYGSGLVNAFAATR

SEQ ID NO: 57193 - protein, 269 aa, Unidentified
AQSVPWGISRVQAPAAHNRGLAGSGVKVAVLDTGISTHPDLNIRGGASFVPGEPSTQDGNGHGTHVAGTIAALNNSIGVLGVAPSAELYAVKVLGASGGGALSSIAQGLEWAGNNGMHVANLSLGSPSPSATLEQAVNSATSRGVLVVAASGNSGAGSISYPARYANAMAVGATDQNNNRASFSQYGAGLDIVAPGVNVQSTYPGSTYASLNGTSMATPHVAGAAVLVKQKNPSWSNVRIRNHLKNTATSLGSTNLYGSGLVNAEAATR

SEQ ID NO: 57194 - protein, 269 aa, Unidentified
AQSVPWGISRVQAPAAHNRGLAGSGVKVAVLDTGISTHPDLNIRGGASFVPGEPSTQDGNGHGTHVAGTIAALNNSIGVLGVAPSAELYAVKVLGASGAGNISSIAQGLEWAGNNGMHVANLSLGSPSPSATLEQAVNSATSRGVLVVAASGNSGAGSISYPARYANAMAVGATDQNNNRASFSQYGAGLDIVAPGVNVQSTYPGSTYASLNGTSMATPHVAGAAMLVKQKNPSWSNVSIRNHLKNTATSLGSTNLYGSGLVNAEAATR

SEQ ID NO: 57195 - protein, 269 aa, Unidentified
AQSVPWGISRVQAPAAHNRRLTGSGVKVAVLDTGISTHPDLNIRGGASFVPGEPSTQDGNGHGTHVAGTIAALNNRIGVLGVAPSAELYAVKVLGASGSGSVSSIAQGLEWAGNNRMHVANLSLGSESPSATLEQAVNSATSRGVLVVAASGNSGAGSISYPARYANAMAVGATDQNNNRADFSQYGAGLDIVAPGVNVQSTYPGSTYASLNGTSMATPHVAGAAALVKQKNPSWSNVQIRDHLKNTATSLGSTNLYGSGLVNAEAATR

SEQ ID NO: 57196 - protein, 269 aa, Unidentified
AQSVPWGISRVQAPAAHNRGLTGSGVKVAVLDTGISTHPDLNIRGGASFVPGEPSTQDGEGHGTHVAGTIAALNNGIGVLGVAPSAELYAVKVLGASGSGSVSSIAQGLEWAGNNDMHVANLSLGSPSPSATLEQAVNSATSRGVLVVAASGNSGADSISYPARYANAMAVGATDQNNNRASFSQYGAGLDIVAPGVNVQSTYPGSTYASLNGTSMATPHVAGAAALVKQKNPSWSNVRIRDHLKNTATSLGSTNLYGSGLVNAEAATR

SEQ ID NO: 57197 - protein, 269 aa, Unidentified
AQSVPWGISRVQAPAAHNRGLTGSGVKVAVLDTGISTHPDLNIRGGASFVPGEPSTQDGEGHGTHVAGTIAALNNGIGVLGVAPSAELYAVKVLGASGSGSVSSIAQGLEWAGNNSMHVANLSLGSPSPSATLEQAVNSATSRGVLVVAASGNSGADSISYPARYANAMAVGATDQNNNRADFSQYGAGLDIVAPGVNVQSTYPGSTYASLNGTSMATPHVAGAAALVKQKNPSWSNVRIRNHLKNTATSLGSTNLYGSGLVNAEAATR

SEQ ID NO: 57198 - protein, 269 aa, Unidentified
AQSVPWGISRVQAPAAHNRKLLGFGVKVAVLDTGISTHPDLNIRGGASFVPGEPSTQDGNGHGTHVAGTIAALNNNIGVLGVAPSAELYAVKVLGASGSGSVSSIAQGLEWAGNNGMHVANLSLGSPSPSATLEQAVNSATSRGVLVVAASGNSGAGSIDYPARYANAMAVGATDQNNNRASFSQYGAGLDIVAPGVNVQSTYPGSAYASLNGTSMATPHVAGAAALVKQKNPSWSNVQIRNHLKNTATSLGSTNLYGSGLVNAEAATR

SEQ ID NO: 57199 - protein, 269 aa, Unidentified
AQSVPWGISRVQAPAAHNRGLAGSGVKVAVLDSGISTHPDLNIRGGASFVPGEPSTQDGNGHGTHVAGTIAALNNSIGVLGVAPSAELYAVKVLGASGSGSVSSIAQGLEWAGNNRMHVANLSLGSPSPSATLEQAVNSATSRGVLVVAASGNSGEGSIDYPARYANAMAVGATDQNNNRADFSQYGAGLDIVAPGVNVQSTYPGSTYASLNGTSMATPHVAGAAALVKQKNPSWSNVQIRNHLKNTATSLGSTNLYGSGLVNAEAATR

SEQ ID NO: 57200 - protein, 269 aa, Unidentified
AQSVPWGISRVQAPAAHNRRLWGSGVKVAVLDTGISTHPDLNIRGGASFVPGEPSTQDGNGHGTHVAGTIAALNNSIGVLGVAPSAELYAVKVLGASGAGSVSSIAQGLEWAGLNGMHVANLSLGSPSPSATLEQAVNSATSRGVLVVAASGNSGAGSISYPARYANAMAVGATDQNNNRASFSQYGAGLDIVAPGVNVQSTYPQSAYASLNGTSMATPHVAGAAALVKQKNPSWSNVQIRNHLKNTATSLGSTNLYGSGLVNAEAATR

SEQ ID NO: 57201 - protein, 269 aa, Unidentified
AQVVPWGISRVQAPAAHNRGLTGSGVKVAVLDTGISTHEDLNIRGGASFVPGEPSTQDGNGHGTHVAGTIAALDNSIGVLGVAPSAELYAVKVLGASGSGSVSSIAQGLEWAGNNRMHVANLSLGRPSPSATLEQAVNSATSRGVLVVAASGNSGAGSISYPARYANAMAVGATDQNNNRASFSQYGAGLDIVAPGVNVQSTYPPSTYASLNGTSMATPHVAGAAALVKQKNPSWSNVQIRNHLKNTATSLGSTNLYGSGLVNAEAATR

SEQ ID NO: 57202 - protein, 269 aa, Unidentified
AQSVPWGISRVQAPAAHNRGLAGRGVKVAVLDSGISTHPDLNIRGGASFVPGEPSTQDGNGHGTHVAGTIAALNNSIGVLGVAPSAELYAVKVLGASGSGSVSSIAQGLEWAGNNGMHVANLSLGIPSPSATLEQAVNSATSRGVLVVAASGNSGAGSIDYPARYANAMAVGATDQNNNRADFSQYGAGLDIVAPGVNVQSTYPGSTYASLNGTSMATPHVAGAAALVKQKNPSWSNVQIRNHLKNTATSLGSTNLYGSGLVNAEAATR

SEQ ID NO: 57203 - protein, 269 aa, Unidentified
AQSVPWGISRVQAPAAHNRGLTGRGVKVAVLDTGISTHPDLNIRGGASFVPGEPSTQDGNGHGTHVAGTIAALNNSIGVLGVAPSAELYAVKVLGASGGGAISSIAQGLEWAGNNGMHVANLSLGSPSPSATLEQAVNSATSRGVLVVAASGNSGAGSISYPARYANAMAVGATDQNNNRASFSQYGAGLDIVAPGVNVQSTYPGSTYASLNGTSMATPHVAGAAVLVKQKNPSWSNVRIRNHLKNTATSLGSTNLYGSGLVNAEAATR

SEQ ID NO: 57204 - protein, 269 aa, Lederbergia lentus
AQSVPWGISRVQAPAAHNRGLTGSGVKVAVLDTGISTHPDLNIRGGASFVPGEPSTQDGNGHGTHVAGTIAALNNSIGVLGVAPSAELYAVKVLGADGEGAISSIAQGLEWAGNNGMHVANLSLGSPSPSATLEQAVNSATSRGVLVVAASGNSGASSISYPARYANAMAVGATDQNNNRASFSQYGAGLDIVAPGVNMQSTYPGSTYASLNGTSMATPHVAGAAALVKQKNPSWSNVQIRNHLKNTATSLGSTNLYGSGLVNAEAATR

SEQ ID NO: 57205 - protein, 269 aa, Unidentified
AQSVPWGISRVQAPASHNRGLTGSGVKVAVLDTGISTHPDLNIRGGASFVPGEPSTQDGNGHGTHVAGTIAALNNSIGVLGVAPSAELYAVKVLGASGAGALSSIAQGLEWAGNNGMHVANLSLGNPSPSATLEQAVNSATSRGVIVVAASGNSGAGSISYPARYANAMAVGATDQNNNRASFSQYGAGLDIVAPGVNVQSTYPGSTYASLNGTSMATPHVAGAAALVKQKNPSWSNVQIRNHLKNTATSLGSTNLYGSGLVNAEAATR

SEQ ID NO: 57206 - protein, 269 aa, Unidentified
AQSVPWGISRVQAPAAHNRGLTGSGVKVAVLDTGISTHPDLRIRGGASFVPGEPSTQDGNGHGTHVAGTIAALNNNIGVLGVAPSAELYAVKVLGASGSASVSSIAQGLEWAGNNGMHVANLSLGLPSPSATLEQAVNSATSRGVLVVAASGNSGAGSISYPARYANAMAVGATDQNNNRASFSQYGAGLDIVAPGVNVQSTYPGSTYASENGTSMATPHVAGAAALVKQKNPRWSNVQIRNHLKNTATSLGSTNLYGSGLVNAEAATR

SEQ ID NO: 57207 - protein, 269 aa, Unidentified
AQSVPWGISRVQAPAAHNRGLTGRGVKVAVLDTGISTHPDLNIRGGASFVPGEPSTQDGNGHGTHVAGTIAALNNGIGVLGVAPSAELYAVKVLGASGSGSVSSIAQGLEWAGNNSMHVANLSLGSPSPSATLEQAVNSATSRGVLVVAASGNSGAGSISYPARYANAMAVGATDQNNNRASFSQYGAGLDIVAPGVNVQSTYPGSTYASLNGTSMATPHVAGAAALVKQKNPSWSNVRIRDRLKNTATSLGSTNLYGSGLVNAEAATR

SEQ ID NO: 57208 - protein, 269 aa, Unidentified
AQSVPWGISRVQAPAAHNRGLYGSGVKVAVLDTGISTHPDLNIRGGASFVPGEPSTQDGNGHGTHVAGTIAALNNSIGVLGVAPSAELYAVKVLGASGGGNISSIAQGLEWAGNNGMHVANLSLGSPSPSATLEQAVNSATSRGVLVVAASGNSGAGSISYPARYANAMAVGATDQNNNRASFSQYGAGLDIVAPGVNVQSTYPGSTYASLNGTSMATPHVAGAAMLVKQKNPSWSNVRIRNHLKNTATSLGSTNLYGSGLVNAEAATR

SEQ ID NO: 57209 - protein, 269 aa, Unidentified
AQSVPWGISRVQAPAAHNRGLTGRGVKVAVLDTGISTHPDLNIRGGASFVPGEPSTQDGNGHGTHVAGTIAALNNGIGVLGVAPSAELYAVKVLGASGSGSVSSIAQGLEWAGNNDMHVANLSLGSPSPSATLEQAVNSATSRGVLVVAASGNSGADSISYPARYANAMAVGATDQNNNRASFSQYGAGLDIVAPGVNVQSTYPGSTYASLNGTSMATPHVAGAAALVKQKNPSWSNVQIRDRLKNTATSLGSTNLYGSGLVNAEAATR

SEQ ID NO: 57210 - protein, 269 aa, Unidentified
AQSVPWGISRVQAPAAHSRGLTGRGVKVAVLDTGISTHPDLNIRGGASFVPGEPSTQDGNGHGTHVAGTIAALNNGIGVLGVAPSAELYAVKVLGASGSGSVSSIAQGLEWAGNNGMHVANLSLGSPSPSATLEQAVNSATSRGVLVVAASGNSGAGSISYPARYANAMAVGANDQNNNRASFSQYGAGLDIVAPGVNVQSTYPGSTYASLNGTSMATPHVAGAAALVKQKNPSWSNVRIRDHLKNTATSLGSTNLYGSGLVNAEAATR

SEQ ID NO: 57211 - protein, 269 aa, Unidentified
AQSVPWGISRVQAPAAHNRGLAGSGVKVAVLDTGISTHPDLNIRGGASFVPGEPSTQDGNGHGTHVAGTIAALNNSIGVLGVAPSAELYAVKVLGASGTGNISSIAQGLEWAGNNGMHVANLSLGSPSPSATLEQAVNSATSRGVLVVAASGNSGAGSISYPARYANAMAVGATDQNNNRASFSQYGAGLDIVAPGVNVQSTYPGSTYASLNGTSMATPHVAGAALLVKQKNPSWSNVSIRNHLKNTATSLGSTNLYGSGLVNAEAATR

SEQ ID NO: 57212 - protein, 269 aa, Unidentified
AQSVPWGISRVQAPAAHNRGLTGSGVKVAVLDTGISTHPDLNIRGGASFVPGEPSTQDGNGHGTHVAGTIAALDNSIGVLGVAPSAELYAVKVLGASGSGAISSIAQGLEWAGNNGMHVANLSLGSPSPSATLEQAVNSATSRGVLVVAASGNSGAGSISYPARYANAMAVGATDQNNNRASFSQYGAGLDIVAPGVNVQSTYPGSTYASLNGTSMATPHVAGAAVLVKHKNPSWSNVRIRNHLKNTATSLGSTNLYGSGLVNAEAATR

SEQ ID NO: 57213 - protein, 269 aa, Unidentified
AQSVPWGISRVQAPAAHNRRLTGSGVKVAVLDTGISTHPDLNIRGGASFVPGEPSTQDGNGHGTHVAGTIAALNNDIGVLGVAPSAELYAVKVLGASGSGSVSSIAQGLEWAGNNSMHVANLSLGSESPSATLEQAVNSATSRGVLVVAASGNSGADSISYPARYANAMAVGATDQNNNRASFSQYGAGLDIVAPGVNVQSTYPGSTYASLNGTSMATPHVAGAAALVKQKNPSWSNVQIRNRLKNTATSLGSTNLYGSGLVNAEAATR

SEQ ID NO: 57214 - protein, 269 aa, Unidentified
AQSVPWGISRVQAPAAHNRGLRGSGVKVAVLDTGISTHPDLNIRGGASFVPGEPSTQDGNGHGTHVAGTIAALNNSIGVLGVAPSAELYAVKVLGASGGGNISSIAQGLEWAGNNGMHVANLSLGSPSPSATLEQAVNSATSRGVLVVAASGNSGAGSISYPARYANAMAVGATDQNNNRASFSQYGAGLDIVAPGVNVQSTYPGSTYASLNGTSMATPHVAGAALLVKQKNPSWSNVWIRNHLKNTATSLGSTNLYGSGLVNAEAATR

SEQ ID NO: 57215 - protein, 269 aa, Unidentified
AQSVPWGISRVQAPAAHRRGLTGRGVKVAVLDTGISTHPDLNIRGGASFVPGEPSTQDGNGHGTHVAGTIAALDNSIGVLGVAPSAELYAVKVLGASGSGSVSSIAQGLEWAGANGMHVANLSLGSPSPSATLEQAVNSATSRGVLVVAASGNSGAGSISYPARYANAMAVGATDQNNNRASFSQYGAGLDIVAPGVNVQSTYPQSTYASLNGTSMATPHVAGAAALVKQKNPSWSNVQIRNRLKNTATSLGSTNLYGSGLVNAEAATR

SEQ ID NO: 57216 - protein, 269 aa, Unidentified
AQSVPWGISRVQAPAARNRGLTGSGVKVAVLDTGISTHPDLRITGGASFVPGEPSTQDGNGHGTHVAGTIAALNNSIGVLGVAPSAELYAVKVLGASGAGSVSSIAQGLEWAGNNGMHVANLSLGSPSPSATLEQAVNSATSRGVLVVAASGNSGAGSISYPARYANAMAVGATDQNNNRASFSQYGAGLDIVAPGVNVQSTYIGSAYASLNGTSMATPHVAGAAALVKQKNPSWSNVQIRNHLKNTATSLGSTNLYGSGLVNAEAATR

SEQ ID NO: 57217 - protein, 269 aa, Unidentified
AQSVPWGISRVQAPAAHNRGLQGSGVKVAVLDTGISTHPDLNIRGGASFVPGEPSTQDGNGHGTHVAGTIAALNNSIGVLGVAPSAELYAVKVLGASGTGGISSIAQGLEWAGNNGMHVANLSLGSPSPSATLEQAVNSATSRGVLVVAASGNSGAGSISYPARYANAMAVGATDQNNNRASFSQYGAGLDIVAPGVNVQSTYPGSTYASLNGTSMATPHVAGAAMLVKQKNPSWSNVWIRNHLKNTATSLGSTNLYGSGLVNAEAATR

SEQ ID NO: 57218 - protein, 269 aa, Unidentified
AQSVPWGISRVQAPAAHNRGLTGSGVKVAVLDTGISTHPDLNIRGGASFVPGEPSTQDGNGHGTHVAGTIAALNNSIGVLGVAPSAELYAVKVLGASGGGAISSIAQGLEWARNNGMHVANLSLGSPSPSATLEQAVNSATSRGVLVVAASGNSGAGSISYPARYANAMAVGATDQNNNRASFSQYGAGLDIVAPGVNVQSTYPGSTYASLNGTSMATPHVAGAAVLVKQKNPSWSNVRIRNHLKNTATSLGSTNLYGSGLVNAEAATR

SEQ ID NO: 57219 - protein, 269 aa, Unidentified
AQSVPWGISRVQAPASHNRGLAGSGVKVAVLDTGISTHPDLNIRGGASFVPGEPSTQDGNGHGTHVAGTIAALNNSIGVLGVAPSAELYAVKVLGASGAGALSSIAQGLEWAGNNGMHVANLSLGSPSPSATLEQAVNSATSRGVIVVAASGNSGAGSISYPARYANAMAVGATDQNNNRASFSQYGAGLDIVAPGVNVQSTYPGSTYASLNGTSMATPHVAGAAALVKQKNPSWSNVQIRNHLKNTATSLGSTNLYGSGLVNAEAATR

SEQ ID NO: 57220 - protein, 269 aa, Unidentified
AQSVPWGISRVQAPAAHNRGLYGSGVKVAVLDTGISTHPDLNIRGGASFVPGEPSTQDGNGHGTHVAGTIAALNNSIGVLGVAPSAELYAVKVLGASGTGAISSIAQGLEWAGNNGMHVANLSLGSPSPSATLEQAVNSATSRGVLVVAASGNSGAGSISYPARYANAMAVGATDQNNNRASFSQYGAGLDIVAPGVNVQSTYPGSTYASLNGTSMATPHVAGAATLVKQKNPSWSNVRIRNHLKNTATSLGSTNLYGSGLVNAEAATR

SEQ ID NO: 57221 - protein, 269 aa, Unidentified
AQSVPWGISRVQAPAAHNRGLTGRGVKVAVLDTGISTHPDLNIRGGASFVPGEPSTQDGNGHGTHVAGTIAALNNDIGVLGVAPSAELYAVKVLGASGSGSVSSIAQGLEWAGNNSMHVANLSLGSPSPSATLEQAVNSATSRGVLVVAASGNSGADSISYPARYANAMAVGATDQNNNRASFSQYGAGLDIVAPGVNVQSTYPGSTYASLNGTSMATPHVAGAAALVKQKNPSWSNVRIRNRLKNTATSLGSTNLYGSGLVNAEAATR

SEQ ID NO: 57222 - protein, 269 aa, Unidentified
AQSVPWGISRVQAPAAHNRGLTGRGVKVAVLDTGISTHPDLNIRGGASFVPGEPSTQDGEGHGTHVAGTIAALNNGIGVLGVAPSAELYAVKVLGASGSGSVSSIAQGLEWAGNNDMHVANLSLGSPSPSATLEQAVNSATSRGVLVVAASGNSGADSISYPARYANAMAVGATDQNNNRASFSQYGAGLDIVAPGVNVQSTYPGSTYASLNGTSMATPHVAGAAALVKQKNPSWSNVQIRDHLKNTATSLGSTNLYGSGLVNAEAATR

SEQ ID NO: 57223 - protein, 269 aa, Unidentified
AQSVPWGISRVQAPAAHNRGLTGGGVKVAVLDTGISTHPDLNIRGGASFVPGEPSTQDGNGHGTHVAGTIAALNNNIGVLGVGPSAELYAVKVLAASGNGSVSSIAQGLEWAGNNGMHVANLSLGAPSPSATLEQAVNSATSRGVLVVAASGNSGAGSISYPARYANAMAVGATDQNNNRADFSQYGAGLDIVAPGVNVQSTYPGSTYASLNGTSSATPHVAGAAALVKQKNPSWSNVQIRNHLKNTATSLGSTNLYGSGLVNAEAATR

SEQ ID NO: 57224 - protein, 269 aa, Unidentified
AQSVPWGISRVQAPAAHNRGLKGSGVKVAVLDTGISTHPDLNIRGGASFVPGEPSTQDGNGHGTHVAGTIAALNNSIGVLGVAPSAELYAVKVLGASGNGNISSIAQGLEWAGNNGMHVANLSLGSPSPSATLEQAVNSATSRGVLVVAASGNSGAGSISYPARYANAMAVGATDQNNNRASFSQYGAGLDIVAPGVNVQSTYPGSTYASLNGTSMATPHVAGAAMLVKQKNPSWSNVRIRNHLKNTATSLGSTNLYGSGLVNAEAATR

SEQ ID NO: 57225 - protein, 269 aa, Unidentified
AQSVPWGISRVQAPAAHNRRLTGRGVKVAVLDTGISTHPDLNIRGGASFVPGEPSTQDGEGHGTHVAGTIAALNNGIGVLGVAPSAELYAVKVLGASGSGSVSSIAQGLEWAGNNSMHVANLSLGSPSPSATLEQAVNSATSRGVLVVAASGNSGAGSISYPARYANAMAVGATDQNNNRASFSQYGAGLDIVAPGVNVQSTYPGSTYASLNGTSMATPHVAGAAALVKQKNPSWSNVRIRNHLKNTATSLGSTNLYGSGLVNAEAATR

SEQ ID NO: 57226 - protein, 269 aa, Unidentified
AQSVPWGISRVQAPAAHNRGLTGRGVKVAVLDTGISTHPDLRITGGASFVPGEPSTQDGNGHGTHVAGTIAALNNSIGVLGVAPSAELYAVKVLGASGSGSVSSIAQGLEWAGNNGMHVANLSLGSPSPSATLEQAVNSATSRGVLVVAASGNSGAGSISYPARYANAMAVGATDQNNNRASFSQYGAGLDIVAPGVNVQSTYPGSAYFSLNGTSMATPHVAGAAALVKQKNPSWSNVQIRNHLKNTATSLGSTNLYGSGLVRAEAATR

SEQ ID NO: 57227 - protein, 269 aa, Unidentified
AQSVPWGISRVQAPAAHNRGLTGRGVKVAVLDSGISTHPDLNIRGGASFVPGEPSTQDGEGHGTHVAGTIAALNNSIGVLGVAPSAELYAVKVLGASGSGSVSSIAQGLEWAGLNGMHVANLSLGIPSPSATLEQAVNSATSRGVLVVAASGNSGAGSISYPARYANAMAVGATDQNNNRADFSQYGAGLDIVAPGVNVQSTYPGSTYASLNGTSMATPHVAGAAALVKQKNPSWSNVQIRNHLKNTATSLGSTNLYGSGLVNAEAATR

SEQ ID NO: 57228 - protein, 269 aa, Unidentified
AQSVPWGISRVQAPAAHNRGLTGSGVKVAVLDTGISTHPDLNIRGGASFVPGEPSTQDGEGHGTHVAGTIAALNNSIGVLGVAPSAELYAVKVLGASGAGSLSSIAQGLEWAGNNGMHVANLSLGSPSPSATLEQAVNSATSRGVLVVAASGNSGAGSISYPARYANAMAVGATDQNNNHADFSQYGAGLDIVAPGVNVQSTYPGSTYASLNGTSMATPHVAGAAALVKQKNPSWSNVQIRNHLKNTATSLGSTNLYGSGLVNAFAATR

SEQ ID NO: 57229 - protein, 269 aa, Unidentified
AQSVPWGISRVQAPAAHNRGLTGSGVKVAVLDTGISTHPDLNIRGGASFVPGEPSTQDGNGHGTHVAGTIAALDNSIGVLGVAPSAELYAVKVLGADGRGAISSIAQGLEWAGNNGMHVASLSLGSPSPSATLEQAVNSATSRGVLVVAASGNSGAGSISYPARYANAMAVGATDQNNNRASFSQYGAGLDIVAPGVNVQSTYPGSTYASLNGTSMATPHVAGAAALVKQKNPSWSNVQIRNHLKNTATSLGSTNLYGSGLVNAEAATR

SEQ ID NO: 57230 - protein, 269 aa, Unidentified
AQSVPWGISRVQAPAAHNRGLTGRGVKVAVLDTGISTHPDLNIRGGASFVPGEPSTQDGNGHGTHVAGTIAALNNSIGVLGVAPSAELYAVKVLGASGSGSVSSIAQGLEWAGNNRMHVANLSLGIPSPSATLEQAVNSATSRGVLVVAASGNSGEGSIDYPARYANAMAVGATDQNNNRADFSQYGAGLDIVAPGVNVQSTYPGSTYASLNGTSMATPHVAGAAALVKQKNPSWSNVQIRNHLKNTATSLGSTNLYGSGLVNAEAATR

SEQ ID NO: 57231 - protein, 269 aa, Unidentified
AQSVPWGISRVQAPAAHNRGLTGSGVKVAVLDTGISTHPDLNIRGGRSFVPGEPSTQDGNGHGTHVAGTIAALNNNIGVLGVAPSAELYAVKVLGASGSGSVSSIAQGLEWAGLNGMHVANLSLGSPSPSATLEQAVNSATSRGVLVVAASGNSGAGSISYPARYANAMAVGATDQNNERASFSQYGAGLDIVAPGVNVQSTYPGSTYASENGTSMATPHVAGAAALVKQKNGSWSNVQIRNHLKNTATSLGSTNLYGSGLVNAEAATR

SEQ ID NO: 57232 - protein, 269 aa, Unidentified
AQSVPWGISRVQAPAAHNRGLYGSGVKVAVLDTGISTHPDLNIRGGASFVPGEPSTQDGNGHGTHVAGTIAALNNSIGVLGVAPSAELYAVKVLGASGGGNISSIAQGLEWAGNNGMHVANLSLGSPSPSATLEQAVNSATSRGVLVVAASGNSGAGSISYPARYANAMAVGATDQNNNRASFSQYGAGLDIVAPGVNVQSTYPGSTYASLNGTSMATPHVAGAAVLVKQKNPSWSNVRIRNHLKNTATSLGSTNLYGSGLVNAEAATR

SEQ ID NO: 57233 - protein, 269 aa, Unidentified
AQSVPWGISRVQAPAAHRRGLTGRGVKVAVLDTGISTHPDLNIRGGASFVPGEPSTQDGNGHGTHVAGTIAALDNSIGVLGVAPSAELYAVKVLGASGSGSVSSIAQGLEWAGNNGMHVANLSLGSPSPSATLEQAVNSATSRGVLVVAASGNSGAGSISYPARYANAMAVGATDQNNNRASFSQYGAGLDLVAPGVNVQSTYPQSTYASLNGTSMATPHVAGAAALVKQKNPSWSNVQIRNRLKNTATSLGSTNLYGSGLVNAEAATR

SEQ ID NO: 57234 - protein, 269 aa, Unidentified
AQSVPWGISRVQAPAAHNRGLTGSGVKVAVLDTGISTHPDLNIRGGASFVPGEPSTQDGNGHGTHVAGTIAALNNHIGVLGVAPSAELYAVKVLGADGEGAISSIAQGLEWAGNNGMHVANLSLGSPSPSATLEQAVNSATSRGVLVVAASGNSGASSISYPARYANAMAVGATDQNNNRASFSQYGAGLDIVAPGVNVQSTYPGSTYASLNGTSMATPHVAGAAALVKQKNPSWSNVQIRNHLKNTATSLGSTNLYGSGLVNAEAATR

SEQ ID NO: 57235 - protein, 269 aa, Unidentified
AQSVPWGISRVRAPAAHNRGLTGSGVKVAVLDTGISTHPDLNIRGGASFVPGEPSTQDGNGHGTHVAGTIAALDNSIGVLGVAPSAELYAVKVLGASGSGATSSIAQGLEWAGNNGMHVANLSLGSPTPSATLEQAVNSATSRGVLVVAASGNSGAGSISYPARYANAMAVGATDQNNNRASFSQYGAGLDIVAPGVNVQSTYPGSTYASLNGTSSATPHVAGAAALVKQKNPSWSNVRIRNHLKNTATSLGSTDLYGSGLVNAEAATR

SEQ ID NO: 57236 - protein, 269 aa, Unidentified
AQSVPWGISRVQAPAAHNRGLQGSGVKVAVLDTGISTHPDLNIRGGASFVPGEPSTQDGNGHGTHVAGTIAALNNSIGVLGVAPSAELYAVKVLGASGAGNLSSIAQGLEWAGNNGMHVANLSLGSPSPSATLEQAVNSATSRGVLVVAASGNSGAGSISYPARYANAMAVGATDQNNNRASFSQYGAGLDIVAPGVNVQSTYPGSTYASLNGTSMATPHVAGAATLVKQKNPSWSNVSIRNHLKNTATSLGSTNLYGSGLVNAEAATR

SEQ ID NO: 57237 - protein, 269 aa, Unidentified
AQSVPWGISRVQAPAAHNRGLRGSGVKVAVLDTGISTHPDLNIRGGASFVPGEPSTQDGNGHGTHVAGTIAALNNSIGVLGVAPSAELYAVKVLGASGAGAISSIAQGLEWAGNNGMHVANLSLGSPSPSATLEQAVNSATSRGVLVVAASGNSGAGSISYPARYANAMAVGATDQNNNRASFSQYGAGLDIVAPGVNVQSTYPGSTYASLNGTSMATPHVAGAAVLVKQKNPSWSNVWIRNHLKNTATSLGSTNLYGSGLVNAEAATR

SEQ ID NO: 57238 - protein, 269 aa, Unidentified
AQSVPWGISRVQAPAAHNRRLTGRGVKVAVLDTGISTHPDLRITGGASFVPGEPSTQDGNGHGTHVAGTIAALNNSIGVLGVAPSAELYAVKVLGASGAGSVSSIAQGLEWAGNNGMHVANLSLGSPSPSATLEQAVNSATSRGVLVVAASGNSGAGSISYPARYANAMAVGATDQNNNRASFSQYGAGLDIVAPGVNVQSTYPGSAYASLNGTSMATPHVAGAAALVKQKNPSWSNVQIRNHLKNTATSLGSTNLYGSGLVNAEAATR

SEQ ID NO: 57239 - protein, 269 aa, Unidentified
AQSVPWGISRVQAPAAHNRRLTGSGVKVAVLDTGISTHPDLNIRGGASFVPGEPSTQDGNGHGTHVAGTIAALNNGIGVLGVAPSAELYAVKVLGASGSGSVSSIAQGLEWAGNNSMHVANLSLGSESPSATLEQAVNSATSRGVLVVAASGNSGAGSISYPARYANAMAVGATDQNNNRASFSQYGAGLDIVAPGVNVQSTYPGSTYASLNGTSMATPHVAGAAALVKQKNPSWSNVRIRNRLKNTATSLGSTNLYGSGLVNAEAATR

SEQ ID NO: 57240 - protein, 269 aa, Unidentified
AQSVPWGISRVQAPAAHRRGLRGRGVKVAVLDTGISTHPDLNIRGGASFVPGEPSTQDGNGHGTHVAGTIAALDNSIGVLGVAPSAELYAVKVLGASGSGSVSSIAQGLEWAGNNGMHVANLSLGSPSPSATLEQAVNSATSRGVLVLAASGNSGAGSISYPARYANAMAVGATDQNNNRASFSQYGAGLDIVAPGVNVQSTYPGSTYASLNGTSMATPHVAGAAALVKQKNPSWSNVQIRNRLKNTATSLGSTNLYGSGLVNAEAATR

SEQ ID NO: 57241 - protein, 269 aa, Unidentified
AQSVPWGISRVQAPAAHNRGLRGSGVKVAVLDTGISTHPDLNIRGGASFVPGEPSTQDGNGHGTHVAGTIAALNNSIGVLGVAPSAELYAVKVLGASGAGNISSIAQGLEWAGNNGMHVANLSLGSPSPSATLEQAVNSATSRGVLVVAASGNSGAGSISYPARYANAMAVGATDQNNNRASFSQYGAGLDIVAPGVNVQSTYPGSTYASLNGTSMATPHVAGAAVLVKQKNPSWSNVWIRNHLKNTATSLGSTNLYGSGLVNAEAATR

SEQ ID NO: 57242 - protein, 269 aa, Unidentified
AQSVPWGISRVQAPAAHNRGLTGRGVKVAVLDTGISTHPDLNIRGGASFVPGEPSTQDGEGHGTHVAGTIAALNNSIGVLGVAPSAELYAVKVLGASGSGSVSSIAQGLEWAGLNRMHVANLSLGIPSPSATLEQAVNSATSRGVLVVAASGNSGAGSIDYPARYANAMAVGATDQNNNRASFSQYGAGLDIVAPGVNVQSTYPGSTYASLNGTSMATPHVAGAAALVKQKNPSWSNVQIRNHLKNTATSLGSTNLYGSGLVNAEAATR

SEQ ID NO: 57243 - protein, 269 aa, Unidentified
AQSVPWGISRVQAPAAHNRRLTGSGVKVAVLDTGISTHPDLNIRGGASFVPGEPSTQDGNGHGTHVAGTIAALNNGIGVLGVAPSAELYAVKVLGASGSGSVSSIAQGLEWAGNNSMHVANLSLGSESPSATLEQAVNSATSRGVLVVAASGNSGADSISYPARYANAMAVGATDQNNNRADFSQYGAGLDIVAPGVNVQSTYPGSTYASLNGTSMATPHVAGAAALVKQKNPSWSNVQIRNHLKNTATSLGSTNLYGSGLVNAEAATR

SEQ ID NO: 57244 - protein, 269 aa, Unidentified
AQSVPWGISRVQAPAAHNRGLKGSGVKVAVLDTGISTHPDLNIRGGASFVPGEPSTQDGNGHGTHVAGTIAALNNSIGVLGVAPSAELYAVKVLGASGNGNLSSIAQGLEWAGNNGMHVANLSLGSPSPSATLEQAVNSATSRGVLVVAASGNSGAGSISYPARYANAMAVGATDQNNNRASFSQYGAGLDIVAPGVNVQSTYPGSTYASLNGTSMATPHVAGAAVLVKQKNPSWSNVSIRNHLKNTATSLGSTNLYGSGLVNAEAATR

SEQ ID NO: 57245 - protein, 269 aa, Unidentified
AQSVPWGISRVQAPAAHNRGLAGRGVKVAVLDSGISTHPDLNIRGGASFVPGEPSTQDGNGHGTHVAGTIAALNNSIGVLGVAPSAELYAVKVLGASGSGSVSSIAQGLEWAGNNRMHVANLSLGSPSPSATLEQAVNSATSRGVLVVAASGNSGAGSIDYPARYANAMAVGATDQNNNRADFSQYGAGLDIVAPGVNVQSTYPGSTYASLNGTSMATPHVAGAAALVKQKNPSWSNVQIRNHLKNTATSLGSTNLYGSGLVNAEAATR

SEQ ID NO: 57246 - protein, 269 aa, Unidentified
AQSVPWGISRVQAPAAHNRRLTGRGVKVAVLDTGISTHPDLNIRGGASFVPGEPSTQDGEGHGTHVAGTIAALNNGIGVLGVAPSAELYAVKVLGASGSGSVSSIAQGLEWAGNNSMHVANLSLGSPSPSATLEQAVNSATSRGVLVVAASGNSGADSISYPARYANAMAVGATDQNNNRASFSQYGAGLDIVAPGVNVQSTYPGSTYASLNGTSMATPHVAGAAALVKQKNPSWSNVQIRNHLKNTATSLGSTNLYGSGLVNAEAATR

SEQ ID NO: 57247 - protein, 269 aa, Unidentified
AQSVPWGISRVQAPAAHNRGLTGRGVKVAVLDTGISTHPDLNITGGASFVPGEPSTQDGNGHGTHVAGTIAALDNSIGVLGVAPSAELYAVKVLGASGSGSVSSIAQGLEWAGNNGMHVANLSLGSPSPSATLEQAVNSATSRGVLVVAASGNSGAGSISYPARYANAMAVGATDQNNNRASFSQYGAGLDIVAPGVNVQSTYPGSTYASLNGTSMATPHVAGEAALVKQKNPSWRNVQIRNRLKNTATSLGSTNLYGSGLVNAEAATR

SEQ ID NO: 57248 - protein, 269 aa, Unidentified
AQSVPWGISRVQAPAAHNRGLAGSGVKVAVLDTGISTHPDLNIRGGASFVPGEPSTQDGNGHGTHVAGTIAALNNSIGVLGVAPSAELYAVKVLGASGAGNLSSIAQGLEWAGNNGMHVANLSLGSPSPSATLEQAVNSATSRGVLVVAASGNSGAGSISYPARYANAMAVGATDQNNNRASFSQYGAGLDIVAPGVNVQSTYPGSTYASLNGTSMATPHVAGAALLVKQKNPSWSNVRIRNHLKNTATSLGSTNLYGSGLVNAEAATR

SEQ ID NO: 57249 - protein, 269 aa, Unidentified
AQSVPWGISRVQAPAAHNRGLTASGVKVAVLDTGISFHPDLNIRGGASFVPGEPSTQDGNGHGTHVAGTIAALNNNIGVLGVAPSAELYAVKVLGASSSGSVSSIAQGLEWAGNNGMHVANLSLGSPSPSATLEQAVNSATSRGVLVVAASGNSGAGSISYPARYANAMAVGATDQNNNRASFSQYGAGLDIVAPGVNVQSTYPGMTYDSLNGTSMATPHVAGAAALVKQKNPSWSNVQIRNHLKNTATSLGSTNLYGSGLVNAEAATR

SEQ ID NO: 57250 - protein, 269 aa, Unidentified
AQSVPWGISRVQAPAAHNRGLTGRGVKVAVLDTGISTHPDLNIRGGASFVPGEPSTQDGNGHGTHVAGTIAALNNDIGVLGVAPSAELYAVKVLGASGSGSVSSIAQGLEWAGNNDMHVANLSLGSPSPSATLEQAVNSATSRGVLVVAASGNSGAGSISYPARYANAMAVGATDQNNNRADFSQYGAGLDIVAPGVNVQSTYPGSTYASLNGTSMATPHVAGAAALVKQKNPSWSNVRIRNRLKNTATSLGSTNLYGSGLVNAEAATR

SEQ ID NO: 57251 - protein, 269 aa, Unidentified
AQSVPWGISRVQAPAAHNRGLTGGGVKVAVLDTGISTHPDLNIRGGASFVPGEPSTQDGNGHGTHVAGTIAALNNNIGVLGVAPSAELYAVKVLSASGNGSVSSIAGGLEWAGNNGMHVANLSLGAPSPSATLEQAVNSATSRGVLVVAASGNSGAGSISYPARYANAMAVGATDQNNNRASFSQYGAGLDIVAPGVNVQSTYPGSTYASLNGTSMATPHVAGAAALVKQKNPSWSNVQIRNHLKNTATSLGSTNLYGSGLVNAEAATR

SEQ ID NO: 57252 - protein, 269 aa, Synthetic construct
AQSVPWGISRVQAPAAHNRGLTGSGVRVAVLDTGISTHPDLNIRGGASFVPGEPSTQDGNGHGTHVAGTIAALDNSIGVLGVAPSAELYAVKVLGASGSGSYSSIAQGLEWAGNNGMHVASLSLGSPSPSATLEQAVNSATSRGVLVVAASGNSGAGSISYPARYANAMAVGATDQNNNRASFSQYGAGLDIVAPGVNVLSTYPGSTYASLSGTSMATPHVAGAAALVKQKNPSWSNVQIRNHLKNTATSLGSTNLYGSGLVNAEAATR

SEQ ID NO: 57253 - protein, 269 aa, Unidentified
AQSVPWGISRVQAPAAHNRGLTGSGVKVAVLDTGISTHPDLRIRGGASFVPGEPSTQDGNGHGTHVAGTIAALNNSIGVLGVAPSAELYAVKVLGASGGGAISSIAQGLEWAGNNGMHVANLSLGSPSPSATLEQAVNSATSRGVLVVAASGNSGAGSISYPARYANAMAVGATDQNNNRASFSQYGAGLDIVAPGVNVQSTYPGSTYASLNGTSMATPHVAGAAALVKQKNPSWSNVRIRNRLKNTATSLGSTNLYGSGLVNAEAATR

SEQ ID NO: 57254 - protein, 269 aa, Unidentified
AQSIPWGISRVQAPAAHNRGLTGSGVKVAVLDTGISTHPDLNIRGGASFVPGEPSTQDGNGHGTHVAGTIAALNNSIGVLGVAPSAELYAVKVLGADGRGAISSIAQGLEWAGNNGMHVANLSLGSPSPSATLEQAVNSATSRGVLVVAASGNSGASSISYPARYANAMAVGATDQNNNRASFSQYGAGLDIVAPGVNVQSTYPGSTYASLNGTSMATPHVAGAAALVKQKNPSWSNVQIRNHLKNTATSLGSTNLYGSGLVNAEAATR

SEQ ID NO: 57255 - protein, 269 aa, Unidentified
AQSVPWGISRVQAPAAHNRGLTGRGVKVAVLDTGISTHPDLNIRGGASFVPGEPSTQDGEGHGTHVAGTIAALNNDIGVLGVAPSAELYAVKVLGASGSGSVSSIAQGLEWAGNNDMHVANLSLGSESPSATLEQAVNSATSRGVLVVAASGNSGAGSISYPARYANAMAVGATDQNNNRASFSQYGAGLDIVAPGVNVQSTYPGSTYASLNGTSMATPHVAGAAALVKQKNPSWSNVQIRNRLKNTATSLGSTNLYGSGLVNAEAATR

SEQ ID NO: 57256 - protein, 269 aa, Unidentified
AQSVPWGISRVQAPAAHNRKLTGSGVKVAVLDTGISTHPDLNIRGGASFVPGEPSTQDGEGHGTHVAGTIAALNNNIGVLGVAPSAELYAVKVLGASGQGSVSSIAGGLEWAGLNGMHVANLSLGSPSPSATLEQAVNSATSRGVLVVAASGNSGAGSISYPARYANAMAVGATDQNNNRASFSQYGAGLDIVAPGVNVQSTYPGSTYASLNGTSMATPHVAGAAALVKQKNPSWSNVQIRNHLKNTATSLGSTNLYGSGLVNAEAATR

SEQ ID NO: 57257 - protein, 269 aa, Unidentified
AQSVPWGISRVQAPAAHNRRLTGRGVKVAVLDTGISTHPDLNIRGGASFVPGEPSTQDGEGHGTHVAGTIAALNNDIGVLGVAPSAELYAVKVLGASGSGSVSSIAQGLEWAGNNDMHVANLSLGSPSPSATLEQAVNSATSRGVLVVAASGNSGAGSISYPARYANAMAVGATDQNNNRASFSQYGAGLDIVAPGVNVQSTYPGSTYASLNGTSMATPHVAGAAALVKQKNPSWSNVRIRNHLKNTATSLGSTNLYGSGLVNAEAATR

SEQ ID NO: 57258 - protein, 269 aa, Unidentified
AQSVPWGISRVQAPAAHNRGLTGSGVKVAVLDTGISTHPDLRITGGASFVPGEPSTQDGNGHGTHVAGTIAALNNSIGVLGVAPSAELYAVKVLGASGAGSVSSIAQGLEWAGNNGMHVANLSLGSPSPSATLEQAVNSATSRGVLVVAASGNSGAGSISYPARYANAMAVGATDQNNNRASFSQYGAGLDIVAPGVSVQSTYIGSAYASLNGTSMATPHVAGAAALVKQKNPSWSNVQIRNHLKNTATSLGSTNLYGSGLVNAEAATR

SEQ ID NO: 57259 - protein, 269 aa, Unidentified
AQSVPWGISRVQAPAAHNRGLTGRGVKVAVLDTGISTHPDLNIRGGASFVPGEPSTQDGEGHGTHVAGTIAALNNDIGVLGVAPSAELYAVKVLGASGSGSVSSIAQGLEWAGNNDMHVANLSLGSPSPSATLEQAVNSATSRGVLVVAASGNSGAGSISYPARYANAMAVGATDQNNNRASFSQYGAGLDIVAPGVNVQSTYPGSTYASLNGTSMATPHVAGAAALVKQKNPSWSNVRIRDHLKNTATSLGSTNLYGSGLVNAEAATR

SEQ ID NO: 57260 - protein, 269 aa, Unidentified
AQSVPWGISRVQAPAAHNRRLTGSGVKVAVLDTGISTHPDLRIRGGASFVPGEPSTQDGNGHGTHVAGTIAALNNNIGVLGVAPSAELYAVKVLGASGGGSVSSIAGGLEWAGLNGMHVANLSLGSPSPSATLEQAVNSATSRGVLVVAASGNSGAGSISYPARYANAMAVGATDQNNNRASFSQYGAGLDIVAPGVNVQSTYPGSTYASLNGTSMATPHVAGAAALVKQKNPSWSNVQIRNHLKNTATSLGSTNLYGSGLVNAEAATR

SEQ ID NO: 57261 - protein, 269 aa, Unidentified
AQSVPWGISRVQAPAAHNRGLTGSGVKVAVLDTGISTHPDLNIRGGASFVPGEPSTQDGEGHGTHVAGTIAALNNGIGVLGVAPSAELYAVKVLGASGSGSVSSIAQGLEWAGNNSMHVANLSLGSPSPSATLEQAVNSATSRGVLVVAASGNSGADSISYPARYANAMAVGATDQNNNRASFSQYGAGLDIVAPGVNVQSTYPGSTYASLNGTSMATPHVAGAAALVKQKNPSWSNVQIRDRLKNTATSLGSTNLYGSGLVNAEAATR

SEQ ID NO: 57262 - protein, 269 aa, Unidentified
AQSVPWGISRVQAPAAHNRGLAGRGVKVAVLDTGISTHPDLNIRGGASFVPGEPSTQDGEGHGTHVAGTIAALNNSIGVLGVAPSAELYAVKVLGASGSGSVSSIAQGLEWAGNNRMHVANLSLGSPSPSATLEQAVNSATSRGVLVVAASGNSGEGSISYPARYANAMAVGATDQNNNRADFSQYGAGLDIVAPGVNVQSTYPGSTYASLNGTSMATPHVAGAAALVKQKNPSWSNVQIRNHLKNTATSLGSTNLYGSGLVNAEAATR

SEQ ID NO: 57263 - protein, 269 aa, Unidentified
AQSVPWGISRVQAPAAHNRGLTGGGVKVAVLDTGISTHPDLNIRGGASFVPGEPSTQDGNGHGTHVAGTIAALNNSIGVLGVAPSAELYAVKVLSASGNGSVSSIANGLEWAGNNGMHVANLSLGAPSPSATLEQAVNSATSRGVLVVAASGNSGAGSISYPARYANAMAVGATDQNNNRASFSQYGAGLDIVAPGVNVQSTYPGSTYASQNGTSMATPHVAGAAALVKQKNPSWSNVQIRNHLKNTATSLGSTNLYGSGLVNAEAATR

SEQ ID NO: 57264 - protein, 269 aa, Unidentified
AQSVPWGISRVQAPAAHNRGLTGSGVKVAVLDTGISTHPDLNIRGGASFVPGEPSTQDGNGHGTHVAGTIAALNNSIGVLGVAPSAELYAVKVLGASGAGSLSSIAQGLEWAGNNGMHVANLSLGSPSPSATLEQAVNSATSRGVLVVAASGNSGEGSISYPARYANAMAVGATDQNNNHADFSQYGAGLDIVAPGVNVQSTYPGSTYASLNGTSMATPHVAGAAALVKQKNPSWSNVQIRNRLKNTATSLGSTNLYGSGLVNAEAATR

SEQ ID NO: 57265 - protein, 269 aa, Unidentified
AQSVPWGISRVQAPAAHNRGLQGSGVKVAVLDTGISTHPDLNIRGGASFVPGEPSTQDGNGHGTHVAGTIAALNNSIGVLGVAPSAELYAVKVLGASGTGGISSIAQGLEWAGNNGMHVANLSLGSPSPSATLEQAVNSATSRGVLVVAASGNSGAGSISYPARYANAMAVGATDQNNNRASFSQYGAGLDIVAPGVNVQSTYPGSTYASLNGTSMATPHVAGAALLVKQKNPSWSNVRIRNHLKNTATSLGSTNLYGSGLVNAEAATR

SEQ ID NO: 57266 - protein, 269 aa, Lederbergia lentus
AQSEPWGISRVQAPAAHNRGLTGSGVKVAVLDTGISTHPDLNIRGGASFVPGEPSTQDGNGHGTHVAGTIAALNNSIGVLGVAPSAELYAVKVLGADGEGAISSIAQGLEWAGNNGMHVANLSLGSPSPSATLEQAVNSATSRGVLVVAASGNSGASSISYPARYANAMAVGATDQNNNRASFSQYGAGLDIVAPGVNVQSTYPGSTYASLNGTSMATPHVAGAAALVKQKNPSWSNVQIRNHLKNTATSLGSTNLYGSGLVNAEAATR

SEQ ID NO: 57267 - protein, 269 aa, Unidentified
AQSVPWGISRVQAPAAHNRGLQGSGVKVAVLDTGISTHPDLNIRGGASFVPGEPSTQDGNGHGTHVAGTIAALNNSIGVLGVAPSAELYAVKVLGASGAGAISSIAQGLEWAGNNGMHVANLSLGSPSPSATLEQAVNSATSRGVLVVAASGNSGAGSISYPARYANAMAVGATDQNNNRASFSQYGAGLDIVAPGVNVQSTYPGSTYASLNGTSMATPHVAGAATLVKQKNPSWSNVRIRNHLKNTATSLGSTNLYGSGLVNAEAATR

SEQ ID NO: 57268 - protein, 269 aa, Unidentified
AQSVPWGISRVQAPAAHNRGLTGSGVKVAVLDTGISTHPDLNIRGGASFVPGEPSTQDGNGHGTHVAGTIAALNNSIGVLGVAPSAELYAVKVLGASGGGAISSIAQGLEWAGNNGMHVANLSLGSPSPSATLEQAVNSATSRGVLVVAASGNSGAGSISYPARYANAMAVGATDQNNNRASFSQYGAGLDIVAPGVNVQSTYPGSTYASLNGTSMATPHVAGAAVLVKQKNPSWSNVRIRDHLKNTATSLGSTNLYGSGLVNAEAATR

SEQ ID NO: 57269 - protein, 269 aa, Unidentified
AQSVPWGISRVQAPAAHRRRLTGRGVKVAVLDTGISTHPDLNIRGGASFVPGEPSTQDGNGHGTHVAGTIAALDNSIGVLGVAPSAELYAVKVLGASGAGSVSSIAQGLEWAGNNGMHVANLSLGSPSPSATLEQAVNSATSRGVLVVAASGNSGAGSISYPARYANAMAVGATDQNNNRASFSQYGAGLDIVAPGVNVQSTYPGSTYASLNGTSMATPHVAGAAALVKQKNPSWSNVQIRNRLKNTATSLGSTNLYGSGLVNAEAATR

SEQ ID NO: 57270 - protein, 269 aa, Unidentified
AQSVPWGISRVQAPAAHRRRLTGSGVKVAVLDTGISTHPDLDIRGGASFVPGEPSTQDGNGHGTHVAGTIAALDNSIGVLGVAPSAELYAVKVLGASGSGSVSSIAQGLEWAGNNGMHVANLSLGSPSPSATLEQAVNSATSRGVLVVAASGNSGAGSISYPARYANAMAVGATDQNNNRASFSQYGAGLDIVAPGVNVQSTYPGSTYASLNGTSMATPHVAGAAALVKQKNPSWRNVQIRNRLKNTATSLGSTNLYGSGLVNAEAATR

SEQ ID NO: 57271 - protein, 269 aa, Unidentified
AQSVPWGISRVQAPAAHNRGLAGSGVKVAVLDSGISTHPDLNIRGGASFVPGEPSTQDGNGHGTHVAGTIAALNNSIGVLGVAPSAELYAVKVLGASGSGSVSSIAQGLEWAGLNRMHVANLSLGSPSPSATLEQAVNSATSRGVLVVAASGNSGEGSISYPARYANAMAVGATDQNNNRADFSQYGAGLDIVAPGVNVQSTYPGSTYASLNGTSMATPHVAGAAALVKQKNPSWSNVQIRNHLKNTATSLGSTNLYGSGLVNAEAATR

SEQ ID NO: 57272 - protein, 269 aa, Unidentified
AQSVPWGISRVQAPAAHRRGLTGRGVKVAVLDTGISTHPDLNIRGGASFVPGEPSTQDGNGHGTHVAGTIAALDNSIGVLGVAPSAELYAVKVLGASGSGSVSSIAQGLEWAGNNGMHVANLSLGSPSPSATLEQAVNSATSRGVLVVAASGNSGAGSISYPARYANAMAVGATDQNNNRASFSQYGAGLDIVAPGVNVQSTYPGSAYFSLNGTSMATPHVAGAAALVKQKNPSWSNVQIRNRLKNTATSLGSTNLYGSGLVNAEAATR

SEQ ID NO: 57273 - protein, 269 aa, Unidentified
AQSVPWGISRVQAPAAHRRGLTGRGVKVAVLDTGISTHPDLNIRGGASFVPGEPSTQDGNGHGTHVAGTIAALDNSIGVLGVAPSAELYAVKVLGASGSGSVSSIAQGLEWAGNNGMHVANLSLGSPSPSATLEQAVNSATSRGVLVVAASGNSGAGSISYPARYANAMAVGATDQNNNRASFSQYGAGLDLVAPGVNVQSTYPGSAYASLNGTSMATPHVAGAAALVKQKNPSWSNVQIRNRLKNTATSLGSTNLYGSGLVNAEAATR

SEQ ID NO: 57274 - protein, 269 aa, Unidentified
AQSVPWGISRVQAPAAHNRGLWGSGVKVAVLDTGISTHPDLRIRCGASFVPGEPSTQDGNGHGTHVAGTIAALNNSIGVLGVAPSAELYAVKVLGASGAGSVSSIAQGLEWAGNNGMHVANLSLGSPSPSATLEQAVNSATSRGVLVVAASGNSGAGSISYPARYANAMAVGATDQNNNRASFSQYGAGLDIVAPGVNVQSTYIQSTYASLNGTSMATPHVAGAAALVKQKNPSWSNVQIRNHLKNTATSLGSTNLYGSGLVNAEAATR

SEQ ID NO: 57275 - protein, 269 aa, Unidentified
AQSVPWGISRVQAPAAHNRGLWGRGVKVAVLDTGISTHPDLNIRGGASFVPGEPSTQDGNGHGTHVAGTIAALNNSIGVLGVAPSAELYAVKVLGASGAGSVSSIAQGLEWAGNNGMHVANLSLGSPSPSATLEQAVNSATSRGVLVVAASGNSGAGSISYPARYANAMAVGATDQNNNRASFSQYGAGLDIVAPGVSVQSTYPQSAYASLNGTSMATPHVAGAAALVKQKNPSWSNVQIRNHLKNTATSLGSTNLYGSGLVNAEAATR

SEQ ID NO: 57276 - protein, 269 aa, Unidentified
AQSVPWGISRVQAPAAHNRGLTGRGVKVAVLDTGISTHPDLNIRGGASFVPGEPSTQDGNGHGTHVAGTIAALNNGIGVLGVAPSAELYAVKVLGASGSGSVSSIAQGLEWAGNNDMHVANLSLGSESPSATLEQAVNSATSRGVLVVAASGNSGAGSISYPARYANAMAVGATDQNNNRASFSQYGAGLDIVAPGVNVQSTYPGSTYASLNGTSMATPHVAGAAALVKQKNPSWSNVRIRNRLKNTATSLGSTNLYGSGLVNAEAATR

SEQ ID NO: 57277 - protein, 269 aa, Unidentified
AQVVPWGISRVQAPAAHNRGLTGSGVKVAVLDTGISTHEDLNIRGGASFVPGEPSTQDGNGHGTHVAGTIAALDNSIGVLGVAPSAELYAVKVLGASGSGSVSSIAQGLEWAGNNRMHVANLSLGRPSPSATLEQAVNSATSRGVLVVAASGNSGAGQISYPARYANAMAVGATDQNNNRASFSQYGAGLDIVAPGVNVQSTYPGSTYASLNGTSMATPHVAGAAALVKQKNPSWSNVQIRNHLKNTATSLGSTNLYGSGLVNAEAATR

SEQ ID NO: 57278 - protein, 269 aa, Unidentified
AQSVPWGISRVQAPAAHNRKLTGSGVKVAVLDTGISTHPDLNIRGGASFVPGEPSTQDGNGHGTHVAGTIAALNNNIGVLGVAPSAELYAVKVLGASGDGSVSSIAQGLEWAGNNGMHVANLSLGLPSPSATLEQAVNSATSRGVLVVAASGNSGAGSISYPARYANAMAVGATDQNNNRASFSQYGAGLDIVAPGVNVQSTYPGSTYASENGTSMATPHVAGAAALVKQKNPSWSNVQIRNHLKNTATSLGSTNLYGSGLVNALAATR

SEQ ID NO: 57279 - protein, 269 aa, Unidentified
AQSVPWGISRVQAPAAHRRGLTGRGVKVAVLDTGISTHPDLDIRGGASFVPGEPSTQDGNGHGTHVAGTIAALDNSIGVLGVAPSAELYAVKVLGASGSGSVSSIAQGLEWAGNNGMHVANLSLGSPSPSATLEQAVNSATSRGVLVVAASGNSGAGSISYPARYANAMAVGATDQNNNRASFSQYGAGLDIVAPGVNVQSTYPGSTYASLNGTSMATPHVAGAAALVKQKNPSWSNVQIRNRLKNTATSLGSTNLYGSGLVRAEAATR

SEQ ID NO: 57280 - protein, 269 aa, Unidentified
AQSVPWGISRVQAPAAHNRGLTGSGVKVAVLDTGISTHPDLNIRGGASFVPGEPSTQDGNGHGTHVAGTIAALNNSIGVLGVAPSAELYAVKVLGASGSGAVSSIAQGLEWAGNNGMHVANLSLGSPSPSATLEQAVNSATSRGVLVVAASGNSGAGSISYPARYANAMAVGATDQNNNRASFSQYGAGLDIVAPGVNVQSTYPQSAYFSLNGTSMATPHVAGAAVLVKQKNPSWSNVRIRNHLKNTATSLGSTNLYGSGLVNAEAATR

SEQ ID NO: 57281 - protein, 269 aa, Unidentified
AQSVPWGISRVQAPAAHNRGLTGRGVKVAVLDTGISTHPDLNIRGGASFVPGEPSTQDGNGHGTHVAGTIAALDNNIGVLGVAPRAELYAVKVLGASGSGSVSSIAQGLEWAGNNRMHVANLSLGSPSPSATLEQAVNSATSRGVLVVAASGNSGAGSISYPARYANAMAVGATDQNNNRASFSQYGAGLDIVAPGVNVQSTWPGSTYASLNGTSQATPHVAGAAALVKQKNPSWSNVQIRNHLKNTATSLGSTNLYGSGLVNAEAATR

SEQ ID NO: 57282 - protein, 269 aa, Unidentified
AQSVPWGISRVQAPAAHNRGLTGSGVKVAVLDSGISTHPDLNIRGGASFVPGEPSTQDGEGHGTHVAGTIAALNNSIGVLGVAPSAELYAVKVLGASGSGSVSSIAQGLEWAGLNRMHVANLSLGSPSPSATLEQAVNSATSRGVLVVAASGNSGEGSIDYPARYANAMAVGATDQNNNRASFSQYGAGLDIVAPGVNVQSTYPGSTYASLNGTSMATPHVAGAAALVKQKNPSWSNVQIRNHLKNTATSLGSTNLYGSGLVNAEAATR

SEQ ID NO: 57283 - protein, 269 aa, Unidentified
AQSVPWGISRVQAPAAHNRGLTGSGVKVAVLDTGISTHPDLNIRGGASFVPGEPSTQDGNGHGTHVAGTIAALNNGIGVLGVAPSAELYAVKVLGASGSGSVSSIAQGLEWAGNNSMHVANLSLGSESPSATLEQAVNSATSRGVLVVAASGNSGADSISYPARYANAMAVGATDQNNNRADFSQYGAGLDIVAPGVNVQSTYPGSTYASLNGTSMATPHVAGAAALVKQKNPSWSNVQIRNRLKNTATSLGSTNLYGSGLVNAEAATR

SEQ ID NO: 57284 - protein, 269 aa, Unidentified
AQSVPWGISRVQAPAAHNRGLTGRGVKVAVLDTGISTHPDLNIRGGASFVPGEPSTQDGNGHGTHVAGTIAALNNGIGVLGVAPSAELYAVKVLGASGSGSVSSIAQGLEWAGNNSMHVANLSLGSESPSATLEQAVNSATSRGVLVVAASGNSGADSISYPARYANAMAVGATDQNNNRASFSQYGAGLDIVAPGVNVQSTYPGSTYASLNGTSMATPHVAGAAALVKQKNPSWSNVRIRNHLKNTATSLGSTNLYGSGLVNAEAATR

SEQ ID NO: 57285 - protein, 269 aa, Unidentified
AQSVPWGISRVQAPAAHNRGLTGRGVKVAVLDTGISTHPDLNIRGGASFVPGEPSTQDGNGHGTHVAGTIAALNNDIGVLGVAPSAELYAVKVLGASGSGSVSSIAQGLEWAGNNSMHVANLSLGSPSPSATLEQAVNSATSRGVLVVAASGNSGADSISYPARYANAMAVGATDQNNNRASFSQYGAGLDIVAPGVNVQSTYPGSTYASLNGTSMATPHVAGAAALVKQKNPSWSNVQIRDRLKNTATSLGSTNLYGSGLVNAEAATR

SEQ ID NO: 57286 - protein, 269 aa, Unidentified
AQSVPWGISRVQAPAAHNRGLAGRGVKVAVLDTGISTHPDLNIRGGASFVPGEPSTQDGNGHGTHVAGTIAALNNSIGVLGVAPSAELYAVKVLGASGSGSVSSIAQGLEWAGLNRMHVANLSLGSPSPSATLEQAVNSATSRGVLVVAASGNSGEGSISYPARYANAMAVGATDQNNNRADFSQYGAGLDIVAPGVNVQSTYPGSTYASLNGTSMATPHVAGAAALVKQKNPSWSNVQIRNHLKNTATSLGSTNLYGSGLVNAEAATR

SEQ ID NO: 57287 - protein, 269 aa, Unidentified
AQSVPWGISRVQAPAAHNRRLTGRGVKVAVLDTGISTHPDLRIRGGASFVPGEPSTQDGNGHGTHVAGTIAALNNSIGVLGVAPSAELYAVKVLGASGAGSVSSIAQGLEWAGNNGMHVANLSLGSPSPSATLEQAVNSATSRGVLVVAASGNSGAGSISYPARYANAMAVGATDQNNNRASFSQYGAGLDIVAPGVDVQSTYPGSAYASLNGTSMATPHVAGAAALVKQKNPSWSNVQIRNHLKNTATSLGSTNLYGSGLVNAEAATR

SEQ ID NO: 57288 - protein, 269 aa, Unidentified
AQSVPWGISRVQAPAAHNRRLWGSGVKVAVLDTGISTHPDLNIRGGASFVPGEPSTQDGNGHGTHVAGTIAALNNSIGVLGVAPSAELYAVKVLGASGSGAISSIAQGLEWAGNNGMHVANLSLGSPSPSATLEQAVNSATSRGVLVVAASGNSGAGSISYPARYANAMAVGATDQNNNRASFSQYGAGLDIVAPGVNVQSTYPGSTYASLNGTSMATPHVAGAAVLVKQKNPSWSNVRIRNHLKNTATSLGSTNLYGSGLVNAEAATR

SEQ ID NO: 57289 - protein, 269 aa, Unidentified
AQSVPWGISRVQAPAAHNRGLTGSGVKVAVLDTGISTHPDLNIRGGASFVPGEPSTQDGEGHGTHVAGTIAALNNDIGVLGVAPSAELYAVKVLGASGSGSVSSIAQGLEWAGNNSMHVANLSLGSESPSATLEQAVNSATSRGVLVVAASGNSGAGSISYPARYANAMAVGATDQNNNRADFSQYGAGLDIVAPGVNVQSTYPGSTYASLNGTSMATPHVAGAAALVKQKNPSWSNVRIRNHLKNTATSLGSTNLYGSGLVNAEAATR

SEQ ID NO: 57290 - protein, 270 aa, Synthetic construct
AQSVPWGISRVQAPAAHNRGLTGSGVRVAVLDTGIDSTHPDLNIRGGASFVPGEPSTQDGNGHGTHVAGTIAALNNSIGVLGVAPSAELYAVKVLNASGSGSVSSIAQGLEWAGNNGMHVANLSLGSPSPSATLEQAVNSATSRGVLVVAASGNSGAGSISYPARYANAMAVGATDQNNNRASFSQYGPGLDIVAPGVNVQSTYPGSTYASLNGTSMATPHVAGAAALVRQRNPSWSNVQIRNHLKNTATSLGSTNLFGSGLVNAEAATR

SEQ ID NO: 57291 - protein, 269 aa, Unidentified
AQSVPWGISRVQAPAAHRRGLTGSGVKVAVLDTGISTHPDLDITGGASFVPGEPSTQDGNGHGTHVAGTIAALDNSIGVLGVAPSAELYAVKVLGASGSGSVSSIAQGLEWAGNNGMHVANLSLGSPSPSATLEQAVNSATSRGVLVVAASGNSGAGSISYPARYANAMAVGATDQNNNRASFSQYGAGLDIVAPGVNVQSTYPGSTYASLNGTSMATPHVAGAAALVKQKNPSWRNVQIRNRLKNTATSLGSTNLYGSGLVNAEAATR

SEQ ID NO: 57292 - protein, 269 aa, Unidentified
AQSVPWGISRVQAPAAHNRGLTGSGVKVAVLDTGISTHPDLNIRGGASFVPGEPSTQDGEGHGTHVAGTIAALNNGIGVLGVAPSAELYAVKVLGASGSGSVSSIAQGLEWAGNNDMHVANLSLGSESPSATLEQAVNSATSRGVLVVAASGNSGAGSISYPARYANAMAVGATDQNNNRASFSQYGAGLDIVAPGVNVQSTYPGSTYASLNGTSMATPHVAGAAALVKQKNPSWSNVRIRDHLKNTATSLGSTNLYGSGLVNAEAATR

SEQ ID NO: 57293 - protein, 269 aa, Unidentified
AQSVPWGISRVQAPAAHRRGLTGRGVKVAVLDTGISTHPDLRIRGGASFVPGEPSTQDGNGHGTHVAGTIAALDNRIGVLGVAPSAELYAVKVLGASGSGSVSSIAQGLEWAGNNGMHVANLSLGSPSPSATLEQAVNSATSRGVLVVAASGNSGAGSISYPARYANAMAVGATDQNNNRASFSQYGAGLDIVAPGVNVQSTYPGSTYASLNGTSMATPHVAGAAALVKQKNPSWSNVQIRNRLKNTATSLGSTNLYGSGLVNAEAATR

SEQ ID NO: 57294 - protein, 269 aa, Unidentified
AQSVPWGISRVQAPAAHNRGLTGSGVKVAVLDTGISTHPDLNIRGGASFVPGEPSTQDGNGHGTHVAGTIAALNNSIGVLGVAPSAELYAVKVLGADGRGAISSIAQGLEWAGNNGMHVVNLSLGSPSPSATLEQAVNSATSRGVLVVAASGNSGASSISYPARYANAMAVGATDQNNNRASFSQYGAGLDIVAPGVNVQSTYPGSTYASLNGTSMATPHVAGAAALVKQKNPSWSNVQIRNHLKNTATSLGSTNLYGSGLVNAEAATR

SEQ ID NO: 57295 - protein, 269 aa, Unidentified
AQSVPWGISRVQAPAAHNRGLAGRGVKVAVLDTGISTHPDLNIRGGASFVPGEPSTQDGNGHGTHVAGTIAALNNSIGVLGVAPSAELYAVKVLGASGSGSVSSIAQGLEWAGLNGMHVANLSLGIPSPSATLEQAVNSATSRGVLVVAASGNSGAGSIDYPARYANAMAVGATDQNNNRADFSQYGAGLDIVAPGVNVQSTYPGSTYASLNGTSMATPHVAGAAALVKQKNPSWSNVQIRNHLKNTATSLGSTNLYGSGLVNAEAATR

SEQ ID NO: 57296 - protein, 269 aa, Unidentified
AQSVPWGISRVQAPAAHNRGLTGRGVKVAVLDTGISTHPDLNIRGGASFVPGEPSTQDGNGHGTHVAGTIAALNNSIGVLGVAPSAELYAVKVLGASGSGSVSSIAQGLEWAGLNRMHVANLSLGIPSPSATLEQAVNSATSRGVLVVAASGNSGEGSIDYPARYANAMAVGATDQNNNRASFSQYGAGLDIVAPGVNVQSTYPGSTYASLNGTSMATPHVAGAAALVKQKNPSWSNVQIRNHLKNTATSLGSTNLYGSGLVNAEAATR

SEQ ID NO: 57297 - protein, 269 aa, Unidentified
AQSVPWGISRVQAPAAHRRRLTGRGVKVAVLDTGISTHPDLNIRGGASFVPGEPSTQDGNGHGTHVAGTIAALDNSIGVLGVAPDAELYAVKVLGASGSGSVSSIAQGLEWAGNNGMHVANLSLGSPSPSATLEQAVNSATSRGVLVVAASGNSGAGSISYPARYANAMAVGATDQNNNRASFSQYGAGLDIVAPGVNVQSTYPGSTYASLNGTSMATPHVAGAAALVKQKNPSWSNVQIRNRLKNTATSLGSTNLYGSGLVNAEAATR

SEQ ID NO: 57298 - protein, 269 aa, Unidentified
AQSVPWGISRVQAPAAHNRRLTGRGVKVAVLDTGISTHPDLNIRGGASFVPGEPSTQDGNGHGTHVAGTIAALNNDIGVLGVAPSAELYAVKVLGASGSGSVSSIAQGLEWAGNNSMHVANLSLGSPSPSATLEQAVNSATSRGVLVVAASGNSGADSISYPARYANAMAVGATDQNNNRADFSQYGAGLDIVAPGVNVQSTYPGSTYASLNGTSMATPHVAGAAALVKQKNPSWSNVQIRNHLKNTATSLGSTNLYGSGLVNAEAATR

SEQ ID NO: 57299 - protein, 269 aa, Unidentified
AQSVPWGISRVQAPAAHNRGLTGSGVKVAVLDTGISTHPDLNIRGGASFVPGEPSTQDGNGHGTHVAGTIAALNNSIGVLGVAPSAELYAVKVLGADGRGAISSIAQGLEWAGNNGMHVANLSLGSPSPSATLEQAVNSATSRGVLVVAASGNSGASSISYPARYANAMAVGATDQNNNRASFSQYGAGLDIVAPGVNVQSTYPGSTYASLNGTSMATPHVAGAAALVKQKNPSWSNVQIRNHLNNTATSLGSTNLYGSGLVNAEAATR

SEQ ID NO: 57300 - protein, 269 aa, Unidentified
AQSVPWGISRVQAPAAHNRGLTGSGVKVAVLDTGISTHPDLNIRGGASFVPGEPSTQDGNGHGTHVAGTIAALNNSIGVLGVAPSAELYAVKVLGASGSGAISSIAQGLEWAGNNGMHVANLSLGSPSPSATLEQAVNSATSRGVLVVAASGNSGADSISYPARYANAMAVGATDQNNNRASFSQYGAGLDIVAPGVNVQSTYPGSTYASLNGTSMATPHVAGVAALVKHKNPSWSNVRIRNHLKNTATSLGSTNLYGSGLVNAEAATR

SEQ ID NO: 57301 - protein, 269 aa, Unidentified
AQSVPWGISRVQAPAAHNRGLQGSGVKVAVLDTGISTHPDLNIRGGASFVPGEPSTQDGNGHGTHVAGTIAALNNSIGVLGVAPSAELYAVKVLGASGAGAISSIAQGLEWAGNNGMHVANLSLGSPSPSATLEQAVNSATSRGVLVVAASGNSGAGSISYPARYANAMAVGATDQNNNRASFSQYGAGLDIVAPGVNVQSTYPGSTYASLNGTSMATPHVAGAAMLVKQKNPSWSNVRIRNHLKNTATSLGSTNLYGSGLVNAEAATR

SEQ ID NO: 57302 - protein, 269 aa, Unidentified
AQSVPWGISRVQAPAAHNRGLAGSGVKVAVLDTGISTHPDLNIRGGASFVPGEPSTQDGNGHGTHVAGTIAALNNSIGVLGVAPSAELYAVKVLGASGGGNLSSIAQGLEWAGNNGMHVANLSLGSPSPSATLEQAVNSATSRGVLVVAASGNSGAGSISYPARYANAMAVGATDQNNNRASFSQYGAGLDIVAPGVNVQSTYPGSTYASLNGTSMATPHVAGAAVLVKQKNPSWSNVRIRNHLKNTATSLGSTNLYGSGLVNAEAATR

SEQ ID NO: 57303 - protein, 269 aa, Unidentified
AQSVPWGISRVQAPAAHNRGLKGSGVKVAVLDTGISTHPDLNIRGGASFVPGEPSTQDGNGHGTHVAGTIAALNNSIGVLGVAPSAELYAVKVLGASGAGGISSIAQGLEWAGNNGMHVANLSLGSPSPSATLEQAVNSATSRGVLVVAASGNSGAGSISYPARYANAMAVGATDQNNNRASFSQYGAGLDIVAPGVNVQSTYPGSTYASLNGTSMATPHVAGAATLVKQKNPSWSNVRIRNHLKNTATSLGSTNLYGSGLVNAEAATR

SEQ ID NO: 57304 - protein, 269 aa, Unidentified
AQSVPWGISRVQAPAAHRRGLTGRGVKVAVLDTGISTHPDLRIRGGASFVPGEPSTQDGNGHGTHVAGTIAALDNSIGVLGVAPSAELYAVKVLGASGSGSVSSIAQGLEWAGNNGMHVANLSLGSPSPSATLEQAVNSATSRGVLVLAASGNSGAGSISYPARYANAMAVGATDQNNNRASFSQYGAGLDIVAPGVNVQSTYPGSTYASLNGTSMATPHVAGAAALVKQKNPSWSNVQIRNRLKNTATSLGSTNLYGSGLVNAEAATR

SEQ ID NO: 57305 - protein, 269 aa, Unidentified
AQSVPWGISRVQAPAAHNRKLTGFGVKVAVLDTGISTHPDLNIRGGASFVPGEPSTQDGNGHGTHVAGTIAALNNNIGVLGVAPSAELYAVKVLGASGSGSVSSIAQGLEWAGNNGMHVANLSLGDPSPSATLEQAVNSATSRGVLVVAASGNSGAGSISYPARYANAMAVGATDQNNNRASFSQYGAGLDIVAPGVNVQSTYPGSAYASENGTSMATPHVAGAAALVKQKNPSWSNVQIRNHLKNTATSLGSTNLYGSGLVNAEAATR

SEQ ID NO: 57306 - protein, 269 aa, Unidentified
AQSVPWGISRVQAPAAHNRRLTGRGVRVAVLDTGISTHPDLDIRGGASFVPGEPSTQDGNGHGTHVAGTIAALNNSIGVLGVAPSAELYAVKVLGASGSGSVSSIAQGLEWAGNNGMHVANLSLGSPSPSATLEQAVNSATSRGVLVVAASGNSGAGSISYPARYANAMAVGATDQNNNRASFSQYGAGLDIVAPGVNVQSTYPGSTYASLNGTSMATPHVAGAAALVKQKNPSWRNVQIRNRLKNTATSLGSTNLYGSGLVNAEAATR

SEQ ID NO: 57307 - protein, 269 aa, Unidentified
AQSVPWGISRVQAPAAHNRKLTGSGVKVAVLDTGISTHPDLNIRGGASFVPGEPSTQDGNGHGTHVAGTIAALNNNIGVLGVAPSAELYAVKVLGASGSGSVSSIAQGLEWAGNNRMHVANLSLGSPSPSATLEQAVNSATSRGVLVVAASGNSGAGSIDYPARYANAMAVGATDQNNNRASFSQYGAGLDIVAPGVNVQSTYPGSAYASENGTSMATPHVAGAAALVKQKNPSWSNVQIRNHLKNTATSLGSTNLYGSGLVNAEAATR

SEQ ID NO: 57308 - protein, 269 aa, Unidentified
AQSVPWGISRVQAPAAHNRGLTGRGVKVAVLDTGISTHPDLNIRGGASFVPGEPSTQDGEGHGTHVAGTIAALNNGIGVLGVAPSAELYAVKVLGASGSGSVSSIAQGLEWAGNNDMHVANLSLGSPSPSATLEQAVNSATSRGVLVVAASGNSGAGSISYPARYANAMAVGATDQNNNRADFSQYGAGLDIVAPGVNVQSTYPGSTYASLNGTSMATPHVAGAAALVKQKNPSWSNVQIRDHLKNTATSLGSTNLYGSGLVNAEAATR

SEQ ID NO: 57309 - protein, 269 aa, Unidentified
AQSVPWGISRVQAPAAHNRGLLGFGVKVAVLDTGISTHPDLNIRGGASFVPGEPSTQDGNGHGTHVAGTIAALNNNIGVLGVAPSAELYAVKVLGASGSGSVSSIAQGLEWAGNNRMHVANLSLGSPSPSATLEQAVNSATSRGVLVVAASGNSGAGSIDYPARYANAMAVGATDQNNNRASFSQYGAGLDIVAPGVNVQSTYPGSTYASENGTSMATPHVAGAAALVKQKNPSWSNVQIRNHLKNTATSLGSTNLYGSGLVNAEAATR

SEQ ID NO: 57310 - protein, 269 aa, Unidentified
AQSVPWGISRVQAPAAHNRRLTGRGVKVAVLDTGISTHPDLNIRGGASFVPGEPSTQDGNGHGTHVAGTIAALNNDIGVLGVAPSAELYAVKVLGASGSGSVSSIAQGLEWAGNNDMHVANLSLGSPSPSATLEQAVNSATSRGVLVVAASGNSGADSISYPARYANAMAVGATDQNNNRASFSQYGAGLDIVAPGVNVQSTYPGSTYASLNGTSMATPHVAGAAALVKQKNPSWSNVQIRDHLKNTATSLGSTNLYGSGLVNAEAATR

SEQ ID NO: 57311 - protein, 269 aa, Unidentified
AQSVPWGISRVQAPAAHRRGLTGSGVKVAVLDTGISTHPDLRIRGGASFVPGEPSTQDGNGHGTHVAGTIAALDNSIGVLGVAPSAELYAVKVLGASGSGSVSSIAQGLEWAGNNGMHVANLSLGSPSPSATLEQAVNSATSRGVLVVAASGNSGAGSISYPARYANAMAVGATDQNNNRASFSQYGAGLDIVAPGVNVQSTYPGSTYASLNGTSMATPHVAGEAALVKQKNPSWRNVQIRNRLKNTATSLGSTNLYGSGLVNAEAATR

SEQ ID NO: 57312 - protein, 269 aa, Unidentified
AQSVPWGISRVQAPAAHNRRLTGRGVKVAVLDTGISTHPDLNIRGGASFVPGEPSTQDGNGHGTHVAGTIAALNNDIGVLGVAPSAELYAVKVLGASGSGSVSSIAQGLEWAGNNSMHVANLSLGSPSPSATLEQAVNSATSRGVLVVAASGNSGADSISYPARYANAMAVGATDQNNNRASFSQYGAGLDIVAPGVNVQSTYPGSTYASLNGTSMATPHVAGAAALVKQKNPSWSNVRIRNHLKNTATSLGSTNLYGSGLVNAEAATR

SEQ ID NO: 57313 - protein, 269 aa, Unidentified
AQSVPWGISRVQAPAAHNRGLRGSGVKVAVLDTGISTHPDLNIRGGASFVPGEPSTQDGNGHGTHVAGTIAALNNSIGVLGVAPSAELYAVKVLGASGQGAISSIAQGLEWAGNNGMHVANLSLGSPSPSATLEQAVNSATSRGVLVVAASGNSGAGSISYPARYANAMAVGATDQNNNRASFSQYGAGLDIVAPGVNVQSTYPGSTYASLNGTSMATPHVAGAAVLVKQKNPSWSNVRIRNHLKNTATSLGSTNLYGSGLVNAEAATR

SEQ ID NO: 57314 - protein, 269 aa, Unidentified
AQSVPWGISRVQAPAAHNRGLTGSGVKVAVLDTGISTHPDLNIRGGASFVPGEPSTQDGNGHGTHVAGTIAALNNSIGVLGVAPSAELYAVKVLGASGGGAISSIAQGLEWAGNNGMHVANLSLGSPSPSATLEQAVNSATSRGVLVLAASGNSGAGSISYPARYANAMAVGATDQNNNRASFSQYGAGLDIVAPGVNVQSTYPGSTYASLNGTSMATPHVAGAAVLVKQKNPSWSNVRIRNHLKNTATSLGSTNLYGSGLVNAEAATR

SEQ ID NO: 57315 - protein, 269 aa, Unidentified
AQSVPWGISRVQAPAAHNRRLTGRGVKVAVLDTGISTHPDLNIRGGASFVPGEPSTQDGNGHGTHVAGTIAALNNDIGVLGVAPSAELYAVKVLGASGSGSVSSIAQGLEWAGNNDMHVANLSLGSPSPSATLEQAVNSATSRGVLVVAASGNSGADSISYPARYANAMAVGATDQNNNRASFSQYGAGLDIVAPGVNVQSTYPGSTYASLNGTSMATPHVAGAAALVKQKNPSWSNVRIRNHLKNTATSLGSTNLYGSGLVNAEAATR

SEQ ID NO: 57316 - protein, 269 aa, Unidentified
AQSVPWGISRVQAPAAHNRGLTGSGVKVAVLDTGISTHPDLNIRGGASFVPGEPSTQDGNGHGTHVAGTIAALDNSIGVLGVAPRAELYAVKVLGASGSGSVSSIAQGLEWAGNNRMHVANLSLGLQAPSATLEQAVNSATSRGVLVVAASGNSGAGSISYPARYANAMAVGATDQNNNRASFSQYGAGLDIVAPGVNVQSTYPGSTYASLNGTSMATPHVAGAAALVKQKNPSWSNVQIRNHLKNTATSLGSTNLYGSGLVNAEAATR

SEQ ID NO: 57317 - protein, 269 aa, Unidentified
AQSVPWGISRVQAPAAHNRRLTGSGVKVAVLDTGISTHPDLNIRGGASFVPGEPSTQDGEGHGTHVAGTIAALNNGIGVLGVAPSAELYAVKVLGASGSGSVSSIAQGLEWAGNNDMHVANLSLGSESPSATLEQAVNSATSRGVLVVAASGNSGAGSISYPARYANAMAVGATDQNNNRADFSQYGAGLDIVAPGVNVQSTYPGSTYASLNGTSMATPHVAGAAALVKQKNPSWSNVQIRNHLKNTATSLGSTNLYGSGLVNAEAATR

SEQ ID NO: 57318 - protein, 269 aa, Unidentified
AQSVPWGISRVQAPAAHNRGLTGSGVKVAVLDTGISTHPDLNIRGGASFVPGEPSTQDGEGHGTHVAGTIAALNNGIGVLGVAPSAELYAVKVLGASGSGSVSSIAQGLEWAGNNDMHVANLSLGSPSPSATLEQAVNSATSRGVLVVAASGNSGADSISYPARYANAMAVGATDQNNNRASFSQYGAGLDIVAPGVNVQSTYPGSTYASLNGTSMATPHVAGAAALVKQKNPSWSNVQIRDRLKNTATSLGSTNLYGSGLVNAEAATR

SEQ ID NO: 57319 - protein, 269 aa, Unidentified
AQSVPWGISRVQAPAAHNRRLTGSGVKVAVLDTGISTHPDLRITGGASFVPGEPSTQDGNGHGTHVAGTIAALNNSIGVLGVAPSAELYAVKVLGASGAGSVSSIAQGLEWAGNNGMHVANLSLGSPSPSATLEQAVNSATSRGVLVVAASGNSGAGSISYPARYANAMAVGATDQNNNRASFSQYGAGLDIVAPGVNVQSTYPQSAYASLNGTSMATPHVAGAAALVKQKNPSWSNVQIRNHLKNTATSLGSTNLYGSGLVNAEAATR

SEQ ID NO: 57320 - protein, 269 aa, Unidentified
AQSVPWGISRVQAPAAHNRGLRGSGVKVAVLDTGISTHPDLNIRGGASFVPGEPSTQDGNGHGTHVAGTIAALNNSIGVLGVAPSAELYAVKVLGASGAGNLSSIAQGLEWAGNNGMHVANLSLGSPSPSATLEQAVNSATSRGVLVVAASGNSGAGSISYPARYANAMAVGATDQNNNRASFSQYGAGLDIVAPGVNVQSTYPGSTYASLNGTSMATPHVAGAATLVKQKNPSWSNVSIRNHLKNTATSLGSTNLYGSGLVNAEAATR

SEQ ID NO: 57321 - protein, 269 aa, Unidentified
AQSVPWGISRVQAPAAHNRGLQGSGVKVAVLDTGISTHPDLNIRGGASFVPGEPSTQDGNGHGTHVAGTIAALNNSIGVLGVAPSAELYAVKVLGASGAGGISSIAQGLEWAGNNGMHVANLSLGSPSPSATLEQAVNSATSRGVLVVAASGNSGAGSISYPARYANAMAVGATDQNNNRASFSQYGAGLDIVAPGVNVQSTYPGSTYASLNGTSMATPHVAGAAVLVKQKNPSWSNVWIRNHLKNTATSLGSTNLYGSGLVNAEAATR

SEQ ID NO: 57322 - protein, 269 aa, Unidentified
AQSVPWGISRVQAPAAHNRGLTGRGVKVAVLDTGISTHPDLNIRGGASFVPGEPSTQDGNGHGTHVAGTIAALNNGIGVLGVAPSAELYAVKVLGASGSGSVSSIAQGLEWAGNNSMHVANLSLGSPSPSATLEQAVNSATSRGVLVVAASGNSGADSISYPARYANAMAVGATDQNNNRASFSQYGAGLDIVAPGVNVQSTYPGSTYASLNGTSMATPHVAGAAALVKQKNPSWSNVRIRDHLKNTATSLGSTNLYGSGLVNAEAATR

SEQ ID NO: 57323 - protein, 269 aa, Unidentified
AQSVPWGISRVQAPAAHNRGLTGRGVKVAVLDSGISTHPDLNIRGGASFVPGEPSTQDGNGHGTHVAGTIAALNNSIGVLGVAPSAELYAVKVLGASGSGSVSSIAQGLEWAGNNRMHVANLSLGIPSPSATLEQAVNSATSRGVLVVAASGNSGAGSIDYPARYANAMAVGATDQNNNRADFSQYGAGLDIVAPGVNVQSTYPGSTYASLNGTSMATPHVAGAAALVKQKNPSWSNVQIRNHLKNTATSLGSTNLYGSGLVNAEAATR

SEQ ID NO: 57324 - protein, 269 aa, Unidentified
AQSVPWGISRVQAPASHNRGLTGSGVKVAVLDTGISTHPDLNIRGGASFVPGEPSTQDGNGHGTHVAGTIAALNNSIGVLGVAPSAELYAVKVLGASGGGAISSIAQGVEWAGNNGMHVANLSLGNPSPSATLEQAVNSATSRGVLVVAASGNSGAGSISYPARYANAMAVGATDQNNNRASFSQYGAGLDIVAPGVNVQSTYPGSTYASLNGTSMATPHVAGAAALVKQKNPSWSNVQIRNHLKNTATSLGSTNLYGSGLVNAEAATR

SEQ ID NO: 57325 - protein, 269 aa, Unidentified
AQSVPWGISRVQAPAAHNRGLAGRGVKVAVLDSGISTHPDLNIRGGASFVPGEPSTQDGNGHGTHVAGTIAALNNSIGVLGVAPSAELYAVKVLGASGSGSVSSIAQGLEWAGNNGMHVANLSLGIPSPSATLEQAVNSATSRGVLVVAASGNSGEGSISYPARYANAMAVGATDQNNNRADFSQYGAGLDIVAPGVNVQSTYPGSTYASLNGTSMATPHVAGAAALVKQKNPSWSNVQIRNHLKNTATSLGSTNLYGSGLVNAEAATR

SEQ ID NO: 57326 - protein, 269 aa, Unidentified
AQSVPWGISRVQAPAAHNRGLAGSGVKVAVLDTGISTHPDLNIRGGASFVPGEPSTQDGNGHGTHVAGTIAALNNSIGVLGVAPSAELYAVKVLGASGGGAISSIAQGLEWAGNNGMHVANLSLGSPSPSATLEQAVNSATSRGVLVVAASGNSGAGSISYPARYANAMAVGATDQNNNRASFSQYGAGLDIVAPGVNVQSTYPGSTYASLNGTSMATPHVAGAAVLVKQKNPSWSNVWIRNHLKNTATSLGSTNLYGSGLVNAEAATR

SEQ ID NO: 57327 - protein, 269 aa, Unidentified
AQSVPWGISRVQAPAAHNRGLTGSGVKVAVLDTGISTHPDLNIRGGASFVPGEPSTQDGNGHGTHVAGTIAALNNSIGVLGVAPSAELYAVKVLGASGAGAISSIAQGLEWAGNNGMHVANLSLGSPSPSATLEQAVNSATSRGVLVVAASGNSGAGSISYPARYANAMAVGATDQNNNRADFSQYGAGLDIVAPGVNVQSTYIGSTYASLNGTSMATPHVAGAAALVKQKNPSWSNVRIRNHLKNTATSLGSTNLYGSGLVNAEAATR

SEQ ID NO: 57328 - protein, 269 aa, Unidentified
AQSVPWGISRVQAPAAHNRRLTGSGVKVAVLDTGISTHPDLNIRGGASFVPGEPSTQDGNGHGTHVAGTIAALNNDIGVLGVAPSAELYAVKVLGASGSGSVSSIAQGLEWAGNNSMHVANLSLGSPSPSATLEQAVNSATSRGVLVVAASGNSGADSISYPARYANAMAVGATDQNNNRASFSQYGAGLDIVAPGVNVQSTYPGSTYASLNGTSMATPHVAGAAALVKQKNPSWSNVQIRDRLKNTATSLGSTNLYGSGLVNAEAATR

SEQ ID NO: 57329 - protein, 269 aa, Unidentified
AQSVPWGISRVQAPAAHNRGLTGSGVKVAVLDTGISTHPDLNIRGGASFVPGEPSTQDGNGHGTHVAGTIAALDNSIGVLGVAPRAELYAVKVLGASGSGAISSIAQGLEWAGNNGMHVANLSLGSPSPSATLEQAVNSATSRGVLVVAASGNSGAGSISYPARYANAMAVGATDQNNNRASFSQYGAGLDIVAPGVNVQSTYPGPTYASLNGTSMATPHVAGAAALVKQKNPSWSNVQIRNHLKNTATSLGSTNLYGSGLVNAVAATR

SEQ ID NO: 57330 - protein, 269 aa, Unidentified
AQSVPWGISRVQAPAAHRRGLTGSGVKVAVLDTGISTHPDLNIRGGASFVPGEPSTQDGNGHGTHVAGTIAALDNSIGVLGVAPSAELYAVKVLGASGGGAISSIAQGLEWAGNNGMHVANLSLGSPSPSATLEQAVNSATSRGVLVVAASGNSGAGSISYPARYANAMAVGATDQNNNRASFSQYGAGLDIVAPGVNVQSTYPGSTYASLNGTSMATPHVAGAAALVKQKNPSWSNVQIRNRLKNTATSLGSTNLYGSGLVNAEAATR

SEQ ID NO: 57331 - protein, 269 aa, Unidentified
AQSVPWGISRVQAPAAHRRRLTGSGVKVAVLDTGISTHPDLRIRGGASFVPGEPSTQDGNGHGTHVAGTIAALDNSIGVLGVAPSAELYAVKVLGASGSGSVSSIAQGLEWAGNNGMHVANLSLGSPSPSATLEQAVNSATSRGVLVVAASGNSGAGSISYPARYANAMAVGATDQNNNRASFSQYGAGLDIVAPGVNVQSTYPGSTYASLNGTSMATPHVAGEAALVKQKNPSWRNVQIRNHLKNTATSLGSTNLYGSGLVNAEAATR

SEQ ID NO: 57332 - protein, 269 aa, Unidentified
AQSVPWGISRVQAPAAHNRGLTGRGVKVAVLDTGISTHPDLNIRGGASFVPGEPSTQDGNGHGTHVAGTIAALNNDIGVLGVAPSAELYAVKVLGASGSGSVSSIAQGLEWAGNNDMHVANLSLGSPSPSATLEQAVNSATSRGVLVVAASGNSGADSISYPARYANAMAVGATDQNNNRADFSQYGAGLDIVAPGVNVQSTYPGSTYASLNGTSMATPHVAGAAALVKQKNPSWSNVQIRNRLKNTATSLGSTNLYGSGLVNAEAATR

SEQ ID NO: 57333 - protein, 269 aa, Unidentified
AQSVPWGISRVQAPAAHNRRLTGRGVKVAVLDTGISTHPDLNIRGGASFVPGEPSTQDGNGHGTHVAGTIAALNNSIGVLGVAPSAELYAVKVLSASGAGSVSSIANGLEWAGLNGMHVANLSLGSPSPSATLEQAVNSATSRGVLVVAASGNSGAGSISYPARYANAMAVGATDQNNNRASFSQYGAGLDIVAPGVNVQSTYPGSTYASLNGTSMATPHVAGAAALVKQKNPSWSNVQIRNHLKNTATSLGSTNLYGSGLVNAEAATR

SEQ ID NO: 57334 - protein, 269 aa, Unidentified
AQSVPWGISRVQAPAAHNRGLKGSGVKVAVLDTGISTHPDLNIRGGASFVPGEPSTQDGNGHGTHVAGTIAALNNSIGVLGVAPSAELYAVKVLGASGNGNISSIAQGLEWAGNNGMHVANLSLGSPSPSATLEQAVNSATSRGVLVVAASGNSGAGSISYPARYANAMAVGATDQNNNRASFSQYGAGLDIVAPGVNVQSTYPGSTYASLNGTSMATPHVAGAAVLVKQKNPSWSNVRIRNHLKNTATSLGSTNLYGSGLVNAEAATR

SEQ ID NO: 57335 - protein, 269 aa, Unidentified
AQSVPWGISRVQAPAAHNRGLRGSGVKVAVLDTGISTHPDLNIRGGASFVPGEPSTQDGNGHGTHVAGTIAALNNSIGVLGVAPSAELYAVKVLGASGGGAISSIAQGLEWAGNNGMHVANLSLGSPSPSATLEQAVNSATSRGVLVVAASGNSGAGSISYPARYANAMAVGATDQNNNRASFSQYGAGLDIVAPGVNVQSTYPGSTYASLNGTSMATPHVAGAAVLVKQKNPSWSNVRIRNHLKNTATSLGSTNLYGSGLVNAEAATR

SEQ ID NO: 57336 - protein, 269 aa, Unidentified
AQSVPWGISRVQAPAAHNRRLTGSGVKVAVLDTGISTHPDLNIRGGASFVPGEPSTQDGNGHGTHVAGTIAALNNDIGVLGVAPSAELYAVKVLGASGSGSVSSIAQGLEWAGNNSMHVANLSLGSESPSATLEQAVNSATSRGVLVVAASGNSGADSISYPARYANAMAVGATDQNNNRASFSQYGAGLDIVAPGVNVQSTYPGSTYASLNGTSMATPHVAGAAALVKQKNPSWSNVQIRDHLKNTATSLGSTNLYGSGLVNAEAATR

SEQ ID NO: 57337 - protein, 269 aa, Unidentified
AQSVPWGISRVQAPAAHNRKLTGSGVKVAVLDTGISTHPDLNIRGGASFVPGEPSTQDGEGHGTHVAGTIAALNNSIGVLGVAPSAELYAVKVLGASGSGSVSSIAQGLEWAGLNGMHVANLSLGQPSPSATLEQAVNSATSRGVLVVAASGNSGAGSISYPARYANAMAVGATDQNNNRASFSQYGAGLDIVAPGVNVQSTYPGSAYASNNGTSMATPHVAGAAALVKQKNPSWSNVQIRNHLKNTATSLGSTNLYGSGLVNAEAATR

SEQ ID NO: 57338 - protein, 269 aa, Unidentified
AQSVPWGISRVQAPAAHNRKLTGGGVKVAVLDTGISTHPDLNIRGGASFVPGEPSTQDGEGHGTHVAGTIAALNNNIGVLGVAPSAELYAVKVLGASGNGSVSSIAQGLEWAGLNGMHVANLSLGAPSPSATLEQAVNSATSRGVLVVAASGNSGAGSISYPARYANAMAVGATDQNNNRASFSQYGAGLDIVAPGVNVQSTYPGSTYASLNGTSSATPHVAGAAALVKQKNPSWSNVQIRNHLKNTATSLGSTNLYGSGLVNAEAATR

SEQ ID NO: 57339 - protein, 269 aa, Unidentified
AQSVPWGISRVQAPAAHNRGLWGRGVKVAVLDTGISTHPDLRITGGASFVPGEPSTQDGNGHGTHVAGTIAALNNSIGVLGVAPSAELYAVKVLGASGAGSVSSIAQGLEWAGNNGMHVANLSLGSPSPSATLEQAVNSATSRGVLVVAASGNSGAGSISYPARYANAMAVGATDQNNNRASFSQYGAGLDIVAPGVNVQSTYPGSAYASLNGTSMATPHVAGAAALVKQKNPSWSNVQIRNHLKNTATSLGSTNLYGSGLVNAEAATR

SEQ ID NO: 57340 - protein, 269 aa, Unidentified
AQSVPWGISRVQAPAAHNRGLTGSGVKVAVLDSGISTHPDLNIRGGASFVPGEPSTQDGEGHGTHVAGTIAALNNSIGVLGVAPSAELYAVKVLGASGSGSVSSIAQGLEWAGLNRMHVANLSLGSPSPSATLEQAVNSATSRGVLVVAASGNSGEGSISYPARYANAMAVGATDQNNNRADFSQYGAGLDIVAPGVNVQSTYPGSTYASLNGTSMATPHVAGAAALVKQKNPSWSNVQIRNHLKNTATSLGSTNLYGSGLVNAEAATR

SEQ ID NO: 57341 - protein, 269 aa, Unidentified
AQSVPWGISRVQAPAAHNRGLTGSGVKVAVLDTGISTHPDLNIRGGASFVPGEPSTQDGEGHGTHVAGTIAALNNGIGVLGVAPSAELYAVKVLGASGSGSVSSIAQGLEWAGNNSMHVANLSLGSESPSATLEQAVNSATSRGVLVVAASGNSGADSISYPARYANAMAVGATDQNNNRASFSQYGAGLDIVAPGVNVQSTYPGSTYASLNGTSMATPHVAGAAALVKQKNPSWSNVQIRDHLKNTATSLGSTNLYGSGLVNAEAATR

SEQ ID NO: 57342 - protein, 269 aa, Unidentified
AQSVPWGISRVQAPAAHNRGLTGSGVKVAVLDTGISTHPDLNIRGGASFVPGEPSTQDGNGHGTHAAGTIAALDNSIGVLGVAPSAELYAVKVLGASGSGAISSIAQGLEWAGNNGMHVANLSLGSPSPSATLEQAVNSATSRGVLVVAASGNSGADSISYPARYANAMAVGATDQNNNRASFSQYGAGLDIVAPGVNVQSTYPGSTYASLNGTSMATPHVAGAAALVKHKNPSWSNVQIRNHLKNTATSLGSTNLYGSGLVNAEAATR

SEQ ID NO: 57343 - protein, 269 aa, Unidentified
AQSVPWGISRVQAPAAHNRGLRGSGVKVAVLDTGISTHPDLNIRGGASFVPGEPSTQDGNGHGTHVAGTIAALNNSIGVLGVAPSAELYAVKVLGASGNGALSSIAQGLEWAGNNGMHVANLSLGSPSPSATLEQAVNSATSRGVLVVAASGNSGAGSISYPARYANAMAVGATDQNNNRASFSQYGAGLDIVAPGVNVQSTYPGSTYASLNGTSMATPHVAGAATLVKQKNPSWSNVSIRNHLKNTATSLGSTNLYGSGLVNAEAATR

SEQ ID NO: 57344 - protein, 269 aa, Unidentified
AQSVPWGISRVQAPAAHNRGLWGRGVKVAVLDTGISTHPDLRITGGASFVPGEPSTQDGNGHGTHVAGTIAALNNSIGVLGVAPSAELYAVKVLGASGAGSVSSIAQGLEWAGNNGMHVANLSLGSPSPSATLEQAVNSATSRGVLVVAASGNSGAGSISYPARYANAMAVGATDQNNNRASFSQYGAGLDIVAPGVNVQSTYIGSTYASLNGTSMATPHVAGAAALVKQKNPSWSNVQIRNHLKNTATSLGSTNLYGSGLVNAEAATR

SEQ ID NO: 57345 - protein, 269 aa, Unidentified
AQSVPWGISRVQAPAAHNRKLTGSGVKVAVLDTGISTHPDLNIRGGASFVPGEPSTQDGEGHGTHVAGTIAALNNNIGVLGVAPSAELYAVKVLGASGSGSVSSIAQGLEWAGLNGMHVAGLSLGSPSPSATLEQAVNSATSRGVLVVAASGNSGAGSISYPARYANAMAVGATDQNNNRASFSQYGAGLDIVAPGVNVQSTYPGSAYASLNGTSMATPHVAGAAALVKQKNPSWSNVQIRNHLKNTATSLGSTNLYGSGLVNAEAATR

SEQ ID NO: 57346 - protein, 269 aa, Unidentified
AQSVPWGISRVQAPAAHNRGLLGSGVKVAVLDTGISTHPDLNIRGGASFVPGEPSTQDGNGHGTHVAGTIAALNNNIGVLGVAPSAELYAVKVLGASGSGSVSSIAQGLEWAGNNRMHVANLSLGDPSPSATLEQAVNSATSRGVLVVAASGNSGAGSIDYPARYANAMAVGATDQNNNRASFSQYGAGLDIVAPGVNVQSTYPGSTYASENGTSMATPHVAGAAALVKQKNPSWSNVQIRNHLKNTATSLGSTNLYGSGLVNAEAATR

SEQ ID NO: 57347 - protein, 269 aa, Unidentified
AQSVPWGISRVQAPAAHNRGLTGFGVKVAVLDTGISTHPDLNIRGGASFVPGEPSTQDGNGHGTHVAGTIAALNNSIGVLGVAPSAELYAVKVLGASGDGSVSSIAQGLEWAGNNRMHVANLSLGSPSPSATLEQAVNSATSRGVLVVAASGNSGAGSISYPARYANAMAVGATDQNNNRASFSQYGAGLDIVAPGVNVQSTYPGSTYDSLNGTSMATPHVAGAAALVKQKNPSWSNVQIRNHIKNTATSLGSTNLYGSGLVNAEFATR

SEQ ID NO: 57348 - protein, 269 aa, Unidentified
AQSVPWGISRVQAPAAHNRGLRGSGVKVAVLDTGISTHPDLNIRGGASFVPGEPSTQDGNGHGTHVAGTIAALNNSIGVLGVAPSAELYAVKVLGASGTGNISSIAQGLEWAGNNGMHVANLSLGSPSPSATLEQAVNSATSRGVLVVAASGNSGAGSISYPARYANAMAVGATDQNNNRASFSQYGAGLDIVAPGVNVQSTYPGSTYASLNGTSMATPHVAGAAVLVKQKNPSWSNVWIRNHLKNTATSLGSTNLYGSGLVNAEAATR

SEQ ID NO: 57349 - protein, 269 aa, Unidentified
AQSVPWGISRVQAPAAHNRRLTGRGVKVAVLDTGISTHPDLNIRGGASFVPGEPSTQDGEGHGTHVAGTIAALNNGIGVLGVAPSAELYAVKVLGASGSGSVSSIAQGLEWAGNNSMHVANLSLGSPSPSATLEQAVNSATSRGVLVVAASGNSGAGSISYPARYANAMAVGATDQNNNRASFSQYGAGLDIVAPGVNVQSTYPGSTYASLNGTSMATPHVAGAAALVKQKNPSWSNVQIRDHLKNTATSLGSTNLYGSGLVNAEAATR

SEQ ID NO: 57350 - protein, 269 aa, Unidentified
AQSVPWGISRVQAPAAHNRRLTGSGVKVAVLDTGISTHPDLNIRGGASFVPGEPSTQDGNGHGTHVAGTIAALNNDIGVLGVAPSAELYAVKVLGASGSGSVSSIAQGLEWAGNNDMHVANLSLGSESPSATLEQAVNSATSRGVLVVAASGNSGAGSISYPARYANAMAVGATDQNNNRASFSQYGAGLDIVAPGVNVQSTYPGSTYASLNGTSMATPHVAGAAALVKQKNPSWSNVQIRDRLKNTATSLGSTNLYGSGLVNAEAATR

SEQ ID NO: 57351 - protein, 269 aa, Unidentified
AQSVPWGISRVQAPAAHNRGLTGSGVKVAVLDTGISTHPDLNIRGGASFVPGEPSTQDGNGHGTHVAGTIAALNNNIGVLGVAPSAELYAVKVLGASGDGSVSSIAQGLEWAGNNGMHVANLSLGQPSPSATLEQAVNSATSRGVLVVAASGNSGAGSISYPARYANAMAVGATDQNNNRASFSQYGAGLDIVAPGVNVQSTYPGSTYASENGTSMATPHVAGAAALVKQKNPRWSNVQIRNHLKNTATSLGSTNLYGSGLVNALAATR

SEQ ID NO: 57352 - protein, 269 aa, Unidentified
AQSVPWGISRVQAPAAHNRGLTGSGVKVAVLDTGISTHPDLNIRGGASFVPGEPSTQDGNGHGTHVAGTIAALNNGIGVLGVAPSAELYAVKVLGASGSGSVSSIAQGLEWAGNNDMHVANLSLGSPSPSATLEQAVNSATSRGVLVVAASGNSGADSISYPARYANAMAVGATDQNNNRADFSQYGAGLDIVAPGVNVQSTYPGSTYASLNGTSMATPHVAGAAALVKQKNPSWSNVRIRDHLKNTATSLGSTNLYGSGLVNAEAATR

SEQ ID NO: 57353 - protein, 269 aa, Unidentified
AQSVPWGISRVQAPAAHNRRLTGSGVKVAVLDTGISTHPDLNIRGGASFVPGEPSTQDGNGHGTHVAGTIAALNNDIGVLGVAPSAELYAVKVLGASGSGSVSSIAQGLEWAGNNDMHVANLSLGSPSPSATLEQAVNSATSRGVLVVAASGNSGADSISYPARYANAMAVGATDQNNNRADFSQYGAGLDIVAPGVNVQSTYPGSTYASLNGTSMATPHVAGAAALVKQKNPSWSNVRIRNHLKNTATSLGSTNLYGSGLVNAEAATR

SEQ ID NO: 57354 - protein, 269 aa, Unidentified
AQSVPWGISRVQAPAAHNRGLTGSGVKVAVLDTGISTHPDLNIRGGASFVPGEPSTQDGNGHGTHVAGTIAALNNSIGVLGVAPSAELYAVKVLGADGEGAISSIAQGLEWAGNNGMHVANLSLGSPSPSATLEQAVNSATSRGVLVVAASGNSGASSISYPARYANAMAVGATDQNNNRASFSQYGAGLDIVAPGVNVQSTYPGSTYASLNGTSMATPHVAGAAALVKQKNPSWSNAQIRNHLKNTATSLGSTNLYGSGLVNAEAATR

SEQ ID NO: 57355 - protein, 269 aa, Unidentified
AQSVPWGISRVQAPAAHNRGLYGSGVKVAVLDTGISTHPDLNIRGGASFVPGEPSTQDGNGHGTHVAGTIAALNNSIGVLGVAPSAELYAVKVLGASGNGAISSIAQGLEWAGNNGMHVANLSLGSPSPSATLEQAVNSATSRGVLVVAASGNSGAGSISYPARYANAMAVGATDQNNNRASFSQYGAGLDIVAPGVNVQSTYPGSTYASLNGTSMATPHVAGAATLVKQKNPSWSNVRIRNHLKNTATSLGSTNLYGSGLVNAEAATR

SEQ ID NO: 57356 - protein, 269 aa, Unidentified
AQSVPWGISRVQAPAAHNRGLQGSGVKVAVLDTGISTHPDLNIRGGASFVPGEPSTQDGNGHGTHVAGTIAALNNSIGVLGVAPSAELYAVKVLGASGGGNISSIAQGLEWAGNNGMHVANLSLGSPSPSATLEQAVNSATSRGVLVVAASGNSGAGSISYPARYANAMAVGATDQNNNRASFSQYGAGLDIVAPGVNVQSTYPGSTYASLNGTSMATPHVAGAAVLVKQKNPSWSNVSIRNHLKNTATSLGSTNLYGSGLVNAEAATR

SEQ ID NO: 57357 - protein, 269 aa, Unidentified
AQSVPWGISRVQAPAAHNRGLRGSGVKVAVLDTGISTHPDLNIRGGASFVPGEPSTQDGNGHGTHVAGTIAALNNSIGVLGVAPSAELYAVKVLGASGNGNLSSIAQGLEWAGNNGMHVANLSLGSPSPSATLEQAVNSATSRGVLVVAASGNSGAGSISYPARYANAMAVGATDQNNNRASFSQYGAGLDIVAPGVNVQSTYPGSTYASLNGTSMATPHVAGAALLVKQKNPSWSNVRIRNHLKNTATSLGSTNLYGSGLVNAEAATR

SEQ ID NO: 57358 - protein, 269 aa, Unidentified
AQSVPWGISRVQAPAAHNRGLQGSGVKVAVLDTGISTHPDLNIRGGASFVPGEPSTQDGNGHGTHVAGTIAALNNSIGVLGVAPSAELYAVKVLGASGNGNLSSIAQGLEWAGNNGMHVANLSLGSPSPSATLEQAVNSATSRGVLVVAASGNSGAGSISYPARYANAMAVGATDQNNNRASFSQYGAGLDIVAPGVNVQSTYPGSTYASLNGTSMATPHVAGAAMLVKQKNPSWSNVRIRNHLKNTATSLGSTNLYGSGLVNAEAATR

SEQ ID NO: 57359 - protein, 269 aa, Unidentified
AQSVPWGISRVQAPAAHNRRLTGRGVKVAVLDTGISTHPDLRITGGASFVPGEPSTQDGNGHGTHVAGTIAALNNSIGVLGVAPSAELYAVKVLGASGAGSVSSIAQGLEWAGNNGMHVANLSLGSPSPSATLEQAVNSATSRGVLVVAASGNSGAGSISYPARYANAMAVGATDQNNNRASFSQYGAGLDIVAPGVNVQSTYPQSTYASLNGTSMATPHVAGAAALVKQKNPSWSNVQIRNHLKNTATSLGSTNLYGSGLVNAEAATR

SEQ ID NO: 57360 - protein, 269 aa, Unidentified
AQSVPWGISRVQAPAAHNRGLTGRGVKVAVLDTGISTHPDLNIRGGASFVPGEPSTQDGNGHGTHVAGTIAALDNSIGVLGVAPSAELYAVKVLGASGGGSVSSIAQGLEWAGNNGMHVANLSLGSPSPSATLEQAVNSATSRGVLVVAASGNSGAGSISYPARYANALAVGATDQNNNRASFSQYGAGLDIVAPGVNVQSTYPGSTYASLNGTSMATPHVAGAAVLVKQKNPSWSNVRIRNHLKNTATSLGSTNLYGSGLVNAEAATR

SEQ ID NO: 57361 - protein, 269 aa, Unidentified
AQSVPWGISRVQAPAAHNRGLRGSGVKVAVLDTGISTHPDLNIRGGASFVPGEPSTQDGNGHGTHVAGTIAALNNSIGVLGVAPSAELYAVKVLGASGNGALSSIAQGLEWAGNNGMHVANLSLGSPSPSATLEQAVNSATSRGVLVVAASGNSGAGSISYPARYANAMAVGATDQNNNRASFSQYGAGLDIVAPGVNVQSTYPGSTYASLNGTSMATPHVAGAAMLVKQKNPSWSNVRIRNHLKNTATSLGSTNLYGSGLVNAEAATR

SEQ ID NO: 57362 - protein, 269 aa, Unidentified
AQSVPWGISRVQAPAAHNRGLTGSGVKVAVLDSGISTHPDLNIRGGASFVPGEPSTQDGEGHGTHVAGTIAALNNSIGVLGVAPSAELYAVKVLGASGSGSVSSIAQGLEWAGLNRMHVANLSLGIPSPSATLEQAVNSATSRGVLVVAASGNSGAGSISYPARYANAMAVGATDQNNNRADFSQYGAGLDIVAPGVNVQSTYPGSTYASLNGTSMATPHVAGAAALVKQKNPSWSNVQIRNHLKNTATSLGSTNLYGSGLVNAEAATR

SEQ ID NO: 57363 - protein, 269 aa, Unidentified
AQSVPWGISRVQAPAAHNRRLTGRGVKVAVLDTGISTHPDLRITGGASFVPGEPSTQDGNGHGTHVAGTIAALNNSIGVLGVAPSAELYAVKVLGASGSGSVSSIAQGLEWAGANGMHVANLSLGSPSPSATLEQAVNSATSRGVLVVAASGNSGAGSISYPARYANAMAVGATDQNNNRASFSQYGAGLDIVAPGVNVQSTYPGSAYASLNGTSMATPHVAGAAALVKQKNPSWSNVQIRNHLKNTATSLGSTNLYGSGLVNAEAATR

SEQ ID NO: 57364 - protein, 269 aa, Unidentified
AQSVPWGISRVQAPAAHNRGLTGRGVKVAVLDTGISTHPDLNIRGGASFVPGEPSTQDGNGHGTHVAGTIAALNNGIGVLGVAPSAELYAVKVLGASGSGSVSSIAQGLEWAGNNSMHVANLSLGSPSPSATLEQAVNSATSRGVLVVAASGNSGAGSISYPARYANAMAVGANDQNNNRASFSQYGAGLDIVAPGVNVQSTYPGSTYASLNGTSMATPHVAGAAALVKQKNPSWSNVRIRDHLKNTATSLGSTNLYGSGLVNAEAATR

SEQ ID NO: 57365 - protein, 269 aa, Unidentified
AQSVPWGISRVQAPAAHNRRLTGRGVKVAVLDTGISTHPDLNIRGGASFVPGEPSTQDGNGHGTHVAGTIAALNNNIGVLGVAPSAELYAVKVLGASGNGSVSSIAQGLEWAGLNGMHVANLSLGAPSPSATLEQAVNSATSRGVLVVAASGNSGAGSISYPARYANAMAVGATDQNNNRASFSQYGAGLDIVAPGVNVQSTYPGSTYASLNGTSMATPHVAGAAALVKQKNPSWSNVQIRNHLKNTATSLGSTNLYGSGLVNAEAATR

SEQ ID NO: 57366 - protein, 269 aa, Unidentified
AQSVPWGISRVQAPAAHNRGLQGSGVKVAVLDTGISTHPDLNIRGGASFVPGEPSTQDGNGHGTHVAGTIAALNNSIGVLGVAPSAELYAVKVLGASGTGAISSIAQGLEWAGNNGMHVANLSLGSPSPSATLEQAVNSATSRGVLVVAASGNSGAGSISYPARYANAMAVGATDQNNNRASFSQYGAGLDIVAPGVNVQSTYPGSTYASLNGTSMATPHVAGAAVLVKQKNPSWSNVWIRNHLKNTATSLGSTNLYGSGLVNAEAATR

SEQ ID NO: 57367 - protein, 269 aa, Unidentified
AQSVPWGISRVQAPAAHNRGLTGSGVKVAVLDTGISTHPDLNIRGGASFVPGEPSTQDGNGHGTHVAGTIAALNNSIGVLGVAPSAELYAVKVLGASGGGAISSIAQGLEWAGLNGMHVANLSLGSPSPSATLEQAVNSATSRGVLVVAASGNSGAGSISYPARYANAMAVGATDQNNNRASFSQYGAGLDIVAPGVNVQSTVPGSTYASLNGTSMATPHVAGAAVLVKQKNPSWSNVQIRNHLKNTATSLGSTNLYGSGLVNAEAATR

SEQ ID NO: 57368 - protein, 269 aa, Unidentified
AQSVPWGISRVQAPAAHNRRLWGRGVKVAVLDTGISTHPDLNIRGGASFVPGEPSTQDGNGHGTHVAGTIAALNNSIGVLGVAPSAELYAVKVLGASGAGSVSSIAQGLEWAGNNGMHVANLSLGSPSPSATLEQAVNSATSRGVLVVAASGNSGAGSISYPARYANAMAVGATDQNNNRASFSQYGAGLDIVAPGVNVQSTYPQSAYASLNGTSMATPHVAGAAALVKQKNPSWSNVQIRNHLKNTATSLGSTNLYGSGLVNAEAATR

SEQ ID NO: 57369 - protein, 269 aa, Unidentified
AQTVPWGISRVQAPAAHNRGLTGRGVKVAVLDTGISTHPDLNIRGGASFVPGEPSTQDGEGHGTHVAGTIAALNNDIGVLGVAPSAELYAVKVLGASGSGSVSSIAQGLEWAGNNSMHVANLSLGSPSPSATLEQAVNSATSRGVLVVAASGNSGAGSISYPARYANAMAVGATDQNNNRASFSQYGAGLDIVAPGVNVQSTYPGSTYASLNGTSMATPHVAGAAALVKQKNPSWSNVQIRDHLKNTATSLGSTNLYGSGLVNAEAATR

SEQ ID NO: 57370 - protein, 269 aa, Unidentified
AQSVPWGISRVQAPAAHNRGLTGSGVKVAVLDTGISTHPDLNIRGGASFVPGEPSTQDGNGHGTHVAGTIAALNNSIGVLGVAPSAELYAVKVLGADGEGAISSIAQGLEWAGNNGMHVANLSLGSPSPSATLEQAVNSATSRGVLVVAASGNSGASSISYPARYANAMAVGATDQNNNRASFSQYGAGLDIVAPGVNVQSTYPGSTYASLNGTSMATPHVAGAAALVKQKNPSWSNVQIRNHLWNTATSLGSTNLYGSGLVNAEAATR

SEQ ID NO: 57371 - protein, 269 aa, Unidentified
AQSVPWGISRVQAPAAHNRGLRGSGVKVAVLDTGISTHPDLNIRGGASFVPGEPSTQDGNGHGTHVAGTIAALNNSIGVLGVAPSAELYAVKVLGASGGGNLSSIAQGLEWAGNNGMHVANLSLGSPSPSATLEQAVNSATSRGVLVVAASGNSGAGSISYPARYANAMAVGATDQNNNRASFSQYGAGLDIVAPGVNVQSTYPGSTYASLNGTSMATPHVAGAATLVKQKNPSWSNVSIRNHLKNTATSLGSTNLYGSGLVNAEAATR

SEQ ID NO: 57372 - protein, 269 aa, Unidentified
AQSVPWGISRVQAPAAHNRRLTGSGVKVAVLDTGISTHPDLNIRGGASFVPGEPSTQDGNGHGTHVAGTIAALNNGIGVLGVAPSAELYAVKVLGASGSGSVSSIAQGLEWAGNNDMHVANLSLGSESPSATLEQAVNSATSRGVLVVAASGNSGAGSISYPARYANAMAVGATDQNNNRADFSQYGAGLDIVAPGVNVQSTYPGSTYASLNGTSMATPHVAGAAALVKQKNPSWSNVQIRNRLKNTATSLGSTNLYGSGLVNAEAATR

SEQ ID NO: 57373 - protein, 269 aa, Unidentified
AQSVPWGISRVQAPAAHNRGLRGSGVKVAVLDTGISTHPDLNIRGGASFVPGEPSTQDGNGHGTHVAGTIAALNNSIGVLGVAPSAELYAVKVLGASGTGALSSIAQGLEWAGNNGMHVANLSLGSPSPSATLEQAVNSATSRGVLVVAASGNSGAGSISYPARYANAMAVGATDQNNNRASFSQYGAGLDIVAPGVNVQSTYPGSTYASLNGTSMATPHVAGAATLVKQKNPSWSNVSIRNHLKNTATSLGSTNLYGSGLVNAEAATR

SEQ ID NO: 57374 - protein, 269 aa, Unidentified
AQSVPWGISRVQAPAAHNRGLQGSGVKVAVLDTGISTHPDLNIRGGASFVPGEPSTQDGNGHGTHVAGTIAALNNSIGVLGVAPSAELYAVKVLGASGGGALSSIAQGLEWAGNNGMHVANLSLGSPSPSATLEQAVNSATSRGVLVVAASGNSGAGSISYPARYANAMAVGATDQNNNRASFSQYGAGLDIVAPGVNVQSTYPGSTYASLNGTSMATPHVAGAAVLVKQKNPSWSNVRIRNHLKNTATSLGSTNLYGSGLVNAEAATR

SEQ ID NO: 57375 - protein, 269 aa, Unidentified
AQSVPWGISRVQAPAAHNRGLTGRGVKVAVLDTGISTHPDLNIRGGASFVPGEPSTQDGEGHGTHVAGTIAALNNGIGVLGVAPSAELYAVKVLGASGSGSVSSIAQGLEWAGNNDMHVANLSLGSESPSATLEQAVNSATSRGVLVVAASGNSGAGSISYPARYANAMAVGATDQNNNRADFSQYGAGLDIVAPGVNVQSTYPGSTYASLNGTSMATPHVAGAAALVKQKNPSWSNVQIRNHLKNTATSLGSTNLYGSGLVNAEAATR

SEQ ID NO: 57376 - protein, 269 aa, Unidentified
AQSVPWGISRVQAPAAHNRGLTGRGVKVAVLDTGISTHPDLNIRGGASFVPGEPSTQDGEGHGTHVAGTIAALNNGIGVLGVAPSAELYAVKVLGASGSGSVSSIAQGLEWAGNNSMHVANLSLGSESPSATLEQAVNSATSRGVLVVAASGNSGAGSISYPARYANAMAVGATDQNNNRASFSQYGAGLDIVAPGVNVQSTYPGSTYASLNGTSMATPHVAGAAALVKQKNPSWSNVQIRDHLKNTATSLGSTNLYGSGLVNAEAATR

SEQ ID NO: 57377 - protein, 269 aa, Unidentified
AQSVPWGISRVQAPAAHNRGLAGRGVKVAVLDSGISTHPDLNIRGGASFVPGEPSTQDGEGHGTHVAGTIAALNNSIGVLGVAPSAELYAVKVLGASGSGSVSSIAQGLEWAGNNGMHVANLSLGIPSPSATLEQAVNSATSRGVLVVAASGNSGAGSISYPARYANAMAVGATDQNNNRADFSQYGAGLDIVAPGVNVQSTYPGSTYASLNGTSMATPHVAGAAALVKQKNPSWSNVQIRNHLKNTATSLGSTNLYGSGLVNAEAATR

SEQ ID NO: 57378 - protein, 269 aa, Unidentified
AQSVPWGISRVQAPASHNRGLAGSGVKVAVLDTGISTHPDLNIRGGASFVPGEPSTQDGNGHGTHVAGTIAALNNSIGVLGVAPSAELYAVKVLGASGGGSISSIAQGLEWAGNNGMHVANLSLGNPSPSATLEQAVNSATSRGVIVVAASGNSGAGSISYPARYANAMAVGATDQNNNRASFSQYGAGLDIVAPGVNVQSTYPGSTYASLNGTSMATPHVAGAAALVKQKNPSWSNVQIRNHLKNTATSLGSTNLYGSGLVNAEAATR

SEQ ID NO: 57379 - protein, 269 aa, Unidentified
AQSVPWGISRVQAPAAHNRGLTGGGVKVAVLDTGISTHPDLNIRGGASFVPGEPSTQDGNGHGTHVAGTVAALNNSIGVLGVAPSAELYAVKVLSASGNGSVSSIAQGLEWAGNNGMHVANLSLGAPSPSATLEQAVNSATSRGVLVVAASGNSGAGSISYPARYANAMAVGATDQNNNRASFSQYGAGLDIVAPGVNVQSTYPGSTYASQNGTSMATPHVAGAAALVKQKNPSWSNVQIRNHLKNTATSLGSTNLYGSGLVNAEAATR

SEQ ID NO: 57380 - protein, 269 aa, Unidentified
AQSVPWGISRVQAPAAHNRGLQGSGVKVAVLDTGISTHPDLNIRGGASFVPGEPSTQDGNGHGTHVAGTIAALNNSIGVLGVAPSAELYAVKVLGASGGGNISSIAQGLEWAGNNGMHVANLSLGSPSPSATLEQAVNSATSRGVLVVAASGNSGAGSISYPARYANAMAVGATDQNNNRASFSQYGAGLDIVAPGVNVQSTYPGSTYASLNGTSMATPHVAGAAVLVKQKNPSWSNVWIRNHLKNTATSLGSTNLYGSGLVNAEAATR

SEQ ID NO: 57381 - protein, 269 aa, Unidentified
AQSVPWGISRVQAPAAHNRGLLGFGVKVAVLDTGISTHPDLNIRGGASFVPGEPSTQDGNGHGTHVAGTIAALNNNIGVLGVAPSAELYAVKVLGASGSGSVSSIAQGLEWAGNNRMHVANLSLGSPSPSATLEQAVNSATSRGVLVVAASGNSGAGSIDYPARYANAMAVGATDQNNNRASFSQYGAGLDIVAPGVNVQSTYPGSAYASLNGTSMATPHVAGAAALVKQKNPSWSNVQIRNHLKNTATSLGSTNLYGSGLVNAEAATR

SEQ ID NO: 57382 - protein, 269 aa, Unidentified
AQSVPWGISRVQAPAAHNRRLTGRGVKVAVLDTGISTHPDLNIRGGASFVPGEPSTQDGNGHGTHVAGTIAALNNDIGVLGVAPSAELYAVKVLGASGSGSVSSIAQGLEWAGNNSMHVANLSLGSPSPSATLEQAVNSATSRGVLVVAASGNSGADSISYPARYANAMAVGATDQNNNRASFSQYGAGLDIVAPGVNVQSTYPGSTYASLNGTSMATPHVAGAAALVKQKNPSWSNVQIRDHLKNTATSLGSTNLYGSGLVNAEAATR

SEQ ID NO: 57383 - protein, 269 aa, Unidentified
AQSVPWGISRVQAPAAHRRGLTGRGVKVAVLDTGISTHPDLDIRGGASFVPGEPSTQDGNGHGTHVAGTIAALDNRIGVLGVAPSAELYAVKVLGASGSGSVSSIAQGLEWAGNNGMHVANLSLGSPSPSATLEQAVNSATSRGVLVVAASGNSGAGSISYPARYANAMAVGATDQNNNRASFSQYGAGLDIVAPGVNVQSTYPGSTYASLNGTSMATPHVAGAAALVKQKNPSWSNVQIRNRLKNTATSLGSTNLYGSGLVNAEAATR

SEQ ID NO: 57384 - protein, 269 aa, Unidentified
AQSVPWGISRVQAPAAHRRGLTGRGVKVAVLDTGISTHPDLNIRGGASFVPGEPSTQDGNGHGTHVAGTIAALNNSIGVLGVAPDAELYAVKVLGASGSGSVSSIAQGLEWAGNNGMHVANLSLGSPSPSATLEQAVNSATSRGVLVVAASGNSGAGSISYPARYANAMAVGATDQNNNRASFSQYGAGLDIVAPGVNVLSTWPGSTYASLNGTSQATPHVAGAAALVKQKNPSWSNVQIRNRLKNTATSLGSTNLYGSGLVNAEAATR

SEQ ID NO: 57385 - protein, 269 aa, Unidentified
AQSVPWGISRVQAPAAHNRGLRGSGVKVAVLDTGISTHPDLNIRGGASFVPGEPSTQDGNGHGTHVAGTIAALNNSIGVLGVAPSAELYAVKVLGASGGGAISSIAQGLEWAGNNGMHVANLSLGSPSPSATLEQAVNSATSRGVLVVAASGNSGAGSISYPARYANAMAVGATDQNNNRASFSQYGAGLDIVAPGVNVQSTYPGSTYASLNGTSSATPHVAGAAVLVKQKNPSWSNVRIRNHLKNTATSLGSTNLYGSGLVNAHAATR

SEQ ID NO: 57386 - protein, 269 aa, Unidentified
AQSVPWGISRVQAPAAHNRGLLGSGVKVAVLDTGISTHPDLNIRGGASFVPGEPSTQDGNGHGTHVAGTIAALNNNIGVLGVAPSAELYAVKVLGASGSGSVSSIAQGLEWAGNNRMHVANLSLGDPSPSATLEQAVNSATSRGVLVVAASGNSGAGSISYPARYANAMAVGATDQNNNRASFSQYGAGLDIVAPGVNVQSTYPGSAYASENGTSMATPHVAGAAALVKQKNPSWSNVQIRNHLKNTATSLGSTNLYGSGLVNAEAATR

SEQ ID NO: 57387 - protein, 269 aa, Unidentified
AQSVPWGISRVQAPAAHNRGLTGSGVKVAVLDTGISTHPDLNIRGGASFVPGEPSTQDGEGHGTHVAGTIAALNNGIGVLGVAPSAELYAVKVLGASGSGSVSSIAQGLEWAGNNSMHVANLSLGSPSPSATLEQAVNSATSRGVLVVAASGNSGADSISYPARYANAMAVGATDQNNNRADFSQYGAGLDIVAPGVNVQSTYPGSTYASLNGTSMATPHVAGAAALVKQKNPSWSNVQIRDHLKNTATSLGSTNLYGSGLVNAEAATR

SEQ ID NO: 57388 - protein, 269 aa, Unidentified
AQSVPWGISRVQAPAAHNRKLTGGGVKVAVLDTGISTHPDLNIRGGASFVPGEPSTQDGEGHGTHVAGTIAALNNNIGVLGVAPSAELYAVKVLGASGGGSVSSIAQGLEWAGLNGMHVANLSLGSPSPSATLEQAVNSATSRGVLVVAASGNSGAGSISYPARYANAMAVGATDQNNNRASFSQYGAGLDIVAPGVNVQSTYPGSTYASLNGTSMATPHVAGAAALVKQKNPSWSNVQIRNHLKNTATSLGSTNLYGSGLVNAEAATR

SEQ ID NO: 57389 - protein, 269 aa, Unidentified
AQSVPWGISRVQAPAAHNRGLTGSGVKVAVLDTGISTHPDLNIRGGASFVPGEPSTQDGNAHGTHVAGTIAALNNSIGVLGVAPSAELYAVKVLGADGRGAISSIAQGLEWAGNNGMHVANLSLGSPSPSATLEQAVNSATSRGVLVVAASGNSGASSISYPARYANAMAVGATDQNNNRASFSQYGAGLDIVAPGVNVQSTYPGSTYASLNGTSMATPHVAGAAALVKQKNPSWSNVQIRNHLKNTATSLGSTNLYGSGLVNAEAATR

SEQ ID NO: 57390 - protein, 269 aa, Unidentified
AQSVPWGISRVQAPAAHNRRLTGSGVKVAVLDTGISTHPDLNIRGGASFVPGEPSTQDGEGHGTHVAGTIAALNNSIGVLGVAPSAELYAVKVLGASGSGSVSSIAQGLEWAGNNRMHVANLSLGSPSPSATLEQAVNSATSRGVLVVAASGNSGAGSISYPARYANAMAVGATDQNNNRADFSQYGAGLDIVAPGVNVQSTYPGSTYASLNGTSMATPHVAGAAALVKQKNPSWSNVQIRDRLKNTATSLGSTNLYGSGLVNAEAATR

SEQ ID NO: 57391 - protein, 269 aa, Unidentified
AQSVPWGISRVQAPAAHNRRLTGRGVKVAVLDTGISTHPDLNIRGGASFVPGEPSTQDGNGHGTHVAGTIAALNNSIGVLGVAPSAELYAVKVLSASGAGSVSSIANGLEWAGNNGMHVANLSLGAPSPSATLEQAVNSATSRGVLVVAASGNSGAGSISYPARYANAMAVGATDQNNNRASFSQYGAGLDIVAPGVNVQSTYPGSTYASLNGTSMATPHVAGAAALVKQKNPSWSNVQIRNHLKNTATSLGSTNLYGSGLVNAEAATR

SEQ ID NO: 57392 - protein, 269 aa, Unidentified
AQSVPWGISRVQAPAAHNRRLTGRGVKVAVLDTGISTHPDLNIRGGASFVPGEPSTQDGNGHGTHVAGTIAALNNSIGVLGVAPSAELYAVKVLGASGSGSVSSIAQGLEWAGNNGMHVANLSLGSESPSATLEQAVNSATSRGVLVVAASGNSGADSISYPARYANAMAVGATDQNNNRADFSQYGAGLDIVAPGVNVQSTYPGSTYASLNGTSMATPHVAGAAALVKQKNPSWSNVQIRDHLKNTATSLGSTNLYGSGLVNAEAATR

SEQ ID NO: 57393 - protein, 269 aa, Unidentified
AQSVPWGISRVQAPAAHNRGLAGSGVKVAVLDTGISTHPDLNIRGGASFVPGEPSTQDGNGHGTHVAGTIAALNNSIGVLGVAPSAELYAVKVLGASGGGGISSIAQGLEWAGNNGMHVANLSLGSPSPSATLEQAVNSATSRGVLVVAASGNSGAGSISYPARYANAMAVGATDQNNNRASFSQYGAGLDIVAPGVNVQSTYPGSTYASLNGTSMATPHVAGAALLVKQKNPSWSNVRIRNHLKNTATSLGSTNLYGSGLVNAEAATR

SEQ ID NO: 57394 - protein, 269 aa, Unidentified
AQSVPWGISRVQAPAAHNRGLQGSGVKVAVLDTGISTHPDLNIRGGASFVPGEPSTQDGNGHGTHVAGTIAALNNSIGVLGVAPSAELYAVKVLGASGNGAISSIAQGLEWAGNNGMHVANLSLGSPSPSATLEQAVNSATSRGVLVVAASGNSGAGSISYPARYANAMAVGATDQNNNRASFSQYGAGLDIVAPGVNVQSTYPGSTYASLNGTSMATPHVAGAAVLVKQKNPSWSNVRIRNHLKNTATSLGSTNLYGSGLVNAEAATR

SEQ ID NO: 57395 - protein, 269 aa, Unidentified
AQSVPWGISRVQAPAAHNRGLTGRGVKVAVLDTGISTHPDLRITGGASFVPGEPSTQDGNGHGTHVAGTIAALNNSIGVLGVAPSAELYAVKVLGASGAGSVSSIAQGLEWAGNNGMHVANLSLGSPSPSATLEQAVNSATSRGVLVVAASGNSGAGSISYPARYANAMAVGATDQNNNRASFSQYGAGLDIVAPGVNVQSTYIGSAYASLNGTSMATPHVAGAAALVKQKNPSWSNVQIRNHLKNTATSLGSTNLYGSGLVNAEAATR

SEQ ID NO: 57396 - protein, 269 aa, Unidentified
AQSVPWGISRVQAPAAHNRGLTGSGVKVAVLDTGISTHPDLNIRGGASFVPGEPSTQDGNGHGTHVAGTIAALNNGIGVLGVAPSAELYAVKVLGASGSGSVSSIAQGLEWAGNNSMHVANLSLGSPSPSATLEQAVNSATSRGVLVVAASGNSGADSISYPARYANAMAVGATDQNNNRASFSQYGAGLDIVAPGVNVQSTYPGSTYASLNGTSMATPHVAGAAALVKQKNPSWSNVRIRDRLKNTATSLGSTNLYGSGLVNAEAATR

SEQ ID NO: 57397 - protein, 269 aa, Unidentified
AQSVPWGISRVQAPAAHNRKLTGFGVKVAVLDTGISTHPDLNIRGGASFVPGEPSTQDGNGHGTHVAGTIAALNNNIGVLGVAPSAELYAVKVLGASGSGSVSSIAQGLEWAGNNRMHVANLSLGSPSPSATLEQAVNSATSRGVLVVAASGNSGAGSIDYPARYANAMAVGATDQNNNRASFSQYGAGLDIVAPGVNVQSTYPGSTYASENGTSMATPHVAGAAALVKQKNPSWSNVQIRNHLKNTATSLGSTNLYGSGLVNAEAATR

SEQ ID NO: 57398 - protein, 269 aa, Unidentified
AQSVPWGISRVQAPAAHNRGLTGGGVKVAVLDTGISTHPDLNIRGGASFVPGEPSTQDGNGHGTHVAGTIAALNNNIGVLGVAPSAELYAVKVLGASGGGSVSSIANGLEWAGNNGMHVANLSLGSPSPSATLEQAVNSATSRGVLVVAASGNSGAGSISYPARYANAMAVGATDQNNNRADFSQYGAGLDIVAPGVNVQSTYPGSTYASQNGTSMATPHVAGAAALVKQKNPSWSNVQIRNHLKNTATSLGSTNLYGSGLVNAEAATR

SEQ ID NO: 57399 - protein, 269 aa, Unidentified
AQSVPWGISRVQAPAAHNRRLTGRGVKVAVLDTGISTHPDLNIRGGASFVPGEPSTQDGNGHGTHVAGTIAALNNNIGVLGVAPSAELYAVKVLGASGGGSVSSIAQGLEWAGNNGMHVANLSLGAPSPSATLEQAVNSATSRGVLVVAASGNSGAGSISYPARYANAMAVGATDQNNNRASFSQYGAGLDIVAPGVNVQSTYPGSTYASQNGTSMATPHVAGAAALVKQKNPSWSNVQIRNHLKNTATSLGSTNLYGSGLVNAEAATR

SEQ ID NO: 57400 - protein, 269 aa, Unidentified
AQSVPWGISRVQAPAAHNRGLTGSGVKVAVLDTGISTHPDLNIRGGASFVPGEPSTQDGNGHGTHVAGTIAALNNSIGVLGVAPSAELYAVKVLGASGAGAISSIAQGLEWAGNNGMHVANLSLGSPSPSATLEQAVNSATSRGVLVVAASGNSGAGSISYPARYANAMAVGATDQNNNRASFSQYGAGLDIVAPGVNVQSTYIGSTYASLNGTSMATPHVAGAAVLVKQKNPSWSNVRIRNHLKNTATSLGSTNLYGSGLVNAEAATR

SEQ ID NO: 57401 - protein, 269 aa, Unidentified
AQSVPWGISRVQAPAAHNRGLTGSGVKVAVLDTGISTHPDLNIRGGASFVPGEPSTQDGNGHGTHAAGTIAALDNSIGVLGVAPSAELYAVKVLGASGSGAISSIAQGLEWAGNNGMHVANLSLGSPSPSATLEQAVNSATSRGVLVVAASGNSGADSISYPARYANAMAVGATDQNNNRASFSQYGAGLDIVAPGVNVQSTYPGSTYASLNGTSMATPHVAGAAALVKRKNPSWSNVQIRNHLKNTATSLGSTNLYGSGLVNAEAATR

SEQ ID NO: 57402 - protein, 269 aa, Unidentified
AQSVPWGISRVQAPAAHNRRLTGRGVEVAVLDTGISTHPDLRIRGGASFVPGEPSTQDGNGHGTHVAGTIAALDNSIGVLGVAPSAELYAVKVLGASGSGSVSSIAQGLEWAGNNGMHVANLSLGSPSPSATLEQAVNSATSRGVLVVAASGNSGAGSISYPARYANAMAVGATDQNNNRASFSQYGAGLDIVAPGVNVQSTYPGSTYASLNGTSMATPHVAGEAALVKQKNPSWSNVQIRNHLKNTATSLGSTNLYGSGLVNAEAATR

SEQ ID NO: 57403 - protein, 269 aa, Unidentified
AQSVPWGISRVQAPAAHNRGLAGSGVKVAVLDTGISTHPDLNIRGGASFVPGEPSTQDGEGHGTHVAGTIAALNNSIGVLGVAPSAELYAVKVLGASGSGSVSSIAQGLEWAGLNRMHVANLSLGSPSPSATLEQAVNSATSRGVLVVAASGNSGEGSISYPARYANAMAVGATDQNNNRADFSQYGAGLDIVAPGVNVQSTYPGSTYASLNGTSMATPHVAGAAALVKQKNPSWSNVQIRNHLKNTATSLGSTNLYGSGLVNAEAATR

SEQ ID NO: 57404 - protein, 269 aa, Unidentified
AQSVPWGISRVQAPAAHRRGLTGRGVKVAVLDTGISTHPDLNIRGGASFVPGEPSTQDGNGHGTHVAGTIAALDNNIGVLGVAPRAELYAVKVLGASGSGSVSSIAQGLEWAGNNGMHVANLSLGSPSPSATLEQAVNSATSRGVLVVAASGNSGAGSISYPARYANAMAVGATDQNNNRASFSQYGAGLDIVAPGVNVQSTYPGSTYASLNGTSMATPHVAGAAALVKQKNPSWSNVQIRNRLKNTATSLGSTNLYGSGLVNAEAATR

SEQ ID NO: 57405 - protein, 269 aa, Unidentified
AQSVPWGISRVQAPAAHNRGLYGSGVKVAVLDTGISTHPDLNIRGGASFVPGEPSTQDGNGHGTHVAGTIAALNNSIGVLGVAPSAELYAVKVLGASGNGNISSIAQGLEWAGNNGMHVANLSLGSPSPSATLEQAVNSATSRGVLVVAASGNSGAGSISYPARYANAMAVGATDQNNNRASFSQYGAGLDIVAPGVNVQSTYPGSTYASLNGTSMATPHVAGAATLVKQKNPSWSNVRIRNHLKNTATSLGSTNLYGSGLVNAEAATR

SEQ ID NO: 57406 - protein, 269 aa, Unidentified
AQSVPWGISRVQAPAAHNRGLTGSGVKVAVLDTGISTHPDLNIRGGASFVPGEPSTQDGNGHGTHVAGTIAALDNNIGVLGVAPRAELYAVKVLGASGSGSVSSIAQGLEWAGNNRMHVANLSLGSPAPSATLEQAVNSATSRGVLVVAASGNSGAGSISYPARYANAMAVGATDQNNNRASFSQYGAGLDIVAPGVNVLSTYPGSTYASLNGTSQATPHVAGAAALVKQKNPSWSNVQIRNHLKNTATSLGSTNLYGSGLVNAEAATR

SEQ ID NO: 57407 - protein, 269 aa, Unidentified
AQSVPWGISRVQAPAAHNRGLTGSGVKVAVLDTGISTHPDLNIRGGASFVPGEPSTQDGNGHGTHVAGTIAALNNSIGVLGVAPSAELYAVKVLGADGRGAISSIAQGLEWAGNNGMHVANLSLGSPSPSATLEQAVNSATSRGVLVVAASGNSGASSISYPARYANAMAVGATDQNNNRASFSQYGAGLDIVAPGVNVQSTYPGSTYASLNGTSMATPHVAGAAALVWQKNPSWSNVQIRNHLKNTATSLGSTNLYGSGLVNAEAATR

SEQ ID NO: 57408 - protein, 269 aa, Unidentified
AQSVPWGISRVQAPAAHNRGLTGRGVKVAVLDTGISTHPDLNIRGGASFVPGEPSTQDGNGHGTHVAGTIAALNNSIGVLGVAPSAELYAVKVLGASGSGSVSSIAQGLEWAGLNRMHVANLSLGIPSPSATLEQAVNSATSRGVLVVAASGNSGAGSIDYPARYANAMAVGATDQNNNRADFSQYGAGLDIVAPGVNVQSTYPGSTYASLNGTSMATPHVAGAAALVKQKNPSWSNVQIRNHLKNTATSLGSTNLYGSGLVNAEAATR

SEQ ID NO: 57409 - protein, 269 aa, Unidentified
AQSVPWGISRVQAPAAHNRGLTGSGVKVAVLDTGISTHPDLNIRGGASFVPGEPSTQDGEGHGTHVAGTIAALNNGIGVLGVAPSAELYAVKVLGASGSGSVSSIAQGLEWAGNNSMHVANLSLGSESPSATLEQAVNSATSRGVLVVAASGNSGADSISYPARYANAMAVGATDQNNNRADFSQYGAGLDIVAPGVNVQSTYPGSTYASLNGTSMATPHVAGAAALVKQKNPSWSNVQIRNHLKNTATSLGSTNLYGSGLVNAEAATR

SEQ ID NO: 57410 - protein, 269 aa, Unidentified
AQVVPWGISRVQAPAAHNRGLTGSGVKVAVLDTGISTHEDLNIRGGASFVPGEPSTQDGNGHGTHVAGTIAALDNSIGVLGVAPSAELYAVKVLGASGSGSVSSIAQGLEWAGNNRMHVANLSLGRPSPSATLEQAVNSATSRGVLVVAASGNSGAGSISYPARYANAMAVGATDQNNNRASFSQYGAGLDIVAPGVNVQSTYIGSTYASLNGTSMATPHVAGAAALVKQKNPSWSNVQIRNHLKNTATSLGSTNLYGSGLVNAEAATR

SEQ ID NO: 57411 - protein, 269 aa, Unidentified
AQSVPWGISRVQAPAAHNRGLAGRGVKVAVLDTGISTHPDLNIRGGASFVPGEPSTQDGEGHGTHVAGTIAALNNSIGVLGVAPSAELYAVKVLGASGSGSVSSIAQGLEWAGNNGMHVANLSLGIPSPSATLEQAVNSATSRGVLVVAASGNSGEGSIDYPARYANAMAVGATDQNNNRASFSQYGAGLDIVAPGVNVQSTYPGSTYASLNGTSMATPHVAGAAALVKQKNPSWSNVQIRNHLKNTATSLGSTNLYGSGLVNAEAATR

SEQ ID NO: 57412 - protein, 269 aa, Unidentified
AQSVPWGISRVQAPAAHNRGLTGSGVKVAVLDTGISTHPDLNIRGGASFVPGEPSTQDGNGHGTHVAGTIAALDNSIGVLGVAPSAELYAVKVLGASGSGAISSIAQGLEWAGNNGMHVANLSLGSPSPSATLEQAVNSATSRGVLVVAASGNSGAGSISYPARYANAMAVGATDQNNNRASFSQYGAGLDIVAPGVNVQSTYPGPTYASLNGTSMATPHVAGAAALVKQKNPSWSNVQIRNHLKNTATSLGSTNLYGSGLFNAVAATR

SEQ ID NO: 57413 - protein, 269 aa, Unidentified
AQSVPWGISRVQAPAAHNRGLTGSGVKVAVLDTGISTHPDLNIRGGASFVPGEPSTQDGNGHGTHVAGTIAALNNSIGVLGVAPSAELYAVKVLGADGRGAISSIAQGLEWAGNNGMHVANLSLGSPSPSATLEQAVNSATTRGVLVVAASGNSGASSISYPARYANAMAVGATDQNNNRASFSQYGAGLDIVAPGVNVQSTYPGSTYASLNGTSMATPHVAGAAALVKQKNPSWSNVQIRNHLKNTATSLGSTNLYGSGLVNAEAATR

SEQ ID NO: 57414 - protein, 269 aa, Unidentified
AQSVPWGISRVQAPAAHNRGLWGRGVKVAVLDTGISTHPDLNIRGGASFVPGEPSTQDGNGHGTHVAGTIAALNNSIGVLGVAPSAELYAVKVLGASGAGSVSSIAQGLEWAGNNGMHVANLSLGSPSPSATLEQAVNSATSRGVLVVAASGNSGAGSISYPARYANAMAVGATDQNNNRASFSQYGAGLDIVAPGVNVQSTYIQSAYASLNGTSMATPHVAGAAALVKQKNPSWSNVQIRNHLKNTATSLGSTNLYGSGLVNAEAATR

SEQ ID NO: 57415 - protein, 269 aa, Unidentified
AQSVPWGISRVQAPAAHRRRLTGRGVKVAVLDTGISTHPDLNIRGGASFVPGEPSTQDGNGHGTHVAGTIAALDNSIGVLGVAPSAELYAVKVLGASGSGSVSSIAQGLEWAGNNGMHVANLSLGSPSPSATLEQAVNSATSRGVLVVAASGNSGAGSISYPARYANAMAVGATDQDNNRASFSQYGAGLDIVAPGVNVQSTYPGSTYASLNGTSMATPHVAGAAALVKQKNPSWSNVQIRNRLKNTATSLGSTNLYGSGLVNAEAATR

SEQ ID NO: 57416 - protein, 269 aa, Unidentified
AQSVPWGISRVQAPAAHNRRLTGSGVKVAVLDTGISTHPDLNIRGGASFVPGEPSTQDGNGHGTHVAGTIAALNNGIGVLGVAPSAELYAVKVLGASGSGSVSSIAQGLEWAGNNSMHVANLSLGSESPSATLEQAVNSATSRGVLVVAASGNSGAGSISYPARYANAMAVGATDQNNNRADFSQYGAGLDIVAPGVNVQSTYPGSTYASLNGTSMATPHVAGAAALVKQKNPSWSNVQIRNRLKNTATSLGSTNLYGSGLVNAEAATR

SEQ ID NO: 57417 - protein, 269 aa, Unidentified
AQSVPWGISRVQAPAAHNRGLAGSGVKVAVLDTGISTHPDLNIRGGASFVPGEPSTQDGNGHGTHVAGTIAALNNSIGVLGVAPSAELYAVKVLGASGNGNISSIAQGLEWAGNNGMHVANLSLGSPSPSATLEQAVNSATSRGVLVVAASGNSGAGSISYPARYANAMAVGATDQNNNRASFSQYGAGLDIVAPGVNVQSTYPGSTYASLNGTSMATPHVAGAALLVKQKNPSWSNVRIRNHLKNTATSLGSTNLYGSGLVNAEAATR

SEQ ID NO: 57418 - protein, 269 aa, Unidentified
AQSVPWGISRVQAPAAHNRGLTGSGVKVAVLDTGISTHPDLNIRGGASFVPGEPSTQDGEGHGTHVAGTIAALNNGIGVLGVAPSAELYAVKVLGASGSGSVSSIAQGLEWAGNNDMHVANLSLGSESPSATLEQAVNSATSRGVLVVAASGNSGADSISYPARYANAMAVGATDQNNNRASFSQYGAGLDIVAPGVNVQSTYPGSTYASLNGTSMATPHVAGAAALVKQKNPSWSNVQIRNRLKNTATSLGSTNLYGSGLVNAEAATR

SEQ ID NO: 57419 - protein, 269 aa, Unidentified
AQSVPWGISRVQAPAAHNRGLAGSGVKVAVLDTGISTHPDLNIRGGASFVPGEPSTQDGNGHGTHVAGTIAALNNSIGVLGVAPSAELYAVKVLGASGAGNLSSIAQGLEWAGNNGMHVANLSLGSPSPSATLEQAVNSATSRGVLVVAASGNSGAGSISYPARYANAMAVGATDQNNNRASFSQYGAGLDIVAPGVNVQSTYPGSTYASLNGTSMATPHVAGAAMLVKQKNPSWSNVSIRNHLKNTATSLGSTNLYGSGLVNAEAATR

SEQ ID NO: 57420 - protein, 269 aa, Unidentified
AQSVPWGISRVQAPAAHNRGLTGGGVKVAVLDTGISTHPDLNIRGGASFVPGEPSTQDGNGHGTHVAGTIAALNNNIGVLGVAPSAELYAVKVLAASGNGSVSSIANGLEWAGNNGMHVANLSLGSPSPSATLEQAVNSATSRGVLVVAASGNSGAGSISYPARYANAMAVGATDQNNNRASFSQYGAGLDIVAPGVNVQSTYPGSTYASQNGTSMATPHVAGAAALVKQKNPSWSNVQIRNHLKNTATSLGSTNLYGSGLVNAEAATR

SEQ ID NO: 57421 - protein, 269 aa, Unidentified
AQSVPWGISRVQAPAAHNRRLTGSGVKVAVLDTGISTHPDLNIRGGASFVPGEPSTQDGNGHGTHVAGTIAALNNSIGVLGVAPSAELYAVKVLGASGAGALSSIAQGLEWAGNNGMHVANLSLGSPSPSATLEQAVNSATSRGVLVVAASGNSGAGSISYPARYANAMAVGATDQNNNRASFSQYGAGLDIVAPGVNVQSTYPGSTYASLNGTSMATPHVAGAAVLVKQKNPSWRNVQIRNHLKNTATSLGSTNLYGSGLVNAEAATR

SEQ ID NO: 57422 - protein, 269 aa, Unidentified
AQSVPWGISRVQAPAAHNRKLTGSGVKVAVLDTGISTHPDLNIRGGASFVPGEPSTQDGNGHGTHVAGTIAALNNNIGVLGVAPSAELYAVKVLGASGDGSVSSIAQGLEWAGNNGMHVANLSLGLPSPSATLEQAVNSATSRGVLVVAASGNSGAGSISYPARYANAMAVGATDQNNNRASFSQYGAGLDIVAPGVNVQSTYPGSTYASENGTSMATPHVAGAAALVKQKNPRWSNVQIRNHLKNTATSLGSTNLYGSGLVNAEAATR

SEQ ID NO: 57423 - protein, 269 aa, Unidentified
AQSVPWGISRVRAPAAHNRGLTGSGVKVAVLDTGISTHPDLNIRGGASFVPGEPSTQDGNGHGTHVAGTIAALDNSIGVLGVAPSAELYAVKVLGASGSGATSSIAQGLEWAGNNGMHVANLSLGSPTPSATLEQAVNSATSRGVLVVAASGNSGAGSISYPARYANAMAVGATDQNNNRASFSQYGAGLDIVAPGVNVQSTYSGSTYASLNGTSSATPHVAGAAALVKQKNPSWSNVRIRNHLKNTATSLGSTNLYGSGLVNAEAATR

SEQ ID NO: 57424 - protein, 269 aa, Bacillus lentus
AQSVPWGIRRVQAPAAHNLGLTGSGVKVAVLDTGISTHPDLRIRGGASFVPGEPSTQDGDGHGTHVAGTIAALDNSIGVLGVAPSAELYAVKVLGASGSGSVSSIAQGLEWAGNNGMHVANLSLGSPSPSATLEQAVNSATSRGVLVVAASGNSGAGSISYPARYANAMAVGATDQNNNRASFSQYGPGLDIVAPGVNVQSTYPGSTYASLNGTSMATPHVAGAAALVKQKNPSWSNVQIRNHLKNTATSLGSTNLYGSGLVNAEAATR

SEQ ID NO: 57425 - protein, 269 aa, Bacillus lentus
AQTVPWGIRRVQAPAAHNLGLTGSGVKVAVLDTGISTHPDLRIRGGASFVPGEPSTQDGDGHGTHVAGTIAALNNSIGVLGVAPSAELYAVKVLGASGSGSVSSIAQGLEWAGNNGMHVANLSLGSPSPSATLEQAVNSATSRGVLVVAASGNSGAGSISYPARYANAMAVGATDQNNNRASFSQYGAGLDIVAPGVNVQSTYPGSTYASLNGTSMATPHVAGAAALVKQKNPSWSNVQIRNHLKNTATSLGSTNLYGSGLVNAEAATQ

SEQ ID NO: 57426 - protein, 269 aa, Bacillus sp.
AQSVPWGISRVQAPAAHNRGLTGSGVKVAVLDTGISTHPDLNIRGGASFVPGEPSTQDGNGHGTHVAGTIAALDNSIGVLGVAPSAELYAVKVLGASGSGAISSIAQGLEWAGNNGMHVANLSLGSPSPSATLEQAVNSATSRGVLVVAASGNEGAGSIDYPARYANAMAVGATDQNNNRASFSQYGAGLDIVAPGVNVQSTYPISTYASLNGTSMATPHVAGAAALVKQKNPSWSNVQIRNHLKNTATSLGSTNLYGSGLVNAEAATR

SEQ ID NO: 57427 - protein, 269 aa, Unidentified
AQSVPWGISRVQAPASHNRGLAGSGVKVAVLDTGISTHPDLNIRGGASFVPGEPSTQDGNGHGTHVAGTIAALNNSIGVLGVAPSAELYAVKVLGASGAGSISSIAQGVEWAGNNGMHVANLSLGSPSPSATLEQAVNSATSRGVIVVAASGNSGAGSISYPARYANAMAVGATDQNNNRASFSQYGAGLDIVAPGVNVQSTYPGSTYASLNGTSMATPHVAGAAALVKQKNPSWSNVQIRNHLKNTATSLGSTNLYGSGLVNAEAATR

SEQ ID NO: 57428 - protein, 269 aa, Unidentified
AQVVPWGISRVQAPAAHNRGLTGSGVKVAVLDTGISTHEDLNIRGGASFVPGEPSTQDGNGHGTHVAGTIAALDNSIGVLGVAPSAELYAVKVLGASGSGSVSSIAQGLEWAGNNRMHVANLSLGRPSPSATLEQAVNSATSRGVLVVAASGNSGAGSISYPARYANAMAVGATDQNNNRASFSQYGAGLDIVAPGVNVQSTYPGSTYKSLNGTSMATPHVAGAAALVKQKNPSWSNVQIRNHLKNTATSLGSTNLYGSGLVNAEAATR

SEQ ID NO: 57429 - protein, 269 aa, Unidentified
AQSVPWGISRVQAPAAHNRKLTGGGVKVAVLDTGISTHPDLNIRGGASFVPGEPSTQDGEGHGTHVAGTIAALNNSIGVLGVAPSAEVYAVKVLAASGQGSVSSIAQGLEWAGLNGMHVANLSLGSPSPSATLEQAVNSATSRGVLVVAASGNSGAGSISYPARYANAMAVGATDQNNNRASFSQYGAGLDIVAPGVNVQSTYPGSTYASLNGTSSATPHVAGAAALVKQKNPSWSNVQIRNHLKNTATSLGSTNLYGSGLVNAEAATR

SEQ ID NO: 57430 - protein, 269 aa, Unidentified
AQSVPWGISRVQAPAAHNRGLTGRGVKVAVLDTGISTHPDLNIRGGASFVPGEPSTQDGNGHGTHVAGTIAALNNGIGVLGVAPSAELYAVKVLGASGSGSVSSIAQGLEWAGNNSMHVANLSLGSESPSATLEQAVNSATSRGVLVVAASGNSGAGSISYPARYANAMAVGATDQNNNRASFSQYGAGLDIVAPGVNVQSTYPGSTYASLNGTSMATPHVAGAAALVKQKNPSWSNVRIRNRLKNTATSLGSTNLYGSGLVNAEAATR

SEQ ID NO: 57431 - protein, 269 aa, Unidentified
AQSVPWGISRVQAPAAHNRRLWGRGVKVAVLDTGISTHPDLRIRGGASFVPGEPSTQDGNGHGTHVAGTIAALNNSIGVLGVAPSAELYAVKVLGASGAGSVSSIAQGLEWAGNNGMHVANLSLGSPSPSATLEQAVNSATSRGVLVVAASGNSGAGSISYPARYANAMAVGATDQNNNRASFSQYGAGLDIVAPGVNVQSTYIGSTYASLNGTSMATPHVAGAAALVKQKNPSWSNVQIRNHLKNTATSLGSTNLYGSGLVNAEAATR

SEQ ID NO: 57432 - protein, 269 aa, Unidentified
AQSVPWGISRVQAPAAHNRGLTGGGVKVAVLDTGISTHPDLNIRGGASFVPGEPSTQDGNGHGTHVAGTIAALNNNIGVLGVAPSAELYAVKVLGASGNGSVSSIAQGLEWAGNNGMHVANLSLGAPSPSATLEQAVNSATSRGVLVVAASGNSGAGSISYPARYANAMAVGATDQNNNRASFSQYGAGLDIVAPGVNVQSTYPGSTYASQNGTSMATPHVAGAAALVKQKNPSWSNVQIRNHLKNTATRLGSTNLYGSGLVNAEAATR

SEQ ID NO: 57433 - protein, 269 aa, Unidentified
AQSVPWGISRVQAPAAHNRGLRGSGVKVAVLDTGISTHPDLNIRGGASFVPGEPSTQDGNGHGTHVAGTIAALNNSIGVLGVAPSAELYAVKVLGASGTGGISSIAQGLEWAGNNGMHVANLSLGSPSPSATLEQAVNSATSRGVLVVAASGNSGAGSISYPARYANAMAVGATDQNNNRASFSQYGAGLDIVAPGVNVQSTYPGSTYASLNGTSMATPHVAGAAVLVKQKNPSWSNVSIRNHLKNTATSLGSTNLYGSGLVNAEAATR

SEQ ID NO: 57434 - protein, 269 aa, Unidentified
AQSVPWGISRVQAPAAHNRGLTGSGVKVAVLDTGISTHPDLNIRGGASFVPGEPSTQDGNGHGTHVAGTIAALNNSIGVLGVAPSAELYAVKVLGASGGGAISSIAQGLEWAGNNGMHVANLSLGSPSPSATLEQAVNSATSRGVLVVAASGNSGAGSISYPARYANAMAVGATDQNNNRASFSQYGAGLDIVAPGVNVQSTYPGSTYASLNGTSMATPHVAGAAVLVKQKNPSWSNVRIRNRLKNTATSLGSTNLYGSGLVNAEAATR

SEQ ID NO: 57435 - protein, 269 aa, Unidentified
AQSVPWGISRVQAPAAHNRGLWGSGVKVAVLDTGISTHPDLRITGGASFVPGEPSTQDGNGHGTHVAGTIAALNNSIGVLGVAPSAELYAVKVLGASGAGSVSSIAQGLEWAGNNGMHVANLSLGSPSPSATLEQAVNSATSRGVLVVAASGNSGAGSISYPARYANAMAVGATDQNNNRASFSQYGAGLDIVAPGVNVQSTYIQSTYASLNGTSMATPHVAGAAALVKQKNPSWSNVQIRNHLKNTATSLGSTNLYGSGLVNAEAATR

SEQ ID NO: 57436 - protein, 269 aa, Unidentified
AQSVPWGISRVQAPAAHNRGLQGSGVKVAVLDTGISTHPDLNIRGGASFVPGEPSTQDGNGHGTHVAGTIAALNNSIGVLGVAPSAELYAVKVLGASGNGNISSIAQGLEWAGNNGMHVANLSLGSPSPSATLEQAVNSATSRGVLVVAASGNSGAGSISYPARYANAMAVGATDQNNNRASFSQYGAGLDIVAPGVNVQSTYPGSTYASLNGTSMATPHVAGAAMLVKQKNPSWSNVRIRNHLKNTATSLGSTNLYGSGLVNAEAATR

SEQ ID NO: 57437 - protein, 269 aa, Unidentified
AQSVPWGISRVQAPAAHNRGLQGSGVKVAVLDTGISTHPDLNIRGGASFVPGEPSTQDGNGHGTHVAGTIAALNNSIGVLGVAPSAELYAVKVLGASGAGALSSIAQGLEWAGNNGMHVANLSLGSPSPSATLEQAVNSATSRGVLVVAASGNSGAGSISYPARYANAMAVGATDQNNNRASFSQYGAGLDIVAPGVNVQSTYPGSTYASLNGTSMATPHVAGAALLVKQKNPSWSNVRIRNHLKNTATSLGSTNLYGSGLVNAEAATR

SEQ ID NO: 57438 - protein, 269 aa, Unidentified
AQSVPWGISRVQAPAAHNRGLKGSGVKVAVLDTGISTHPDLNIRGGASFVPGEPSTQDGNGHGTHVAGTIAALNNSIGVLGVAPSAELYAVKVLGASGTGGISSIAQGLEWAGNNGMHVANLSLGSPSPSATLEQAVNSATSRGVLVVAASGNSGAGSISYPARYANAMAVGATDQNNNRASFSQYGAGLDIVAPGVNVQSTYPGSTYASLNGTSMATPHVAGAAVLVKQKNPSWSNVSIRNHLKNTATSLGSTNLYGSGLVNAEAATR

SEQ ID NO: 57439 - protein, 269 aa, Unidentified
AQSVPWGISRVQAPAAHNRGLAGSGVKVAVLDSGISTHPDLNIRGGASFVPGEPSTQDGNGHGTHVAGTIAALNNSIGVLGVAPSAELYAVKVLGASGSGSVSSIAQGLEWAGLNRMHVANLSLGIPSPSATLEQAVNSATSRGVLVVAASGNSGAGSISYPARYANAMAVGATDQNNNRADFSQYGAGLDIVAPGVNVQSTYPGSTYASLNGTSMATPHVAGAAALVKQKNPSWSNVQIRNHLKNTATSLGSTNLYGSGLVNAEAATR

SEQ ID NO: 57440 - protein, 269 aa, Unidentified
AQSVPWGISRVQAPAAHNRGLRGSGVKVAVLDTGISTHPDLNIRGGASFVPGEPSTQDGNGHGTHVAGTIAALNNSIGVLGVAPSAELYAVKVLGASGNGALSSIAQGLEWAGNNGMHVANLSLGSPSPSATLEQAVNSATSRGVLVVAASGNSGAGSISYPARYANAMAVGATDQNNNRASFSQYGAGLDIVAPGVNVQSTYPGSTYASLNGTSMATPHVAGAAVLVKQKNPSWSNVSIRNHLKNTATSLGSTNLYGSGLVNAEAATR

SEQ ID NO: 57441 - protein, 269 aa, Unidentified
AQSVPWGISRVQAPAAHNRRLTGRGVKVAVLDTGISTHPDLNIRGGASFVPGEPSTQDGNGHGTHVAGTIAALNNDIGVLGVAPSAELYAVKVLGASGSGSVSSIAQGLEWAGNNDMHVANLSLGSPSPSATLEQAVNSATSRGVLVVAASGNSGAGSISYPARYANAMAVGATDQNNNRASFSQYGAGLDIVAPGVNVQSTYPGSTYASLNGTSMATPHVAGAAALVKQKNPSWSNVRIRDHLKNTATSLGSTNLYGSGLVNAEAATR

SEQ ID NO: 57442 - protein, 269 aa, Unidentified
AQSVPWGISRVQAPAAHNRKLLGFGVKVAVLDTGISTHPDLNIRGGASFVPGEPSTQDGNGHGTHVAGTIAALNNSIGVLGVAPSAELYAVKVLGASGSGSVSSIAQGLEWAGNNRMHVANLSLGSPSPSATLEQAVNSATSRGVLVVAASGNSGAGSIDYPARYANAMAVGATDQNNNRASFSQYGAGLDIVAPGVNVQSTYPGSAYASLNGTSMATPHVAGAAALVKQKNPSWSNVQIRNHLKNTATSLGSTNLYGSGLVNAEAATR

SEQ ID NO: 57443 - protein, 269 aa, Unidentified
AQSVPWGISRVQAPAAHNRGLKGSGVKVAVLDTGISTHPDLNIRGGASFVPGEPSTQDGNGHGTHVAGTIAALNNSIGVLGVAPSAELYAVKVLGASGTGGISSIAQGLEWAGNNGMHVANLSLGSPSPSATLEQAVNSATSRGVLVVAASGNSGAGSISYPARYANAMAVGATDQNNNRASFSQYGAGLDIVAPGVNVQSTYPGSTYASLNGTSMATPHVAGAAMLVKQKNPSWSNVRIRNHLKNTATSLGSTNLYGSGLVNAEAATR

SEQ ID NO: 57444 - protein, 269 aa, Unidentified
AQSVPWGISRVQAPAAHNRRLTGRGVKVAVLDTGISTHPDLNIRGGASFVPGEPSTQDGNGHGTHVAGTIAALNNDIGVLGVAPSAELYAVKVLGASGSGSVSSIAQGLEWAGNNSMHVANLSLGSESPSATLEQAVNSATSRGVLVVAASGNSGAGSISYPARYANAMAVGATDQNNNRASFSQYGAGLDIVAPGVNVQSTYPGSTYASLNGTSMATPHVAGAAALVKQKNPSWSNVRIRNHLKNTATSLGSTNLYGSGLVNAEAATR

SEQ ID NO: 57445 - protein, 269 aa, Unidentified
AQSVPWGISRVQAPAAHNRGLYGSGVKVAVLDTGISTHPDLNIRGGASFVPGEPSTQDGNGHGTHVAGTIAALNNSIGVLGVAPSAELYAVKVLGASGTGGLSSIAQGLEWAGNNGMHVANLSLGSPSPSATLEQAVNSATSRGVLVVAASGNSGAGSISYPARYANAMAVGATDQNNNRASFSQYGAGLDIVAPGVNVQSTYPGSTYASLNGTSMATPHVAGAATLVKQKNPSWSNVRIRNHLKNTATSLGSTNLYGSGLVNAEAATR

SEQ ID NO: 57446 - protein, 269 aa, Unidentified
AQSVPWGISRVQAPAAHNRGLTGSGVKVAVLDTGISTHPDLNIRGGASFVPGEPSTQDGEGHGTHVAGTIAALNNGIGVLGVAPSAELYAVKVLGASGSGSVSSIAQGLEWAGNNSMHVANLSLGSPSPSATLEQAVNSATSRGVLVVAASGNSGAGSISYPARYANAMAVGATDQNNNRADFSQYGAGLDIVAPGVNVQSTYPGSTYASLNGTSMATPHVAGAAALVKQKNPSWSNVQIRDRLKNTATSLGSTNLYGSGLVNAEAATR

SEQ ID NO: 57447 - protein, 269 aa, Unidentified
AQSVPWGISRVQAPAAHNRGLTGRGVKVAVLDTGISTHPDLNIRGGASFVPGEPSTQDGNGHGTHVAGTIAALNNGIGVLGVAPSAELYAVKVLGASGSGSVSSIAQGLEWAGNNSMHVANLSLGSPSPSATLEQAVNSATSRGVLVVAASGNSGAGSISYPARYANAMAVGATDQNNNRADFSQYGAGLDIVAPGVNVQSTYPGSTYASLNGTSMATPHVAGAAALVKQKNPSWSNVRIRDHLKNTATSLGSTNLYGSGLVNAEAATR

SEQ ID NO: 57448 - protein, 269 aa, Unidentified
AQSVPWGISRVQAPAAHNRKLLGFGVKVAVLDTGISTHPDLNIRGGASFVPGEPSTQDGNGHGTHVAGTIAALNNSIGVLGVAPSAELYAVKVLGASGSGSVSSIAQGLEWAGNNRMHVANLSLGDPSPSATLEQAVNSATSRGVLVVAASGNSGAGSIDYPARYANAMAVGATDQNNNRASFSQYGAGLDIVAPGVNVQSTYPGSTYASLNGTSMATPHVAGAAALVKQKNPSWSNVQIRNHLKNTATSLGSTNLYGSGLVNAEAATR

SEQ ID NO: 57449 - protein, 269 aa, Unidentified
AQSVPWGISRVQAPAAHNRGLRGSGVKVAVLDTGISTHPDLNIRGGASFVPGEPSTQDGNGHGTHVAGTIAALNNSIGVLGVAPSAELYAVKVLGASGGGAISSIAQGLEWAGNNGMHVANLSLGSPSPSATLEQAVNSATSRGVLVVAASGNSGAGSISYPARYANAMAVGATDQNNNRASFSQYGAGLDIVAPGVNVQSTYPGSTYASLNGTSMATPHVAGAAMLVKQKNPSWSNVSIRNHLKNTATSLGSTNLYGSGLVNAEAATR

SEQ ID NO: 57450 - protein, 269 aa, Unidentified
AQSVPWGISRVQAPAAHNRKLTGSGVKVAVLDTGISTHPDLNIRGGASFVPGEPSTQDGEGHGTHVAGTIAALNNSIGVLGVAPSAELYAVKVLGASGSGSVSSIAQGLEWAGLNGMHVANLSLGIPSPSATLEQAVNSATSRGVLVVAASGNSGAGSISYPARYANAMAVGATDQNNNRASFSQYGAGLDIVAPGVNVQSTYPGSAYASNNGTSMATPHVAGAAALVKQKNPSWSNVQIRNHLKNTATSLGSTNLYGSGLVNAEAATR

SEQ ID NO: 57451 - protein, 269 aa, Unidentified
AQSVPWGISRVQAPAAHNRGLTGRGVKVAVLDTGISTHPDLNIRGGASFVPGEPSTQDGNGHGTHVAGTIAALNNDIGVLGVAPSAELYAVKVLGASGSGSVSSIAQGLEWAGNNDMHVANLSLGSESPSATLEQAVNSATSRGVLVVAASGNSGAGSISYPARYANAMAVGATDQNNNRADFSQYGAGLDIVAPGVNVQSTYPGSTYASLNGTSMATPHVAGAAALVKQKNPSWSNVQIRNRLKNTATSLGSTNLYGSGLVNAEAATR

SEQ ID NO: 57452 - protein, 269 aa, Unidentified
AQSVPWGISRVRAPAAHNRGLTGSGVKVAVLDTGISTHPDLNIRGGASFVPGEPSTQDGNGHGTHVAGTIAALDNSIGVLGVAPSAELYAVKVLGASGSGATSSIAQGLEWAGNNGMHVANLSLGSPTPSATLEQAVNSATSRGVLVVAASGNSGAGSISYPARYANAMAVGATDQNNNRASFSQYGAGLDIVAPGVNVQSTYPGSTYVSLNGTSSATPHVAGAAALVKQKNPSWSNVRIRNHLKNTATSLGSTNLYGSGLVNAEAATR

SEQ ID NO: 57453 - protein, 269 aa, Unidentified
AQSVPWGISRVQAPAAHNRGLQGSGVKVAVLDTGISTHPDLNIRGGASFVPGEPSTQDGNGHGTHVAGTIAALNNSIGVLGVAPSAELYAVKVLGASGGGNISSIAQGLEWAGNNGMHVANLSLGSPSPSATLEQAVNSATSRGVLVVAASGNSGAGSISYPARYANAMAVGATDQNNNRASFSQYGAGLDIVAPGVNVQSTYPGSTYASLNGTSMATPHVAGAALLVKQKNPSWSNVRIRNHLKNTATSLGSTNLYGSGLVNAEAATR

SEQ ID NO: 57454 - protein, 269 aa, Unidentified
AQSVPWGISRVQAPAAHNRGLYGSGVKVAVLDTGISTHPDLNIRGGASFVPGEPSTQDGNGHGTHVAGTIAALNNSIGVLGVAPSAELYAVKVLGASGGGNISSIAQGLEWAGNNGMHVANLSLGSPSPSATLEQAVNSATSRGVLVVAASGNSGAGSISYPARYANAMAVGATDQNNNRASFSQYGAGLDIVAPGVNVQSTYPGSTYASLNGTSMATPHVAGAAVLVKQKNPSWSNVWIRNHLKNTATSLGSTNLYGSGLVNAEAATR

SEQ ID NO: 57455 - protein, 269 aa, Unidentified
AQSVPWGISRVQAPAAHNRRLTGSGVKVAVLDTGISTHPDLNIRGGASFVPGEPSTQDGNGHGTHVAGTIAALNNGIGVLGVAPSAELYAVKVLGASGSGSVSSIAQGLEWAGNNDMHVANLSLGSPSPSATLEQAVNSATSRGVLVVAASGNSGAGSISYPARYANAMAVGATDQNNNRADFSQYGAGLDIVAPGVNVQSTYPGSTYASLNGTSMATPHVAGAAALVKQKNPSWSNVRIRDHLKNTATSLGSTNLYGSGLVNAEAATR

SEQ ID NO: 57456 - protein, 269 aa, Unidentified
AQSVPWGISRVQAPAAHNRGLTGSGVKVAVLDTGISTHPDLNIRGGASFVPGEPSTQDGNGHGTHVAGTIAALNNSIGVLGVAPSAELYAVKVLGADGRGAISSIAQGLEWAGNNGMHVANLSLGSPSPSATLEQAVNSATSRGVLVVAASGNSGASSISYPARYANAMAVGATDQNNNRASFSQYGAGLDIVAPGVNVQSTYPGSTYASLNGTSMATPHVAGAAALVKQKNPSWSNSQIRNHLKNTATSLGSTNLYGSGLVNAEAATR

SEQ ID NO: 57457 - protein, 269 aa, Unidentified
AQSVPWGISRVQAPAAHRRGLRGRGVKVAVLDTGISTHPDLNIRGGASFVPGEPSTQDGNGHGTHVAGTIAALDNSIGVLGVAPDAELYAVKVLGASGSGSVSSIAQGLEWAGNNGMHVANLSLGSPSPSATLEQAVNSATSRGVLVVAASGNSGAGSISYPARYANAMAVGATDQNNNRASFSQYGAGLDIVAPGVNVQSTYPGSTYASLNGTSMATPHVAGAAALVKQKNPSWSNVQIRNRLKNTATSLGSTNLYGSGLVNAEAATR

SEQ ID NO: 57458 - protein, 269 aa, Lederbergia lentus
AQSVPWGISRVQAPAAHNRGLTGSGVKVAVLDTGISTHPDLNIRGGASFVPGEPSTQDGNGHGTHVAGTIAALNNSIGVLGVAPSAELYAVKVLGADGEGAISSIAQGLEWAGNNGMHVANLSLGSPSPSATLEQAVNSATSRGVLVVAASGNSGASSIAYPARYANAMAVGATDQNNNRASFSQYGAGLDIVAPGVNVQSTYPGSTYASLNGTSMATPHVAGAAALVKQKNPSWSNVQIRNHLKNTATSLGSTNLYGSGLVNAEAATR

SEQ ID NO: 57459 - protein, 269 aa, Unidentified
AQSVPWGISRVQAPAAHNRGLAGSGVKVAVLDTGISTHPDLNIRGGASFVPGEPSTQDGNGHGTHVAGTIAALNNSIGVLGVAPSAELYAVKVLGASGGGAISSIAQGLEWAGNNGMHVANLSLGSPSPSATLEQAVNSATSRGVLVVAASGNSGAGSISYPARYANAMAVGATDQNNNRASFSQYGAGLDIVAPGVNVQSTYPGSTYASLNGTSMATPHVAGAALLVKQKNPSWSNVRIRNHLKNTATSLGSTNLYGSGLVNAEAATR

SEQ ID NO: 57460 - protein, 269 aa, Unidentified
AQSVPWGISRVQAPAAHNRGLAGRGVKVAVLDSGISTHPDLNIRGGASFVPGEPSTQDGNGHGTHVAGTIAALNNSIGVLGVAPSAELYAVKVLGASGSGSVSSIAQGLEWAGNNRMHVANLSLGSPSPSATLEQAVNSATSRGVLVVAASGNSGEGSISYPARYANAMAVGATDQNNNRADFSQYGAGLDIVAPGVNVQSTYPGSTYASLNGTSMATPHVAGAAALVKQKNPSWSNVQIRNHLKNTATSLGSTNLYGSGLVNAEAATR

SEQ ID NO: 57461 - protein, 269 aa, Unidentified
AQSVPWGISRVQAPAAHNRGLYGSGVKVAVLDTGISTHPDLNIRGGASFVPGEPSTQDGNGHGTHVAGTIAALNNSIGVLGVAPSAELYAVKVLGASGNGNLSSIAQGLEWAGNNGMHVANLSLGSPSPSATLEQAVNSATSRGVLVVAASGNSGAGSISYPARYANAMAVGATDQNNNRASFSQYGAGLDIVAPGVNVQSTYPGSTYASLNGTSMATPHVAGAALLVKQKNPSWSNVRIRNHLKNTATSLGSTNLYGSGLVNAEAATR

SEQ ID NO: 57462 - protein, 269 aa, Unidentified
AQSVPWGISRVQAPAAHNRRLTGSGVKVAVLDTGISTHPDLNIRGGASFVPGEPSTQDGNGHGTHVAGTIAALNNDIGVLGVAPSAELYAVKVLGASGSGSVSSIAQGLEWAGNNDMHVANLSLGSPSPSATLEQAVNSATSRGVLVVAASGNSGAGSISYPARYANAMAVGATDQNNNRADFSQYGAGLDIVAPGVNVQSTYPGSTYASLNGTSMATPHVAGAAALVKQKNPSWSNVRIRNRLKNTATSLGSTNLYGSGLVNAEAATR

SEQ ID NO: 57463 - protein, 269 aa, Unidentified
AQSVPWGISRVQAPAAHRRGLRGRGVKVAVLDTGISTHPDLDIRGGASFVPGEPSTQDGNGHGTHVAGTIAALDNSIGVLGVAPSAELYAVKVLGASGSGSVSSIAQGLEWAGNNGMHVANLSLGSPSPSATLEQAVNSATSRGVLVVAASGNSGAGSISYPARYANAMAVGATDQNNNRASFSQYGAGLDIVAPGVNVQSTYPGSTYASLNGTSMATPHVAGAAALVKQKNPSWSNVQIRNRLKNTATSLGSTNLYGSGLVNAEAATR

SEQ ID NO: 57464 - protein, 269 aa, Unidentified
AQSVPWGISRVQAPAAHNRGLAGSGVKVAVLDTGISTHPDLNIRGGASFVPGEPSTQDGNGHGTHVAGTIAALNNSIGVLGVAPSAELYAVKVLGASGTGNISSIAQGLEWAGNNGMHVANLSLGSPSPSATLEQAVNSATSRGVLVVAASGNSGAGSISYPARYANAMAVGATDQNNNRASFSQYGAGLDIVAPGVNVQSTYPGSTYASLNGTSMATPHVAGAATLVKQKNPSWSNVSIRNHLKNTATSLGSTNLYGSGLVNAEAATR

SEQ ID NO: 57465 - protein, 269 aa, Unidentified
AQSVPWGISRVQAPAAHNRRLTGSGVKVAVLDTGISTHPDLNIRGGASFVPGEPSTQDGEGHGTHVAGTIAALNNDIGVLGVAPSAELYAVKVLGASGSGSVSSIAQGLEWAGNNDMHVANLSLGSPSPSATLEQAVNSATSRGVLVVAASGNSGADSISYPARYANAMAVGATDQNNNRASFSQYGAGLDIVAPGVNVQSTYPGSTYASLNGTSMATPHVAGAAALVKQKNPSWSNVQIRDHLKNTATSLGSTNLYGSGLVNAEAATR

SEQ ID NO: 57466 - protein, 269 aa, Unidentified
AQSVPWGISRVQAPAAHNRGLRGSGVKVAVLDTGISTHPDLNIRGGASFVPGEPSTQDGNGHGTHVAGTIAALNNSIGVLGVAPSAELYAVKVLGASGGGAISSIAQGLEWAGNNGMHVANLSLGSPSPSATLEQAVNSATSRGVLVVAASGNSGAGSISYPARYANAMAVGATDQNNNRASFSQYGAGLDIVAPGVNVQSTYPGSTYASLNGTSMATPHVAGAATLVKQKNPSWSNVSIRNHLKNTATSLGSTNLYGSGLVNAEAATR

SEQ ID NO: 57467 - protein, 269 aa, Unidentified
AQSVPWGISRVQAPAAHNRRLWGSGVKVAVLDTGISTHPDLRITGGASFVPGEPSTQDGNGHGTHVAGTIAALNNSIGVLGVAPSAELYAVKVLGASGAGSVSSIAQGLEWAGNNGMHVANLSLGSPSPSATLEQAVNSATSRGVLVVAASGNSGAGSISYPARYANAMAVGATDQNNNRASFSQYGAGLDIVAPGVNVQSTYIGSTYASLNGTSMATPHVAGAAALVKQKNPSWSNVQIRNHLKNTATSLGSTNLYGSGLVNAEAATR

SEQ ID NO: 57468 - protein, 269 aa, Unidentified
AQSVPWGISRVQAPAAHNRGLTGGGVKVAVLDTGISTHPDLNIRGGASFVPGEPSTQDGNGHGTHVAGTIAALNNNIGVLGVAPSAELYAVKVLAASGNGSVSSIAGGLEWAGNNGMHVANLSLGSPSPSATLEQAVNSATSRGVLVVAASGNSGAGSISYPARYANAMAVGATDQNNNRADFSQYGAGLDIVAPGVNVQSTYPGSTYASLNGTSMATPHVAGAAALVKQKNPSWSNVQIRNHLKNTATSLGSTNLYGSGLVNAEAATR

SEQ ID NO: 57469 - protein, 269 aa, Unidentified
AQSVPWGISRVQAPAAHNRGLAGSGVKVAVLDTGISTHPDLNIRGGASFVPGEPSTQDGNGHGTHVAGTIAALNNSIGVLGVAPSAELYAVKVLGASGSGAISSIAQGLEWAGNNGMHVANTSLGSPSPSATLEQAVNSATSRGVLVVAASGNSGAGSISYPARYANAMAVGATDQNNNRASFSQYGAGLDIVAPGVNVQSTYPGSTYASLNGTSMATPHVAGAAVLVKQKNPSWSNVRIRNHLKNTATSLGSTNLYGSGLVNAEAATR

SEQ ID NO: 57470 - protein, 269 aa, Unidentified
AQSVPWGISRVQAPAAHNRKLTGSGVKVAVLDTGISTHPDLNIRGGASFVPGEPSTQDGEGHGTHVAGTIAALNNNIGVLGVAPSAELYAVKVLGASGNGSVSSIAQGLEWAGLNGMHVANLSLGSPSPSATLEQAVNSATSRGVLVVAASGNSGAGSISYPARYANAMAVGATDQNNNRADFSQYGAGLDIVAPGVNVQSTYPGSTYASLNGTSMATPHVAGAAALVKQKNPSWSNVQIRNHLKNTATSLGSTNLYGSGLVNAEAATR

SEQ ID NO: 57471 - protein, 269 aa, Unidentified
AQSVPWGISRVQAPAAHNRGLTGRGVKVAVLDTGISTHPDLNIRGGASFVPGEPSTQDGNGHGTHVAGTIAALNNSIGVLGVAPSAELYAVKVLGASGSGSVSSIAQGLEWAGLNRMHVANLSLGSPSPSATLEQAVNSATSRGVLVVAASGNSGEGSIDYPARYANAMAVGATDQNNNRADFSQYGAGLDIVAPGVNVQSTYPGSTYASLNGTSMATPHVAGAAALVKQKNPSWSNVQIRNHLKNTATSLGSTNLYGSGLVNAEAATR

SEQ ID NO: 57472 - protein, 269 aa, Unidentified
AQSVPWGISRVQAPAAHNRGLLGFGVKVAVLDTGISTHPDLNIRGGASFVPGEPSTQDGNGHGTHVAGTIAALNNNIGVLGVAPSAELYAVKVLGASGSGSVSSIAQGLEWAGNNGMHVANLSLGSPSPSATLEQAVNSATSRGVLVVAASGNSGAGSIDYPARYANAMAVGATDQNNNRASFSQYGAGLDIVAPGVNVQSTYPGSAYASENGTSMATPHVAGAAALVKQKNPSWSNVQIRNHLKNTATSLGSTNLYGSGLVNAEAATR

SEQ ID NO: 57473 - protein, 269 aa, Lederbergia lentus
AQSVPWGISRVQAPAAHNRGLTGSGVSVAVLDTGISTHPDLNIRGGASFVPGEPSTQDGNGHGTHVAGTIAALNNSIGVLGVAPSAELYAVKVLGADGEGAISSIAQGLEWAGNNGMHVANLSLGSPSPSATLEQAVNSATSRGVLVVAASGNSGASSISYPARYANAMAVGATDQNNNRASFSQYGAGLDIVAPGVNVQSTYPGSTYASLNGTSMATPHVAGAAALVKQKNPSWSNVQIRNHLKNTATSLGSTNLYGSGLVNAEAATR

SEQ ID NO: 57474 - protein, 269 aa, Unidentified
AQSVPWGISRVQAPAAHRRGLTGRGVKVAVLDTGISTHPDLNIRGGASFVPGEPSTQDGNGHGTHVAGTIAALDNNIGVLGVAPRAELYAVKVLGASGSGSVSSIAQGLEWAGNNGMHVANLSLGSPSPSATLEQAVNSATSRGVLVVAASGNSGAGSISYPARYANAMAVGATDQNNNRASFSQYGAGLDIVAPGVNVLSTYPGSTYASLNGTSMATPHVAGAAALVKQKNPSWSNVQIRNHLKNTATSLGSTNLYGSGLVNAEAATR

SEQ ID NO: 57475 - protein, 269 aa, Unidentified
AQSVPWGISRVQAPAAHNRKLLGSGVKVAVLDTGISTHPDLNIRGGASFVPGEPSTQDGEGHGTHVAGTIAALNNDIGVLGVAPSAELYAVKVLGASGSGSVSSIAQGLEWAGNNSMHVANLSLGSPSPSATLEQAVNSATSRGVLVVAASGNSGAGSISYPARYANAMAVGATDQNNNRASFSQYGAGLDIVAPGVNVQSTYPGSTYASLNGTSMATPHVAGAAALVKQKNPSWSNVQIRDHLKNTATSLGSTNLYGSGLVNAEAATR

SEQ ID NO: 57476 - protein, 269 aa, Unidentified
AQSVPWGISRVQAPAAHNRRLTGSGVKVAVLDTGISTHPDLNIRGGASFVPGEPSTQDGEGHGTHVAGTIAALNNDIGVLGVAPSAELYAVKVLGASGSGSVSSIAQGLEWAGNNDMHVANLSLGSESPSATLEQAVNSATSRGVLVVAASGNSGADSISYPARYANAMAVGATDQNNNRASFSQYGAGLDIVAPGVNVQSTYPGSTYASLNGTSMATPHVAGAAALVKQKNPSWSNVQIRNHLKNTATSLGSTNLYGSGLVNAEAATR

SEQ ID NO: 57477 - protein, 269 aa, Unidentified
AQSVPWGISRVQAPAAHRRRLTGSGVKVAVLDTGISTHPDLDITGGASFVPGEPSTQDGNGHGTHVAGTIAALNNSIGVLGVAPSAELYAVKVLGASGSGSVSSIAQGLEWAGNNGMHVANLSLGSPSPSATLEQAVNSATSRGVLVVAASGNSGAGSISYPARYANAMAVGATDQNNNRASFSQYGAGLDIVAPGVNVQSTYPGSTYASLNGTSMATPHVAGEAALVKQKNPSWRNVQIRNHLKNTATSLGSTNLYGSGLVNAEAATR

SEQ ID NO: 57478 - protein, 269 aa, Bacillus lentus
AQTVPWGIRRVQAPAAHNLGLTGSGVKVAVLDTGISTHPDLNIRGGASFVPGEPSTQDGDGHGTHVAGTIAALNNSIGVLGVAPSAELYAVKVLGASGSGSVSSIAQGLEWAGNNGMHVANLSLGSPSPSATLEQAVNSATSRGVLVVAASGNSGAGSISYPARYANAMAVGATDQNNNRASFSQYGAGLDIVAPGVNVQSTYPGSTYASLNGTSMATPHVAGAAALVKQKNPSWSNVRIRNHLKNTATSLGDTNLYGSGLVNAEAATR

SEQ ID NO: 57479 - protein, 269 aa, Unidentified
AQSVPWGISRVQAPAAHNRGLAGSGVKVAVLDTGISTHPDLNIRGGASFVPGEPSTQDGNGHGTHVAGTIAALNNSIGVLGVAPSAELYAVKVLGASGAGNISSIAQGLEWAGNNGMHVANLSLGSPSPSATLEQAVNSATSRGVLVVAASGNSGAGSISYPARYANAMAVGATDQNNNRASFSQYGAGLDIVAPGVNVQSTYPGSTYASLNGTSMATPHVAGAATLVKQKNPSWSNVRIRNHLKNTATSLGSTNLYGSGLVNAEAATR

SEQ ID NO: 57480 - protein, 269 aa, Unidentified
AQSVPWGISRVQAPAAHNRGLQGSGVKVAVLDTGISTHPDLNIRGGASFVPGEPSTQDGNGHGTHVAGTIAALNNSIGVLGVAPSAELYAVKVLGASGNGGISSIAQGLEWAGNNGMHVANLSLGSPSPSATLEQAVNSATSRGVLVVAASGNSGAGSISYPARYANAMAVGATDQNNNRASFSQYGAGLDIVAPGVNVQSTYPGSTYASLNGTSMATPHVAGAAVLVKQKNPSWSNVSIRNHLKNTATSLGSTNLYGSGLVNAEAATR

SEQ ID NO: 57481 - protein, 269 aa, Unidentified
AQSVPWGISRVQAPAAHNRGLTGSGVKVAVLDTGISTHPDLNIRGGASFVPGEPSTQDGNGHGTHVAGTIAALDNSIGVLGVAPSAELYAVKVLGASGAGAISSIAQGLEWAGNNGMHVANLSLGSPSPSATLEQAVNSATSRGVLVVAASGNSGAGSISYPARYANAMAVGATDQNNNRASFSQYGAGLDIVAPGVNVQSTYPGSTYASLNGTSMATPHVAGAAVLVKQKNPSWSNVRIRNHLKNTATSLGSTNLYGSGLVNAEAATR

SEQ ID NO: 57482 - protein, 269 aa, Unidentified
AQSVPWGISRVQAPAAHRRGLTGRGVKVAVLDTGISTHPDLNIRGGASFVPGEPSTQDGNGHGTHVAGTIAALDNSIGVLGVAPSAELYAVKVLGASGSGSVSSIAQGLEWAGNNGMHVANLSLGSPSPSATLEQAVNSATSRGVLVVAASGNSGAGSISYPARYANAMAVGATDQDNNRASFSQYGAGLDIVAPGVNVQSTYPGSAYASLNGTSMATPHVAGAAALVKQKNPSWSNVQIRNRLKNTATSLGSTNLYGSGLVNAEAATR

SEQ ID NO: 57483 - protein, 269 aa, Unidentified
AQSVPWGISRVQAPAAHNRGLKGSGVKVAVLDTGISTHPDLNIRGGASFVPGEPSTQDGNGHGTHVAGTIAALNNSIGVLGVAPSAELYAVKVLGASGTGNISSIAQGLEWAGNNGMHVANLSLGSPSPSATLEQAVNSATSRGVLVVAASGNSGAGSISYPARYANAMAVGATDQNNNRASFSQYGAGLDIVAPGVNVQSTYPGSTYASLNGTSMATPHVAGAAMLVKQKNPSWSNVRIRNHLKNTATSLGSTNLYGSGLVNAEAATR

SEQ ID NO: 57484 - protein, 269 aa, Unidentified
AQSVPWGISRVQAPAAHNRGLAGSGVKVAVLDTGISTHPDLNIRGGASFVPGEPSTQDGNGHGTHVAGTIAALNNSIGVLGVAPSAELYAVKVLGASGGGNISSIAQGLEWAGNNGMHVANLSLGSPSPSATLEQAVNSATSRGVLVVAASGNSGAGSISYPARYANAMAVGATDQNNNRASFSQYGAGLDIVAPGVNVQSTYPGSTYASLNGTSMATPHVAGAAMLVKQKNPSWSNVWIRNHLKNTATSLGSTNLYGSGLVNAEAATR

SEQ ID NO: 57485 - protein, 269 aa, Unidentified
AQSVPWGISRVQAPAAHNRGLTGRGVKVAVLDTGISTHPDLNIRGGASFVPGEPSTQDGEGHGTHVAGTIAALNNDIGVLGVAPSAELYAVKVLGASGSGSVSSIAQGLEWAGNNSMHVANLSLGSPSPSATLEQAVNSATSRGVLVVAASGNSGADSISYPARYANAMAVGATDQNNNRADFSQYGAGLDIVAPGVNVQSTYPGSTYASLNGTSMATPHVAGAAALVKQKNPSWSNVQIRNHLKNTATSLGSTNLYGSGLVNAEAATR

SEQ ID NO: 57486 - protein, 269 aa, Unidentified
AQSVPWGISRVQAPAAHNRGLTGSGVKVAVLDTGISTHPDLNIRGGASFVPGEPSTQDGNGHGTHVAGTIAALNNNIGVLGVAPSAELYAVKVLSASGNGSVSSIAGGLEWAGNNGMHVANLSLGSPSPSATLEQAVNSATSRGVLVVAASGNSGADSISYPARYANAMAVGATDQNNNRASFSQYGAGLDIVAPGVNVQSTYPGSTYASQNGTSMATPHVAGAAALVKQKNPSWSNVQIRNHLKNTATSLGSTNLYGSGLVNAEAATR

SEQ ID NO: 57487 - protein, 269 aa, Unidentified
AQSVPWGISRVQAPASHNRGLAGSGVKVAVLDTGISTHPDLNIRGGASFVPGEPSTQDGNGHGTHVAGTIAALNNSIGVLGVAPSAELYAVKVLGASGGGALSSIAQGLEWAGNNGMHVANLSLGSPSPSATLEQAVNSATSRGVIVVAASGNSGAGSISYPARYANAMAVGATDQNNNRASFSQYGAGLDIVAPGVNVQSTYPGSTYASLNGTSMATPHVAGAAALVKQKNPSWSNVQIRNHLKNTATSLGSTNLYGSGLVNAEAATR

SEQ ID NO: 57488 - protein, 269 aa, Unidentified
AQSVPWGISRVQAPAAHNRGLLGSGVKVAVLDTGISFHPDLNIRGGRSFVPGEPSTQDGEGHGTHVAGTIAALNNSIGVLGVAPSAELYAVKVLGASSSGSVSSIAQGLEWAGNNGMHVANLSLGSPSPSATLEQAVNSATSRGVLVVAASGNSGAGSISYPARYANAMAVGATDQNNNKASFSQYGAGLDIVAPGVNVQSTYPGSTYASLNGTSMATPHVAGAAALVKQKNPSWSNVQIRNHLKNTATSLGSTNLYGSGLVNAEAATR

SEQ ID NO: 57489 - protein, 269 aa, Unidentified
AQSVPWGISRVQAPAAHRRGLTGRGVKVAVLDTGISTHPDLNIRGGASFVPGEPSTQDGNGHGTHVAGTIAALDNSIGVLGVAPSAELYAVKVLGASGSGSVSSIAQGLEWAGNNGMHVANLSLGSPSPSATLEQAVNSATSRGVLVVAASGNSGAGSISYPARYANAMAVGATDQNNNRASFSQYGAGLDIVAPGVNVQSTYPGSTYASENGTSMATPHVAGAAALVKQKNPSWSNVQIRNRLKNTATSLGSTNLYGSGLVRAEAATR

SEQ ID NO: 57490 - protein, 269 aa, Unidentified
AQSVPWGISRVQAPAAHNRGLAGRGVKVAVLDSGISTHPDLNIRGGASFVPGEPSTQDGEGHGTHVAGTIAALNNSIGVLGVAPSAELYAVKVLGASGSGSVSSIAQGLEWAGNNRMHVANLSLGSPSPSATLEQAVNSATSRGVLVVAASGNSGEGSISYPARYANAMAVGATDQNNNRASFSQYGAGLDIVAPGVNVQSTYPGSTYASLNGTSMATPHVAGAAALVKQKNPSWSNVQIRNHLKNTATSLGSTNLYGSGLVNAEAATR

SEQ ID NO: 57491 - protein, 269 aa, Unidentified
AQSVPWGISRVQAPAAHNRGLAGSGVKVAVLDTGISTHPDLNIRGGASFVPGEPSTQDGNGHGTHVAGTIAALNNSIGVLGVAPSAELYAVKVLGASGTGGISSIAQGLEWAGNNGMHVANLSLGSPSPSATLEQAVNSATSRGVLVVAASGNSGAGSISYPARYANAMAVGATDQNNNRASFSQYGAGLDIVAPGVNVQSTYPGSTYASLNGTSMATPHVAGAATLVKQKNPSWSNVRIRNHLKNTATSLGSTNLYGSGLVNAEAATR

SEQ ID NO: 57492 - protein, 269 aa, Unidentified
AQSVPWGISRVQAPAAHNRGLRGSGVKVAVLDTGISTHPDLNIRGGASFVPGEPSTQDGNGHGTHVAGTIAALNNSIGVLGVAPSAELYAVKVLGASGNGNISSIAQGLEWAGNNGMHVANLSLGSPSPSATLEQAVNSATSRGVLVVAASGNSGAGSISYPARYANAMAVGATDQNNNRASFSQYGAGLDIVAPGVNVQSTYPGSTYASLNGTSMATPHVAGAAVLVKQKNPSWSNVSIRNHLKNTATSLGSTNLYGSGLVNAEAATR

SEQ ID NO: 57493 - protein, 269 aa, Unidentified
AQSVPWGISRVQAPAAHRRGLTGRGVKVAVLDTGISTHPDLDIRGGASFVPGEPSTQDGNGHGTHVAGTIAALDNSIGVLGVAPSAELYAVKVLGASGSGSVSSIAQGLEWAGNNGMHVANLSLGSPSPSATLEQAVNSATSRGVLVLAASGNSGAGSISYPARYANAMAVGATDQNNNRASFSQYGAGLDIVAPGVNVQSTYPGSTYASLNGTSMATPHVAGAAALVKQKNPSWSNVQIRNRLKNTATSLGSTNLYGSGLVNAEAATR

SEQ ID NO: 57494 - protein, 269 aa, Unidentified
AQSVPWGISRVQAPAAHNRGLTGSGVKVAVLDTGISTHPDLNIRGGASFVPGEPSTQDGNGHGTHVAGTIAALNNSIGVLGVAPSAELYAVKVLGADGRGAISSIAQGLEWAGNNGMHVANLSLGSPSPSATLEQAVNSATSRGVLVVAASGNSGASSISYPARYANAMAVGATDQNNNRASFSQYGAGLDIVAPGVNVQSTYPGSTYASLNGTSMATPHVAGAAALVKQKNPSWSNVQIRNHLWNTATSLGSTNLYGSGLVNAEAATR

SEQ ID NO: 57495 - protein, 269 aa, Unidentified
AQSVPWGISRVQAPAAHNRGLTGGGVKVAVLDTGISTHPDLNIRGGASFVPGEPSTQDGNGHGTHVAGTIAALNNSIGVLGVAPSAELYAVKVLAASGNGSVSSIAGGLEWAGNNGMHVANLSLGAPSPSATLEQAVNSATSRGVLVVAASGNSGAGSISYPARYANAMAVGATDQNNNRADFSQYGAGLDIVAPGVNVQSTYPGSTYASLNGTSMATPHVAGAAALVKQKNPSWSNVQIRNHLKNTATSLGSTNLYGSGLVNAEAATR

SEQ ID NO: 57496 - protein, 269 aa, Unidentified
AQSVPWGISRVQAPAAHNRGLKGSGVKVAVLDTGISTHPDLNIRGGASFVPGEPSTQDGNGHGTHVAGTIAALNNSIGVLGVAPSAELYAVKVLGASGTGNISSIAQGLEWAGNNGMHVANLSLGSPSPSATLEQAVNSATSRGVLVVAASGNSGAGSISYPARYANAMAVGATDQNNNRASFSQYGAGLDIVAPGVNVQSTYPGSTYASLNGTSMATPHVAGAALLVKQKNPSWSNVSIRNHLKNTATSLGSTNLYGSGLVNAEAATR

SEQ ID NO: 57497 - protein, 269 aa, Unidentified
AQSVPWGISRVQAPAAHNRGLTGSGVKVAVLDTGISTHPDLNIRGGASFVPGEPSTQDGEGHGTHVAGTIAALNNNIGVLGVAPSAELYAVKVLGASGSASVSSIAQGLEWAGLNGMHVANLSLGSPSPSATLEQAVNSATRRGVLVVAASGNSGAGSISYPARYANAMAVGATDQNNNRASFSQYGAGLDIVAPGVNVQSTYPGSTYASLNGTSMATPHVAGAAALVKQKNPSWSNVQIRNHIKNTATSLGSTNLYGSGLVNAEAATR

SEQ ID NO: 57498 - protein, 269 aa, Unidentified
AQSVPWGISRVQAPAAHNRGLTGSGVKVAVLDTGISTHPDLNIRGGASFVPGEPSTQDGNGHGTHVAGTIAALNNSIGVLGVAPSAELYAVKVLPFTGAGAISSIAQGLEWAGNNGMHVANLSLGSPSPSATLEQAVNSATSRGVLVVAASGNSGAGSISYPARYANAMAVGATDQNNNRASFSQYGAGLDIVAPGVNVQSTYPGSTYASLNGTSMATPHVAGAAALVKQKNPSWSNVQIRNHLKNTATSLGSTNLYGSGLVNAEAATR

SEQ ID NO: 57499 - protein, 269 aa, Unidentified
AQSVPWGISRVQAPAAHNRRLTGSGVKVAVLDTGISTHPDLNIRGGASFVPGEPSTQDGNGHGTHVAGTIAALNNDIGVLGVAPSAELYAVKVLGASGSGSVSSIAQGLEWAGNNDMHVANLSLGSPSPSATLEQAVNSATSRGVLVVAASGNSGADSISYPARYANAMAVGATDQNNNRASFSQYGAGLDIVAPGVNVQSTYPGSTYASLNGTSMATPHVAGAAALVKQKNPSWSNVQIRDRLKNTATSLGSTNLYGSGLVNAEAATR

SEQ ID NO: 57500 - protein, 269 aa, Unidentified
AQSVPWGISRVQAPAAHNRGLTGRGVKVAVLDTGISTHPDLNIRGGASFVPGEPSTQDGNGHGTHVAGTIAALNNGIGVLGVAPSAELYAVKVLGASGSGSVSSIAQGLEWAGNNSMHVANLSLGSESPSATLEQAVNSATSRGVLVVAASGNSGAGSISYPARYANAMAVGATDQNNNRADFSQYGAGLDIVAPGVNVQSTYPGSTYASLNGTSMATPHVAGAAALVKQKNPSWSNVQIRDHLKNTATSLGSTNLYGSGLVNAEAATR

SEQ ID NO: 57501 - protein, 269 aa, Unidentified
AQSVPWGISRVQAPAAHNRGLRGSGVKVAVLDTGISTHPDLNIRGGASFVPGEPSTQDGNGHGTHVAGTIAALNNSIGVLGVAPSAELYAVKVLGASGAGNLSSIAQGLEWAGNNGMHVANLSLGSPSPSATLEQAVNSATSRGVLVVAASGNSGAGSISYPARYANAMAVGATDQNNNRASFSQYGAGLDIVAPGVNVQSTYPGSTYASLNGTSMATPHVAGAAMLVKQKNPSWSNVRIRNHLKNTATSLGSTNLYGSGLVNAEAATR

SEQ ID NO: 57502 - protein, 269 aa, Unidentified
AQSVPWGISRVQAPAAHNRGLQGSGVKVAVLDTGISTHPDLNIRGGASFVPGEPSTQDGNGHGTHVAGTIAALNNSIGVLGVAPSAELYAVKVLGASGTGGISSIAQGLEWAGNNGMHVANLSLGSPSPSATLEQAVNSATSRGVLVVAASGNSGAGSISYPARYANAMAVGATDQNNNRASFSQYGAGLDIVAPGVNVQSTYPGSTYASLNGTSMATPHVAGAALLVKQKNPSWSNVWIRNHLKNTATSLGSTNLYGSGLVNAEAATR

SEQ ID NO: 57503 - protein, 269 aa, Unidentified
AQSVPWGISRVQAPAAHNRRLTGRGVKVAVLDTGISTHPDLNIRGGASFVPGEPSTQDGNGHGTHVAGTIAALNNSIGVLGVAPSAELYAVKVLGASGGGSVSSIAQGLEWAGLNGMHVANLSLGAPSPSATLEQAVNSATSRGVLVVAASGNSGAGSISYPARYANAMAVGATDQNNNRASFSQYGAGLDIVAPGVNVQSTYPGSTYASQNGTSMATPHVAGAAALVKQKNPSWSNVQIRNHLKNTATSLGSTNLYGSGLVNAEAATR

SEQ ID NO: 57504 - protein, 269 aa, Unidentified
AQVVPWGISRVQAPAAHNRGLTGSGVKVAVLDTGISTHEDLNIRGGASFVPGEPSTQDGNGHGTHVAGTIAALDNSIGVLGVAPDAELYAVKVLGASGSGSVSSIAQGLEWAGNNRMHVANLSLGRPSPSATLEQAVNSATSRGVLVVAASGNSGAGSISYPARYANAMAVGATDQNNNRASFSQYGAGLDIVAPGVNVQSTYPGSTYASLNGTSMATPHVAGAAALVKQKNPSWSNVQIRNHLKNTATSLGSTNLYGSGLVNAEAATR

SEQ ID NO: 57505 - protein, 269 aa, Unidentified
AQSVPWGISRVQAPAAHNRRLTGRGVKVAVLDTGISTHPDLNIRGGASFVPGEPSTQDGEGHGTHVAGTIAALNNSIGVLGVAPSAELYAVKVLGASGSGSVSSIAQGLEWAGNNGMHVANLSLGSESPSATLEQAVNSATSRGVLVVAASGNSGAGSISYPARYANAMAVGATDQNNNRADFSQYGAGLDIVAPGVNVQSTYPGSTYASLNGTSMATPHVAGAAALVKQKNPSWSNVQIRDHLKNTATSLGSTNLYGSGLVNAEAATR

SEQ ID NO: 57506 - protein, 269 aa, Unidentified
AQSVPWGISRVQAPAAHNRGLTGRGVKVAVLDTGISTHPDLNIRGGASFVPGEPSTQDGEGHGTHVAGTIAALNNGIGVLGVAPSAELYAVKVLGASGSGSVSSIAQGLEWAGNNDMHVANLSLGSPSPSATLEQAVNSATSRGVLVVAASGNSGAGSISYPARYANAMAVGATDQNNNRASFSQYGAGLDIVAPGVNVQSTYPGSTYASLNGTSMATPHVAGAAALVKQKNPSWSNVQIRDRLKNTATSLGSTNLYGSGLVNAEAATR

SEQ ID NO: 57507 - protein, 269 aa, Unidentified
AQSVPWGISRVQAPAAHNRRLTGRGVKVAVLDTGISTHPDLNIRGGASFVPGEPSTQDGNGHGTHVAGTIAALNNSIGVLGVAPSAELYAVKVLSASGNGSVSSIAGGLEWAGLNGMHVANLSLGSPSPSATLEQAVNSATSRGVLVVAASGNSGAGSISYPARYANAMAVGATDQNNNRASFSQYGAGLDIVAPGVNVQSTYPGSTYASLNGTSMATPHVAGAAALVKQKNPSWSNVQIRNHLKNTATSLGSTNLYGSGLVNAEAATR

SEQ ID NO: 57508 - protein, 269 aa, Unidentified
AQSVPWGISRVQAPAAHNRGLAGSGVKVAVLDTGISTHPDLNIRGGASFVPGEPSTQDGNGHGTHVAGTIAALNNSIGVLGVAPSAELYAVKVLGASGNGNISSIAQGLEWAGNNGMHVANLSLGSPSPSATLEQAVNSATSRGVLVVAASGNSGAGSISYPARYANAMAVGATDQNNNRASFSQYGAGLDIVAPGVNVQSTYPGSTYASLNGTSMATPHVAGAAVLVKQKNPSWSNVSIRNHLKNTATSLGSTNLYGSGLVNAEAATR

SEQ ID NO: 57509 - protein, 269 aa, Unidentified
AQSVPWGISRVQAPAAHNRKLTGSGVKVAVLDTGISTHPDLNIRGGASFVPGEPSTQDGEGHGTHVAGTIAALNNNIGVLGVAPSAELYAVKVLGASGSGSVSSIAQGLEWAGLNGMHVANLSLGQPSPSATLEQAVNSATSRGVLVVAASGNSGAGSISYPARYANAMAVGATDQNNNRASFSQYGAGLDIVAPGVNVQSTYPGSAYASLNGTSMATPHVAGAAALVKQKNPSWSNVQIRNHLKNTATSLGSTNLYGSGLVNAEAATR

SEQ ID NO: 57510 - protein, 269 aa, Unidentified
AQSVPWGISRVQAPAAHRRGLTGRGVKVAVLDTGISTHPDLNIRGGASFVPGEPSTQDGNGHGTHVAGTIAALDNSIGVLGVAPSAELYAVKVLGASGSGSVSSIAQGLEWAGNNGMHVANLSLGSPSPSATLEQAVNSATSRGVLVVAASGNSGAGSISYPARYANAMAVGATDQDNNRASFSQYGAGLDIVAPGVNVQSTYPQSTYASLNGTSMATPHVAGAAALVKQKNPSWSNVQIRNRLKNTATSLGSTNLYGSGLVNAEAATR

SEQ ID NO: 57511 - protein, 269 aa, Unidentified
AQSVPWGISRVQAPAAHNRGLKGSGVKVAVLDTGISTHPDLNIRGGASFVPGEPSTQDGNGHGTHVAGTIAALNNSIGVLGVAPSAELYAVKVLGASGTGNISSIAQGLEWAGNNGMHVANLSLGSPSPSATLEQAVNSATSRGVLVVAASGNSGAGSISYPARYANAMAVGATDQNNNRASFSQYGAGLDIVAPGVNVQSTYPGSTYASLNGTSMATPHVAGAAVLVKQKNPSWSNVRIRNHLKNTATSLGSTNLYGSGLVNAEAATR

SEQ ID NO: 57512 - protein, 269 aa, Unidentified
AQSVPWGISRVQAPAAHNRGLRGSGVKVAVLDTGISTHPDLNIRGGASFVPGEPSTQDGNGHGTHVAGTIAALNNSIGVLGVAPSAELYAVKVLGASGNGAISSIAQGLEWAGNNGMHVANLSLGSPSPSATLEQAVNSATSRGVLVVAASGNSGAGSISYPARYANAMAVGATDQNNNRASFSQYGAGLDIVAPGVNVQSTYPGSTYASLNGTSMATPHVAGAAVLVKQKNPSWSNVRIRNHLKNTATSLGSTNLYGSGLVNAEAATR

SEQ ID NO: 57513 - protein, 269 aa, Unidentified
AQSVPWGISRVQAPAAHNRGLTGSGVKVAVLDTGISTHPDLNIRGGASFVPGEPSTQDGNGHGTHVAGTIAALNNRIGVLGVAPSAELYAVKVLGASGGGAISSIAQGLEWAGNNGMHVANLSLGSPSPSATLEQAVNSATSRGVLVVAASGNSGAGSISYPARYANAMAVGATDQNNNRASFSQYGAGLDIVAPGVNVQSTYPGSTYASLNGTSMATPHVAGAAVLVKQKNPSWSNVRIRNHLKNTATSLGSTNLYGSGLVNAEAATR

SEQ ID NO: 57514 - protein, 269 aa, Unidentified
AQSVPWGISRVQAPAAHNRGLTGSGVKVAVLDTGISTHPDLNIRGGASFVPGEPSTQDGNGHGTHVAGTIAALNNSIGVLGVAPSAELYAVKVLGADGRGAISSIAQGLEWAGNNGMHVANLSLGSPSPSATLEQAVNSATSRGVLVVAASGNSGASSISYPARYANAMAVGATDQNNNRASFSQYGAGLDIVAPGVNVQSTYPGSTYASLNGTSMATPHVAGAAALVKQKNPSWSNLQIRNHLKNTATSLGSTNLYGSGLVNAEAATR

SEQ ID NO: 57515 - protein, 269 aa, Bacillus lentus
AQSVPWGIRKVQAQAAHNRGLAGSGVKVAVLDTGISTHPDLNIRGGASFVPGEPSTQDGNGHGTHVAGTIAALNNSIGVLGVAPSAELYAVKVLGASGSGSVSSIAQGLEWAGNNGMHVANLSLGSPSPSATLEQAVNSATSRGVLVVAASGNSGAGSISAPASYANAMAVGATDQNNNRASFSQYGAGLDIVAPGVNVQSTYPGSTYASLNGTSMATPHVAGAAALVKQKNPSWSNVQIRNHLKNTATSLGSTNLYGSGLVNAEAATR

SEQ ID NO: 57516 - protein, 269 aa, Unidentified
AQSVPWGISRVQAPAAHNRGLTGRGVKVAVLDTGISTHPDLNIRGGASFVPGEPSTQDGEGHGTHVAGTIAALNNGIGVLGVAPSAELYAVKVLGASGSGSVSSIAQGLEWAGNNDMHVANLSLGSESPSATLEQAVNSATSRGVLVVAASGNSGAGSISYPARYANAMAVGATDQNNNRASFSQYGAGLDIVAPGVNVQSTYPGSTYASLNGTSMATPHVAGAAALVKQKNPSWSNVQIRDHLKNTATSLGSTNLYGSGLVNAEAATR

SEQ ID NO: 57517 - protein, 269 aa, Lederbergia lentus
AQSVPWGISRVQAPAAHNRGLTGSGVKVAVLDTGISTHPDLNIRGGASFVPGEPSTQDGNGHGTHVAGTIAALNNSIGVLGVAPSAELYAVKVLGADGEGAISSIAQGLEWAGNNGMHVANLSLGSPSDSATLEQAVNSATSRGVLVVAASGNSGASSISYPARYANAMAVGATDQNNNRASFSQYGAGLDIVAPGVNVQSTYPGSTYASLNGTSMATPHVAGAAALVKQKNPSWSNVQIRNHLKNTATSLGSTNLYGSGLVNAEAATR

SEQ ID NO: 57518 - protein, 269 aa, Unidentified
AQSVPWGISRVQAPAAHNRGLYGSGVKVAVLDTGISTHPDLNIRGGASFVPGEPSTQDGNGHGTHVAGTIAALNNSIGVLGVAPSAELYAVKVLGASGAGNISSIAQGLEWAGNNGMHVANLSLGSPSPSATLEQAVNSATSRGVLVVAASGNSGAGSISYPARYANAMAVGATDQNNNRASFSQYGAGLDIVAPGVNVQSTYPGSTYASLNGTSMATPHVAGAALLVKQKNPSWSNVRIRNHLKNTATSLGSTNLYGSGLVNAEAATR

SEQ ID NO: 57519 - protein, 269 aa, Unidentified
AQSVPWGISRVQAPAAHNRRLTGSGVKVAVLDTGISTHPDLNIRGGASFVPGEPSTQDGEGHGTHVAGTIAALNNDIGVLGVAPSAELYAVKVLGASGSGSVSSIAQGLEWAGNNSMHVANLSLGSESPSATLEQAVNSATSRGVLVVAASGNSGAGSISYPARYANAMAVGATDQNNNRASFSQYGAGLDIVAPGVNVQSTYPGSTYASLNGTSMATPHVAGAAALVKQKNPSWSNVQIRDHLKNTATSLGSTNLYGSGLVNAEAATR

SEQ ID NO: 57520 - protein, 269 aa, Unidentified
AQSVPWGISRVQAPAAHNRGLTGSGVKVAVLDTGISTHPDLNIRGGASFVPGEPSTQDGNGHGTHVAGTIAALNNSIGVLGVAPSAELYAVKVLGASGGGAISSIAQGLEWAGNNGMHVANLSLGSPSPSATLEQAVNSATSRGVLVVAASGNSGAGSISYPARYANAMAVGATDQNNNRASFSQYGAGLDIVAPGVNVQSTYPGSTYASLNGTSMATPHVAGAAVLVKQKNPSWSNVRIRRHLKNTATSLGSTNLYGSGLVNAEAATR

SEQ ID NO: 57521 - protein, 269 aa, Unidentified
AQSVPWGISRVQAPAAHNRGLYGSGVKVAVLDTGISTHPDLNIRGGASFVPGEPSTQDGNGHGTHVAGTIAALNNSIGVLGVAPSAELYAVKVLGASGTGNLSSIAQGLEWAGNNGMHVANLSLGSPSPSATLEQAVNSATSRGVLVVAASGNSGAGSISYPARYANAMAVGATDQNNNRASFSQYGAGLDIVAPGVNVQSTYPGSTYASLNGTSMATPHVAGAATLVKQKNPSWSNVRIRNHLKNTATSLGSTNLYGSGLVNAEAATR

SEQ ID NO: 57522 - protein, 269 aa, Unidentified
AQSVPWGISRVQAPAAHNRGLQGSGVKVAVLDTGISTHPDLNIRGGASFVPGEPSTQDGNGHGTHVAGTIAALNNSIGVLGVAPSAELYAVKVLGASGNGNISSIAQGLEWAGNNGMHVANLSLGSPSPSATLEQAVNSATSRGVLVVAASGNSGAGSISYPARYANAMAVGATDQNNNRASFSQYGAGLDIVAPGVNVQSTYPGSTYASLNGTSMATPHVAGAAVLVKQKNPSWSNVWIRNHLKNTATSLGSTNLYGSGLVNAEAATR

SEQ ID NO: 57523 - protein, 269 aa, Unidentified
AQSVPWGISRVQAPASHNRGLAGSGVKVAVLDTGISTHPDLNIRGGASFVPGEPSTQDGNGHGTHVAGTIAALNNSIGVLGVAPSAELYAVKVLGASGGGAISSIAQGLEWAGNNGMHVANLSLGNPSPSATLEQAVNSATSRGVLVVAASGNSGAGSISYPARYANAMAVGATDQNNNRASFSQYGAGLDIVAPGVNVQSTYPGSTYASLNGTSMATPHVAGAAALVKQKNPSWSNVQIRNHLKNTATSLGSTNLYGSGLVNAEAATR

SEQ ID NO: 57524 - protein, 269 aa, Unidentified
AQSVPWGISRVQAPAAHNRGLKGSGVKVAVLDTGISTHPDLNIRGGASFVPGEPSTQDGNGHGTHVAGTIAALNNSIGVLGVAPSAELYAVKVLGASGNGGISSIAQGLEWAGNNGMHVANLSLGSPSPSATLEQAVNSATSRGVLVVAASGNSGAGSISYPARYANAMAVGATDQNNNRASFSQYGAGLDIVAPGVNVQSTYPGSTYASLNGTSMATPHVAGAAVLVKQKNPSWSNVRIRNHLKNTATSLGSTNLYGSGLVNAEAATR

SEQ ID NO: 57525 - protein, 269 aa, Unidentified
AQSVPWGISRVQAPAAHRRGLTGRGVKVAVLDTGISTHPDLNIRGGASFVPGEPSTQDGNGHGTHVAGTIAALDNSIGVLGVAPSAELYAVKVLGASGAGSVSSIAQGLEWAGANGMHVANLSLGSPSPSATLEQAVNSATSRGVLVVAASGNSGAGSISYPARYANAMAVGATDQNNNRASFSQYGAGLDIVAPGVNVQSTYPGSTYASLNGTSMATPHVAGAAALVKQKNPSWSRVQIRNHLKNTATSLGSTNLYGSGLVNAEAATR

SEQ ID NO: 57526 - protein, 269 aa, Bacillus sp.
AQSVPWGISRVQAPAAHNRGLTGSGVKVAVLDTGISTHPDLNIRGGASFVPGEPSTQDGNGHGTHVAGTIAALNNSIGVLGVAPNAELYAVKVLGASGSGSVSSIAQGLEWAGNNVMHVANLSLGXXXPSATLEQAVNSATSRGVLVVAASGNSGAGSIDYPARYANAMAVGATDQNNNRASFSQYGAGLDIVAPGVNVQSTYPGSTYASLNGTSMATPHVAGAAALVKQKNPSWSNVQIRNHLKNTATSLGSTNLYGSGLVNAEAATR

SEQ ID NO: 57527 - protein, 269 aa, Unidentified
AQSVPWGISRVQAPAAHNRRLTGSGVKVAVLDTGISTHPDLNIRGGASFVPGEPSTQDGEGHGTHVAGTIAALNNDIGVLGVAPSAELYAVKVLGASGSGSVSSIAQGLEWAGNNSMHVANLSLGSPSPSATLEQAVNSATSRGVLVVAASGNSGADSISYPARYANAMAVGATDQNNNRASFSQYGAGLDIVAPGVNVQSTYPGSTYASLNGTSMATPHVAGAAALVKQKNPSWSNVRIRNHLKNTATSLGSTNLYGSGLVNAEAATR

SEQ ID NO: 57528 - protein, 269 aa, Unidentified
AQSVPWGISRVQAPAAHRRGLTGRGVKVAVLDTGISTHPDLNIRGGASFVPGEPSTQDGNGHGTHVAGTIAALDNSIGVLGVAPSAELYAVKVLGASGSGSVSSIAQGLEWAGNNGMHVANLSLGSPSPSATLEQAVNSATSRGVLVVAASGNSGAGSISYPARYANAMAVGATDQNNNRASFSQYGAGLDIVAPGVNVQSTYPGSTYASENGTSMATPHVAGAAALVKQKNPSWRNVQIRNRLKNTATSLGSTNLYGSGLVNAEAATR

SEQ ID NO: 57529 - protein, 269 aa, Unidentified
AQSVPWGISRVQAPAAHNRRLTGSGVKVAVLDTGISTHPDLNIRGGASFVPGEPSTQDGNGHGTHVAGTIAALNNDIGVLGVAPSAELYAVKVLGASGSGSVSSIAQGLEWAGNNSMHVANLSLGSPSPSATLEQAVNSATSRGVLVVAASGNSGADSISYPARYANAMAVGATDQNNNRADFSQYGAGLDIVAPGVNVQSTYPGSTYASLNGTSMATPHVAGAAALVKQKNPSWSNVRIRNHLKNTATSLGSTNLYGSGLVNAEAATR

SEQ ID NO: 57530 - protein, 269 aa, Unidentified
AQSVPWGISRVQAPAAHNRGLYGSGVKVAVLDTGISTHPDLNIRGGASFVPGEPSTQDGNGHGTHVAGTIAALNNSIGVLGVAPSAELYAVKVLGASGTGGISSIAQGLEWAGNNGMHVANLSLGSPSPSATLEQAVNSATSRGVLVVAASGNSGAGSISYPARYANAMAVGATDQNNNRASFSQYGAGLDIVAPGVNVQSTYPGSTYASLNGTSMATPHVAGAATLVKQKNPSWSNVRIRNHLKNTATSLGSTNLYGSGLVNAEAATR

SEQ ID NO: 57531 - protein, 269 aa, Unidentified
AQSVPWGISRVQAPAAHNRGLTGRGVKVAVLDTGISTHPDLNIRGGASFVPGEPSTQDGEGHGTHVAGTIAALNNGIGVLGVAPSAELYAVKVLGASGSGSVSSIAQGLEWAGNNSMHVANLSLGSESPSATLEQAVNSATSRGVLVVAASGNSGAGSISYPARYANAMAVGATDQNNNRASFSQYGAGLDIVAPGVNVQSTYPGSTYASLNGTSMATPHVAGAAALVKQKNPSWSNVQIRNRLKNTATSLGSTNLYGSGLVNAEAATR

SEQ ID NO: 57532 - protein, 269 aa, Unidentified
AQSVPWGISRVQAPAAHNRKLLGFGVKVAVLDTGISTHPDLNIRGGASFVPGEPSTQDGNGHGTHVAGTIAALNNNIGVLGVAPSAELYAVKVLGASGSGSVSSIAQGLEWAGNNRMHVANLSLGDPSPSATLEQAVNSATSRGVLVVAASGNSGAGSISYPARYANAMAVGATDQNNNRASFSQYGAGLDIVAPGVNVQSTYPGSTYASLNGTSMATPHVAGAAALVKQKNPSWSNVQIRNHLKNTATSLGSTNLYGSGLVNAEAATR

SEQ ID NO: 57533 - protein, 269 aa, Unidentified
AQSVPWGISRVQAPASHNRGLAGSGVKVAVLDTGISTHPDLNIRGGASFVPGEPSTQDGNGHGTHVAGTIAALNNSIGVLGVAPSAELYAVKVLGASGGGGLSSIAQGLEWAGNNGMHVANLSLGNPSPSATLEQAVNSATSRGVLVVAASGNSGAGSISYPARYANAMAVGATDQNNNRASFSQYGAGLDIVAPGVNVQSTYPGSTYASLNGTSMATPHVAGAAALVKQKNPSWSNVQIRNHLKNTATSLGSTNLYGSGLVNAEAATR

SEQ ID NO: 57534 - protein, 269 aa, Unidentified
AQSVPWGISRVQAPAAHRRRLTGSGVKVAVLDTGISTHPDLDITGGASFVPGEPSTQDGNGHGTHVAGTIAALDNSIGVLGVAPSAELYAVKVLGASGSGSVSSIAQGLEWAGNNGMHVANLSLGSPSPSATLEQAVNSATSRGVLVVAASGNSGAGSISYPARYANAMAVGATDQNNNRASFSQYGAGLDIVAPGVNVQSTYPGSTYASLNGTSMATPHVAGAAALVKQKNPSWSNVQIRNRLKNTATSLGSTNLYGSGLVNAEAATR

SEQ ID NO: 57535 - protein, 269 aa, Unidentified
AQVVPWGISRVQAPAAHNRGLTGSGVKVAVLDTGISTHEDLNIRGGASFVPGEPSTQDGNGHGTHVAGTIAALDNSIGVLGVAPSAELYAVKVLGASGSGSVSSIAQGLEWAGNNRMHVANLSLGRPSPSATLEQAVNSATSRGVLVVAASGNSGAGSISYPARYANAMAVGATDQNNNRASFSQYGAGLDIVAPGVNVQSTYPGSTYASKNGTSMATPHVAGAAALVKQKNPSWSNVQIRNHLKNTATSLGSTNLYGSGLVNAEAATR

SEQ ID NO: 57536 - protein, 269 aa, Unidentified
AQSVPWGISRVQAPAAHNRKLTGSGVKVAVLDTGISTHPDLNIRGGASFVPGEPSTQDGEGHGTHVAGTIAALNNNIGVLGVAPSAELYAVKVLGASGSGSVSSIAQGLEWAGLNGMHVANLSLGIPSPSATLEQAVNSATSRGVLVVAASGNSGAGSISYPARYANAMAVGATDQNNNRASFSQYGAGLDIVAPGVNVQSTYPGSTYASNNGTSMATPHVAGAAALVKQKNPSWSNVQIRNHLKNTATSLGSTNLYGSGLVNAEAATR

SEQ ID NO: 57537 - protein, 269 aa, Unidentified
AQSVPWGISRVQAPAAHNRGLTGSGVKVAVLDTGISTHPDLNIRGGASFVPGEPSTQDGNGHGTHVAGTIAALNNSIGVLGVAPSAELYAVKVLGADGRGAISSIAQGLEWAGNNGMHVANLSLGSPSPSATLEQAVNSAWSRGVLVVAASGNSGASSISYPARYANAMAVGATDQNNNRASFSQYGAGLDIVAPGVNVQSTYPGSTYASLNGTSMATPHVAGAAALVKQKNPSWSNVQIRNHLKNTATSLGSTNLYGSGLVNAEAATR

SEQ ID NO: 57538 - protein, 269 aa, Unidentified
AQSVPWGISRVQAPAAHRRELTGSGVKVAVLDTGISTHPDLNIRGGASFVPGEPSTQDGNGHGTHVAGTIAALDNNIGVLGVAPSAELYAVKVLGASGSGSVSSIAQGLEWAGNNRMHVANLSLGSPSPSATLEQAVNSATSRGVLVVAASGNSGAGSISYPARYANAMAVGATDQNNNRASFSQYGAGLDIVAPGVNVQSTYPGSTYASLNGTSMATPHVAGAAALVKQKNPSWSNVQIRNRLKNTATSLGSTNLYGSGLVNAEAATR

SEQ ID NO: 57539 - protein, 269 aa, Unidentified
AQSVPWGISRVQAPAAHNRGLTGRGVKVAVLDTGISTHPDLNIRGGASFVPGEPSTQDGNGHGTHVAGTIAALDNSIGVLGVAPRAELYAVKVLGASGSGSVSSIAQGLEWAGNNGMHVANLSLGSPSPSATLEQAVNSATSRGVLVVAASGNSGAGSISYPARYANAMAVGATDQNNNRASFSQYGAGLDIVAPGVNVQSTWPGSAYASLNGTSQATPHVAGAAALVKQKNPSWSNVQIRNRLKNTATSLGSTNLYGSGLVNAEAATR

SEQ ID NO: 57540 - protein, 269 aa, Unidentified
AQSVPWGISRVQAPAAHNRGLQGSGVKVAVLDTGISTHPDLNIRGGASFVPGEPSTQDGNGHGTHVAGTIAALNNSIGVLGVAPSAELYAVKVLGASGNGNLSSIAQGLEWAGNNGMHVANLSLGSPSPSATLEQAVNSATSRGVLVVAASGNSGAGSISYPARYANAMAVGATDQNNNRASFSQYGAGLDIVAPGVNVQSTYPGSTYASLNGTSMATPHVAGAATLVKQKNPSWSNVRIRNHLKNTATSLGSTNLYGSGLVNAEAATR

SEQ ID NO: 57541 - protein, 269 aa, Unidentified
AQSVPWGISRVQAPAAHNRGLTGSGVKVAVLDTGISTHPDLNIRGGASFVPGEPSTQDGNGHGTHVAGTIAALNNSIGVLGVAPSAELYAVKVLGASGAGSLSSIAQGLEWAGNNGMHVANLSLGNPSPSATLEQAVNSATSRGVLVVAASGNSGEGSISYPARYANAMAVGATDQNNNHASFSQYGAGLDIVAPGVNVQSTYPGSTYASLNGTSMATPHVAGAAALVKQKNPSWSNVQIRNHLKNTATSLGSTNLYGSGLVNAFAATR

SEQ ID NO: 57542 - protein, 269 aa, Unidentified
AQSVPWGISRVQAPAAHNRGLYGSGVKVAVLDTGISTHPDLNIRGGASFVPGEPSTQDGNGHGTHVAGTIAALNNSIGVLGVAPSAELYAVKVLGASGTGGISSIAQGLEWAGNNGMHVANLSLGSPSPSATLEQAVNSATSRGVLVVAASGNSGAGSISYPARYANAMAVGATDQNNNRASFSQYGAGLDIVAPGVNVQSTYPGSTYASLNGTSMATPHVAGAAMLVKQKNPSWSNVSIRNHLKNTATSLGSTNLYGSGLVNAEAATR

SEQ ID NO: 57543 - protein, 269 aa, Unidentified
AQSVPWGISRVQAPAAHNRGLTGSGVKVAVLDTGISTHPDLNIRGGASFVPGEPSTQDGNGHGTHVAGTIAALNNSIGVLGVAPSAELYAVKVLGQTGAAAISSIAQGLEWAGNNGMHVANLSLGSPSPSATLEQAVNSATSRGVLVVAASGNSGAGSISYPARYANAMAVGATDQNNNRASFSQYGAGLDIVAPGVNVQSTYPGSTYASLNGTSMATPHVAGAAALVKQKNPSWSNVQIRNHLKNTATSLGSTNLYGSGLVNAEAATR

SEQ ID NO: 57544 - protein, 269 aa, Unidentified
AQSVPWGISRVQAPAAHRRGLTGRGVKVAVLDTGISTHPDLRITGGASFVPGEPSTQDGNGHGTHVAGTIAALNNSIGVLGVAPSAELYAVKVLGASGSGSVSSIAQGLEWAGNNGMHVANLSLGSPSPSATLEQAVNSATSRGVLVVAASGNSGAGSISYPARYANAMAVGATDQNNNRASFSQYGAGLDIVAPGVNVQSTYPGSTYASLNGTSMATPHVAGEAALVKQKNPSWSNVQIRNRLKNTATSLGSTNLYGSGLVNAEAATR

SEQ ID NO: 57545 - protein, 269 aa, Unidentified
AQSVPWGISRVQAPAAHNRGLKGSGVKVAVLDTGISTHPDLNIRGGASFVPGEPSTQDGNGHGTHVAGTIAALNNSIGVLGVAPSAELYAVKVLGASGNGNLSSIAQGLEWAGNNGMHVANLSLGSPSPSATLEQAVNSATSRGVLVVAASGNSGAGSISYPARYANAMAVGATDQNNNRASFSQYGAGLDIVAPGVNVQSTYPGSTYASLNGTSMATPHVAGAATLVKQKNPSWSNVRIRNHLKNTATSLGSTNLYGSGLVNAEAATR

SEQ ID NO: 57546 - protein, 269 aa, Unidentified
AQSVPWGISRVQAPAAHNRGLTGSGVKVAVLDTGISTHPDLNIRGGASFVPGEPSTQDGNGHGTHVAGTIAALNNDIGVLGVAPSAELYAVKVLGASGSGSVSSIAQGLEWAGNNDMHVANLSLGSESPSATLEQAVNSATSRGVLVVAASGNSGADSISYPARYANAMAVGATDQNNNRASFSQYGAGLDIVAPGVNVQSTYPGSTYASLNGTSMATPHVAGAAALVKQKNPSWSNVRIRNRLKNTATSLGSTNLYGSGLVNAEAATR

SEQ ID NO: 57547 - protein, 269 aa, Unidentified
AQSVPWGISRVQAPAAHNRGLTGRGVKVAVLDTGISTHPDLNIRGGASFVPGEPSTQDGEGHGTHVAGTIAALNNGIGVLGVAPSAELYAVKVLGASGSGSVSSIAQGLEWAGNNSMHVANLSLGSPSPSATLEQAVNSATSRGVLVVAASGNSGADSISYPARYANAMAVGATDQNNNRADFSQYGAGLDIVAPGVNVQSTYPGSTYASLNGTSMATPHVAGAAALVKQKNPSWSNVQIRNHLKNTATSLGSTNLYGSGLVNAEAATR

SEQ ID NO: 57548 - protein, 269 aa, Unidentified
AQSVPWGISRVQAPAAHRRGLTGRGVKVAVLDTGISTHPDLNIRGGASFVPGEPSTQDGNGHGTHVAGTIAALDNSIGVLGVAPSAELYAVKVLGASGAGSVSSIAQGLEWAGNNGMHVANLSLGSPSPSATLEQAVNSATSRGVLVVAASGNSGAGSISYPARYANAMAVGATDQDNNRASFSQYGAGLDIVAPGVNVQSTYPGSTYASLNGTSMATPHVAGAAALVKQKNPSWSNVQIRNRLKNTATSLGSTNLYGSGLVNAEAATR

SEQ ID NO: 57549 - protein, 269 aa, Unidentified
AQSVPWGISRVQAPAAHNRRLTGSGVKVAVLDTGISTHPDLNIRGGASFVPGEPSTQDGNGHGTHVAGTIAALNNSIGVLGVAPSAELYAVKVLGASGGGGISSIAQGLEWAGNNGMHVANLSLGSPSPSATLEQAVNSATSRGVLVVAASGNSGAGSISYPARYANAMAVGATDQNNNRASFSQYGAGLDIVAPGVNVQSTYPGSTYASLNGTSMATPHVAGAAVLVKQKNPSWRNVQIRNHLKNTATSLGSTNLYGSGLVNAEAATR

SEQ ID NO: 57550 - protein, 269 aa, Unidentified
AQSVPWGISRVQAPAAHNRKLTGGGVKVAVLDTGISTHPDLNIRGGASFVPGEPSTQDGEGHGTHVAGTIAALNNSIGVLGVAPSAELYAVKVLAASGQGSVSSIAQGLEWAGLNGMHVANLSLGSPSPSATLEQAVNSATSRGVLVVAASGNSGAGSISYPARYANAMAVGATDQNNNRASFSQYGAGLDIVAPGVNVQSTYPGSTYASQNGTSSATPHVAGAAALVKQKNPSWSNVQIRNHLKNTATSLGSTNLYGSGLVNAEAATR

SEQ ID NO: 57551 - protein, 269 aa, Unidentified
AQSVPWGISRVQAPAAHNRGLTGSGVKVAVLDTGISTHPDLNIRGGASFVPGEPSTQDGNGHGTHVAGTIAALNNSIGVLGVAPSAELYAVKVLGADGRGAISSIAQGLEWAGNNGMHVANLSLGSPSPSATLEQAVNSATSRGVLVVAASGNSGASSISYPARYANAMAVGATDQNNNRASFSQYGAGLDIVAPGVNVQSTYPGSTYASLNGTSMATPHVAGAAALVKQKNPSWSAVQIRNHLKNTATSLGSTNLYGSGLVNAEAATR

SEQ ID NO: 57552 - protein, 269 aa, Unidentified
AQSVPWGISRVQAPAAHNRGLAGRGVKVAVLDSGISTHPDLNIRGGASFVPGEPSTQDGNGHGTHVAGTIAALNNSIGVLGVAPSAELYAVKVLGASGSGSVSSIAQGLEWAGNNGMHVANLSLGSPSPSATLEQAVNSATSRGVLVVAASGNSGEGSIDYPARYANAMAVGATDQNNNRADFSQYGAGLDIVAPGVNVQSTYPGSTYASLNGTSMATPHVAGAAALVKQKNPSWSNVQIRNHLKNTATSLGSTNLYGSGLVNAEAATR

SEQ ID NO: 57553 - protein, 269 aa, Unidentified
AQSVPWGISRVQAPAAHNRGLTGRGVKVAVLDTGISTHPDLNIRGGASFVPGEPSTQDGEGHGTHVAGTIAALNNGIGVLGVAPSAELYAVKVLGASGSGSVSSIAQGLEWAGNNSMHVANLSLGSESPSATLEQAVNSATSRGVLVVAASGNSGADSISYPARYANAMAVGATDQNNNRASFSQYGAGLDIVAPGVNVQSTYPGSTYASLNGTSMATPHVAGAAALVKQKNPSWSNVQIRNHLKNTATSLGSTNLYGSGLVNAEAATR

SEQ ID NO: 57554 - protein, 269 aa, Unidentified
AQSVPWGISRVQAPAAHNRRLTGRGVKVAVLDTGISTHPDLNIRGGASFVPGEPSTQDGNGHGTHVAGTIAALNNSIGVLGVAPSAELYAVKVLAASGGGSVSSIAQGLEWAGNNGMHVANLSLGAPSPSATLEQAVNSATSRGVLVVAASGNSGAGSISYPARYANAMAVGATDQNNNRASFSQYGAGLDIVAPGVNVQSTYPGSTYASQNGTSMATPHVAGAAALVKQKNPSWSNVQIRNHLKNTATSLGSTNLYGSGLVNAEAATR

SEQ ID NO: 57555 - protein, 269 aa, Unidentified
AQSVPWGISRVQAPAAHNRGLKGSGVKVAVLDTGISTHPDLNIRGGASFVPGEPSTQDGNGHGTHVAGTIAALNNSIGVLGVAPSAELYAVKVLGASGNGALSSIAQGLEWAGNNGMHVANLSLGSPSPSATLEQAVNSATSRGVLVVAASGNSGAGSISYPARYANAMAVGATDQNNNRASFSQYGAGLDIVAPGVNVQSTYPGSTYASLNGTSMATPHVAGAALLVKQKNPSWSNVRIRNHLKNTATSLGSTNLYGSGLVNAEAATR

SEQ ID NO: 57556 - protein, 269 aa, Unidentified
AQSVPWGISRVQAPAAHNRGLYGSGVKVAVLDTGISTHPDLNIRGGASFVPGEPSTQDGNGHGTHVAGTIAALNNSIGVLGVAPSAELYAVKVLGASGAGGISSIAQGLEWAGNNGMHVANLSLGSPSPSATLEQAVNSATSRGVLVVAASGNSGAGSISYPARYANAMAVGATDQNNNRASFSQYGAGLDIVAPGVNVQSTYPGSTYASLNGTSMATPHVAGAAVLVKQKNPSWSNVRIRNHLKNTATSLGSTNLYGSGLVNAEAATR

SEQ ID NO: 57557 - protein, 269 aa, Unidentified
AQSVPWGISRVQAPAAHNRGLRGSGVKVAVLDTGISTHPDLNIRGGASFVPGEPSTQDGNGHGTHVAGTIAALNNSIGVLGVAPSAELYAVKVLGASGNGNISSIAQGLEWAGNNGMHVANLSLGSPSPSATLEQAVNSATSRGVLVVAASGNSGAGSISYPARYANAMAVGATDQNNNRASFSQYGAGLDIVAPGVNVQSTYPGSTYASLNGTSMATPHVAGAATLVKQKNPSWSNVSIRNHLKNTATSLGSTNLYGSGLVNAEAATR

SEQ ID NO: 57558 - protein, 269 aa, Unidentified
AQSVPWGISRVQAPAAHNRGLRGSGVKVAVLDTGISTHPDLNIRGGASFVPGEPSTQDGNGHGTHVAGTIAALNNSIGVLGVAPSAELYAVKVLGASGGGNLSSIAQGLEWAGNNGMHVANLSLGSPSPSATLEQAVNSATSRGVLVVAASGNSGAGSISYPARYANAMAVGATDQNNNRASFSQYGAGLDIVAPGVNVQSTYPGSTYASLNGTSMATPHVAGAAVLVKQKNPSWSNVSIRNHLKNTATSLGSTNLYGSGLVNAEAATR

SEQ ID NO: 57559 - protein, 269 aa, Unidentified
AQSVPWGISRVQAPAAHNRGLAGSGVKVAVLDTGISTHPDLNIRGGASFVPGEPSTQDGNGHGTHVAGTIAALNNSIGVLGVAPSAELYAVKVLGASGAGALSSIAQGLEWAGNNGMHVANLSLGSPSPSATLEQAVNSATSRGVLVVAASGNSGAGSISYPARYANAMAVGATDQNNNRASFSQYGAGLDIVAPGVNVQSTYPGSTYASLNGTSMATPHVAGAAVLVKQKNPSWSNVRIRNHLKNTATSLGSTNLYGSGLVNAEAATR

SEQ ID NO: 57560 - protein, 269 aa, Unidentified
AQSVPWGISRVQAPAAHNRKLTGSGVKVAVLDTGISTHPDLNIRGGASFVPGEPSTQDGNGHGTHVAGTIAALNNSIGVLGVAPSAELYAVKVLGASGDGSVSSIAQGLEWAGNNGMHVANLSLGLPSPSATLEQAVNSATSRGVLVVAASGNSGAGSISYPARYANAMAVGATDQNNNRASFSQYGAGLDIVAPGVNVQSTYPGSTYASESGTSMATPHVAGAAALVKQKNPRWSNVQIRNHLKNTATSLGSTNLYGSGLVNAEAATR

SEQ ID NO: 57561 - protein, 269 aa, Unidentified
AQSVPWGISRVQAPAAHNRGLAGRGVKVAVLDTGISTHPDLNIRGGASFVPGEPSTQDGNGHGTHVAGTIAALNNSIGVLGVAPSAELYAVKVLGASGSGSVSSIAQGLEWAGLNRMHVANLSLGSPSPSATLEQAVNSATSRGVLVVAASGNSGAGSIDYPARYANAMAVGATDQNNNRADFSQYGAGLDIVAPGVNVQSTYPGSTYASLNGTSMATPHVAGAAALVKQKNPSWSNVQIRNHLKNTATSLGSTNLYGSGLVNAEAATR

SEQ ID NO: 57562 - protein, 269 aa, Unidentified
AQSVPWGISRVQAPAAHNRRLTGSGVKVAVLDTGISTHPDLNIRGGASFVPGEPSTQDGNGHGTHVAGTIAALNNGIGVLGVAPSAELYAVKVLGASGSGSVSSIAQGLEWAGNNDMHVANLSLGSESPSATLEQAVNSATSRGVLVVAASGNSGAGSISYPARYANAMAVGATDQNNNRADFSQYGAGLDIVAPGVNVQSTYPGSTYASLNGTSMATPHVAGAAALVKQKNPSWSNVRIRNHLKNTATSLGSTNLYGSGLVNAEAATR

SEQ ID NO: 57563 - protein, 269 aa, Unidentified
AQSVPWGISRVQAPAAHRRRLTGRGVKVAVLDTGISTHPDLNIRGGASFVPGEPSTQDGNGHGTHVAGTIAALDNSIGVLGVAPSAELYAVKVLGASGSGSVSSIAQGLEWAGNNGMHVANLSLGSPSPSATLEQAVNSATSRGVLVVAASGNSGAGSISYPARYANAMAVGATDQNNNRASFSQYGAGLDIVAPGVNVQSTYPGSAYASLNGTSMATPHVAGAAALVKQKNPSWSNVQIRNRLKNTATSLGSTNLYGSGLVNAEAATR

SEQ ID NO: 57564 - protein, 269 aa, Unidentified
AQSVPWGISRVQAPAAHRRGLTGRGVKVAVLDTGISTHPDLNIRGGASFVPGEPSTQDGNGHGTHVAGTIAALDNSIGVLGVAPSAELYAVKVLGASGSGSVSSIAQGLEWAGNNGMHVANLSLGSPSPSATLEQAVNSATSRGVLVVAASGNSGAGSISYPARYANAMAVGATDQDNNRASFSQYGAGLDIVAPGVNVQSTYPGSTYFSLNGTSMATPHVAGAAALVKQKNPSWSNVQIRNRLKNTATSLGSTNLYGSGLVNAEAATR

SEQ ID NO: 57565 - protein, 269 aa, Bacillus lentus
AQSVPWGIRRVQAPTAHNRGLTGSGVKVAVLDTGISTHPDLNIRGGASFVPGEPSTQDGNGHGTHAAGTIAALNNSIGVLGVAPSAELYAVKVLGADGSGSVSSIAQGLEWAGNNGMHVANLSLGSPSPSATLEQAVNSATSRGVLVVAASGNSGAGSISYPARYANAMAVGATDQNNNRASFSQYGAGLDIVAPGVNVQSTYPGSTYASLNGTSMATPHVAGAAALVKQKNPSWSNVRIRNHLKDTATSLGSTNLYGSGLVNAEAATR

SEQ ID NO: 57566 - protein, 269 aa, Unidentified
AQSVPWGISRVQAPAAHNRGLQGSGVKVAVLDTGISTHPDLNIRGGASFVPGEPSTQDGNGHGTHVAGTIAALNNSIGVLGVAPSAELYAVKVLGASGTGNISSIAQGLEWAGNNGMHVANLSLGSPSPSATLEQAVNSATSRGVLVVAASGNSGAGSISYPARYANAMAVGATDQNNNRASFSQYGAGLDIVAPGVNVQSTYPGSTYASLNGTSMATPHVAGAALLVKQKNPSWSNVSIRNHLKNTATSLGSTNLYGSGLVNAEAATR

SEQ ID NO: 57567 - protein, 269 aa, Unidentified
AQSVPWGISRVQAPASHNRGLAGSGVKVAVLDTGISTHPDLNIRGGASFVPGEPSTQDGNGHGTHVAGTIAALNNSIGVLGVAPSAELYAVKVLGASGGGSISSIAQGVEWAGNNGMHVANLSLGSPSPSATLEQAVNSATSRGVIVVAASGNSGAGSISYPARYANAMAVGATDQNNNRASFSQYGAGLDIVAPGVNVQSTYPGSTYASLNGTSMATPHVAGAAALVKQKNPSWSNVQIRNHLKNTATSLGSTNLYGSGLVNAEAATR

SEQ ID NO: 57568 - protein, 269 aa, Unidentified
AQSVPWGISRVQAPAAHNRGLTGSGVKVAVLDTGISTHPDLRITGGASFVPGEPSTQDGNGHGTHVAGTIAALNNSIGVLGVAPSAELYAVKVLGASGAGSVSSIAQGLEWAGNNGMHVANLSLGSPSPSATLEQAVNSATSRGVLVVAASGNSGAGSISYPARYANAMAVGATDQNNNRASFSQYGAGLDIVAPGVNVQSTYIQSAYASLNGTSMATPHVAGAAALVKQKNPSWSNVQIRNHLKNTATSLGSTNLYGSGLVNAEAATR

SEQ ID NO: 57569 - protein, 269 aa, Unidentified
AQSVPWGISRVQAPAAHNRRLTGSGVKVAVLDTGISTHPDLDITGGASFVPGEPSTQDGNGHGTHVAGTIAALDNSIGVLGVAPSAELYAVKVLGASGSGSVSSIAQGLEWAGNNGMHVANLSLGSPSPSATLEQAVNSATSRGVLVVAASGNSGAGSISYPARYANAMAVGATDQNNNRASFSQYGAGLDIVAPGVNVQSTYPGSTYASLNGTSMATPHVAGAAALVKQKNPSWRNVQIRNRLKNTATSLGSTNLYGSGLVNAEAATR

SEQ ID NO: 57570 - protein, 269 aa, Unidentified
AQSVPWGISRVQAPAAHNRRLTGSGVKVAVLDTGISTHPDLNIRGGASFVPGEPSTQDGEGHGTHVAGTIAALNNDIGVLGVAPSAELYAVKVLGASGSGSVSSIAQGLEWAGNNSMHVANLSLGSESPSATLEQAVNSATSRGVLVVAASGNSGAGSISYPARYANAMAVGATDQNNNRASFSQYGAGLDIVAPGVNVQSTYPGSTYASLNGTSMATPHVAGAAALVKQKNPSWSNVRIRNHLKNTATSLGSTNLYGSGLVNAEAATR

SEQ ID NO: 57571 - protein, 269 aa, Unidentified
AQSVPWGISRVQAPAAHNRGLTGSGVKVAVLDTGISTHPDLNIRGGASFVPGEPSTQDGNGHGTHVAGTIAALNNSIGVLGVAPSAELYAVKVLPQAGAGAISSIAQGLEWAGNNGMHVANLSLGSPSPSATLEQAVNSATSRGVLVVAASGNSGAGSISYPARYANAMAVGATDQNNNRASFSQYGAGLDIVAPGVNVQSTYPGSTYASLNGTSMATPHVAGAAALVKQKNPSWSNVQIRNHLKNTATSLGSTNLYGSGLVNAEAATR

SEQ ID NO: 57572 - protein, 269 aa, Unidentified
AQSVPWGISRVQAPAAHNRGLAGSGVKVAVLDTGISTHPDLNIRGGASFVPGEPSTQDGNGHGTHVAGTIAALNNSIGVLGVAPSAELYAVKVLGASGQGAISSIAQGLEWAGNNGMHVANLSLGSPSPSATLEQAVNSATSRGVLVVAASGNSGAGSISYPARYANAMAVGATDQNNNRASFSQYGAGLDIVAPGVNVQSTYPGSTYASLNGTSMATPHVAGAAVLVKQKNPSWSNVRIRNHLKNTATSLGSTNLYGSGLVNAEAATR

SEQ ID NO: 57573 - protein, 269 aa, Unidentified
AQSVPWGISRVQAPAAHNRGLKGSGVKVAVLDTGISTHPDLNIRGGASFVPGEPSTQDGNGHGTHVAGTIAALNNSIGVLGVAPSAELYAVKVLGASGGGAISSIAQGLEWAGNNGMHVANLSLGSPSPSATLEQAVNSATSRGVLVVAASGNSGAGSISYPARYANAMAVGATDQNNNRASFSQYGAGLDIVAPGVNVQSTYPGSTYASLNGTSMATPHVAGAAVLVKQKNPSWSNVRIRNHLKNTATSLGSTNLYGSGLVNAEAATR

SEQ ID NO: 57574 - protein, 269 aa, Unidentified
AQSVPWGISRVQAPAAHNRRLTGSGVKVAVLDTGISTHPDLNITGGASFVPGEPSTQDGNGHGTHVAGTIAALNNSIGVLGVAPSAELYAVKVLGASGAGSVSSIAQGLEWAGNNGMHVANLSLGSPSPSATLEQAVNSATSRGVLVVAASGNSGAGSISYPARYANAMAVGATDQNNNRASFSQYGAGLDIVAPGVNVQSTYIQSTYASLNGTSMATPHVAGAAALVKQKNPSWSNVQIRNHLKNTATSLGSTNLYGSGFVNAEAATR

SEQ ID NO: 57575 - protein, 269 aa, Unidentified
AQSVPWGISRVQAPAAHNRGLAGSGVKVAVLDTGISTHPDLNIRGGASFVPGEPSTQDGNGHGTHVAGTIAALNNSIGVLGVAPSAELYAVKVLGASGTGNLSSIAQGLEWAGNNGMHVANLSLGSPSPSATLEQAVNSATSRGVLVVAASGNSGAGSISYPARYANAMAVGATDQNNNRASFSQYGAGLDIVAPGVNVQSTYPGSTYASLNGTSMATPHVAGAALLVKQKNPSWSNVSIRNHLKNTATSLGSTNLYGSGLVNAEAATR

SEQ ID NO: 57576 - protein, 269 aa, Unidentified
AQSVPWGISRVQAPAAHNRGLTGSGVKVAVLDTGISTHPDLNIRGGASFVPGEPSTQDGNGHGTHVAGTIAALNNSIGVLGVAPSAELYAVKVLGASGSGAISSIAQGLEWAGNNGMHVANLSLGSPSPSATLEQAVNSATSRGVLVVAASGNSGAGSISYPARYANAMAVGATDQNNNRASFSQYGAGLDIVAPGVNVQSTWPGSTYASLNGTSMATPHVAGAAVLVKHKNPSWSNVQIRNHLKNTATSVGSTNLYGSGLVNAEAATR

SEQ ID NO: 57577 - protein, 269 aa, Unidentified
AQSVPWGISRVQAPAAHNRGLTGSGVKVAVLDTGISTHPDLNIRGGASFVPGEPSTQDGNGHGTHVAGTIAALNNSIGVLGVAPSAELYAVKVLGNDGRGAISSIAQGLEWAGNNGMHVANLSLGSPSPSATLEQAVNSATSRGVLVVAASGNSGASSISYPARYANAMAVGATDQNNNRASFSQYGAGLDIVAPGVNVQSTYPGSTYASLNGTSMATPHVAGAAALVKQKNPSWSNVQIRNHLKNTATSLGSTNLYGSGLVNAEAATR

SEQ ID NO: 57578 - protein, 269 aa, Unidentified
AQSVPWGISRVQAPAAHNRGLTGSGVKVAVLDTGISTHPDLRIRGGASFVPGEPSTQDGNGHGTHVAGTIAALNNSIGVLGVAPSAELYAVKVLGASGAGSVSSIAQGLEWAGANGMHVANLSLGSPSPSATLEQAVNSATSRGVLVVAASGNSGAGSISYPARYANAMAVGATDQNNNRASFSQYGAGLDIVAPGVNVQSTYPGSAYFSLNGTSMATPHVAGAAALVKQKNPSWSNVQIRNHLKNTATSLGSTNLYGSGLVRAEAATR

SEQ ID NO: 57579 - protein, 269 aa, Unidentified
AQSVPWGISRVQAPAAHNRGLTGRGVKVAVLDTGISTHPDLNIRGGASFVPGEPSTQDGEGHGTHVAGTIAALNNGIGVLGVAPSAELYAVKVLGASGSGSVSSIAQGLEWAGNNDMHVANLSLGSPSPSATLEQAVNSATSRGVLVVAASGNSGADSISYPARYANAMAVGATDQNNNRADFSQYGAGLDIVAPGVNVQSTYPGSTYASLNGTSMATPHVAGAAALVKQKNPSWSNVQIRNHLKNTATSLGSTNLYGSGLVNAEAATR

SEQ ID NO: 57580 - protein, 269 aa, Unidentified
AQSVPWGISRVQAPAAHNRGLAGSGVKVAVLDTGISTHPDLNIRGGASFVPGEPSTQDGNGHGTHVAGTIAALNNSIGVLGVAPSAELYAVKVLGASGNGNLSSIAQGLEWAGNNGMHVANLSLGSPSPSATLEQAVNSATSRGVLVVAASGNSGAGSISYPARYANAMAVGATDQNNNRASFSQYGAGLDIVAPGVNVQSTYPGSTYASLNGTSMATPHVAGAAMLVKQKNPSWSNVRIRNHLKNTATSLGSTNLYGSGLVNAEAATR

SEQ ID NO: 57581 - protein, 269 aa, Unidentified
AQSVPWGISRVQAPAAHNRGLRGSGVKVAVLDTGISTHPDLNIRGGASFVPGEPSTQDGNGHGTHVAGTIAALNNSIGVLGVAPSAELYAVKVLGASGAGNISSIAQGLEWAGNNGMHVANLSLGSPSPSATLEQAVNSATSRGVLVVAASGNSGAGSISYPARYANAMAVGATDQNNNRASFSQYGAGLDIVAPGVNVQSTYPGSTYASLNGTSMATPHVAGAALLVKQKNPSWSNVSIRNHLKNTATSLGSTNLYGSGLVNAEAATR

SEQ ID NO: 57582 - protein, 269 aa, Unidentified
AQSVPWGISRVQAPAAHNRGLAGSGVKVAVLDSGISTHPDLNIRGGASFVPGEPSTQDGNGHGTHVAGTIAALNNSIGVLGVAPSAELYAVKVLGASGSGSVSSIAQGLEWAGNNRMHVANLSLGIPSPSATLEQAVNSATSRGVLVVAASGNSGAGSIDYPARYANAMAVGATDQNNNRADFSQYGAGLDIVAPGVNVQSTYPGSTYASLNGTSMATPHVAGAAALVKQKNPSWSNVQIRNHLKNTATSLGSTNLYGSGLVNAEAATR

SEQ ID NO: 57583 - protein, 269 aa, Unidentified
AQSVPWGISRVQAPAAHNRGLAGRGVKVAVLDTGISTHPDLNIRGGASFVPGEPSTQDGEGHGTHVAGTIAALNNSIGVLGVAPSAELYAVKVLGASGSGSVSSIAQGLEWAGLNGMHVANLSLGSPSPSATLEQAVNSATSRGVLVVAASGNSGEGSISYPARYANAMAVGATDQNNNRADFSQYGAGLDIVAPGVNVQSTYPGSTYASLNGTSMATPHVAGAAALVKQKNPSWSNVQIRNHLKNTATSLGSTNLYGSGLVNAEAATR

SEQ ID NO: 57584 - protein, 269 aa, Unidentified
AQSVPWGISRVQAPAAHNRGLLGSGVKVAVFDTGISTHPDLNIRGGASFVPGEPSTQDGNGHGTHVAGTIAALNNSIGVLGVAPSAELYAVKVLGASGSASVSSIAQGLEWAGNNGMHVANLSLGDPSPSATLEQAVNSATSRGVLVVAASGNSGAGSISYPARYANAMAVGATDQNNNRASFSQYGAGLDIVAPGVNVQSTYPGSTYASLNGTSMAAPHVAGAAALVKQKNPSWSFVQIRNHLKNTATSLGSTNLYGSGLVNAEAATR

SEQ ID NO: 57585 - protein, 269 aa, Unidentified
AQSVPWGISRVQAPAAHNRGLTGSGVKVAVLDTGISSHPDLNIRGGASFVPGEPSTQDGNGHGTHVAGTIAALDDSIGVLGVAPSAELYAVKVLGASGSGAISSIAQGLEWAGNNGMHVANLSLGSPSPSATLEQAVNSATSRGVLVVAASGNSGAGSISYPARYANAMAVGATDQNNNRASFSQYGAGLDIVAPGVNVQSTYPGSTYASLNGTSMATPHVAGAAALVKQQNPSWSNVQIRNHLKNTATSLGSTNLYGSGLVNAEAATR

SEQ ID NO: 57586 - protein, 269 aa, Unidentified
AQSVPWGISRVQAPAAHNRGLTGSGVKVAVLDTGISTHPDLNIRGGASFVPGEPSTQDGNGHGTHVAGTIAALNNNIGVLGVAPSAELYAVKVLAASGNGSVSSIAQGLEWAGNNGMHVANLSLGAPSPSATLEQAVNSATSRGVLVVAASGNSGAGSISYPARYANAMAVGATDQNNNRADFSQYGAGLDIVAPGVNVQSTYPGSTYASQNGTSMATPHVAGAAALVKQKNPSWSNVQIRNHLKNTATSLGSTNLYGSGLVNAEAATR

SEQ ID NO: 57587 - protein, 269 aa, Unidentified
AQSVPWGISRVQAPAAHRRGLTGRGVKVAVLDTGISTHPDLNIRGGASFVPGEPSTQDGNGHGTHVAGTIAALDNRIGVLGVAPDAELYAVKVLGASGSGSVSSIAQGLEWAGNNGMHVANLSLGSPSPSATLEQAVNSATSRGVLVVAASGNSGAGSISYPARYANAMAVGATDQNNNRASFSQYGAGLDIVAPGVNVQSTYPGSTYASLNGTSMATPHVAGAAALVKQKNPSWSNVQIRNRLKNTATSLGSTNLYGSGLVNAEAATR

SEQ ID NO: 57588 - protein, 269 aa, Unidentified
AQSVPWGISRVQAPAAHNRRLTGRGVKVAVLDTGISTHPDLNIRGGASFVPGEPSTQDGNGHGTHVAGTIAALNNGIGVLGVAPSAELYAVKVLGASGSGSVSSIAQGLEWAGNNDMHVANLSLGSPSPSATLEQAVNSATSRGVLVVAASGNSGAGSISYPARYANAMAVGATDQNNNRASFSQYGAGLDIVAPGVNVQSTYPGSTYASLNGTSMATPHVAGAAALVKQKNPSWSNVQIRDRLKNTATSLGSTNLYGSGLVNAEAATR

SEQ ID NO: 57589 - protein, 269 aa, Unidentified
AQSVPWGISRVQAPAAHNRGLYGSGVKVAVLDTGISTHPDLNIRGGASFVPGEPSTQDGNGHGTHVAGTIAALNNSIGVLGVAPSAELYAVKVLGASGNGNISSIAQGLEWAGNNGMHVANLSLGSPSPSATLEQAVNSATSRGVLVVAASGNSGAGSISYPARYANAMAVGATDQNNNRASFSQYGAGLDIVAPGVNVQSTYPGSTYASLNGTSMATPHVAGAALLVKQKNPSWSNVRIRNHLKNTATSLGSTNLYGSGLVNAEAATR

SEQ ID NO: 57590 - protein, 269 aa, Unidentified
AQSVPWGISRVQAPAAHNRGLAGSGVKVAVLDTGISTHPDLNIRGGASFVPGEPSTQDGNGHGTHVAGTIAALNNSIGVLGVAPSAELYAVKVLGASGTGGISSIAQGLEWAGNNGMHVANLSLGSPSPSATLEQAVNSATSRGVLVVAASGNSGAGSISYPARYANAMAVGATDQNNNRASFSQYGAGLDIVAPGVNVQSTYPGSTYASLNGTSMATPHVAGAAMLVKQKNPSWSNVSIRNHLKNTATSLGSTNLYGSGLVNAEAATR

SEQ ID NO: 57591 - protein, 269 aa, Unidentified
AQSVPWGISRVQAPAAHNRGLKGSGVKVAVLDTGISTHPDLNIRGGASFVPGEPSTQDGNGHGTHVAGTIAALNNSIGVLGVAPSAELYAVKVLGASGNGAISSIAQGLEWAGNNGMHVANLSLGSPSPSATLEQAVNSATSRGVLVVAASGNSGAGSISYPARYANAMAVGATDQNNNRASFSQYGAGLDIVAPGVNVQSTYPGSTYASLNGTSMATPHVAGAATLVKQKNPSWSNVRIRNHLKNTATSLGSTNLYGSGLVNAEAATR

SEQ ID NO: 57592 - protein, 269 aa, Unidentified
AQSVPWGISRVQAPAAHRRRLTGSGVKVAVLDTGISTHPDLDITGGASFVPGEPSTQDGNGHGTHVAGTIAALNNSIGVLGVAPSAELYAVKVLGASGSGSVSSIAQGLEWAGNNGMHVANLSLGSPSPSATLEQAVNSATSRGVLVVAASGNSGAGSISYPARYANAMAVGATDQNNNRASFSQYGAGLDIVAPGVNVQSTYPGSTYASLNGTSMATPHVAGAAAIVKQKNPSWRNVQIRNHLKNTATSLGSTNLYGSGLVNAEAATR

SEQ ID NO: 57593 - protein, 269 aa, Unidentified
AQSVPWGISRVQAPAAHNRGLTGRGVKVAVLDTGISTHPDLNIRGGASFVPGEPSTQDGEGHGTHVAGTIAALNNSIGVLGVAPSAELYAVKVLGASGSGSVSSIAQGLEWAGNNRMHVANLSLGSPSPSATLEQAVNSATSRGVLVVAASGNSGEGSIDYPARYANAMAVGATDQNNNRADFSQYGAGLDIVAPGVNVQSTYPGSTYASLNGTSMATPHVAGAAALVKQKNPSWSNVQIRNHLKNTATSLGSTNLYGSGLVNAEAATR

SEQ ID NO: 57594 - protein, 269 aa, Unidentified
AQSVPWGISRVQAPAAHRRGLWGRGVKVAVLDTGISTHPDLNIRGGASFVPGEPSTQDGNGHGTHVAGTIAALDNSIGVLGVAPSAELYAVKVLGASGSGSVSSIAQGLEWAGANGMHVANLSLGSPSPSATLEQAVNSATSRGVLVVAASGNSGAGSISYPARYANAMAVGATDQNNNRASFSQYGAGLDIVAPGVNVQSTYPGSTYASLNGTSMATPHVAGAAALVKQKNPSWSNVQIRNRLKNTATSLGSTNLYGSGLVNAEAATR

SEQ ID NO: 57595 - protein, 269 aa, Unidentified
AQSVPWGISRVQAPAAHNRGLTGSGVKVAVLDTGISTHPDLNIRGGASFVPGEPSTQDGNGHGTHVAGTIAALNNSIGVLGVAPSAELYAVKVLPATSAGAISSIAQGLEWAGNNGMHVANLSLGSPSPSATLEQAVNSATSRGVLVVAASGNSGAGSISYPARYANAMAVGATDQNNNRASFSQYGAGLDIVAPGVNVQSTYPGSTYASLNGTSMATPHVAGAAALVKQKNPSWSNVQIRNHLKNTATSLGSTNLYGSGLVNAEAATR

SEQ ID NO: 57596 - protein, 269 aa, Unidentified
AQSVPWGISRVQAPAAHNRRLTGRGVKVAVLDTGISTHPDLNIRGGASFVPGEPSTQDGNGHGTHVAGTIAALNNSIGVLGVAPSAELYAVKVLGASGSGSVSSIAQGLEWAGNNRMHVANLSLGSESPSATLEQAVNSATSRGVLVVAASGNSGADSISYPARYANAMAVGATDQNNNRASFSQYGAGLDIVAPGVNVQSTYPGSTYASLNGTSMATPHVAGAAALVKQKNPSWSNVQIRDHLKNTATSLGSTNLYGSGLVNAEAATR

SEQ ID NO: 57597 - protein, 269 aa, Unidentified
AQSVPWGISRVQAPAAHNRGLRGSGVKVAVLDTGISTHPDLNIRGGASFVPGEPSTQDGNGHGTHVAGTIAALNNSIGVLGVAPSAELYAVKVLGASGGGNISSIAQGLEWAGNNGMHVANLSLGSPSPSATLEQAVNSATSRGVLVVAASGNSGAGSISYPARYANAMAVGATDQNNNRASFSQYGAGLDIVAPGVNVQSTYPGSTYASLNGTSMATPHVAGAAVLVKQKNPSWSNVWIRNHLKNTATSLGSTNLYGSGLVNAEAATR

SEQ ID NO: 57598 - protein, 269 aa, Unidentified
AQSVPWGISRVQAPAAHNRRLTGSGVKVAVLDTGISTHPDLNIRGGASFVPGEPSTQDGNGHGTHVAGTIAALNNDIGVLGVAPSAELYAVKVLGASGSGSVSSIAQGLEWAGNNSMHVANLSLGSESPSATLEQAVNSATSRGVLVVAASGNSGADSISYPARYANAMAVGATDQNNNRADFSQYGAGLDIVAPGVNVQSTYPGSTYASLNGTSMATPHVAGAAALVKQKNPSWSNVQIRNHLKNTATSLGSTNLYGSGLVNAEAATR

SEQ ID NO: 57599 - protein, 269 aa, Unidentified
AQSVPWGISRVQAPAAHNRGLKGSGVKVAVLDTGISTHPDLNIRGGASFVPGEPSTQDGNGHGTHVAGTIAALNNSIGVLGVAPSAELYAVKVLGASGAGNISSIAQGLEWAGNNGMHVANLSLGSPSPSATLEQAVNSATSRGVLVVAASGNSGAGSISYPARYANAMAVGATDQNNNRASFSQYGAGLDIVAPGVNVQSTYPGSTYASLNGTSMATPHVAGAATLVKQKNPSWSNVRIRNHLKNTATSLGSTNLYGSGLVNAEAATR

SEQ ID NO: 57600 - protein, 269 aa, Unidentified
AQSVPWGISRVQAPAAHNRGLTGGGVKVAVLDTGISTHPDLNIRGGASFVPGEPSTQDGNGHGTHVAGTIAALNNNIGVLGVAPSAELYAVKVLGASGNGSVSSIAQGLEWAGNNGMHVANLSLGAPSPSATLEQAVNSATSRGVLVVAASGNSGAGSISYPARYANAMAVGATDQNNNRASFSQYGAGLDIVAPGVNVQSTYPGSTYASQNGTSMATPHVAGAAALVKQKNPSWSVVQIRNHLKNTATSLGSTNLYGSGLVNAEAATR

SEQ ID NO: 57601 - protein, 269 aa, Unidentified
AQSVPWGISRVQAPAAHRRGLTGSGVKVAVLDTGISTHPDLNIRGGASFVPGEPSTQDGNGHGTHVAGTIAALDNSIGVLGVAPSAELYAVKVLGASGGGAISSIAQGLEWAGNNGMHVANLSLGSPSPSATLEQAVNSATSRGVLVVAASGNSGAGSISYPARYANAMAVGATDQNNNRASFSQYGAGLDIVAPGVNVQSTYPGSTYASLNGTSMATPHVAGAAALVKQKNPSWSNVRIRNHLKNTATSLGSTNLYGSGLVNAEAATR

SEQ ID NO: 57602 - protein, 269 aa, Unidentified
AQSVPWGISRVQAPAAHNRGLTGSGVKVAVLDTGISTHPDLNIRGGASFVPGEPSTQDGEGHGTHVAGTIAALNNGIGVLGVAPSAELYAVKVLGASGSGSVSSIAQGLEWAGNNSMHVANLSLGSESPSATLEQAVNSATSRGVLVVAASGNSGAGSISYPARYANAMAVGATDQNNNRADFSQYGAGLDIVAPGVNVQSTYPGSTYASLNGTSMATPHVAGAAALVKQKNPSWSNVRIRNHLKNTATSLGSTNLYGSGLVNAEAATR

SEQ ID NO: 57603 - protein, 269 aa, Unidentified
AQSVPWGISRVQAPAAHNRGLTGSGVKVAVLDTGISTHPDLNIRGGASFVPGEPSVQDGNGHGTHVAGTIAALNNSIGVLGVAPSAELYAVKVLGADGRGAISSIAQGLEWAGNNGMHVANLSLGSPSPSATLEQAVNSATSRGVLVVAASGNSGASSISYPARYANAMAVGATDQNNNRASFSQYGAGLDIVAPGVNVQSTYPGSTYASLNGTSMATPHVAGAAALVKQKNPSWSNVQIRNHLKNTATSLGSTNLYGSGLVNAEAATR

SEQ ID NO: 57604 - protein, 269 aa, Unidentified
AQSVPWGISRVQAPAAHNRGLRGSGVKVAVLDTGISTHPDLNIRGGASFVPGEPSTQDGNGHGTHVAGTIAALNNSIGVLGVAPSAELYAVKVLGASGNGGISSIAQGLEWAGNNGMHVANLSLGSPSPSATLEQAVNSATSRGVLVVAASGNSGAGSISYPARYANAMAVGATDQNNNRASFSQYGAGLDIVAPGVNVQSTYPGSTYASLNGTSMATPHVAGAAVLVKQKNPSWSNVSIRNHLKNTATSLGSTNLYGSGLVNAEAATR

SEQ ID NO: 57605 - protein, 269 aa, Unidentified
AQSVPWGISRVQAPAAHNRGLQGSGVKVAVLDTGISTHPDLNIRGGASFVPGEPSTQDGNGHGTHVAGTIAALNNSIGVLGVAPSAELYAVKVLGASGNGGISSIAQGLEWAGNNGMHVANLSLGSPSPSATLEQAVNSATSRGVLVVAASGNSGAGSISYPARYANAMAVGATDQNNNRASFSQYGAGLDIVAPGVNVQSTYPGSTYASLNGTSMATPHVAGAAVLVKQKNPSWSNVWIRNHLKNTATSLGSTNLYGSGLVNAEAATR

SEQ ID NO: 57606 - protein, 269 aa, Unidentified
AQSVPWGISRVQAPAAHNRGLTGRGVKVAVLDTGISTHPDLNIRGGASFVPGEPSTQDGNGHGTHVAGTIAALNNDIGVLGVAPSAELYAVKVLGASGSGSVSSIAQGLEWAGNNDMHVANLSLGSPSPSATLEQAVNSATSRGVLVVAASGNSGADSISYPARYANAMAVGATDQNNNRADFSQYGAGLDIVAPGVNVQSTYPGSTYASLNGTSMATPHVAGAAALVKQKNPSWSNVRIRNHLKNTATSLGSTNLYGSGLVNAEAATR

SEQ ID NO: 57607 - protein, 269 aa, Unidentified
AQSVPWGISRVQAPAAHNRGLTGRGVKVAVLDTGISTHPDLNIRGGASFVPGEPSTQDGNGHGTHVAGTIAALNNGIGVLGVAPSAELYAVKVLGASGSGSVSSIAQGLEWAGNNDMHVANLSLGSESPSATLEQAVNSATSRGVLVVAASGNSGAGSISYPARYANAMAVGATDQNNNRADFSQYGAGLDIVAPGVNVQSTYPGSTYASLNGTSMATPHVAGAAALVKQKNPSWSNVQIRDHLKNTATSLGSTNLYGSGLVNAEAATR

SEQ ID NO: 57608 - protein, 269 aa, Unidentified
AQSVPWGISRVQAPASHNRGLAGSGVKVAVLDTGISTHPDLNIRGGASFVPGEPSTQDGNGHGTHVAGTIAALNNSIGVLGVAPSAELYAVKVLGASGAGGISSIAQGVEWAGNNGMHVANLSLGSPSPSATLEQAVNSATSRGVLVVAASGNSGAGSISYPARYANAMAVGATDQNNNRASFSQYGAGLDIVAPGVNVQSTYPGSTYASLNGTSMATPHVAGAAALVKQKNPSWSNVQIRNHLKNTATSLGSTNLYGSGLVNAEAATR

SEQ ID NO: 57609 - protein, 269 aa, Unidentified
AQSVPWGISRVQAPAAHRRGLTGSGVKVAVLDTGISTHPDLNIRGGASFVPGEPSTQDGNGHGTHVAGTIAALDNNIGVLGVAPRAELYAVKVLGASGSGSVSSIAQGLEWAGNNGMHVANLSLGSPSPSATLEQAVNSATSRGVLVVAASGNSGAGSISYPARYANAMAVGATDQNNNRASFSQYGAGLDIVAPGVNVLSTYPGSTYASLNGTSMATPHVAGAAALVKQKNPSWSNVQIRNRLKNTATSLGSTNLYGSGLVNAEAATR

SEQ ID NO: 57610 - protein, 269 aa, Bacillus lentus
AQSVPWGIRRVEAQAAHNRGLTGSGVRVAVLDTGISTHPDLNIRGGASFVPGEPSTQDGNGHGTHVAGTIAALNNSIGVLGVAPSAELYAVKVLGASGSGSVSSIAQGLEWAGNNGMHVANLSLGSPSPSATLEQAVNSATSRGVLVVAASGNSGAGSISAPASYANAMAVGATDQNNNRASFSQYGAGLDIVAPGVNVQSTYPGSTYASLNGTSMATPHVAGAAALVKQKNPSWSNVQIRNHLKNTATSLGSTNLYGSGLVNAEAATR

SEQ ID NO: 57611 - protein, 269 aa, Unidentified
AQSVPWGISRVQAPAAHRRGLTGRGVKVAVLDTGISTHPDLNIRGGASFVPGEPSTQDGNGHGTHVAGTIAALDNSIGVLGVAPSAELYAVKVLGASGSGAVSSIAQGLEWAGNNGMHVANLSLGSPSPSATLEQAVNSATSRGVLVVAASGNSGAGSISYPARYANAMAVGATDQNNNRASFSQYGAGLDIVAPGVNVQSTYPGSTYASLNGTSMATPHVAGAAVLVKQKNPSWSNVRIRNHLKNTATSLGSTNLYGSGLVNAEAATR

SEQ ID NO: 57612 - protein, 269 aa, Unidentified
AQSVPWGISRVQAPAAHNRRLTGRGVKVAVLDTGISTHPDLNIRGGASFVPGEPSTQDGEGHGTHVAGTIAALNNGIGVLGVAPSAELYAVKVLGASGSGSVSSIAQGLEWAGNNSMHVANLSLGSESPSATLEQAVNSATSRGVLVVAASGNSGAGSISYPARYANAMAVGATDQNNNRASFSQYGAGLDIVAPGVNVQSTYPGSTYASLNGTSMATPHVAGAAALVKQKNPSWSNVQIRNHLKNTATSLGSTNLYGSGLVNAEAATR

SEQ ID NO: 57613 - protein, 269 aa, Unidentified
AQSVPWGISRVQAPAAHNRKLLGSGVKVAVLDTGISTHPDLNIRGGASFVPGEPSTQDGNGHGTHVAGTIAALNNNIGVLGVAPSAELYAVKVLGASGSGSVSSIAQGLEWAGNNRMHVANLSLGDPSPSATLEQAVNSATSRGVLVVAASGNSGAGSISYPARYANAMAVGATDQNNNRASFSQYGAGLDIVAPGVNVQSTYPGSTYASENGTSMATPHVAGAAALVKQKNPSWSNVQIRNHLKNTATSLGSTNLYGSGLVNAEAATR

SEQ ID NO: 57614 - protein, 269 aa, Unidentified
AQSVPWGISRVQAPAAHNRGLRGSGVKVAVLDTGISTHPDLNIRGGASFVPGEPSTQDGNGHGTHVAGTIAALNNSIGVLGVAPSAELYAVKVLGASGGGNLSSIAQGLEWAGNNGMHVANLSLGSPSPSATLEQAVNSATSRGVLVVAASGNSGAGSISYPARYANAMAVGATDQNNNRASFSQYGAGLDIVAPGVNVQSTYPGSTYASLNGTSMATPHVAGAALLVKQKNPSWSNVRIRNHLKNTATSLGSTNLYGSGLVNAEAATR

SEQ ID NO: 57615 - protein, 269 aa, Unidentified
AQSVPWGISRVQAPAAHNRRLTGSGVKVAVLDTGISTHPDLNIRGGASFVPGEPSTQDGEGHGTHVAGTIAALNNRIGVLGVAPSAELYAVKVLGASGSGSVSSIAQGLEWAGNNGMHVANLSLGSESPSATLEQAVNSATSRGVLVVAASGNSGAGSISYPARYANAMAVGATDQNNNRADFSQYGAGLDIVAPGVNVQSTYPGSTYASLNGTSMATPHVAGAAALVKQKNPSWSNVQIRDHLKNTATSLGSTNLYGSGLVNAEAATR

SEQ ID NO: 57616 - protein, 269 aa, Unidentified
AQSVPWGISRVQAPAAHNRGLTGRGVKVAVLDTGISTHPDLNIRGGASFVPGEPSTQDGEGHGTHVAGTIAALNNGIGVLGVAPSAELYAVKVLGASGSGSVSSIAQGLEWAGNNSMHVANLSLGSPSPSATLEQAVNSATSRGVLVVAASGNSGADSISYPARYANAMAVGATDQNNNRASFSQYGAGLDIVAPGVNVQSTYPGSTYASLNGTSMATPHVAGAAALVKQKNPSWSNVQIRNRLKNTATSLGSTNLYGSGLVNAEAATR

SEQ ID NO: 57617 - protein, 269 aa, Unidentified
AQSVPWGISRVQAPAAHNRGLQGSGVKVAVLDTGISTHPDLNIRGGASFVPGEPSTQDGNGHGTHVAGTIAALNNSIGVLGVAPSAELYAVKVLGASGAGGISSIAQGLEWAGNNGMHVANLSLGSPSPSATLEQAVNSATSRGVLVVAASGNSGAGSISYPARYANAMAVGATDQNNNRASFSQYGAGLDIVAPGVNVQSTYPGSTYASLNGTSMATPHVAGAAMLVKQKNPSWSNVRIRNHLKNTATSLGSTNLYGSGLVNAEAATR

SEQ ID NO: 57618 - protein, 269 aa, Unidentified
AQSVPWGISRVQAPAAHNRGLTGSGVKVAVLDTGISTHPDLNIRGGASFVPGEPSTQDGNGHGTHVAGTIAALNNDIGVLGVAPSAELYAVKVLGASGSGSVSSIAQGLEWAGNNDMHVANLSLGSPSPSATLEQAVNSATSRGVLVVAASGNSGADSISYPARYANAMAVGATDQNNNRADFSQYGAGLDIVAPGVNVQSTYPGSTYASLNGTSMATPHVAGAAALVKQKNPSWSNVRIRNRLKNTATSLGSTNLYGSGLVNAEAATR

SEQ ID NO: 57619 - protein, 269 aa, Unidentified
AQSVPWGISRVQAPAAHNRGLRGSGVKVAVLDTGISTHPDLNIRGGASFVPGEPSTQDGNGHGTHVAGTIAALNNSIGVLGVAPSAELYAVKVLGASGAGNISSIAQGLEWAGNNGMHVANLSLGSPSPSATLEQAVNSATSRGVLVVAASGNSGAGSISYPARYANAMAVGATDQNNNRASFSQYGAGLDIVAPGVNVQSTYPGSTYASLNGTSMATPHVAGAAMLVKQKNPSWSNVSIRNHLKNTATSLGSTNLYGSGLVNAEAATR

SEQ ID NO: 57620 - protein, 269 aa, Unidentified
AQSVPWGISRVQAPAAHNRGLTGSGVKVAVLDTGISTHPDLNIRGGASFVPGEPSTQDGNGHGTHVAGTIAALDNNIGVLGVAPRAELYAVKVLGASGSGSVSSIAQGLEWAGNNRMHVANLSLGSQSPSATLEQAVNSATSRGVLVVAASGNSGAGSISYPARYANAMAVGATDQNNNRASFSQYGAGLDIVAPGVNVLSTYPGSTYASLNGTSMATPHVAGAAALVKQKNPSWSNVQIRNHLKNTATSLGSTNLYGSGLVNAEAATR

SEQ ID NO: 57621 - protein, 269 aa, Unidentified
AQSVPWGISRVQAPAAHNRGLRGSGVKVAVLDTGISTHPDLNIRGGASFVPGEPSTQDGNGHGTHVAGTIAALNNSIGVLGVAPSAELYAVKVLGASGTGNISSIAQGLEWAGNNGMHVANLSLGSPSPSATLEQAVNSATSRGVLVVAASGNSGAGSISYPARYANAMAVGATDQNNNRASFSQYGAGLDIVAPGVNVQSTYPGSTYASLNGTSMATPHVAGAALLVKQKNPSWSNVWIRNHLKNTATSLGSTNLYGSGLVNAEAATR

SEQ ID NO: 57622 - protein, 269 aa, Unidentified
AQSVPWGISRVQAPAAHNRGLKGSGVKVAVLDTGISTHPDLNIRGGASFVPGEPSTQDGNGHGTHVAGTIAALNNSIGVLGVAPSAELYAVKVLGASGGGALSSIAQGLEWAGNNGMHVANLSLGSPSPSATLEQAVNSATSRGVLVVAASGNSGAGSISYPARYANAMAVGATDQNNNRASFSQYGAGLDIVAPGVNVQSTYPGSTYASLNGTSMATPHVAGAAMLVKQKNPSWSNVRIRNHLKNTATSLGSTNLYGSGLVNAEAATR

SEQ ID NO: 57623 - protein, 269 aa, Unidentified
AQSVPWGISRVQAPAAHNRKLTGSGVKVAVLDTGISTHPDLNIRGGASFVPGEPSTQDGEGHGTHVAGTIAALNNSIGVLGVAPSAELYAVKVLSASGNGSVSSIANGLEWAGLNGMHVANLSLGSPSPSATLEQAVNSATSRGVLVVAASGNSGAGSISYPARYANAMAVGATDQNNNRASFSQYGAGLDIVAPGVNVQSTYPGSTYASLNGTSMATPHVAGAAALVKQKNPSWSNVQIRNHLKNTATSLGSTNLYGSGLVNAEAATR

SEQ ID NO: 57624 - protein, 269 aa, Unidentified
AQSVPWGISRVQAPAAHNRGLKGSGVKVAVLDTGISTHPDLNIRGGASFVPGEPSTQDGNGHGTHVAGTIAALNNSIGVLGVAPSAELYAVKVLGASGNGALSSIAQGLEWAGNNGMHVANLSLGSPSPSATLEQAVNSATSRGVLVVAASGNSGAGSISYPARYANAMAVGATDQNNNRASFSQYGAGLDIVAPGVNVQSTYPGSTYASLNGTSMATPHVAGAATLVKQKNPSWSNVRIRNHLKNTATSLGSTNLYGSGLVNAEAATR

SEQ ID NO: 57625 - protein, 269 aa, Unidentified
AQSVPWGISRVQAPAAHNRGLRGSGVKVAVLDTGISTHPDLNIRGGASFVPGEPSTQDGNGHGTHVAGTIAALNNSIGVLGVAPSAELYAVKVLGASGTGNISSIAQGLEWAGNNGMHVANLSLGSPSPSATLEQAVNSATSRGVLVVAASGNSGAGSISYPARYANAMAVGATDQNNNRASFSQYGAGLDIVAPGVNVQSTYPGSTYASLNGTSMATPHVAGAAMLVKQKNPSWSNVRIRNHLKNTATSLGSTNLYGSGLVNAEAATR

SEQ ID NO: 57626 - protein, 269 aa, Unidentified
AQSVPWGISRVQAPAAHNRRLTGSGVKVAVLDTGISTHPDLNIRGGASFVPGEPSTQDGNGHGTHVAGTIAALNNDIGVLGVAPSAELYAVKVLGASGSGSVSSIAQGLEWAGNNDMHVANLSLGSPSPSATLEQAVNSATSRGVLVVAASGNSGADSISYPARYANAMAVGATDQNNNRADFSQYGAGLDIVAPGVNVQSTYPGSTYASLNGTSMATPHVAGAAALVKQKNPSWSNVQIRNRLKNTATSLGSTNLYGSGLVNAEAATR

SEQ ID NO: 57627 - protein, 269 aa, Unidentified
AQSVPWGISRVQAPAAHNRGLTGRGVKVAVLDSGISTHPDLNIRGGASFVPGEPSTQDGEGHGTHVAGTIAALNNSIGVLGVAPSAELYAVKVLGASGSGSVSSIAQGLEWAGNNRMHVANLSLGSPSPSATLEQAVNSATSRGVLVVAASGNSGAGSIDYPARYANAMAVGATDQNNNRADFSQYGAGLDIVAPGVNVQSTYPGSTYASLNGTSMATPHVAGAAALVKQKNPSWSNVQIRNHLKNTATSLGSTNLYGSGLVNAEAATR

SEQ ID NO: 57628 - protein, 269 aa, Unidentified
AQSVPWGISRVQAPAAHNRKLLGSGVKVAVLDTGISTHPDLNIRGGASFVPGEPSTQDGNGHGTHVAGTIAALNNNIGVLGVAPSAELYAVKVLGASGSGSVSSIAQGLEWAGNNGMHVANLSLGDPSPSATLEQAVNSATSRGVLVVAASGNSGAGSISYPARYANAMAVGATDQNNNRASFSQYGAGLDIVAPGVNVQSTYPGSAYASENGTSMATPHVAGAAALVKQKNPSWSNVQIRNHLKNTATSLGSTNLYGSGLVNAEAATR

SEQ ID NO: 57629 - protein, 269 aa, Unidentified
AQSVPWGISRVQAPAAHNRKLTGSGVKVAVLDTGISTHPDLNIRGGASFVPGEPSTQDGNGHGTHVAGTIAALNNSIGVLGVAPSAELYAVKVLGASGDGSVSSIAQGLEWAGNNGMHVANLSLGLPSPSATLEQAVNSATSRGVLVVAASGNSGAGSISYPARYANAMAVGATDQNNNRASFSQYGAGLDIVAPGVNVQSTYPGPTYASENGTSMATPHVAGAAALVKQKNPRWSNVQIRNHLKNTATSLGSTNLYGSGLVNAEAATR

SEQ ID NO: 57630 - protein, 269 aa, Unidentified
AQSVPWGISRVQAPAAHRRGLTGRGVKVAVLDTGISTHPDLNIRGGASFVPGEPSTQDGNGHGTHVAGTIAALDNSIGVLGVAPSAELYAVKVLGASGSGSVSSIAQGLEWAGNNGMHVANLSLGSPSPSATLEQAVNSATSRGVLVVAASGNSGAGSISYPARYANAMAVGATDQDNNRASFSQYGAGLDIVAPGVNVQSTYPGSTYASLNGTSMATPHVAGAAALVKQKNPSWSNVRIRTHLKNTATSLGSTNLYGSGLVNAEAATR

SEQ ID NO: 57631 - protein, 269 aa, Unidentified
AQSVPWGISRVQAPAAHNRRLTGSGVKVAVLDTGISTHPDLNIRGGASFVPGEPSTQDGNGHGTHVAGTIAALNNDIGVLGVAPSAELYAVKVLGASGSGSVSSIAQGLEWAGNNSMHVANLSLGSESPSATLEQAVNSATSRGVLVVAASGNSGADSISYPARYANAMAVGATDQNNNRASFSQYGAGLDIVAPGVNVQSTYPGSTYASLNGTSMATPHVAGAAALVKQKNPSWSNVRIRNHLKNTATSLGSTNLYGSGLVNAEAATR

SEQ ID NO: 57632 - protein, 269 aa, Unidentified
AQSVPWGISRVQAPAAHNRKLTGFGVKVAVLDTGISTHPDLNIRGGASFVPGEPSTQDGNGHGTHVAGTIAALNNNIGVLGVAPSAELYAVKVLGASGSGSVSSIAQGLEWAGNNRMHVANLSLGDPSPSATLEQAVNSATSRGVLVVAASGNSGAGSISYPARYANAMAVGATDQNNNRASFSQYGAGLDIVAPGVNVQSTYPGSTYASENGTSMATPHVAGAAALVKQKNPSWSNVQIRNHLKNTATSLGSTNLYGSGLVNAEAATR

SEQ ID NO: 57633 - protein, 269 aa, Lederbergia lentus
AQSIPWGISRVQAPAAHNRGLTGSGVKVAVLDTGISTHPDLNIRGGASFVPGEPSTQDGNGHGTHVAGTIAALNNSIGVLGVAPSAELYAVKVLGADGEGAISSIAQGLEWAGNNGMHVANLSLGSPSPSATLEQAVNSATSRGVLVVAASGNSGASSISYPARYANAMAVGATDQNNNRASFSQYGAGLDIVAPGVNVQSTYPGSTYASLNGTSMATPHVAGAAALVKQKNPSWSNVQIRNHLKNTATSLGSTNLYGSGLVNAEAATR

SEQ ID NO: 57634 - protein, 269 aa, Unidentified
AQSVPWGISRVQAPAAHNRRLTGSGVKVAVLDTGISTHPDLNIRGGASFVPGEPSTQDGNGHGTHVAGTIAALNNSIGVLGVAPSAELYAVKVLGASGAGALSSIAQGLEWAGNNGMHVANLSLGSPSPSATLEQAVNSATSRGVLVVAASGNSGAGSISYPARYANAMAVGATDQNNNRASFSQYGAGLDIVAPGVNVQSTYPGSTYASLNGTSMATPHVAGAAVLVKQKNPSWSNVRIRNHLKNTATSLGSTNLYGSGLVNAEAATR

SEQ ID NO: 57635 - protein, 269 aa, Unidentified
AQSVPWGISRVQAPASHNRGLAGSGVKVAVLDTGISTHPDLNIRGGASFVPGEPSTQDGNGHGTHVAGTIAALNNSIGVLGVAPSAELYAVKVLGASGAGSLSSIAQGLEWAGNNGMHVANLSLGNPSPSATLEQAVNSATSRGVIVVAASGNSGAGSISYPARYANAMAVGATDQNNNRASFSQYGAGLDIVAPGVNVQSTYPGSTYASLNGTSMATPHVAGAAALVKQKNPSWSNVQIRNHLKNTATSLGSTNLYGSGLVNAEAATR

SEQ ID NO: 57636 - protein, 269 aa, Unidentified
AQSVPWGISRVQAPAAHNRGLTGSGVKVAVLDTGISTHPDLNIRGGASFVPGEPSTQDGNGHGTHVAGTIAALNNSIGVLGVAPSAELYAVKVLGADGRGAISSIAQGLEWAGNNGMHVANLSLGSPSPSATLEQAVNSATSRGVLVVAASGNSGASSISYPARYANAMAVGATDQNNNRASFSQYGAGLDIVAPGVNVQSTYPGSTYASLNGTSMATPHVAGAAALVKQKNPSWSNRQIRNHLKNTATSLGSTNLYGSGLVNAEAATR

SEQ ID NO: 57637 - protein, 269 aa, Unidentified
AQSVPWGISRVQAPAAHNRKLTGFGVKVAVLDTGISTHPDLNIRGGASFVPGEPSTQDGNGHGTHVAGTIAALNNSIGVLGVAPSAELYAVKVLGASGSGSVSSIAQGLEWAGNNRMHVANLSLGSPSPSATLEQAVNSATSRGVLVVAASGNSGAGSIDYPARYANAMAVGATDQNNNRASFSQYGAGLDIVAPGVNVQSTYPGSAYASENGTSMATPHVAGAAALVKQKNPSWSNVQIRNHLKNTATSLGSTNLYGSGLVNAEAATR

SEQ ID NO: 57638 - protein, 269 aa, Unidentified
AQSVPWGISRVQAPAAHNRGLAGSGVKVAVLDTGISTHPDLNIRGGASFVPGEPSTQDGNGHGTHVAGTIAALNNSIGVLGVAPSAELYAVKVLGASGAGGISSIAQGLEWAGNNGMHVANLSLGSPSPSATLEQAVNSATSRGVLVVAASGNSGAGSISYPARYANAMAVGATDQNNNRASFSQYGAGLDIVAPGVNVQSTYPGSTYASLNGTSMATPHVAGAALLVKQKNPSWSNVRIRNHLKNTATSLGSTNLYGSGLVNAEAATR

SEQ ID NO: 57639 - protein, 269 aa, Unidentified
AQSVPWGISRVQAPAAHNRGLTGSGVKVAVLDTGISTHPDLNIRGGASFVPGEPSTQDGNGHGTHVAGTIAALNNSIGVLGVAPSAELYAVKVLGADGRGAISSIAQGLEWAGNNGMHVANLSLGSPSPSATLEQAVNSATARGVLVVAASGNSGASSISYPARYANAMAVGATDQNNNRASFSQYGAGLDIVAPGVNVQSTYPGSTYASLNGTSMATPHVAGAAALVKQKNPSWSNVQIRNHLKNTATSLGSTNLYGSGLVNAEAATR

SEQ ID NO: 57640 - protein, 269 aa, Unidentified
AQSVPWGISRVQAPAAHNRKLTASGVKVAVLDTGISTHPDLNIRGGASFVPGEPSTQDGEGHGTHVAGTIAALNNSIGVLGVAPSAELYAVKVLGASGSGSVSSIAQGLEWAGLNRMHVANLSLGSPSPSATLEQAVNSATSRGVLVVAASGNSGAGSISYPARYANAMAVGATDQNNNRASFSQYGAGLDIVAPGVNVQSTYPGSAYASLNGTSMATPHVAGAAALVKQKNPSWSNVQIRNHLKNTATSLGSTNLYGSGLVNAEAATR

SEQ ID NO: 57641 - protein, 269 aa, Unidentified
AQSVPWGISRVQAPAAHNRRLTGRGVKVAVLDTGISTHPDLNIRGGASFVPGEPSTQDGEGHGTHVAGTIAALNNDIGVLGVAPSAELYAVKVLGASGSGSVSSIAQGLEWAGNNDMHVANLSLGSPSPSATLEQAVNSATSRGVLVVAASGNSGAGSISYPARYANAMAVGATDQNNNRADFSQYGAGLDIVAPGVNVQSTYPGSTYASLNGTSMATPHVAGAAALVKQKNPSWSNVQIRNHLKNTATSLGSTNLYGSGLVNAEAATR

SEQ ID NO: 57642 - protein, 269 aa, Unidentified
AQSVPWGISRVQAPAAHNRGLAGSGVKVAVLDTGISTHPDLNIRGGASFVPGEPSTQDGNGHGTHVAGTIAALNNSIGVLGVAPSAELYAVKVLGASGGGNLSSIAQGLEWAGNNGMHVANLSLGSPSPSATLEQAVNSATSRGVLVVAASGNSGAGSISYPARYANAMAVGATDQNNNRASFSQYGAGLDIVAPGVNVQSTYPGSTYASLNGTSMATPHVAGAAVLVKQKNPSWSNVSIRNHLKNTATSLGSTNLYGSGLVNAEAATR

SEQ ID NO: 57643 - protein, 269 aa, Unidentified
AQSVPWGISRVQAPAAHNRGLQGSGVKVAVLDTGISTHPDLNIRGGASFVPGEPSTQDGNGHGTHVAGTIAALNNSIGVLGVAPSAELYAVKVLGASGTGNISSIAQGLEWAGNNGMHVANLSLGSPSPSATLEQAVNSATSRGVLVVAASGNSGAGSISYPARYANAMAVGATDQNNNRASFSQYGAGLDIVAPGVNVQSTYPGSTYASLNGTSMATPHVAGAALLVKQKNPSWSNVWIRNHLKNTATSLGSTNLYGSGLVNAEAATR

SEQ ID NO: 57644 - protein, 269 aa, Unidentified
AQSVPWGISRVQAPAAHNRGLQGSGVKVAVLDTGISTHPDLNIRGGASFVPGEPSTQDGNGHGTHVAGTIAALNNSIGVLGVAPSAELYAVKVLGASGGGNISSIAQGLEWAGNNGMHVANLSLGSPSPSATLEQAVNSATSRGVLVVAASGNSGAGSISYPARYANAMAVGATDQNNNRASFSQYGAGLDIVAPGVNVQSTYPGSTYASLNGTSMATPHVAGAATLVKQKNPSWSNVRIRNHLKNTATSLGSTNLYGSGLVNAEAATR

SEQ ID NO: 57645 - protein, 269 aa, Unidentified
AQSVPWGISRVQAPAAHNRRLWGSGVKVAVLDTGISTHPDLRIRGGASFVPGEPSTQDGNGHGTHVAGTIAALNNSIGVLGVAPSAELYAVKVLGASGAGSVSSIAQGLEWAGNNGMHVANLSLGSPSPSATLEQAVNSATSRGVLVVAASGNSGAGSISYPARYANAMAVGATDQNNNRASFSQYGAGLDIVAPGVNVQSTYPQSAYASLNGTSMATPHVAGAAALVKQKNPSWSNVQIRNHLKNTATSLGSTNLYGSGLVNAEAATR

SEQ ID NO: 57646 - protein, 269 aa, Unidentified
AQSVPWGISRVQAPAAHRRGLTGRGVKVAVLDTGISTHPDLRIRGGASFVPGEPSTQDGNGHGTHVAGTIAALDNSIGVLGVAPSAELYAVKVLGASGSGSVSSIAQGLEWAGNNGMHVANLSLGSPSPSATLEQAVNSATSRGVLVVAASGNSGAGSISYPARYANAMAVGATDQNNNRASFSQYGAGLDIVAPGVNVQSTYPGSTYASLNGTSMATPHVAGAAALVKQKNPSWSNVQIRNRLKNTATSLGSTNLYGSGLVRAEAATR

SEQ ID NO: 57647 - protein, 269 aa, Unidentified
AQSVPWGISRVQAPAAHNRGLRGSGVKVAVLDTGISTHPDLNIRGGASFVPGEPSTQDGNGHGTHVAGTIAALNNSIGVLGVAPSAELYAVKVLGASGAGNLSSIAQGLEWAGNNGMHVANLSLGSPSPSATLEQAVNSATSRGVLVVAASGNSGAGSISYPARYANAMAVGATDQNNNRASFSQYGAGLDIVAPGVNVQSTYPGSTYASLNGTSMATPHVAGAALLVKQKNPSWSNVRIRNHLKNTATSLGSTNLYGSGLVNAEAATR

SEQ ID NO: 57648 - protein, 269 aa, Unidentified
AQSVPWGISRVQAPAAHNRKLTGSGVKVAVLDTGISTHPDLNIRGGASFVPGEPSTQDGEGHGTHVAGTIAALNNNIGVLGVAPSAELYAVKVLGASGSGSVSSIAQGLEWAGLNGMHVANLSLGSPSPSATLEQAVNSATSRGVLVVAASGNSGAGSISYPARYANAMAVGATDQNNNRASFSQYGAGLDIVAPGVNVQSTYPGSAYASNNGTSMATPHVAGAAALVKQKNPSWSNVQIRNHLKNTATSLGSTNLYGSGLVNAEAATR

SEQ ID NO: 57649 - protein, 269 aa, Unidentified
AQSVPWGISRVQAPAAHNRGLYGSGVKVAVLDTGISTHPDLNIRGGASFVPGEPSTQDGNGHGTHVAGTIAALNNSIGVLGVAPSAELYAVKVLGASGAGNISSIAQGLEWAGNNGMHVANLSLGSPSPSATLEQAVNSATSRGVLVVAASGNSGAGSISYPARYANAMAVGATDQNNNRASFSQYGAGLDIVAPGVNVQSTYPGSTYASLNGTSMATPHVAGAALLVKQKNPSWSNVWIRNHLKNTATSLGSTNLYGSGLVNAEAATR

SEQ ID NO: 57650 - protein, 269 aa, Unidentified
AQSVPWGISRVQAPAAHNRGLRGSGVKVAVLDTGISTHPDLNIRGGASFVPGEPSTQDGNGHGTHVAGTIAALNNSIGVLGVAPSAELYAVKVLGASGTGNLSSIAQGLEWAGNNGMHVANLSLGSPSPSATLEQAVNSATSRGVLVVAASGNSGAGSISYPARYANAMAVGATDQNNNRASFSQYGAGLDIVAPGVNVQSTYPGSTYASLNGTSMATPHVAGAAMLVKQKNPSWSNVRIRNHLKNTATSLGSTNLYGSGLVNAEAATR

SEQ ID NO: 57651 - protein, 269 aa, Lederbergia lentus
AQSVPWGISRVQAPAAHNRGLTGSGVKVAVLDTGISTHPDLNIRGGASFVPGEPSTQDGNDHGTHVAGTIAALNNSIGVLGVAPSAELYAVKVLGADGEGAISSIAQGLEWAGNNGMHVANLSLGSPSPSATLEQAVNSATSRGVLVVAASGNSGASSISYPARYANAMAVGATDQNNNRASFSQYGAGLDIVAPGVNVQSTYPGSTYASLNGTSMATPHVAGAAALVKQKNPSWSNVQIRNHLKNTATSLGSTNLYGSGLVNAEAATR

SEQ ID NO: 57652 - protein, 269 aa, Unidentified
AQSVPWGISRVQAPAAHNRGLAGSGVKVAVLDTGISTHPDLNIRGGASFVPGEPSTQDGNGHGTHVAGTIAALNNSIGVLGVAPSAELYAVKVLGASGTGAISSIAQGLEWAGNNGMHVANLSLGSPSPSATLEQAVNSATSRGVLVVAASGNSGAGSISYPARYANAMAVGATDQNNNRASFSQYGAGLDIVAPGVNVQSTYPGSTYASLNGTSMATPHVAGAAVLVKQKNPSWSNVRIRNHLKNTATSLGSTNLYGSGLVNAEAATR

SEQ ID NO: 57653 - protein, 269 aa, Unidentified
AQSVPWGISRVQAPAAHNRGLTGRGVKVAVLDTGISTHPDLNIRGGASFVPGEPSTQDGNGHGTHVAGTIAALNNDIGVLGVAPSAELYAVKVLGASGSGSVSSIAQGLEWAGNNDMHVANLSLGSESPSATLEQAVNSATSRGVLVVAASGNSGAGSISYPARYANAMAVGATDQNNNRASFSQYGAGLDIVAPGVNVQSTYPGSTYASLNGTSMATPHVAGAAALVKQKNPSWSNVQIRDRLKNTATSLGSTNLYGSGLVNAEAATR

SEQ ID NO: 57654 - protein, 269 aa, Unidentified
AQSVPWGISRVQAPAAHNRRLWGRGVKVAVLDTGISTHPDLNIRGGASFVPGEPSTQDGNGHGTHVAGTIAALNNSIGVLGVAPSAELYAVKVLGASGAGSVSSIAQGLEWAGLNGMHVANLSLGSPSPSATLEQAVNSATSRGVLVVAASGNSGAGSISYPARYANAMAVGATDQNNNRASFSQYGAGLDIVAPGVNVQSTYIGSTYASLNGTSMATPHVAGAAALVKQKNPSWSNVQIRNHLKNTATSLGSTNLYGSGLVNAEAATR

SEQ ID NO: 57655 - protein, 269 aa, Unidentified
AQSVPWGISRVQAPAAHNRKLTGSGVKVAVLDTGISTHPDLNIRGGASFVPGEPSTQDGEGHGTHVAGTIAALNNNIGVLGVAPSAELYAVKVLAASGQGSVSSIAQGLEWAGLNGMHVANLSLGAPSPSATLEQAVNSATSRGVLVVAASGNSGAGSISYPARYANAMAVGATDQNNNRASFSQYGAGLDIVAPGVNVQSTYPGSTYASLNGTSSATPHVAGAAALVKQKNPSWSNVQIRNHLKNTATSLGSTNLYGSGLVNAEAATR

SEQ ID NO: 57656 - protein, 269 aa, Unidentified
AQSVPWGISRVQAPASHNRGLAGSGVKVAVLDTGISTHPDLNIRGGASFVPGEPSTQDGNGHGTHVAGTIAALNNSIGVLGVAPSAELYAVKVLGASGAGGLSSIAQGLEWAGNNGMHVANLSLGNPSPSATLEQAVNSATSRGVLVVAASGNSGAGSISYPARYANAMAVGATDQNNNRASFSQYGAGLDIVAPGVNVQSTYPGSTYASLNGTSMATPHVAGAAALVKQKNPSWSNVQIRNHLKNTATSLGSTNLYGSGLVNAEAATR

SEQ ID NO: 57657 - protein, 269 aa, Unidentified
AQSVPWGISRVQAPAAHNRGLRGSGVKVAVLDTGISTHPDLNIRGGASFVPGEPSTQDGNGHGTHVAGTIAALNNSIGVLGVAPSAELYAVKVLGASGGGAISSIAQGLEWAGNNGMHVANLSLGSPSPSATLEQAVNSATSRGVLVVAASGNSGAGSISYPARYANAMAVGATDQNNNRASFSQYGAGLDIVAPGVNVQSTYPGSTYASLNGTSMATPHVAGAALLVKQKNPSWSNVRIRNHLKNTATSLGSTNLYGSGLVNAEAATR

SEQ ID NO: 57658 - protein, 269 aa, Unidentified
AQSVPWGISRVQAPAAHNRGLYGSGVKVAVLDTGISTHPDLNIRGGASFVPGEPSTQDGNGHGTHVAGTIAALNNSIGVLGVAPSAELYAVKVLGASGAGNISSIAQGLEWAGNNGMHVANLSLGSPSPSATLEQAVNSATSRGVLVVAASGNSGAGSISYPARYANAMAVGATDQNNNRASFSQYGAGLDIVAPGVNVQSTYPGSTYASLNGTSMATPHVAGAATLVKQKNPSWSNVWIRNHLKNTATSLGSTNLYGSGLVNAEAATR

SEQ ID NO: 57659 - protein, 269 aa, Unidentified
AQSVPWGISRVQAPAAHNRGLYGSGVKVAVLDTGISTHPDLNIRGGASFVPGEPSTQDGNGHGTHVAGTIAALNNSIGVLGVAPSAELYAVKVLGASGNGGISSIAQGLEWAGNNGMHVANLSLGSPSPSATLEQAVNSATSRGVLVVAASGNSGAGSISYPARYANAMAVGATDQNNNRASFSQYGAGLDIVAPGVNVQSTYPGSTYASLNGTSMATPHVAGAALLVKQKNPSWSNVRIRNHLKNTATSLGSTNLYGSGLVNAEAATR

SEQ ID NO: 57660 - protein, 269 aa, Unidentified
AQSVPWGISRVQAPAAHNRGLKGSGVKVAVLDTGISTHPDLNIRGGASFVPGEPSTQDGNGHGTHVAGTIAALNNSIGVLGVAPSAELYAVKVLGASGGGGISSIAQGLEWAGNNGMHVANLSLGSPSPSATLEQAVNSATSRGVLVVAASGNSGAGSISYPARYANAMAVGATDQNNNRASFSQYGAGLDIVAPGVNVQSTYPGSTYASLNGTSMATPHVAGAAVLVKQKNPSWSNVRIRNHLKNTATSLGSTNLYGSGLVNAEAATR

SEQ ID NO: 57661 - protein, 269 aa, Unidentified
AQSVPWGISRVQAPAAHNRGLYGSGVKVAVLDTGISTHPDLNIRGGASFVPGEPSTQDGNGHGTHVAGTIAALNNSIGVLGVAPSAELYAVKVLGASGTGAISSIAQGLEWAGNNGMHVANLSLGSPSPSATLEQAVNSATSRGVLVVAASGNSGAGSISYPARYANAMAVGATDQNNNRASFSQYGAGLDIVAPGVNVQSTYPGSTYASLNGTSMATPHVAGAAMLVKQKNPSWSNVRIRNHLKNTATSLGSTNLYGSGLVNAEAATR

SEQ ID NO: 57662 - protein, 269 aa, Unidentified
AQSVPWGISRVQAPAAHNRKLLGSGVKVAVLDTGISTHPDLNIRGGASFVPGEPSTQDGNGHGTHVAGTIAALNNSIGVLGVAPSAELYAVKVLGASGSGSVSSIAQGLEWAGNNRMHVANLSLGSPSPSATLEQAVNSATSRGVLVVAASGNSGAGSIDYPARYANAMAVGATDQNNNRASFSQYGAGLDIVAPGVNVQSTYPGSAYASENGTSMATPHVAGAAALVKQKNPSWSNVQIRNHLKNTATSLGSTNLYGSGLVNAEAATR

SEQ ID NO: 57663 - protein, 269 aa, Unidentified
AQSVPWGISRVQAPAAHNRRLTGSGVKVAVLDTGISTHPDLNIRGGASFVPGEPSTQDGEGHGTHVAGTIAALNNGIGVLGVAPSAELYAVKVLGASGSGSVSSIAQGLEWAGNNSMHVANLSLGSPSPSATLEQAVNSATSRGVLVVAASGNSGAGSISYPARYANAMAVGATDQNNNRASFSQYGAGLDIVAPGVNVQSTYPGSTYASLNGTSMATPHVAGAAALVKQKNPSWSNVQIRDRLKNTATSLGSTNLYGSGLVNAEAATR

SEQ ID NO: 57664 - protein, 269 aa, Unidentified
AQSVPWGISRVQAPAAHNRGLTGFGVKVAVLDTGISTHPDLNIRGGASFVPGEPSTQDGNGHGTHVAGTIAALNNNIGVLGVAPSAELYAVKVLGASGSGSVSSIAQGLEWAGNNRMHVANLSLGSPSPSATLEQAVNSATSRGVLVVAASGNSGAGSISYPARYANAMAVGATDQNNNRASFSQYGAGLDIVAPGVKVQSTYPGSAYASENGTSMATPHVAGAAALVKQKNPSWSNVQIRNHLKNTATSLGSTNLYGSGLVNAEAATR

SEQ ID NO: 57665 - protein, 269 aa, Unidentified
AQSVPWGISRVQAPAAHNRRLTGSGVKVAVLDTGISTHPDLNIRGGASFVPGEPSTQDGNGHGTHVAGTIAALNNGIGVLGVAPSAELYAVKVLGASGSGSVSSIAQGLEWAGNNSMHVANLSLGSPSPSATLEQAVNSATSRGVLVVAASGNSGAGSISYPARYANAMAVGATDQNNNRADFSQYGAGLDIVAPGVNVQSTYPGSTYASLNGTSMATPHVAGAAALVKQKNPSWSNVQIRDRLKNTATSLGSTNLYGSGLVNAEAATR

SEQ ID NO: 57666 - protein, 269 aa, Unidentified
AQSVPWGISRVQAPAAHNRKLLGSGVKVAVLDTGISTHPDLNIRGGASFVPGEPSTQDGNGHGTHVAGTIAALNNNIGVLGVAPSAELYAVKVLGASGSGSVSSIAQGLEWAGNNRMHVANLSLGDPSPSATLEQAVNSATSRGVLVVAASGNSGAGSISYPARYANAMAVGATDQNNNRASFSQYGAGLDIVAPGVNVQSTYPGSAYASLNGTSMATPHVAGAAALVKQKNPSWSNVQIRNHLKNTATSLGSTNLYGSGLVNAEAATR

SEQ ID NO: 57667 - protein, 269 aa, Unidentified
AQSVPWGISRVQAPAAHRRGLTGRGVKVAVLDTGISTHPDLNIRGGASFVPGEPSTQDGNGHGTHVAGTIAALDNSIGVLGVAPDAELYAVKVLGASGSGSVSSIAQGLEWAGNNGMHVANLSLGSPSPSATLEQAVNSATSRGVLVVAASGNSGAGSISYPARYANAMAVGATDQNNNRASFSQYGAGLDIVAPGVNVQSTYPGSTYASLNGTSMATPHVAGAAALVKQKNPSWSNVQIRNRLKNTATSLGSTNLYGSGLVRAEAATR

SEQ ID NO: 57668 - protein, 269 aa, Unidentified
AQSVPWGISRVQAPAAHNRRLTGSGVKVAVLDTGISTHPDLRIRGGASFVPGEPSTQDGNGHGTHVAGTIAALNNSIGVLGVAPSAELYAVKVLGASGAGSVSSIAQGLEWAGANGMHVANLSLGSPSPSATLEQAVNSATSRGVLVVAASGNSGAGSISYPARYANAMAVGATDQNNNRASFSQYGAGLDIVAPGVNVQSTYPGSAYFSLNGTSMATPHVAGAAALVKQKNPSWSNVQIRNHLKNTATSLGSTNLYGSGLVNAEAATR

SEQ ID NO: 57669 - protein, 269 aa, Bacillus lentus
AQSVPWGIRRVQAPAAHNLGLTGSGVKVAVLDTGISTHPDLRIRGGASFVPGEPSTQDGDGHGTHVAGTIAALNNSIGVLGVAPSAELYAVKVLGASGSGSVSSIAQGLEWAGNNGMHVANLSLGSPSPSATLEQAVNSATSRGVLVVAASGNSGAGSISYPARYANAMAVGATDQNNNRASFSQYGPGLDIVAPGVNVQSTYPGSTYASLNGTSMATPHVAGAAALVKQKNPSWSNVQIRNHLKNTATSLGSTNLYGSGLVNAEAATQ

SEQ ID NO: 57670 - protein, 269 aa, Unidentified
AQSVPWGISRVQAPAAHNRKLLGFGVKVAVLDTGISTHPDLNIRGGASFVPGEPSTQDGNGHGTHVAGTIAALNNSIGVLGVAPSAELYAVKVLGASGSGSVSSIAQGLEWAGNNGMHVANLSLGSPSPSATLEQAVNSATSRGVLVVAASGNSGAGSIDYPARYANAMAVGATDQNNNRASFSQYGAGLDIVAPGVNVQSTYPGSAYASENGTSMATPHVAGAAALVKQKNPSWSNVQIRNHLKNTATSLGSTNLYGSGLVNAEAATR

SEQ ID NO: 57671 - protein, 269 aa, Unidentified
AQSVPWGISRVQAPAAHNRGLTGSGVKVAVLDTGISTHPDLNIRGGASFVPGEPSTQDGNGHGTHVAGTIAALNNSIGVLGVAPSAELYAVKVLGADGRGAISSIAQGLEWAGNNGMHVANLSLGSPSPSATLEQAVNSATSRGVLVVAASGNSGASSISYPARYANAMAVGATDQNNNRASFSQYGAGLDIVAPGVNVQSTYPGSTYASDNGTSMATPHVAGAAALVKQKNPSWSNVQIRNHLKNTATSLGSTNLYGSGLVNAEAATR

SEQ ID NO: 57672 - protein, 269 aa, Unidentified
AQSVPWGISRVQAPAAHNRGLTGSGVKVAVLDTGISTHPDLSIRGGASFVPGEPSTQDGNGHGTHVAGTIAALDNSIGVLGVAPSAELYAVKVLGASGSGAISSIAQGLEWAGKNGMHVANLSLGSPSPSATLEQAVNSATSRGVLVVAASGNSGAGSISYPARYANAMAVGATDQINNRASFSQYGAGLDIVAPGVNVQSTYPGSTYASLNGTSMATPHVAGAAALVKQKNPSWSNVQIRNHLKNTATSLGSTNLYGSGLVNAEAATR

SEQ ID NO: 57673 - protein, 269 aa, Unidentified
AQSVPWGISRVQAPAAHRRGLTGRGVKVAVLDTGISTHPDLNIRGGASFVPGEPSTQDGNGHGTHVAGTIAALDNSIGVLGVAPDAELYAVKVLGASGSGSVSSIAQGLEWAGNNGMHVANLSLGSPSPSATLEQAVNSATSRGVLVVAASGNSGAGSISYPARYANAMAVGATDQNNNRASFSQYGAGLDIVAPGVNVQSTYPGSTYASLNGTSMATPHVAGAAALVKQKNPSWRNVQIRNRLKNTATSLGSTNLYGSGLVNAEAATR

SEQ ID NO: 57674 - protein, 269 aa, Unidentified
AQSVPWGISRVQAPAAHNRGLTGRGVKVAVLDTGISTHPDLNIRGGASFVPGEPSTQDGNGHGTHVAGTIAALNNDIGVLGVAPSAELYAVKVLGASGSGSVSSIAQGLEWAGNNSMHVANLSLGSPSPSATLEQAVNSATSRGVLVVAASGNSGADSISYPARYANAMAVGATDQNNNRADFSQYGAGLDIVAPGVNVQSTYPGSTYASLNGTSMATPHVAGAAALVKQKNPSWSNVQIRNRLKNTATSLGSTNLYGSGLVNAEAATR

SEQ ID NO: 57675 - protein, 269 aa, Unidentified
AQSVPWGISRVQAPAAHNRGLRGSGVKVAVLDTGISTHPDLNIRGGASFVPGEPSTQDGNGHGTHVAGTIAALNNSIGVLGVAPSAELYAVKVLGASGGGALSSIAQGLEWAGNNGMHVANLSLGSPSPSATLEQAVNSATSRGVLVVAASGNSGAGSISYPARYANAMAVGATDQNNNRASFSQYGAGLDIVAPGVNVQSTYPGSTYASLNGTSMATPHVAGAATLVKQKNPSWSNVRIRNHLKNTATSLGSTNLYGSGLVNAEAATR

SEQ ID NO: 57676 - protein, 269 aa, Unidentified
AQSVPWGISRVQAPAAHNRGLKGSGVKVAVLDTGISTHPDLNIRGGASFVPGEPSTQDGNGHGTHVAGTIAALNNSIGVLGVAPSAELYAVKVLGASGNGNISSIAQGLEWAGNNGMHVANLSLGSPSPSATLEQAVNSATSRGVLVVAASGNSGAGSISYPARYANAMAVGATDQNNNRASFSQYGAGLDIVAPGVNVQSTYPGSTYASLNGTSMATPHVAGAATLVKQKNPSWSNVSIRNHLKNTATSLGSTNLYGSGLVNAEAATR

SEQ ID NO: 57677 - protein, 269 aa, Unidentified
AQSVPWGISRVQAPAAHNRGLRGSGVKVAVLDTGISTHPDLNIRGGASFVPGEPSTQDGNGHGTHVAGTIAALNNSIGVLGVAPSAELYAVKVLGASGGGGISSIAQGLEWAGNNGMHVANLSLGSPSPSATLEQAVNSATSRGVLVVAASGNSGAGSISYPARYANAMAVGATDQNNNRASFSQYGAGLDIVAPGVNVQSTYPGSTYASLNGTSMATPHVAGAATLVKQKNPSWSNVRIRNHLKNTATSLGSTNLYGSGLVNAEAATR

SEQ ID NO: 57678 - protein, 269 aa, Unidentified
AQSVPWGISRVQAPAAHRRGLTGRGVKVAVLDTGISTHPDLNIRGGASFVPGEPSTQDGNGHGTHVAGTIAALDNSIGVLGVAPSAELYAVKVLGASGSGSVSSIAQGLEWAGANGMHVANLSLGSPSPSATLEQAVNSATSRGVLVVAASGNSGAGSISYPARYANAMAVGATDQNNNRASFSQYGAGLDIVAPGVNVQSTYPGSTYFSLNGTSMATPHVAGAAALVKQKNPSWSNVQIRNRLKNTATSLGSTNLYGSGLVNAEAATR

SEQ ID NO: 57679 - protein, 269 aa, Unidentified
AQSVPWGISRVQAPAAHNRRLTGSGVKVAVLDTGISTHPDLRITGGASFVPGEPSTQDGNGHGTHVAGTIAALNNSIGVLGVAPSAELYAVKVLGASGAGSVSSIAQGLEWAGNNGMHVANLSLGSPSPSATLEQAVNSATSRGVLVVAASGNSGAGSISYPARYANAMAVGATDQNNNRASFSQYGAGLDIVAPGVNVQSTYIGSAYASLNGTSMATPHVAGAAALVKQKNPSWSNVQIRNHLKNTATSLGSTNLYGSGLVNAEAATR

SEQ ID NO: 57680 - protein, 269 aa, Unidentified
AQSVPWGISRVQAPAAHNRGLTGRGVKVAVLDTGISTHPDLNIRGGASFVPGEPSTQDGEGHGTHVAGTIAALNNDIGVLGVAPSAELYAVKVLGASGSGSVSSIAQGLEWAGNNDMHVANLSLGSPSPSATLEQAVNSATSRGVLVVAASGNSGADSISYPARYANAMAVGATDQNNNRASFSQYGAGLDIVAPGVNVQSTYPGSTYASLNGTSMATPHVAGAAALVKQKNPSWSNVQIRNRLKNTATSLGSTNLYGSGLVNAEAATR

SEQ ID NO: 57681 - protein, 269 aa, Unidentified
AQSVPWGISRVQAPAAHNRGLAGSGVKVAVLDTGISTHPDLNIRGGASFVPGEPSTQDGNGHGTHVAGTIAALNNSIGVLGVAPSAELYAVKVLGASGGGNISSIAQGLEWAGNNGMHVANLSLGSPSPSATLEQAVNSATSRGVLVVAASGNSGAGSISYPARYANAMAVGATDQNNNRASFSQYGAGLDIVAPGVNVQSTYPGSTYASLNGTSMATPHVAGAALLVKQKNPSWSNVRIRNHLKNTATSLGSTNLYGSGLVNAEAATR

SEQ ID NO: 57682 - protein, 269 aa, Unidentified
AQSVPWGISRVQAPAAHNRGLTGSGVKVAVLDTGISTHPDLNIRGGASFVPGEPSTQDGNGHGTHVAGTIAALDNSIGVLGVAPSAELYAVKVLGASGGGAISSIAQGLEWAGNNGMHVANLSLGSPSPSATLEQAVNSATSRGVLVVAASGNSGAGSISYPARYANAMAVGATDQNNNRASFSQYGAGLDIVAPGVNVQSTYPGSTYASLNGTSMATPHVAGAAVLVKQKNPSWSNVQIRNRLKNTATSLGSTNLYGSGLVNAEAATR

SEQ ID NO: 57683 - protein, 269 aa, Unidentified
AQSVPWGISRVQAPAAHNRGLQGSGVKVAVLDTGISTHPDLNIRGGASFVPGEPSTQDGNGHGTHVAGTIAALNNSIGVLGVAPSAELYAVKVLGASGGGNISSIAQGLEWAGNNGMHVANLSLGSPSPSATLEQAVNSATSRGVLVVAASGNSGAGSISYPARYANAMAVGATDQNNNRASFSQYGAGLDIVAPGVNVQSTYPGSTYASLNGTSMATPHVAGAAVLVKQKNPSWSNVRIRNHLKNTATSLGSTNLYGSGLVNAEAATR

SEQ ID NO: 57684 - protein, 269 aa, Unidentified
AQSVPWGISRVQAPASHNRGLAGSGVKVAVLDTGISTHPDLNIRGGASFVPGEPSTQDGNGHGTHVAGTIAALNNSIGVLGVAPSAELYAVKVLGASGAGSLSSIAQGVEWAGNNGMHVANLSLGNPSPSATLEQAVNSATSRGVLVVAASGNSGAGSISYPARYANAMAVGATDQNNNRASFSQYGAGLDIVAPGVNVQSTYPGSTYASLNGTSMATPHVAGAAALVKQKNPSWSNVQIRNHLKNTATSLGSTNLYGSGLVNAEAATR

SEQ ID NO: 57685 - protein, 269 aa, Unidentified
AQSVPWGISRVQAPAAHNRGLAGSGVKVAVLDTGISTHPDLNIRGGASFVPGEPSTQDGNGHGTHVAGTIAALNNSIGVLGVAPSAELYAVKVLGASGNGAISSIAQGLEWAGNNGMHVANLSLGSPSPSATLEQAVNSATSRGVLVVAASGNSGAGSISYPARYANAMAVGATDQNNNRASFSQYGAGLDIVAPGVNVQSTYPGSTYASLNGTSMATPHVAGAATLVKQKNPSWSNVRIRNHLKNTATSLGSTNLYGSGLVNAEAATR

SEQ ID NO: 57686 - protein, 269 aa, Unidentified
AQSVPWGISRVQAPAAHNRGLAGRGVKVAVLDSGISTHPDLNIRGGASFVPGEPSTQDGNGHGTHVAGTIAALNNSIGVLGVAPSAELYAVKVLGASGSGSVSSIAQGLEWAGNNRMHVANLSLGIPSPSATLEQAVNSATSRGVLVVAASGNSGAGSISYPARYANAMAVGATDQNNNRADFSQYGAGLDIVAPGVNVQSTYPGSTYASLNGTSMATPHVAGAAALVKQKNPSWSNVQIRNHLKNTATSLGSTNLYGSGLVNAEAATR

SEQ ID NO: 57687 - protein, 269 aa, Unidentified
AQSVPWGISRVQAPAAHNRGLTGRGVKVAVLDTGISTHPDLNIRGGASFVPGEPSTQDGEGHGTHVAGTIAALNNSIGVLGVAPSAELYAVKVLGASGSGSVSSIAQGLEWAGLNGMHVANLSLGIPSPSATLEQAVNSATSRGVLVVAASGNSGEGSISYPARYANAMAVGATDQNNNRADFSQYGAGLDIVAPGVNVQSTYPGSTYASLNGTSMATPHVAGAAALVKQKNPSWSNVQIRNHLKNTATSLGSTNLYGSGLVNAEAATR

SEQ ID NO: 57688 - protein, 269 aa, Unidentified
AQSVPWGISRVQAPAAHNRRLTGRGVKVAVLDTGISTHPDLNIRGGASFVPGEPSTQDGNGHGTHVAGTIAALNNSIGVLGVAPSAELYAVKVLGASGAGSVSSIAQGLEWAGNNGMHVANLSLGSPSPSATLEQAVNSATSRGVLVVAASGNSGAGSISYPARYANAMAVGATDQNNNRASFSQYGAGLDIVAPGVNVQSTYIQSAYASLNGTSMATPHVAGAAALVKQKNPSWSNVQIRNHLKNTATSLGSTNLYGSGLVNAEAATR

SEQ ID NO: 57689 - protein, 269 aa, Unidentified
AQSVPWGISRVQAPAAHNRRLTGSGVKVAVLDTGISTHPDLNIRGGASFVPGEPSTQDGNGHGTHVAGTIAALNNDIGVLGVAPSAELYAVKVLGASGSGSVSSIAQGLEWAGNNSMHVANLSLGSESPSATLEQAVNSATSRGVLVVAASGNSGAGSISYPARYANAMAVGATDQNNNRASFSQYGAGLDIVAPGVNVQSTYPGSTYASLNGTSMATPHVAGAAALVKQKNPSWSNVRIRDHLKNTATSLGSTNLYGSGLVNAEAATR

SEQ ID NO: 57690 - protein, 269 aa, Unidentified
AQSVPWGISRVQAPAAHNRGLLGFGVKVAVLDTGISTHPDLNIRGGASFVPGEPSTQDGNGHGTHVAGTIAALNNSIGVLGVAPSAELYAVKVLGASGSGSVSSIAQGLEWAGNNRMHVANLSLGDPSPSATLEQAVNSATSRGVLVVAASGNSGAGSIDYPARYANAMAVGATDQNNNRASFSQYGAGLDIVAPGVNVQSTYPGSTYASENGTSMATPHVAGAAALVKQKNPSWSNVQIRNHLKNTATSLGSTNLYGSGLVNAEAATR

SEQ ID NO: 57691 - protein, 269 aa, Unidentified
AQSVPWGISRVQAPAAHNRGLLGFGVKVAVLDTGISTHPDLNIRGGASFVPGEPSTQDGNGHGTHVAGTIAALNNNIGVLGVAPSAELYAVKVLGASGSGSVSSIAQGLEWAGNNRMHVANLSLGSPSPSATLEQAVNSATSRGVLVVAASGNSGAGSISYPARYANAMAVGATDQNNNRASFSQYGAGLDIVAPGVNVQSTYPGSAYASENGTSMATPHVAGAAALVKQKNPSWSNVQIRNHLKNTATSLGSTNLYGSGLVNAEAATR

SEQ ID NO: 57692 - protein, 269 aa, Unidentified
AQSVPWGISRVQAPAAHNRRLTGSGVKVAVLDTGISTHPDLNIRGGASFVPGEPSTQDGNGHGTHVAGTIAALNNSIGVLGVAPSAELYAVKVLGASGSGSVSSIAQGLEWAGNNRMHVANLSLGSPSPSATLEQAVNSATSRGVLVVAASGNSGAGSISYPARYANAMAVGATDQNNNRADFSQYGAGLDIVAPGVNVQSTYPGSTYASLNGTSMATPHVAGAAALVKQKNPSWSNVRIRDRLKNTATSLGSTNLYGSGLVNAEAATR

SEQ ID NO: 57693 - protein, 269 aa, Unidentified
AQSVPWGISRVQAPAAHSRRLWGSGVKVAVLDTGISTHPDLRIRGGASFVPGEPSTQDGNGHGTHVAGTIAALNNSIGVLGVAPSAELYAVKVLGASGAGSVSSIAQGLEWAGNNGMHVANLSLGSPSPSATLEQAVNSATSRGVLVVAASGNSGAGSISYPARYANAMAVGATDQNNNRASFSQYGAGLDIVAPGVNVQSTYPQSTYASLNGTSMATPHVAGAAALVKQKNPSWSNVQIRNHLKNTATSLGSTNLYGSGLVNAEAATR

SEQ ID NO: 57694 - protein, 269 aa, Unidentified
AQSVPWGISRVQAPAAHNRGLTGSGVKVAVLDTGISTHPDLNIRGGASFVPGEPSTQDGEGHGTHVAGTIAALNNDIGVLGVAPSAELYAVKVLGASGSGSVSSIAQGLEWAGNNDMHVANLSLGSESPSATLEQAVNSATSRGVLVVAASGNSGAGSISYPARYANAMAVGATDQNNNRASFSQYGAGLDIVAPGVNVQSTYPGSTYASLNGTSMATPHVAGAAALVKQKNPSWSNVRIRDHLKNTATSLGSTNLYGSGLVNAEAATR

SEQ ID NO: 57695 - protein, 269 aa, Unidentified
AQSVPWGISRVQAPAAHNRGLAGSGVKVAVLDTGISTHPDLNIRGGASFVPGEPSTQDGNGHGTHVAGTIAALNNSIGVLGVAPSAELYAVKVLGASGNGGISSIAQGLEWAGNNGMHVANLSLGSPSPSATLEQAVNSATSRGVLVVAASGNSGAGSISYPARYANAMAVGATDQNNNRASFSQYGAGLDIVAPGVNVQSTYPGSTYASLNGTSMATPHVAGAAVLVKQKNPSWSNVRIRNHLKNTATSLGSTNLYGSGLVNAEAATR

SEQ ID NO: 57696 - protein, 269 aa, Unidentified
AQSVPWGISRVQAPAAHNRRLTGRGVKVAVLDTGISTHPDLNIRGGASFVPGEPSTQDGNGHGTHVAGTIAALNNDIGVLGVAPSAELYAVKVLGASGSGSVSSIAQGLEWAGNNDMHVANLSLGSPSPSATLEQAVNSATSRGVLVVAASGNSGADSISYPARYANAMAVGATDQNNNRASFSQYGAGLDIVAPGVNVQSTYPGSTYASLNGTSMATPHVAGAAALVKQKNPSWSNVQIRNRLKNTATSLGSTNLYGSGLVNAEAATR

SEQ ID NO: 57697 - protein, 269 aa, Unidentified
AQSVPWGISRVQAPAAHRRGLTGRGVKVAVLDTGISTHPDLDIRGGASFVPGEPSTQDGNGHGTHVAGTIAALDNSIGVLGVAPSAELYAVKVLGASGSGSVSSIAQGLEWAGNNGMHVANLSLGSPSPSATLEQAVNSATSRGVLVVAASGNSGAGSISYPARYANAMAVGATDQNNNRASFSQYGAGLDIVAPGVNVQSTYPGSTYASLNGTSMATPHVAGAAALVKQKNPSWRNVQIRNRLKNTATSLGSTNLYGSGLVNAEAATR

SEQ ID NO: 57698 - protein, 269 aa, Unidentified
AQSVPWGISRVQAPAAHNRGLTGSGVKVAVLDTGISTHPDLNIRGGASFVPGEPSTQDGNGHGTHVAGTIAALDNSIGVLGVAPSAELYAVKVLGASGSGAISSIAQGLEWAGNNGMHVANLSLGSPSPSATLEQAVNSATSRGVLVVAASGNSGADSISYPARYANAMAVGATDQNNNRASFSQYGAGLDIVAPGVNVESTYPGSTYASLNGTSMATPHVAGAAALVKQKNPSWSNAQIRNHLKNTATSLGSTNLYGSGLVNAEAATR

SEQ ID NO: 57699 - protein, 269 aa, Unidentified
AQSVPWGISRVQAPAAHNRGLTGRGVKVAVLDTGISTHPDLNIRGGASFVPGEPSTQDGNGHGTHVAGTIAALNNGIGVLGVAPSAELYAVKVLGASGSGSVSSIAQGLEWAGNNSMHVANLSLGSESPSATLEQAVNSATSRGVLVVAASGNSGAGSISYPARYANAMAVGATDQNNNRADFSQYGAGLDIVAPGVNVQSTYPGSTYASLNGTSMATPHVAGAAALVKQKNPSWSNVRIRNHLKNTATSLGSTNLYGSGLVNAEAATR

SEQ ID NO: 57700 - protein, 269 aa, Unidentified
AQSVPWGISRVQAPAAHNRKLTGSGVKVAVLDTGISTHPDLNIRGGASFVPGEPSPQDGEGHGTHVAGTIAALNNSIGVLGVAPSAELYAVKVLGASGSGSVSSIAQGLEWAGLNGMHVANLSLGQPSPSATLEQAVNSATSRGVLVVAASGNSGAGSISYPARYANAMAVGATDQNNNRASFSQYGAGLDIVAPGVNVQSTYPGSAYASLNGTSMATPHVAGAAALVKQKNPSWSNVQIRNHLKNTATSLGSTNLYGSGLVNAEAATR

SEQ ID NO: 57701 - protein, 269 aa, Unidentified
AQSVPWGISRVQAPAAHNRGLTGSGVKVAVLDTGISTHPDLNIRGGASFVPGEPSTQDGNGHGTHVAGTIAALDNNIGVLGVAPRAELYAVKVLGASGSGSVSSIAQGLEWAGNNRMHVANLSLGSPAPSATLEQAVNSATSRGVLVVAASGNSGAGSISYPARYANAMAVGATDQNNNRASFSQYGAGLDIVAPGVNVLSTYPGSTYASLNGTSMATPHVAGAAALVKQKNPSWSNVQIRNHLKNTATSLGSTNLYGSGLVNAEAATR

SEQ ID NO: 57702 - protein, 269 aa, Unidentified
AQSVPWGISRVQAPAAHNRGLYGSGVKVAVLDTGISTHPDLNIRGGASFVPGEPSTQDGNGHGTHVAGTIAALNNSIGVLGVAPSAELYAVKVLGASGTGGISSIAQGLEWAGNNGMHVANLSLGSPSPSATLEQAVNSATSRGVLVVAASGNSGAGSISYPARYANAMAVGATDQNNNRASFSQYGAGLDIVAPGVNVQSTYPGSTYASLNGTSMATPHVAGAAMLVKQKNPSWSNVRIRNHLKNTATSLGSTNLYGSGLVNAEAATR

SEQ ID NO: 57703 - protein, 269 aa, Unidentified
AQSVPWGISRVQAPAAHNRKLTGSGVKVAVLDTGISTHPDLNIRGGASFVPGEPSTQDGEGHGTHVAGTIAALNNNIGVLGVAPSAELYAVKVLGASGQGSVSSIAQGLEWAGLNGMHVANLSLGAPSPSATLEQAVNSATSRGVLVVAASGNSGAGSISYPARYANAMAVGATDQNNNRASFSQYGAGLDIVAPGVNVQSTYPGSTYASLNGTSMATPHVAGAAALVKQKNPSWSNVQIRNHLKNTATSLGSTNLYGSGLVNAEAATR

SEQ ID NO: 57704 - protein, 269 aa, Unidentified
AQSVPWGISRVQAPAAHNRGLTGRGVKVAVLDTGISTHPDLNIRGGASFVPGEPSTQDGEGHGTHVAGTIAALNNDIGVLGVAPSAELYAVKVLGASGSGSVSSIAQGLEWAGNNSMHVANLSLGSESPSATLEQAVNSATSRGVLVVAASGNSGAGSISYPARYANAMAVGATDQNNNRASFSQYGAGLDIVAPGVNVQSTYPGSTYASLNGTSMATPHVAGAAALVKQKNPSWSNVQIRNRLKNTATSLGSTNLYGSGLVNAEAATR

SEQ ID NO: 57705 - protein, 269 aa, Unidentified
AQSVPWGISRVQAPAAHNRGLRGSGVKVAVLDTGISTHPDLNIRGGASFVPGEPSTQDGNGHGTHVAGTIAALNNSIGVLGVAPSAELYAVKVLGASGNGGISSIAQGLEWAGNNGMHVANLSLGSPSPSATLEQAVNSATSRGVLVVAASGNSGAGSISYPARYANAMAVGATDQNNNRASFSQYGAGLDIVAPGVNVQSTYPGSTYASLNGTSMATPHVAGAATLVKQKNPSWSNVRIRNHLKNTATSLGSTNLYGSGLVNAEAATR

SEQ ID NO: 57706 - protein, 269 aa, Unidentified
AQSVPWGISRVQAPAAHNRRLTGSGVKVAVLDTGISTHPDLNIRGGASFVPGEPSTQDGNGHGTHVAGTIAALNNGIGVLGVAPSAELYAVKVLGASGSGSVSSIAQGLEWAGNNDMHVANLSLGSPSPSATLEQAVNSATSRGVLVVAASGNSGADSISYPARYANAMAVGATDQNNNRADFSQYGAGLDIVAPGVNVQSTYPGSTYASLNGTSMATPHVAGAAALVKQKNPSWSNVQIRDHLKNTATSLGSTNLYGSGLVNAEAATR

SEQ ID NO: 57707 - protein, 269 aa, Unidentified
AQSVPWGISRVQAPAAHNRGLAGSGVKVAVLDTGISTHPDLNIRGGASFVPGEPSTQDGNGHGTHVAGTIAALNNSIGVLGVAPSAELYAVKVLGASGNGGISSIAQGLEWAGNNGMHVANLSLGSPSPSATLEQAVNSATSRGVLVVAASGNSGAGSISYPARYANAMAVGATDQNNNRASFSQYGAGLDIVAPGVNVQSTYPGSTYASLNGTSMATPHVAGAATLVKQKNPSWSNVRIRNHLKNTATSLGSTNLYGSGLVNAEAATR

SEQ ID NO: 57708 - protein, 269 aa, Unidentified
AQSVPWGISRVQAPAAHRRGLWGRGVKVAVLDTGISTHPDLNIRGGASFVPGEPSTQDGNGHGTHVAGTIAALDNSIGVLGVAPSAELYAVKVLGASGSGSVSSIAQGLEWAGNNGMHVANLSLGSPSPSATLEQAVNSATSRGVLVVAASGNSGAGSISYPARYANAMAVGATDQDNNRASFSQYGAGLDIVAPGVNVQSTYPGSTYASLNGTSMATPHVAGAAALVKQKNPSWSRVQIRNHLKNTATSLGSTNLYGSGLVNAEAATR

SEQ ID NO: 57709 - protein, 269 aa, Unidentified
AQSVPWGISRVQAPAAHRRGLTGRGVKVAVLDTGISTHPDLRIRGGASFVPGEPSTQDGNGHGTHVAGTIAALDNSIGVLGVAPDAELYAVKVLGASGSGSVSSIAQGLEWAGNNGMHVANLSLGSPSPSATLEQAVNSATSRGVLVVAASGNSGAGSISYPARYANAMAVGATDQNNNRASFSQYGAGLDIVAPGVNVQSTYPGSTYASLNGTSMATPHVAGAAALVKQKNPSWSNVQIRNRLKNTATSLGSTNLYGSGLVNAEAATR

SEQ ID NO: 57710 - protein, 269 aa, Lederbergia lentus
AQSVPWGISRVQAPAAHNRGLTGSGVQVAVLDTGISTHPDLNIRGGASFVPGEPSTQDGNGHGTHVAGTIAALNNSIGVLGVAPSAELYAVKVLGADGEGAISSIAQGLEWAGNNGMHVANLSLGSPSPSATLEQAVNSATSRGVLVVAASGNSGASSISYPARYANAMAVGATDQNNNRASFSQYGAGLDIVAPGVNVQSTYPGSTYASLNGTSMATPHVAGAAALVKQKNPSWSNVQIRNHLKNTATSLGSTNLYGSGLVNAEAATR

SEQ ID NO: 57711 - protein, 269 aa, Unidentified
AQSVPWGISRVQAPAAHNRGLTGRGVKVAVLDTGISTHPDLNIRGGASFVPGEPSTQDGNGHGTHVAGTIAALDNSIGVLGVAPSAELYAVKVLGASGGGSISSIAQGLEWAGNNGMHVANLSLGSPSPSATLEQAVNSATSRGVLVVAASGNSGAGSISYPARYANAMAVGATDQNNNRASFSQYGAGLDIVAPGVNVQSTYPGSTYASLNGTSMATPHVAGAAALVKQKVPSWSRVQIRNHLKNTATSLGSTNLYGSGLVNAEAATR

SEQ ID NO: 57712 - protein, 269 aa, Unidentified
AQSVPWGISRVQAPASHNRGLAGSGVKVAVLDTGISTHPDLNIRGGASFVPGEPSTQDGNGHGTHVAGTIAALNNSIGVLGVAPSAELYAVKVLGASGGGAISSIAQGVEWAGNNGMHVANLSLGSPSPSATLEQAVNSATSRGVLVVAASGNSGAGSISYPARYANAMAVGATDQNNNRASFSQYGAGLDIVAPGVNVQSTYPGSTYASLNGTSMATPHVAGAAALVKQKNPSWSNVQIRNHLKNTATSLGSTNLYGSGLVNAEAATR

SEQ ID NO: 57713 - protein, 269 aa, Unidentified
AQSVPWGISRVQAPAAHRRGLTGRGVKVAVLDTGISTHPDLNIRGGASFVPGEPSTQDGNGHGTHVAGTIAALDNNIGVLGVAPSAELYAVKVLGASGSGSVSSIAQGLEWAGNNGMHVANLSLGSPSPSATLEQAVNSATSRGVLVVAASGNSGAGSISYPARYANAMAVGATDQNNNRASFSQYGAGLDIVAPGVNVLSTYPGSTYASLNGTSMATPHVAGAAALVKQKNPSWSNVQIRNRLKNTATSLGSTNLYGSGLVNAEAATR

SEQ ID NO: 57714 - protein, 269 aa, Unidentified
AQSVPWGISRVQAPAAHNRKLTGSGVKVAVLDTGISTHPDLNIRGGASFVPGEPSTQDGEGHGTHVAGTIAALNNSIGVLGVAPSAELYAVKVLGASGSGSVGSIAQGLEWAGLNGMHVANLSLGLPSPSATLEQAVNSATSRGVLVVAASGNSGAGSISYPARYANAMAVGATDQNNNRASFSQYGAGLDIVAPGVNVQSTYPGSAYASLNGTSMATPHVAGAAALVKQKNPSWSNVQIRNHLKNTATSLGSTNLYGSGLVNAEAATR

SEQ ID NO: 57715 - protein, 269 aa, Unidentified
AQSVPWGISRVQAPAAHNRRLTGSGVKVAVLDTGISTHPDLNIRGGASFVPGEPSTQDGNGHGTHVAGTIAALNNGIGVLGVAPSAELYAVKVLGASGSGSVSSIAQGLEWAGNNSMHVANLSLGSPSPSATLEQAVNSATSRGVLVVAASGNSGAGSISYPARYANAMAVGATDQNNNRASFSQYGAGLDIVAPGVNVQSTYPGSTYASLNGTSMATPHVAGAAALVKQKNPSWSNVRIRDRLKNTATSLGSTNLYGSGLVNAEAATR

SEQ ID NO: 57716 - protein, 269 aa, Unidentified
AQSVPWGISRVQAPAAHNRGLAGSGVKVAVLDTGISTHPDLNIRGGASFVPGEPSTQDGNGHGTHVAGTIAALNNSIGVLGVAPSAELYAVKVLGASGTGALSSIAQGLEWAGNNGMHVANLSLGSPSPSATLEQAVNSATSRGVLVVAASGNSGAGSISYPARYANAMAVGATDQNNNRASFSQYGAGLDIVAPGVNVQSTYPGSTYASLNGTSMATPHVAGAATLVKQKNPSWSNVWIRNHLKNTATSLGSTNLYGSGLVNAEAATR

SEQ ID NO: 57717 - protein, 269 aa, Unidentified
AQSVPWGISRVQAPAAHNRGLKGSGVKVAVLDTGISTHPDLNIRGGASFVPGEPSTQDGNGHGTHVAGTIAALNNSIGVLGVAPSAELYAVKVLGASGAGNLSSIAQGLEWAGNNGMHVANLSLGSPSPSATLEQAVNSATSRGVLVVAASGNSGAGSISYPARYANAMAVGATDQNNNRASFSQYGAGLDIVAPGVNVQSTYPGSTYASLNGTSMATPHVAGAALLVKQKNPSWSNVSIRNHLKNTATSLGSTNLYGSGLVNAEAATR

SEQ ID NO: 57718 - protein, 269 aa, Unidentified
AQSVPWGISRVQAPAAHNRGLRGSGVKVAVLDTGISTHPDLNIRGGASFVPGEPSTQDGNGHGTHVAGTIAALNNSIGVLGVAPSAELYAVKVLGASGGGGISSIAQGLEWAGNNGMHVANLSLGSPSPSATLEQAVNSATSRGVLVVAASGNSGAGSISYPARYANAMAVGATDQNNNRASFSQYGAGLDIVAPGVNVQSTYPGSTYASLNGTSMATPHVAGAALLVKQKNPSWSNVRIRNHLKNTATSLGSTNLYGSGLVNAEAATR

SEQ ID NO: 57719 - protein, 269 aa, Unidentified
AQSVPWGISRVQAPAAHNRGLRGSGVKVAVLDTGISTHPDLNIRGGASFVPGEPSTQDGNGHGTHVAGTIAALNNSIGVLGVAPSAELYAVKVLGASGAGNISSIAQGLEWAGNNGMHVANLSLGSPSPSATLEQAVNSATSRGVLVVAASGNSGAGSISYPARYANAMAVGATDQNNNRASFSQYGAGLDIVAPGVNVQSTYPGSTYASLNGTSMATPHVAGAATLVKQKNPSWSNVSIRNHLKNTATSLGSTNLYGSGLVNAEAATR

SEQ ID NO: 57720 - protein, 269 aa, Unidentified
AQSVPWGISRVQAPAAHNRGLYGSGVKVAVLDTGISTHPDLNIRGGASFVPGEPSTQDGNGHGTHVAGTIAALNNSIGVLGVAPSAELYAVKVLGASGGGAISSIAQGLEWAGNNGMHVANLSLGSPSPSATLEQAVNSATSRGVLVVAASGNSGAGSISYPARYANAMAVGATDQNNNRASFSQYGAGLDIVAPGVNVQSTYPGSTYASLNGTSMATPHVAGAAVLVKQKNPSWSNVRIRNHLKNTATSLGSTNLYGSGLVNAEAATR

SEQ ID NO: 57721 - protein, 269 aa, Unidentified
AQSVPWGISRVQAPASHNRGLAGSGVKVAVLDTGISTHPDLNIRGGASFVPGEPSTQDGNGHGTHVAGTIAALNNSIGVLGVAPSAELYAVKVLGASGAGAISSIAQGVEWAGNNGMHVANLSLGSPSPSATLEQAVNSATSRGVLVVAASGNSGAGSISYPARYANAMAVGATDQNNNRASFSQYGAGLDIVAPGVNVQSTYPGSTYASLNGTSMATPHVAGAAALVKQKNPSWSNVQIRNHLKNTATSLGSTNLYGSGLVNAEAATR

SEQ ID NO: 57722 - protein, 269 aa, Unidentified
AQSVPWGISRVQAPAAHNRGLYGSGVKVAVLDTGISTHPDLNIRGGASFVPGEPSTQDGNGHGTHVAGTIAALNNSIGVLGVAPSAELYAVKVLGASGTGALSSIAQGLEWAGNNGMHVANLSLGSPSPSATLEQAVNSATSRGVLVVAASGNSGAGSISYPARYANAMAVGATDQNNNRASFSQYGAGLDIVAPGVNVQSTYPGSTYASLNGTSMATPHVAGAAMLVKQKNPSWSNVRIRNHLKNTATSLGSTNLYGSGLVNAEAATR

SEQ ID NO: 57723 - protein, 269 aa, Unidentified
AQSVPWGISRVQAPAAHNRGLKGSGVKVAVLDTGISTHPDLNIRGGASFVPGEPSTQDGNGHGTHVAGTIAALNNSIGVLGVAPSAELYAVKVLGASGGGNLSSIAQGLEWAGNNGMHVANLSLGSPSPSATLEQAVNSATSRGVLVVAASGNSGAGSISYPARYANAMAVGATDQNNNRASFSQYGAGLDIVAPGVNVQSTYPGSTYASLNGTSMATPHVAGAAMLVKQKNPSWSNVRIRNHLKNTATSLGSTNLYGSGLVNAEAATR

SEQ ID NO: 57724 - protein, 269 aa, Unidentified
AQSVPWGISRVQAPAAHNRGLAGRGVKVAVLDSGISTHPDLNIRGGASFVPGEPSTQDGNGHGTHVAGTIAALNNSIGVLGVAPSAELYAVKVLGASGSGSVSSIAQGLEWAGLNGMHVANLSLGSPSPSATLEQAVNSATSRGVLVVAASGNSGAGSIDYPARYANAMAVGATDQNNNRADFSQYGAGLDIVAPGVNVQSTYPGSTYASLNGTSMATPHVAGAAALVKQKNPSWSNVQIRNHLKNTATSLGSTNLYGSGLVNAEAATR

SEQ ID NO: 57725 - protein, 269 aa, Unidentified
AQSVPWGISRVQAPAAHNRGLTGRGVKVAVLDTGISTHPDLNIRGGASFVPGEPSTQDGNGHGTHVAGTIAALNNGIGVLGVAPSAELYAVKVLGASGSGSVSSIAQGLEWAGNNSMHVANLSLGSESPSATLEQAVNSATSRGVLVVAASGNSGADSISYPARYANAMAVGATDQNNNRADFSQYGAGLDIVAPGVNVQSTYPGSTYASLNGTSMATPHVAGAAALVKQKNPSWSNVQIRNHLKNTATSLGSTNLYGSGLVNAEAATR

SEQ ID NO: 57726 - protein, 269 aa, Unidentified
AQSVPWGISRVQAPAAHNRGLTGSGVKVAVLDTGISTHPDLNIRGGASFVPGEPSTQDGNGHGTHVAGTIAALNNSIGVLGVAPSAELYAVKVLGASGAGAISSIAQGLEWAGANGMHVANLSLGSPSPSATLEQAVNSATSRGVLVVAASGNSGAGSISYPARYANAMAVGATDQDNNRASFSQYGAGLDIVAPGVNVQSTYPGSTYFSLNGTSMATPHVAGAAALVKQKNPSWSNVQIRNHLKNTATSLGSTNLYGSGLVNAEAATR

SEQ ID NO: 57727 - protein, 269 aa, Unidentified
AQSVPWGISRVQAPAAHNRRLTGSGVKVAVLDTGISTHPDLRIRGGASFVPGEPSTQDGNGHGTHVAGTIAALNNSIGVLGVAPSAELYAVKVLAASGNGSVSSIAQGLEWAGNNGMHVANLSLGAPSPSATLEQAVNSATSRGVLVVAASGNSGAGSISYPARYANAMAVGATDQNNNRASFSQYGAGLDIVAPGVNVQSTYPGSTYASLNGTSMATPHVAGAAAIVKQKNPSWSNVQIRNHLKNTATSLGSTNLYGSGLVNAEAATR

SEQ ID NO: 57728 - protein, 269 aa, Unidentified
AQSVPWGISRVQAPAAHNRGLRGSGVKVAVLDTGISTHPDLNIRGGASFVPGEPSTQDGNGHGTHVAGTIAALNNSIGVLGVAPSAELYAVKVLGASGAGNLSSIAQGLEWAGNNGMHVANLSLGSPSPSATLEQAVNSATSRGVLVVAASGNSGAGSISYPARYANAMAVGATDQNNNRASFSQYGAGLDIVAPGVNVQSTYPGSTYASLNGTSMATPHVAGAAVLVKQKNPSWSNVSIRNHLKNTATSLGSTNLYGSGLVNAEAATR

SEQ ID NO: 57729 - protein, 269 aa, Unidentified
AQSVPWGISRVQAPAAHNRRLTGSGVKVAVLDTGISTHPDLNIRGGASFVPGEPSTQDGNGHGTHVAGTIAALNNDIGVLGVAPSAELYAVKVLGASGSGSVSSIAQGLEWAGNNDMHVANLSLGSESPSATLEQAVNSATSRGVLVVAASGNSGADSISYPARYANAMAVGATDQNNNRASFSQYGAGLDIVAPGVNVQSTYPGSTYASLNGTSMATPHVAGAAALVKQKNPSWSNVRIRNHLKNTATSLGSTNLYGSGLVNAEAATR

SEQ ID NO: 57730 - protein, 269 aa, Unidentified
AQSVPWGISRVQAPAAHNRGLKGSGVKVAVLDTGISTHPDLNIRGGASFVPGEPSTQDGNGHGTHVAGTIAALNNSIGVLGVAPSAELYAVKVLGASGTGNLSSIAQGLEWAGNNGMHVANLSLGSPSPSATLEQAVNSATSRGVLVVAASGNSGAGSISYPARYANAMAVGATDQNNNRASFSQYGAGLDIVAPGVNVQSTYPGSTYASLNGTSMATPHVAGAAVLVKQKNPSWSNVRIRNHLKNTATSLGSTNLYGSGLVNAEAATR

SEQ ID NO: 57731 - protein, 269 aa, Unidentified
AQSVPWGISRVQAPAAHNRRLTGRGVKVAVLDTGISTHPDLNITGGASFVPGEPSTQDGNGHGTHVAGTIAALNNSIGVLGVAPSAELYAVKVLGASGAGSVSSIAQGLEWAGNNGMHVANLSLGSPSPSATLEQAVNSATSRGVLVVAASGNSGAGSISYPARYANAMAVGATDQNNNRASFSQYGAGLDIVAPGVNVQSTYIGSAYASLNGTSMATPHVAGAAALVKQKNPSWSNVQIRNHLKNTATSLGSTNLYGSGLVNAEAATR

SEQ ID NO: 57732 - protein, 269 aa, Unidentified
AQSVPWGISRVQAPAAHNRRLTGSGVKVAVLDTGISTHPDLNIRGGASFVPGEPSTQDGNGHGTHVAGTIAALNNSIGVLGVAPSAELYAVKVLGASGSGSVSSIAQGLEWAGNNGMHVANLSLGSESPSATLEQAVNSATSRGVLVVAASGNSGADSISYPARYANAMAVGATDQNNNRASFSQYGAGLDIVAPGVNVQSTYPGSTYASLNGTSMATPHVAGAAALVKQKNPSWSNVRIRDRLKNTATSLGSTNLYGSGLVNAEAATR

SEQ ID NO: 57733 - protein, 269 aa, Unidentified
AQSVPWGISRVQAPAAHNRGLTGRGVKVAVLDTGISTHPDLRITGGASFVPGEPSTQDGNGHGTHVAGTIAALNNSIGVLGVAPSAELYAVKVLGASGAGSVSSIAQGLEWAGNNGMHVANLSLGSPSPSATLEQAVNSATSRGVLVVAASGNSGAGSISYPARYANAMAVGATDQNNNRASFSQYGAGLDIVAPGVNVQSTYPQSAYASLNGTSMATPHVAGAAALVKQKNPSWSNVQIRNHLKNTATSLGSTNLYGSGLVNAEAATR

SEQ ID NO: 57734 - protein, 269 aa, Unidentified
AQSVPWGISRVQAPAAHNRGLTGRGVKVAVLDTGISTHPDLNIRGGASFVPGEPSTQDGEGHGTHVAGTIAALNNSIGVLGVAPSAELYAVKVLGASGSGSVSSIAQGLEWAGNNRMHVANLSLGIPSPSATLEQAVNSATSRGVLVVAASGNSGEGSISYPARYANAMAVGATDQNNNRADFSQYGAGLDIVAPGVNVQSTYPGSTYASLNGTSMATPHVAGAAALVKQKNPSWSNVQIRNHLKNTATSLGSTNLYGSGLVNAEAATR

SEQ ID NO: 57735 - protein, 269 aa, Unidentified
AQSVPWGISRVQAPAAHNRGLAGSGVKVAVLDTGISTHPDLNIRGGASFVPGEPSTQDGNGHGTHVAGTIAALNNSIGVLGVAPSAELYAVKVLGASGTGNLSSIAQGLEWAGNNGMHVANLSLGSPSPSATLEQAVNSATSRGVLVVAASGNSGAGSISYPARYANAMAVGATDQNNNRASFSQYGAGLDIVAPGVNVQSTYPGSTYASLNGTSMATPHVAGAAMLVKQKNPSWSNVRIRNHLKNTATSLGSTNLYGSGLVNAEAATR

SEQ ID NO: 57736 - protein, 269 aa, Unidentified
AQSVPWGISRVQAPAAHNRKLTGSGVKVAVLDTGISTHPDLNIRGGASFVPGEPSTQDGNGHGTHVAGTIAALNNNIGVLGVAPSAELYAVKVLGASGDGSVSSTAQGLEWAGNNGMHVANLSLGLPSPSATLEQAVNSATSRGVLVVAASGNSGAGSISYPARYANAMAVGATDQNNNRASFSQYGAGLDIVAPGVNVQSTYPGSTYASLNGTSMATPHVAGAAALVKQKNPRWSNVQIRNHLKNTATSLGSTNLYGSGLVNAEAATR

SEQ ID NO: 57737 - protein, 269 aa, Unidentified
AQSVPWGISRVQAPAAHNRRLTGSGVKVAVLDTGISTHPDLNIRGGASFVPGEPSTQDGNGHGTHVAGTIAALNNDIGVLGVAPSAELYAVKVLGASGSGSVSSIAQGLEWAGNNDMHVANLSLGSPSPSATLEQAVNSATSRGVLVVAASGNSGADSISYPARYANAMAVGATDQNNNRASFSQYGAGLDIVAPGVNVQSTYPGSTYASLNGTSMATPHVAGAAALVKQKNPSWSNVRIRNRLKNTATSLGSTNLYGSGLVNAEAATR

SEQ ID NO: 57738 - protein, 269 aa, Unidentified
AQSVPWGISRVQAPAAHRRGLTGRGVKVAVLDTGISTHPDLNIRGGASFVPGEPSTQDGNGHGTHVAGTIAALDNSIGVLGVAPSAELYAVKVLGASGSGSVSSIAQGLEWAGANGMHVANLSLGSPSPSATLEQAVNSATSRGVLVVAASGNSGAGSISYPARYANAMAVGATDQDNNRASFSQYGAGLDIVAPGVNVQSTYPGSTYASLNGTSMATPHVAGAAALVKQKNPSWSRVQIRNHLKNTATSLGSTNLYGSGLVNAEAATR

SEQ ID NO: 57739 - protein, 269 aa, Unidentified
AQSVPWGISRVQAPAAHNRGLKGSGVKVAVLDTGISTHPDLNIRGGASFVPGEPSTQDGNGHGTHVAGTIAALNNSIGVLGVAPSAELYAVKVLGASGNGNISSIAQGLEWAGNNGMHVANLSLGSPSPSATLEQAVNSATSRGVLVVAASGNSGAGSISYPARYANAMAVGATDQNNNRASFSQYGAGLDIVAPGVNVQSTYPGSTYASLNGTSMATPHVAGAATLVKQKNPSWSNVRIRNHLKNTATSLGSTNLYGSGLVNAEAATR

SEQ ID NO: 57740 - protein, 269 aa, Unidentified
AQSVPWGISRVQAPAAHNRRLTGSGVKVAVLDTGISTHPDLNIRGGASFVPGEPSTQDGNGHGTHVAGTIAALNNRIGVLGVAPSAELYAVKVLGASGSGSVSSIAQGLEWAGNNGMHVANLSLGSPSPSATLEQAVNSATSRGVLVVAASGNSGADSISYPARYANAMAVGATDQNNNRADFSQYGAGLDIVAPGVNVQSTYPGSTYASLNGTSMATPHVAGAAALVKQKNPSWSNVRIRDHLKNTATSLGSTNLYGSGLVNAEAATR

SEQ ID NO: 57741 - protein, 269 aa, Lederbergia lentus
AQSDPWGISRVQAPAAHNRGLTGSGVKVAVLDTGISTHPDLNIRGGASFVPGEPSTQDGNGHGTHVAGTIAALNNSIGVLGVAPSAELYAVKVLGADGEGAISSIAQGLEWAGNNGMHVANLSLGSPSPSATLEQAVNSATSRGVLVVAASGNSGASSISYPARYANAMAVGATDQNNNRASFSQYGAGLDIVAPGVNVQSTYPGSTYASLNGTSMATPHVAGAAALVKQKNPSWSNVQIRNHLKNTATSLGSTNLYGSGLVNAEAATR

SEQ ID NO: 57742 - protein, 269 aa, Unidentified
AQSVPWGISRVQAPAAHNRGLTGSGVKVAVLDTGISTHPDLNIRGGASFVPGEPSTQDGNGHGTHVAGTIAALNNSIGVLGVAPSAELYAVKVLGADGRGAISSIAQGLEWAGNNGMHVANLSLGSPSPSATLEQAVNYATSRGVLVVAASGNSGASSISYPARYANAMAVGATDQNNNRASFSQYGAGLDIVAPGVNVQSTYPGSTYASLNGTSMATPHVAGAAALVKQKNPSWSNVQIRNHLKNTATSLGSTNLYGSGLVNAEAATR

SEQ ID NO: 57743 - protein, 269 aa, Unidentified
AQSVPWGISRVQAPAAHNRGLTGRGVKVAVLDSGISTHPDLNIRGGASFVPGEPSTQDGEGHGTHVAGTIAALNNSIGVLGVAPSAELYAVKVLGASGSGSVSSIAQGLEWAGLNGMHVANLSLGSPSPSATLEQAVNSATSRGVLVVAASGNSGEGSISYPARYANAMAVGATDQNNNRADFSQYGAGLDIVAPGVNVQSTYPGSTYASLNGTSMATPHVAGAAALVKQKNPSWSNVQIRNHLKNTATSLGSTNLYGSGLVNAEAATR

SEQ ID NO: 57744 - protein, 269 aa, Unidentified
AQSVPWGISRVQAPAAHRRRLTGRGVKVAVLDTGISTHPDLDIRGGASFVPGEPSTQDGNGHGTHVAGTIAALDNSIGVLGVAPSAELYAVKVLGASGSGSVSSIAQGLEWAGNNGMHVANLSLGSPSPSATLEQAVNSATSRGVLVVAASGNSGAGSISYPARYANAMAVGATDQNNNRASFSQYGAGLDIVAPGVNVQSTYPGSTYASLNGTSMATPHVAGAAALVKQKNPSWSNVQIRNRLKNTATSLGSTNLYGSGLVNAEAATR

SEQ ID NO: 57745 - protein, 269 aa, Unidentified
AQSVPWGISRVQAPAAHNRGLTGSGVKVAVLDTGISTHPDLNIRGGASFVPGEPSTQDGNGHGTHVAGTIAALNNDIGVLGVAPSAELYAVKVLGASGSGSVSSIAQGLEWAGNNSMHVANLSLGSESPSATLEQAVNSATSRGVLVVAASGNSGAGSISYPARYANAMAVGATDQNNNRADFSQYGAGLDIVAPGVNVQSTYPGSTYASLNGTSMATPHVAGAAALVKQKNPSWSNVRIRDHLKNTATSLGSTNLYGSGLVNAEAATR

SEQ ID NO: 57746 - protein, 269 aa, Unidentified
AQSVPWGISRVQAPAAHNRKLTGGGVKVAVLDTGISTHPDLNIRGGASFVPGEPSTQDGEGHGTHVAGTIAALNNSIGVLGVAPSAELYAVKVLSASGQGSVSSIAQGLEWAGLNGMHVANLSLGAPSPSATLEQAVNSATSRGVLVVAASGNSGAGSISYPARYANAMAVGATDQNNNRASFSQYGAGLDIVAPGVNVQSTYPGSTYASLNGTSSATPHVAGAAALVKQKNPSWSNVQIRNHLKNTATSLGSTNLYGSGLVNAEAATR

SEQ ID NO: 57747 - protein, 269 aa, Unidentified
AQSVPWGISRVQAPAAHNRKLTGSGVKVAVLDTGISTHPDLNIRGGASFVPGEPSTQDGEGHGTHVAGTIAALNNNIGVLGVAPSAELYAVKVLSASGNGSVSSIAQGLEWAGLNGMHVANLSLGSPSPSATLEQAVNSATSRGVLVVAASGNSGAGSISYPARYANAMAVGATDQNNNRASFSQYGAGLDIVAPGVNVQSTYPGSTYASLNGTSMATPHVAGAAALVKQKNPSWSNVQIRNHLKNTATSLGSTNLYGSGLVNAEAATR

SEQ ID NO: 57748 - protein, 269 aa, Unidentified
AQSVPWGISRVQAPAAHNRKLTGSGVKVAVLDTGISTHPDLNIRGGASFVPGEPSTQDGEGHGTHVAGTIAALNNSIGVLGVAPSAELYAVKVLGASGDGSVSSIAQGLEWAGLNGMHVANLSLGQPSPSATLEQAVNSATSRGVLVVAASGNSGAGSISYPARYANAMAVGATDQNNNRASFSQYGAGLDIVAPGVNVQSTYPGSAYASLNGTSMATPHVAGAAALVKQKNPSWSNVQIRNHLKNTATSLGSTNLYGSGLVNAEAATR

SEQ ID NO: 57749 - protein, 269 aa, Unidentified
AQSVPWGISRVQAPAAHNRGLYGSGVKVAVLDTGISTHPDLNIRGGASFVPGEPSTQDGNGHGTHVAGTIAALNNSIGVLGVAPSAELYAVKVLGASGTGNISSIAQGLEWAGNNGMHVANLSLGSPSPSATLEQAVNSATSRGVLVVAASGNSGAGSISYPARYANAMAVGATDQNNNRASFSQYGAGLDIVAPGVNVQSTYPGSTYASLNGTSMATPHVAGAAVLVKQKNPSWSNVSIRNHLKNTATSLGSTNLYGSGLVNAEAATR

SEQ ID NO: 57750 - protein, 269 aa, Unidentified
AQSVPWGISRVQAPAAHNRGLQGSGVKVAVLDTGISTHPDLNIRGGASFVPGEPSTQDGNGHGTHVAGTIAALNNSIGVLGVAPSAELYAVKVLGASGGGAISSIAQGLEWAGNNGMHVANLSLGSPSPSATLEQAVNSATSRGVLVVAASGNSGAGSISYPARYANAMAVGATDQNNNRASFSQYGAGLDIVAPGVNVQSTYPGSTYASLNGTSMATPHVAGAAVLVKQKNPSWSNVSIRNHLKNTATSLGSTNLYGSGLVNAEAATR

SEQ ID NO: 57751 - protein, 269 aa, Unidentified
AQSVPWGISRVQAPAAHNRGLAGSGVKVAVLDTGISTHPDLNIRGGASFVPGEPSTQDGNGHGTHVAGTIAALNNSIGVLGVAPSAELYAVKVLGASGNGGLSSIAQGLEWAGNNGMHVANLSLGSPSPSATLEQAVNSATSRGVLVVAASGNSGAGSISYPARYANAMAVGATDQNNNRASFSQYGAGLDIVAPGVNVQSTYPGSTYASLNGTSMATPHVAGAATLVKQKNPSWSNVRIRNHLKNTATSLGSTNLYGSGLVNAEAATR

SEQ ID NO: 57752 - protein, 269 aa, Unidentified
AQSVPWGISRVQAPAAHNRGLTGSGVKVAVLDTGISTHPDLNIRGGASFVPGEPSTQDGNGHGTHVAGTIAALNNSIGVLGVAPSAELYAVKVLGADGEGAISSIAQGLEWAGNNGMHVANLSLGSPSPSATLEQAVNSATSRGVLVVAASGNSGASSISYPARYANAMAVGATDQNNNRASFSQYGAGLDIVAPGVNVQSTYPGSTYASLNGTSMATPHVAGAAALVKQKNPSWSNVQIRGHLKNTATSLGSTNLYGSGLVNAEAATR

SEQ ID NO: 57753 - protein, 269 aa, Unidentified
AQSVPWGISRVQAPAAHNRKLTGSGVKVAVLDTGISTHPDLRIRGGASFVPGDPSTQDGEGHGTHVAGTIAALNNNIGVLGVAPSAELYAVKVLGASGSGSVSSIAQGLEWAGNNGMHVANLSLGSPSPSATLEQAVNSATSRGVLVVAASGNSGAGSISYPARYANAMAVGATDQNNNRASFSQYGAGLDIVAPGVNVQSTYPGSTYASLNGTSMATPHVAGAAALVKQKNPRWSNVQIRNHLKNTATSLGSTNLYGSGLVNAEAATR

SEQ ID NO: 57754 - protein, 269 aa, Unidentified
AQSVPWGISRVQAPAAHNRGLRGSGVKVAVLDTGISTHPDLNIRGGASFVPGEPSTQDGNGHGTHVAGTIAALNNSIGVLGVAPSAELYAVKVLGASGNGAISSIAQGLEWAGNNGMHVANLSLGSPSPSATLEQAVNSATSRGVLVVAASGNSGAGSISYPARYANAMAVGATDQNNNRASFSQYGAGLDIVAPGVNVQSTYPGSTYASLNGTSMATPHVAGAAVLVKQKNPSWSNVWIRNHLKNTATSLGSTNLYGSGLVNAEAATR

SEQ ID NO: 57755 - protein, 269 aa, Unidentified
AQSVPWGISRVQAPAAHNRGLYGSGVKVAVLDTGISTHPDLNIRGGASFVPGEPSTQDGNGHGTHVAGTIAALNNSIGVLGVAPSAELYAVKVLGASGTGNISSIAQGLEWAGNNGMHVANLSLGSPSPSATLEQAVNSATSRGVLVVAASGNSGAGSISYPARYANAMAVGATDQNNNRASFSQYGAGLDIVAPGVNVQSTYPGSTYASLNGTSMATPHVAGAATLVKQKNPSWSNVRIRNHLKNTATSLGSTNLYGSGLVNAEAATR

SEQ ID NO: 57756 - protein, 269 aa, Unidentified
AQSRPWGISRVQAPAAHNRGLTGSGVKVAVLDTGISTHPDLNIRGGASFVPGEPSTQDGNGHGTHVAGTIAALNNSIGVLGVAPSAELYAVKVLGASGGGAISSIAQGLEWAGNNGMHVANLSLGSPSPSATLEQAVNSATSRGVLVVAASGNSGAGSISYPARYANAMAVGATDQNNNRASFSQYGAGLDIVAPGVNVQSTYPGSTYASLNGTSMATPHVAGAAVLVKQKNPSWSNVRIRNHLKNTATSLGSTNLYGSGLVNAEAATR

SEQ ID NO: 57757 - protein, 269 aa, Unidentified
AQSVPWGISRVQAPAAHNRRLTGSGVKVAVLDTGISTHPDLRIRGGASFVPGEPSTQDGNGHGTHVAGTIAALNNSIGVLGVAPSAELYAVKVLGASGQGSVSSIAQGLEWAGLNGMHVANLSLGAPSPSATLEQAVNSATSRGVLVVAASGNSGAGSISYPARYANAMAVGATDQNNNRASFSQYGAGLDIVAPGVNVQSTYPGSTYASQNGTSMATPHVAGAAALVKQKNPSWSNVQIRNHLKNTATSLGSTNLYGSGLVNAEAATR

SEQ ID NO: 57758 - protein, 269 aa, Unidentified
AQSVPWGISRVQAPAAHNRGLAGSGVKVAVLDTGISTHPDLNIRGGASFVPGEPSTQDGNGHGTHVAGTIAALNNSIGVLGVAPSAELYAVKVLGASGNGGISSIAQGLEWAGNNGMHVANLSLGSPSPSATLEQAVNSATSRGVLVVAASGNSGAGSISYPARYANAMAVGATDQNNNRASFSQYGAGLDIVAPGVNVQSTYPGSTYASLNGTSMATPHVAGAAMLVKQKNPSWSNVSIRNHLKNTATSLGSTNLYGSGLVNAEAATR

SEQ ID NO: 57759 - protein, 269 aa, Unidentified
AQSVPWGISRVQAPAAHNRGLTGSGVKVAVLDTGISTHPDLNIRGGASFVPGEPSTQDGNGHGTHVAGTIAALNNSIGVLGVAPSAELYAVKVLGASGSGSLSSIAQGLEWAGNNGMHVANLSLGSPSPSATLEQAVNSATSRGVLVVAASGNSGEGSISYPARYANAMAVGATDQNNNHADFSQYGAGLDIVAPGVNVQSTYPGSTYASLNGTSMATPHVAGAAALVKQKNPSWSNVQIRNRLKNTATSLGSTNLYGSGLVNAFAATR

SEQ ID NO: 57760 - protein, 269 aa, Unidentified
AQSVPWGISRVQAPAAHNRGLTGSGVKVAVLDTGISTHPDLNIRGGASFVPGEPSTQDGNGHGTHVAGTIAALNNSIGVLGVAPSAELYAVKVLGADGRGAISSIAQGLEWAGSNGMHVANLSLGSPSPSATLEQAVNSATSRGVLVVAASGNSGASSISYPARYANAMAVGATDQNNNRASFSQYGAGLDIVAPGVNVQSTYPGSTYASLNGTSMATPHVAGAAALVKQKNPSWSNVQIRNHLKNTATSLGSTNLYGSGLVNAEAATR

SEQ ID NO: 57761 - protein, 269 aa, Unidentified
AQSVPWGISRVQAPAAHNRGLAGRGVKVAVLDSGISTHPDLNIRGGASFVPGEPSTQDGEGHGTHVAGTIAALNNSIGVLGVAPSAELYAVKVLGASGSGSVSSIAQGLEWAGNNGMHVANLSLGIPSPSATLEQAVNSATSRGVLVVAASGNSGEGSISYPARYANAMAVGATDQNNNRASFSQYGAGLDIVAPGVNVQSTYPGSTYASLNGTSMATPHVAGAAALVKQKNPSWSNVQIRNHLKNTATSLGSTNLYGSGLVNAEAATR

SEQ ID NO: 57762 - protein, 269 aa, Unidentified
AQSVPWGISRVQAPAAHRRGLTGRGVKVAVLDTGISTHPDLNIRGGASFVPGEPSTQDGNGHGTHVAGTIAALDNSIGVLGVAPSAELYAVKVLGASGAGSVSSIAQGLEWAGNNGMHVANLSLGSPSPSATLEQAVNSATSRGVLVVAASGNSGAGSISYPARYANAMAVGATDQNNNRASFSQYGAGLDLVAPGVNVQSTYPGSTYASLNGTSMATPHVAGAAALVKQKNPSWSNVQIRNRLKNTATSLGSTNLYGSGLVNAEAATR

SEQ ID NO: 57763 - protein, 269 aa, Unidentified
AQSVPWGISRVQAPAAHNRGLRGSGVKVAVLDTGISTHPDLNIRGGASFVPGEPSTQDGNGHGTHVAGTIAALNNSIGVLGVAPSAELYAVKVLGASGGGNISSIAQGLEWAGNNGMHVANLSLGSPSPSATLEQAVNSATSRGVLVVAASGNSGAGSISYPARYANAMAVGATDQNNNRASFSQYGAGLDIVAPGVNVQSTYPGSTYASLNGTSMATPHVAGAAMLVKQKNPSWSNVRIRNHLKNTATSLGSTNLYGSGLVNAEAATR

SEQ ID NO: 57764 - protein, 269 aa, Unidentified
AQSVPWGISRVQAPAAHNRRLTGSGVKVAVLDTGISTHPDLNIRGGASFVPGEPSTQDGNGHGTHVAGTIAALNNSIGVLGVAPSAELYAVKVLGASGGGAISSIAQGLEWAGNNGMHVANLSLGSPSPSATLEQAVNSATSRGVLVVAASGNSGAGSISYPARYANAMAVGATDQNNNRASFSQYGAGLDIVAPGVNVQSTYPGSTYASLNGTSMATPHVAGAAVLVKQKNPSWSNVRIRNHLKNTATSLGSTNLYGSGLVNAEAATR

SEQ ID NO: 57765 - protein, 269 aa, Unidentified
AQVVPWGISRVQAPAAHNRGLTGSGVKVAVLDTGISTHEDLNIRGGASFVPGEPSTQDGNGHGTHVAGTIAALDNSIGVLGVAPSAELYAVKVLGASGSGSVSSIAQGLEWAGNNRMHVANLSLGRPSPSATLEQAVNSATSRGVLVVAASGNSGAGSISYPARYANAMAVGATDQNNNRASFSQYGAGLDIVAPGVNVQSTYPGSTYASLNGTSMATPHVAGAAALVKQKNPSWSNVQIRNHLKNTATSLGSTILYGSGLVNAEAATR

SEQ ID NO: 57766 - protein, 269 aa, Unidentified
AQSVPWGISRVQAPAAHNRGLRGSGVKVAVLDTGISTHPDLNIRGGASFVPGEPSTQDGNGHGTHVAGTIAALNNSIGVLGVAPSAELYAVKVLGASGNGNISSIAQGLEWAGNNGMHVANLSLGSPSPSATLEQAVNSATSRGVLVVAASGNSGAGSISYPARYANAMAVGATDQNNNRASFSQYGAGLDIVAPGVNVQSTYPGSTYASLNGTSMATPHVAGAAMLVKQKNPSWSNVWIRNHLKNTATSLGSTNLYGSGLVNAEAATR

SEQ ID NO: 57767 - protein, 269 aa, Unidentified
AQSVPWGISRVQAPAAHNRGLRGSGVKVAVLDTGISTHPDLNIRGGASFVPGEPSTQDGNGHGTHVAGTIAALNNSIGVLGVAPSAELYAVKVLGASGTGALSSIAQGLEWAGNNGMHVANLSLGSPSPSATLEQAVNSATSRGVLVVAASGNSGAGSISYPARYANAMAVGATDQNNNRASFSQYGAGLDIVAPGVNVQSTYPGSTYASLNGTSMATPHVAGAALLVKQKNPSWSNVRIRNHLKNTATSLGSTNLYGSGLVNAEAATR

SEQ ID NO: 57768 - protein, 269 aa, Unidentified
AQSVPWGISRVQAPAAHNRGLTGRGVKVAVLDTGISTHPDLNIRGGASFVPGEPSTQDGEGHGTHVAGTIAALNNDIGVLGVAPSAELYAVKVLGASGSGSVSSIAQGLEWAGNNSMHVANLSLGSPSPSATLEQAVNSATSRGVLVVAASGNSGAGSISYPARYANAMAVGATDQNNNRADFSQYGAGLDIVAPGVNVQSTYPGSTYASLNGTSMATPHVAGAAALVKQKNPSWSNVRIRNHLKNTATSLGSTNLYGSGLVNAEAATR

SEQ ID NO: 57769 - protein, 269 aa, Unidentified
AQSVPWGISRVQAPAAHNRRLTGSGVKVAVLDTGISTHPDLRIRGGASFVPGEPSTQDGNGHGTHVAGTIAALNNSIGVLGVAPSAELYAVKVLSASGQGSVSSIAQGLEWAGNNGMHVANLSLGAPSPSATLEQAVNSATSRGVLVVAASGNSGAGSISYPARYANAMAVGATDQNNNRASFSQYGAGLDIVAPGVNVQSTYPGSTYASQNGTSMATPHVAGAAALVKQKNPSWSNVQIRNHLKNTATSLGSTNLYGSGLVNAEAATR

SEQ ID NO: 57770 - protein, 269 aa, Unidentified
AQSVPWGISRVQAPAAHNRGLTGSGVKVAVLDTGISTHPDLNIRGGASFVPGEPSTQDGEGHGTHVAGTIAALNNGIGVLGVAPSAELYAVKVLGASGSGSVSSIAQGLEWAGNNSMHVANLSLGSPSPSATLEQAVNSATSRGVLVVAASGNSGAGSISYPARYANAMAVGATDQNNNRADFSQYGAGLDIVAPGVNVQSTYPGSTYASLNGTSMATPHVAGAAALVKQKNPSWSNVRIRDHLKNTATSLGSTNLYGSGLVNAEAATR

SEQ ID NO: 57771 - protein, 269 aa, Unidentified
AQSVPWGISRVQAPAAHNRGLTGGGVKVAVLDTGISTHPDLNIRGGASFVPGEPSTQDGNGHGTHVAGTIAALNNNIGVLGVAPSAELYAVKVLAASGQGSVSSIAQGLEWAGNNGMHVANLSLGAPSPSATLEQAVNSATSRGVLVVAASGNSGAGSISYPARYANAMAVGATDQNNNRASFSQYGAGLDIVAPGVNVQSTYPGSTYASQNGTSMATPHVAGAAALVKQKNPSWSNVQIRNHLKNTATSLGSTNLYGSGLVNAEAATR

SEQ ID NO: 57772 - protein, 269 aa, Unidentified
AQSVPWGISRVQAPAAHNRGLAGRGVKVAVLDSGISTHPDLNIRGGASFVPGEPSTQDGEGHGTHVAGTIAALNNSIGVLGVAPSAELYAVKVLGASGSGSVSSIAQGLEWAGLNGMHVANLSLGSPSPSATLEQAVNSATSRGVLVVAASGNSGEGSISYPARYANAMAVGATDQNNNRASFSQYGAGLDIVAPGVNVQSTYPGSTYASLNGTSMATPHVAGAAALVKQKNPSWSNVQIRNHLKNTATSLGSTNLYGSGLVNAEAATR

SEQ ID NO: 57773 - protein, 269 aa, Unidentified
AQSVPWGISRVQAPAAHNRKLLGFGVKVAVLDTGISTHPDLNIRGGASFVPGEPSTQDGNGHGTHVAGTIAALNNSIGVLGVAPSAELYAVKVLGASGSGSVSSIAQGLEWAGNNRMHVANLSLGDPSPSATLEQAVNSATSRGVLVVAASGNSGAGSISYPARYANAMAVGATDQNNNRASFSQYGAGLDIVAPGVNVQSTYPGSAYASLNGTSMATPHVAGAAALVKQKNPSWSNVQIRNHLKNTATSLGSTNLYGSGLVNAEAATR

SEQ ID NO: 57774 - protein, 269 aa, Unidentified
AQSVPWGISRVQAPAAHNRRLWGSGVKVAVLDTGISTHPDLRITGGASFVPGEPSTQDGNGHGTHVAGTIAALNNSIGVLGVAPSAELYAVKVLGASGAGSVSSIAQGLEWAGNNGMHVANLSLGSPSPSATLEQAVNSATSRGVLVVAASGNSGAGSISYPARYANAMAVGATDQNNNRASFSQYGAGLDIVAPGVNVQSTYPQSTYASLNGTSMATPHVAGAAALVKQKNPSWSNVQIRNHLKNTATSLGSTNLYGSGLVNAEAATR

SEQ ID NO: 57775 - protein, 269 aa, Unidentified
AQSVPWGISRVQAPAAHNRGLWGSGVKVAVLDTGISTHPDLRITGGASFVPGEPSTQDGNGHGTHVAGTIAALNNSIGVLGVAPSAELYAVKVLGASGAGSVSSIAQGLEWAGNNGMHVANLSLGSPSPSATLEQAVNSATSRGVLVVAASGNSGAGSISYPARYANAMAVGATDQNNNRASFSQYGAGLDIVAPGVNVQSTYIGSAYASLNGTSMATPHVAGAAALVKQKNPSWSNVQIRNHLKNTATSLGSTNLYGSGLVNAEAATR

SEQ ID NO: 57776 - protein, 269 aa, Unidentified
AQSVPWGISRVQAPAAHRRGLWGRGVKVAVLDTGISTHPDLNIRGGASFVPGEPSTQDGNGHGTHVAGTIAALDNSIGVLGVAPSAELYAVKVLGASGSGSVSSIAQGLEWAGNNGMHVANLSLGSPSPSATLEQAVNSATSRGVLVVAASGNSGAGSISYPARYANAMAVGATDQNNNRASFSQYGAGLDIVAPGVNVQSTYPQSTYASLNGTSMATPHVAGAAALVKQKNPSWSNVQIRNRLKNTATSLGSTNLYGSGLVNAEAATR

SEQ ID NO: 57777 - protein, 269 aa, Unidentified
AQSVPWGISRVQAPAAHRRGLTGRGVKVAVLDTGISTHPDLNIRGGASFVPGEPSTQDGNGHGTHVAGTIAALDNSIGVLGVAPSAELYAVKVLGASGSGSVSSIAQGLEWAGANGMHVANLSLGSPSPSATLEQAVNSATSRGVLVVAASGNSGAGSISYPARYANAMAVGATDQNNNRASFSQYGAGLDLVAPGVNVQSTYPGSTYASLNGTSMATPHVAGAAALVKQKNPSWSNVQIRNRLKNTATSLGSTNLYGSGLVNAEAATR

SEQ ID NO: 57778 - protein, 269 aa, Unidentified
AQSVPWGISRVQAPAAHNRGLYGSGVKVAVLDTGISTHPDLNIRGGASFVPGEPSTQDGNGHGTHVAGTIAALNNSIGVLGVAPSAELYAVKVLGASGGGNISSIAQGLEWAGNNGMHVANLSLGSPSPSATLEQAVNSATSRGVLVVAASGNSGAGSISYPARYANAMAVGATDQNNNRASFSQYGAGLDIVAPGVNVQSTYPGSTYASLNGTSMATPHVAGAALLVKQKNPSWSNVSIRNHLKNTATSLGSTNLYGSGLVNAEAATR

SEQ ID NO: 57779 - protein, 269 aa, Lederbergia lentus
AQSVPWGISDVQAPAAHNRGLTGSGVKVAVLDTGISTHPDLNIRGGASFVPGEPSTQDGNGHGTHVAGTIAALNNSIGVLGVAPSAELYAVKVLGADGEGAISSIAQGLEWAGNNGMHVANLSLGSPSPSATLEQAVNSATSRGVLVVAASGNSGASSISYPARYANAMAVGATDQNNNRASFSQYGAGLDIVAPGVNVQSTYPGSTYASLNGTSMATPHVAGAAALVKQKNPSWSNVQIRNHLKNTATSLGSTNLYGSGLVNAEAATR

SEQ ID NO: 57780 - protein, 269 aa, Unidentified
AQSVPWGISRVQAPAAHNRGLQGSGVKVAVLDTGISTHPDLNIRGGASFVPGEPSTQDGNGHGTHVAGTIAALNNSIGVLGVAPSAELYAVKVLGASGTGAISSIAQGLEWAGNNGMHVANLSLGSPSPSATLEQAVNSATSRGVLVVAASGNSGAGSISYPARYANAMAVGATDQNNNRASFSQYGAGLDIVAPGVNVQSTYPGSTYASLNGTSMATPHVAGAATLVKQKNPSWSNVSIRNHLKNTATSLGSTNLYGSGLVNAEAATR

SEQ ID NO: 57781 - protein, 269 aa, Unidentified
AQSVPWGISRVQAPAAHNRGLTGRGVKVAVLDTGISTHPDLNIRGGASFVPGEPSTQDGEGHGTHVAGTIAALNNDIGVLGVAPSAELYAVKVLGASGSGSVSSIAQGLEWAGNNSMHVANLSLGSPSPSATLEQAVNSATSRGVLVVAASGNSGAGSISYPARYANAMAVGATDQNNNRADFSQYGAGLDIVAPGVNVQSTYPGSTYASLNGTSMATPHVAGAAALVKQKNPSWSNVQIRNRLKNTATSLGSTNLYGSGLVNAEAATR

SEQ ID NO: 57782 - protein, 269 aa, Unidentified
AQSVPWGISRVQAPAAHNRGLTGRGVKVAVLDTGISTHPDLNIRGGASFVPGEPSTQDGEGHGTHVAGTIAALNNDIGVLGVAPSAELYAVKVLGASGSGSVSSIAQGLEWAGNNSMHVANLSLGSPSPSATLEQAVNSATSRGVLVVAASGNSGAGSISYPARYANAMAVGATDQNNNRASFSQYGAGLDIVAPGVNVQSTYPGSTYASLNGTSMATPHVAGAAALVKQKNPSWSNVQIRDRLKNTATSLGSTNLYGSGLVNAEAATR

SEQ ID NO: 57783 - protein, 269 aa, Unidentified
AQSVPWGISRVQAPAAHNRGLRGSGVKVAVLDTGISTHPDLNIRGGASFVPGEPSTQDGNGHGTHVAGTIAALNNSIGVLGVAPSAELYAVKVLGASGGGNISSIAQGLEWAGNNGMHVANLSLGSPSPSATLEQAVNSATSRGVLVVAASGNSGAGSISYPARYANAMAVGATDQNNNRASFSQYGAGLDIVAPGVNVQSTYPGSTYASLNGTSMATPHVAGAATLVKQKNPSWSNVSIRNHLKNTATSLGSTNLYGSGLVNAEAATR

SEQ ID NO: 57784 - protein, 269 aa, Unidentified
AQSVPWGISRVQAPAAHNRGLRGSGVKVAVLDTGISTHPDLNIRGGASFVPGEPSTQDGNGHGTHVAGTIAALNNSIGVLGVAPSAELYAVKVLGASGGGNISSIAQGLEWAGNNGMHVANLSLGSPSPSATLEQAVNSATSRGVLVVAASGNSGAGSISYPARYANAMAVGATDQNNNRASFSQYGAGLDIVAPGVNVQSTYPGSTYASLNGTSMATPHVAGAAMLVKQKNPSWSNVWIRNHLKNTATSLGSTNLYGSGLVNAEAATR

SEQ ID NO: 57785 - protein, 269 aa, Unidentified
AQSVPWGISRVQAPAAHNRRLTGRGVKVAVLDTGISTHPDLNIRGGASFVPGEPSTQDGNGHGTHVAGTIAALNNDIGVLGVAPSAELYAVKVLGASGSGSVSSIAQGLEWAGNNDMHVANLSLGSESPSATLEQAVNSATSRGVLVVAASGNSGAGSISYPARYANAMAVGATDQNNNRADFSQYGAGLDIVAPGVNVQSTYPGSTYASLNGTSMATPHVAGAAALVKQKNPSWSNVQIRNHLKNTATSLGSTNLYGSGLVNAEAATR

SEQ ID NO: 57786 - protein, 269 aa, Unidentified
AQSVPWGISRVQAPAAHNRRLTGRGVKVAVLDTGISTHPDLNIRGGASFVPGEPSTQDGEGHGTHVAGTIAALNNGIGVLGVAPSAELYAVKVLGASGSGSVSSIAQGLEWAGNNDMHVANLSLGSPSPSATLEQAVNSATSRGVLVVAASGNSGAGSISYPARYANAMAVGATDQNNNRASFSQYGAGLDIVAPGVNVQSTYPGSTYASLNGTSMATPHVAGAAALVKQKNPSWSNVQIRDHLKNTATSLGSTNLYGSGLVNAEAATR

SEQ ID NO: 57787 - protein, 269 aa, Unidentified
AQSVPWGISRVQAPAAHNRGLQGSGVKVAVLDTGISTHPDLNIRGGASFVPGEPSTQDGNGHGTHVAGTIAALNNSIGVLGVAPSAELYAVKVLGASGGGNISSIAQGLEWAGNNGMHVANLSLGSPSPSATLEQAVNSATSRGVLVVAASGNSGAGSISYPARYANAMAVGATDQNNNRASFSQYGAGLDIVAPGVNVQSTYPGSTYASLNGTSMATPHVAGAATLVKQKNPSWSNVWIRNHLKNTATSLGSTNLYGSGLVNAEAATR

SEQ ID NO: 57788 - protein, 269 aa, Unidentified
AQSVPWGISRVQAPAAHNRRLTGSGVKVAVLDTGISTHPDLNIRGGASFVPGEPSTQDWNGHGTHVAGTIAALNNSIGVLGVAPSAELYAVKVLGASGSGSVSSIAQGLEWAGNNGMHVANLSLGSESPSATLEQAVNSATSRGVLVVAASGNSGADSISYPARYANAMAVGATDQNNNRADFSQYGAGLDIVAPGVNVQSTYPGSTYASLNGTSMATPHVAGAAALVKQKNPSWSNVRIRNHLKNTATSLGSTNLYGSGLVNAEAATR

SEQ ID NO: 57789 - protein, 269 aa, Unidentified
AQSVPWGISRVQAPAAHNRGLTGRGVKVAVLDTGISTHPDLNIRGGASFVPGEPSTQDGEGHGTHVAGTIAALNNGIGVLGVAPSAELYAVKVLGASGSGSVSSIAQGLEWAGNNDMHVANLSLGSPSPSATLEQAVNSATSRGVLVVAASGNSGADSISYPARYANAMAVGATDQNNNRASFSQYGAGLDIVAPGVNVQSTYPGSTYASLNGTSMATPHVAGAAALVKQKNPSWSNVQIRNRLKNTATSLGSTNLYGSGLVNAEAATR

SEQ ID NO: 57790 - protein, 269 aa, Unidentified
AQSVPWGISRVQAPAAHNRKLTGSGVKVAVLDTGISTHPDLNIRGGASFVPGEPSTQDGEGHGTHVAGTIAALNNNIGVLGVAPSAELYAVKVLGASGNGSVSSIANGLEWAGLNGMHVANLSLGSPSPSATLEQAVNSATSRGVLVVAASGNSGAGSISYPARYANAMAVGATDQNNNRADFSQYGAGLDIVAPGVNVQSTYPGSTYASLNGTSSATPHVAGAAALVKQKNPSWSNVQIRNHLKNTATSLGSTNLYGSGLVNAEAATR

SEQ ID NO: 57791 - protein, 269 aa, Unidentified
AQSVPWGISRVQAPAAHNRGLAGSGVKVAVLDTGISTHPDLNIRGGASFVPGEPSTQDGNGHGTHVAGTIAALNNSIGVLGVAPSAELYAVKVLGASGTGAISSIAQGLEWAGNNGMHVANLSLGSPSPSATLEQAVNSATSRGVLVVAASGNSGAGSISYPARYANAMAVGATDQNNNRASFSQYGAGLDIVAPGVNVQSTYPGSTYASLNGTSMATPHVAGAAVLVKQKNPSWSNVWIRNHLKNTATSLGSTNLYGSGLVNAEAATR

SEQ ID NO: 57792 - protein, 269 aa, Unidentified
AQSVPWGISRVQAPAAHRRGLTGSGVKVAVLDTGISTHPDLNIRGGASFVPGEPSTQDGNGHGTHVAGTIAALNNSIGVLGVAPSAELYAVKVLGASGSGSVSSIAQGLEWAGNNRMHVANLSLGSPSPSATLEQAVNSATSRGVLVVAASGNSGAGSISYPARYANAMAVGATDQNNNRASFSQYGAGLDIVAPGVNVLSTWPGSAYASLNGTSQATPHVAGAAALVKQKNPSWSNVQIRNRLKNTATSLGSTNLYGSGLVNAEAATR

SEQ ID NO: 57793 - protein, 269 aa, Unidentified
AQSVPWGISRVQAPAAHNRGLRGSGVKVAVLDTGISTHPDLNIRGGASFVPGEPSTQDGNGHGTHVAGTIAALNNSIGVLGVAPSAELYAVKVLGASGNGNISSIAQGLEWAGNNGMHVANLSLGSPSPSATLEQAVNSATSRGVLVVAASGNSGAGSISYPARYANAMAVGATDQNNNRASFSQYGAGLDIVAPGVNVQSTYPGSTYASLNGTSMATPHVAGAATLVKQKNPSWSNVRIRNHLKNTATSLGSTNLYGSGLVNAEAATR

SEQ ID NO: 57794 - protein, 269 aa, Unidentified
AQSVPWGISRVQAPAAHNRGLTGSGVKVAVLDTGISTHPDLNIRGGASFVPGEPSTQDGEGHGTHVAGTIAALNNDIGVLGVAPSAELYAVKVLGASGSGSVSSIAQGLEWAGNNSMHVANLSLGSPSPSATLEQAVNSATSRGVLVVAASGNSGAGSISYPARYANAMAVGATDQNNNRADFSQYGAGLDIVAPGVNVQSTYPGSTYASLNGTSMATPHVAGAAALVKQKNPSWSNVRIRDHLKNTATSLGSTNLYGSGLVNAEAATR

SEQ ID NO: 57795 - protein, 269 aa, Unidentified
AQSVPWGISRVQAPAAHNRGLYGSGVKVAVLDTGISTHPDLNIRGGASFVPGEPSTQDGNGHGTHVAGTIAALNNSIGVLGVAPSAELYAVKVLGASGAGNLSSIAQGLEWAGNNGMHVANLSLGSPSPSATLEQAVNSATSRGVLVVAASGNSGAGSISYPARYANAMAVGATDQNNNRASFSQYGAGLDIVAPGVNVQSTYPGSTYASLNGTSMATPHVAGAAVLVKQKNPSWSNVRIRNHLKNTATSLGSTNLYGSGLVNAEAATR

SEQ ID NO: 57796 - protein, 269 aa, Unidentified
AQSVPWGISRVQAPAAHNRRLTGSGVKVAVLDTGISTHPDLNIRGGASFVPGEPSTQDGNGHGTHVAGTIAALNNSIGVLGVAPSAELYAVKVLGASGGGALSSIAQGLEWAGNNGMHVANLSLGSPSPSATLEQAVNSATSRGVLVVAASGNSGAGSISYPARYANAMAVGATDQNNNRASFSQYGAGLDIVAPGVNVQSTYPGSTYASLNGTSMATPHVAGAAVLVKQKNPSWRNVQIRNHLKNTATSLGSTNLYGSGLVNAEAATR

SEQ ID NO: 57797 - protein, 269 aa, Unidentified
AQSVPWGISRVQAPAAHNRKLTGSGVKVAVLDTGISTHPDLNIRGGASFVPGEPSTQDGNGHGTHVAGTIAALNNNIGVLGVAPSAELYAVKVLGASGSGSVSSIAQGLEWAGNNGMHVANLSLGDPSPSATLEQAVNSATSRGVLVVAASGNSGAGSIDYPARYANAMAVGATDQNNNRASFSQYGAGLDIVAPGVNVQSTYPGSAYASENGTSMATPHVAGAAALVKQKNPSWSNVQIRNHLKNTATSLGSTNLYGSGLVNAEAATR

SEQ ID NO: 57798 - protein, 269 aa, Unidentified
AQSVPWGISRVQAPAAHNRGLTGRGVKVAVLDTGISTHPDLNIRGGASFVPGEPSTQDGEGHGTHVAGTIAALNNGIGVLGVAPSAELYAVKVLGASGSGSVSSIAQGLEWAGNNSMHVANLSLGSPSPSATLEQAVNSATSRGVLVVAASGNSGAGSISYPARYANAMAVGATDQNNNRADFSQYGAGLDIVAPGVNVQSTYPGSTYASLNGTSMATPHVAGAAALVKQKNPSWSNVQIRDHLKNTATSLGSTNLYGSGLVNAEAATR

SEQ ID NO: 57799 - protein, 269 aa, Unidentified
AQSVPWGISRVQAPAAHNRGLTGSGVKVAVLDTGISTHPDLNIRGGASFVPGEPSTQDGNGHGTHVAGTIAALNNSIGVLGVAPSAELYAVKVLGADGRGAISSIAQGLEWAGNNGMHVANLSLGSPSPSATLEQAVNAATSRGVLVVAASGNSGASSISYPARYANAMAVGATDQNNNRASFSQYGAGLDIVAPGVNVQSTYPGSTYASLNGTSMATPHVAGAAALVKQKNPSWSNVQIRNHLKNTATSLGSTNLYGSGLVNAEAATR

SEQ ID NO: 57800 - protein, 269 aa, Unidentified
AQSVPWGISRVQAPAAHNRGLQGSGVKVAVLDTGISTHPDLNIRGGASFVPGEPSTQDGNGHGTHVAGTIAALNNSIGVLGVAPSAELYAVKVLGASGNGNISSIAQGLEWAGNNGMHVANLSLGSPSPSATLEQAVNSATSRGVLVVAASGNSGAGSISYPARYANAMAVGATDQNNNRASFSQYGAGLDIVAPGVNVQSTYPGSTYASLNGTSMATPHVAGAAVLVKQKNPSWSNVRIRNHLKNTATSLGSTNLYGSGLVNAEAATR

SEQ ID NO: 57801 - protein, 269 aa, Unidentified
AQSVPWGISRVQAPAAHRRGLTGRGVKVAVLDTGISTHPDLNIRGGASFVPGEPSTQDGNGHGTHVAGTIAALDNSIGVLGVAPSAELYAVKVLGASGSGSVSSIAQGLEWAGNNGMHVANLSLGSPSPSATLEQAVNSATSRGVLVVAASGNSGAGSISYPARYANAMAVGATDQNNNRASFSQYGAGLDIVAPGVNVQSTYPQSTYFSLNGTSMATPHVAGAAALVKQKNPSWSNVQIRNRLKNTATSLGSTNLYGSGLVNAEAATR

SEQ ID NO: 57802 - protein, 269 aa, Unidentified
AQSVPWGISRVQAPAAHNRKLTGGGVKVAVLDTGISTHPDLNIRGGASFVPGEPSTQDGEGHGTHVAGTIAALNNSIGVLGVAPSAELYAVKVLGASGNGSVSSIANGLEWAGLNGMHVANLSLGSPSPSATLEQAVNSATSRGVLVVAASGNSGAGSISYPARYANAMAVGATDQNNNRADFSQYGAGLDIVAPGVNVQSTYPGSTYASLNGTSSATPHVAGAAALVKQKNPSWSNVQIRNHLKNTATSLGSTNLYGSGLVNAEAATR

SEQ ID NO: 57803 - protein, 269 aa, Unidentified
AQSVPWGISRVQAPAAHNRGLTGSGVKVAVLDTGISTHPDLNIRGGASFVPGEPSTQDGNGHGTHVAGTIAALNNSIGVLGVAPSAELYAVKVLPATGGAAISSIAQGLEWAGNNGMHVANLSLGSPSPSATLEQAVNSATSRGVLVVAASGNSGAGSISYPARYANAMAVGATDQNNNRASFSQYGAGLDIVAPGVNVQSTYPGSTYASLNGTSMATPHVAGAAALVKQKNPSWSNVQIRNHLKNTATSLGSTNLYGSGLVNAEAATR

SEQ ID NO: 57804 - protein, 269 aa, Unidentified
AQSVPWGISRVQAPAAHNRGLTGSGVKVAVLDTGISTHPDLNIRGGASFVPGEPSTQDENGHGTHVAGTIAALNNSIGVLGVAPSAELYAVKVLAASGSGSVSSIAQGLEWAGNNGMHVANLSLGAESPSATLEQAVNSATSRGVLVVAASGNSGAKSISYPARYANAMAVGATDQNNNRASFSQYGAGLDIVAPGVNVQSTYPGSTYASQNGTSMATPHVAGAAALVKQKNPSWSNVQIRNHLKNTATSLGSTNLYGSGLVNAEAATR

SEQ ID NO: 57805 - protein, 269 aa, Unidentified
AQSVPWGISRVQAPAAHNRGLTGRGVKVAVLDTGISTHPDLNIRGGASFVPGEPSTQDGEGHGTHVAGTIAALNNSIGVLGVAPSAELYAVKVLGASGSGSVSSIAQGLEWAGLNRMHVANLSLGSPSPSATLEQAVNSATSRGVLVVAASGNSGAGSIDYPARYANAMAVGATDQNNNRADFSQYGAGLDIVAPGVNVQSTYPGSTYASLNGTSMATPHVAGAAALVKQKNPSWSNVQIRNHLKNTATSLGSTNLYGSGLVNAEAATR

SEQ ID NO: 57806 - protein, 269 aa, Unidentified
AQSVPWGISRVQAPAAHNRGLQGSGVKVAVLDTGISTHPDLNIRGGASFVPGEPSTQDGNGHGTHVAGTIAALNNSIGVLGVAPSAELYAVKVLGASGAGNISSIAQGLEWAGNNGMHVANLSLGSPSPSATLEQAVNSATSRGVLVVAASGNSGAGSISYPARYANAMAVGATDQNNNRASFSQYGAGLDIVAPGVNVQSTYPGSTYASLNGTSMATPHVAGAAVLVKQKNPSWSNVRIRNHLKNTATSLGSTNLYGSGLVNAEAATR

SEQ ID NO: 57807 - protein, 269 aa, Unidentified
AQSVPWGISRVQAPAAHNRGLRGSGVKVAVLDTGISTHPDLNIRGGASFVPGEPSTQDGNGHGTHVAGTIAALNNSIGVLGVAPSAELYAVKVLGASGTGNLSSIAQGLEWAGNNGMHVANLSLGSPSPSATLEQAVNSATSRGVLVVAASGNSGAGSISYPARYANAMAVGATDQNNNRASFSQYGAGLDIVAPGVNVQSTYPGSTYASLNGTSMATPHVAGAATLVKQKNPSWSNVWIRNHLKNTATSLGSTNLYGSGLVNAEAATR

SEQ ID NO: 57808 - protein, 269 aa, Unidentified
AQSVPWGISRVQAPASHNRGLAGSGVKVAVLDTGISTHPDLNIRGGASFVPGEPSTQDGNGHGTHVAGTIAALNNSIGVLGVAPSAELYAVKVLGASGSGGISSIAQGLEWAGNNGMHVANLSLGNPSPSATLEQAVNSATSRGVIVVAASGNSGAGSISYPARYANAMAVGATDQNNNRASFSQYGAGLDIVAPGVNVQSTYPGSTYASLNGTSMATPHVAGAAALVKQKNPSWSNVQIRNHLKNTATSLGSTNLYGSGLVNAEAATR

SEQ ID NO: 57809 - protein, 269 aa, Unidentified
AQSVPWGISRVQAPAAHNRGLRGSGVKVAVLDTGISTHPDLNIRGGASFVPGEPSTQDGNGHGTHVAGTIAALNNSIGVLGVAPSAELYAVKVLGASGTGAISSIAQGLEWAGNNGMHVANLSLGSPSPSATLEQAVNSATSRGVLVVAASGNSGAGSISYPARYANAMAVGATDQNNNRASFSQYGAGLDIVAPGVNVQSTYPGSTYASLNGTSMATPHVAGAAVLVKQKNPSWSNVSIRNHLKNTATSLGSTNLYGSGLVNAEAATR

SEQ ID NO: 57810 - protein, 269 aa, Unidentified
AQSVPWGISRVQAPAAHNRGLTGSGVKVAVLDTGISTHPDLNIRGGASFVPGEPSTQDGNGHGTHVAGTIAALDNSIGVLGVAPSAELYAVKVLGADGRGAISSIAQGLEWAGNNGMHVANLSLGSPSPSATLEQAVNSATSRGVLVVAASGNSGASSISYPARYANAMAVGATDQNNNRASFSQYGAGLDIVAPGVNVQSTYPGSTYASLNGTSMATPHVAGAAALVKQKNPSWSNVQIRNHLKNTATSLGSTNLYGSGLVNAEAATR

SEQ ID NO: 57811 - protein, 269 aa, Unidentified
AQSVPWGISRVQAPAAHNRGLTGSGVKVAVLDTGISTHPDLNIRGGASFVPGEPSTQDGNGHGTHVAGTIAALNNSIGVLGVAPSAELYAVKVLGASGGGAISSIAQGLEWAGNNGMHVANLSLGSPSPSATLEQAVNSATSRGVLVVAASGNSGAGSISYPARYANAMAVGATDQNNNRASFSQYGAGLDIVAPGVNVQSTYPGSTYASLNGTSMATPHVAGAAVLVKQKNPSWSNRRIRNHLKNTATSLGSTNLYGSGLVNAEAATR

SEQ ID NO: 57812 - protein, 269 aa, Unidentified
AQSVPWGISRVQAPAAHNRRLTGSGVKVAVLDTGISTHPDLNIRGGASFVPGEPSTQDGNGHGTHVAGTIAALNNSIGVLGVAPSAELYAVKVLGASGGGSVSSIAQGLEWAGNNGMHVANLSLGSPSPSATLEQAVNSATSRGVLVVAASGNSGAGSISYPARYANAMAVGATDQNNNRASFSQYGAGLDLVAPGVNVQSTYPGSTYFSLNGTSMATPHVAGAAVLVKQKNPSWSNVRIRNHLKNTATSLGSTNLYGSGLVNAEAATR

SEQ ID NO: 57813 - protein, 269 aa, Unidentified
AQSVPWGISRVQAPAAHNRGLTGSGVKVAVLDTGISTHPDLNIRGGASFVPGEPSTQDGNGHGTHVAGTIAALNNSIGVLGVAPSAELYAVKVLGASGAGAISSIAQGLEWAGNNGMHVANLSLGSPSPSATLEQAVNSATSRGVLVVAASGNSGAGSISYPARYANAMAVGATDQNNNRADFSQYGAGLDIVAPGVNVQSTYPGSTYASLNGTSMATPHVAGAAVLVKQKNPSWSNVRIRNHLKNTATSLGSTNLYGSGLVNAEAATR

SEQ ID NO: 57814 - protein, 269 aa, Unidentified
AQSVPWGISRVQAPAAHNRGLTGRGVKVAVLDTGISTHPDLNIRGGASFVPGEPSTQDGNGHGTHVAGTIAALNNSIGVLGVAPDAELYAVKVLGASGSGSVSSIAQGLEWAGNNRMHVANLSLGSPSPSATLEQAVNSATSRGVLVVAASGNSGAGSISYPARYANAMAVGATDQNNNRASFSQYGAGLDIVAPGVNVQSTWPGSAYASLNGTSMATPHVAGAAALVKQKNPSWSNVQIRNRLKNTATSLGSTNLYGSGLVNAEAATR

SEQ ID NO: 57815 - protein, 269 aa, Unidentified
AQSVPWGISRVQAPAAHNRRLTGSGVKVAVLDTGISTHPDLNIRGGASFVPGEPSTQDGNGHGTHVAGTIAALNNGIGVLGVAPSAELYAVKVLGASGSGSVSSIAQGLEWAGNNDMHVANLSLGSPSPSATLEQAVNSATSRGVLVVAASGNSGAGSISYPARYANAMAVGATDQNNNRADFSQYGAGLDIVAPGVNVQSTYPGSTYASLNGTSMATPHVAGAAALVKQKNPSWSNVQIRDRLKNTATSLGSTNLYGSGLVNAEAATR

SEQ ID NO: 57816 - protein, 269 aa, Unidentified
AQSVPWGISRVQAPAAHNRGLTGRGVKVAVLDTGISTHPDLNIRGGASFVPGEPSTQDGNGHGTHVAGTIAALNNDIGVLGVAPSAELYAVKVLGASGSGSVSSIAQGLEWAGNNDMHVANLSLGSPSPSATLEQAVNSATSRGVLVVAASGNSGADSISYPARYANAMAVGATDQNNNRASFSQYGAGLDIVAPGVNVQSTYPGSTYASLNGTSMATPHVAGAAALVKQKNPSWSNVRIRDHLKNTATSLGSTNLYGSGLVNAEAATR

SEQ ID NO: 57817 - protein, 269 aa, Synthetic construct
AQSVPWGISRVQAPAAHNRGLTGSGVKVAVLDTGISTHPDLNIRGGASFVPGEPSTQDGNQHGTHVAGTIAALNNSIGVLGVAPSAELYAVKVLGASGSGSVSSIAQGLEWAGNNGMHVANLSLESPSPSATLEQAVNSATSRGVLVVAASGNSGAGSISGPARYANAMAVGATDQNNNRASFSQYGAGLDIVAPGVNVQSTYPQSSYQSLNGTSMATPHVAGAAALVKQKNPSWSNVQIRNHLKNTATSLGSTNLYGSGLVNAEAATR

SEQ ID NO: 57818 - protein, 269 aa, Unidentified
AQSVPWGISRVQAPAAHNRGLTGRGVKVAVLDSGISTHPDLNIRGGASFVPGEPSTQDGNGHGTHVAGTIAALNNSIGVLGVAPSAELYAVKVLGASGSGSVSSIAQGLEWAGLNGMHVANLSLGSPSPSATLEQAVNSATSRGVLVVAASGNSGEGSIDYPARYANAMAVGATDQNNNRADFSQYGAGLDIVAPGVNVQSTYPGSTYASLNGTSMATPHVAGAAALVKQKNPSWSNVQIRNHLKNTATSLGSTNLYGSGLVNAEAATR

SEQ ID NO: 57819 - protein, 269 aa, Unidentified
AQSVPWGISRVQAPAAHNRGLRGSGVKVAVLDTGISTHPDLNIRGGASFVPGEPSTQDGNGHGTHVAGTIAALNNSIGVLGVAPSAELYAVKVLGASGNGNLSSIAQGLEWAGNNGMHVANLSLGSPSPSATLEQAVNSATSRGVLVVAASGNSGAGSISYPARYANAMAVGATDQNNNRASFSQYGAGLDIVAPGVNVQSTYPGSTYASLNGTSMATPHVAGAAVLVKQKNPSWSNVRIRNHLKNTATSLGSTNLYGSGLVNAEAATR

SEQ ID NO: 57820 - protein, 269 aa, Unidentified
AQSVPWGISRVQAPAAHNRGLAGSGVKVAVLDTGISTHPDLNIRGGASFVPGEPSTQDGNGHGTHVAGTIAALNNSIGVLGVAPSAELYAVKVLGASGNGALSSIAQGLEWAGNNGMHVANLSLGSPSPSATLEQAVNSATSRGVLVVAASGNSGAGSISYPARYANAMAVGATDQNNNRASFSQYGAGLDIVAPGVNVQSTYPGSTYASLNGTSMATPHVAGAATLVKQKNPSWSNVRIRNHLKNTATSLGSTNLYGSGLVNAEAATR

SEQ ID NO: 57821 - protein, 269 aa, Lederbergia lentus
AQTVPWGISRVQAPAAHNRGLTGSGVKVAVLDTGISTHPDLNIRGGASFVPGEPSTQDGNGHGTHVAGTIAALNNSIGVLGVAPSAELYAVKVLGADGEGAISSIAQGLEWAGNNGMHVANLSLGSPSPSATLEQAVNSATSRGVLVVAASGNSGASSISYPARYANAMAVGATDQNNNRASFSQYGAGLDIVAPGVNVQSTYPGSTYASLNGTSMATPHVAGAAALVKQKNPSWSNVQIRNHLKNTATSLGSTNLYGSGLVNAEAATR

SEQ ID NO: 57822 - protein, 269 aa, Unidentified
AQSVPWGISRVQAPAAHNRGLQGSGVKVAVLDTGISTHPDLNIRGGASFVPGEPSTQDGNGHGTHVAGTIAALNNSIGVLGVAPSAELYAVKVLGASGNGNISSIAQGLEWAGNNGMHVANLSLGSPSPSATLEQAVNSATSRGVLVVAASGNSGAGSISYPARYANAMAVGATDQNNNRASFSQYGAGLDIVAPGVNVQSTYPGSTYASLNGTSMATPHVAGAATLVKQKNPSWSNVWIRNHLKNTATSLGSTNLYGSGLVNAEAATR

SEQ ID NO: 57823 - protein, 269 aa, Unidentified
AQSVPWGISRVQAPAAHNRKLLGFGVKVAVLDTGISTHPDLNIRGGASFVPGEPSTQDGNGHGTHVAGTIAALNNSIGVLGVAPSAELYAVKVLGASGSGSVSSIAQGLEWAGNNGMHVANLSLGDPSPSATLEQAVNSATSRGVLVVAASGNSGAGSISYPARYANAMAVGATDQNNNRASFSQYGAGLDIVAPGVNVQSTYPGSAYASENGTSMATPHVAGAAALVKQKNPSWSNVQIRNHLKNTATSLGSTNLYGSGLVNAEAATR

SEQ ID NO: 57824 - protein, 269 aa, Unidentified
AQSVPWGISRVQAPAAHNRGLQGSGVKVAVLDTGISTHPDLNIRGGASFVPGEPSTQDGNGHGTHVAGTIAALNNSIGVLGVAPSAELYAVKVLGASGTGGISSIAQGLEWAGNNGMHVANLSLGSPSPSATLEQAVNSATSRGVLVVAASGNSGAGSISYPARYANAMAVGATDQNNNRASFSQYGAGLDIVAPGVNVQSTYPGSTYASLNGTSMATPHVAGAATLVKQKNPSWSNVSIRNHLKNTATSLGSTNLYGSGLVNAEAATR

SEQ ID NO: 57825 - protein, 269 aa, Unidentified
AQSVPWGISRVQAPAAHNRGLTGRGVKVAVLDTGISTHPDLNIRGGASFVPGEPSTQDGEGHGTHVAGTIAALNNGIGVLGVAPSAELYAVKVLGASGSGSVSSIAQGLEWAGNNSMHVANLSLGSPSPSATLEQAVNSATSRGVLVVAASGNSGAGSISYPARYANAMAVGATDQNNNRADFSQYGAGLDIVAPGVNVQSTYPGSTYASLNGTSMATPHVAGAAALVKQKNPSWSNVRIRNHLKNTATSLGSTNLYGSGLVNAEAATR

SEQ ID NO: 57826 - protein, 269 aa, Unidentified
AQSVPWGISRVQAPAAHNRGLTAFGVKVAVLDTGISTHPDLNIRGGASFVPGEPSTQDGEGHGTHVAGTIAALNNSIGVLGVAPSAELYAVKVLGASGSGSVSSIAQGLEWAGNNRMHVANLSLGSPSPSATLEQAVNSATSRGVLVVAASGNSGAGSISYPARYANAMAVGATDQNNNRASFSQYGAGLDIVAPGVNVQSTYPGSAYASLNGTSMATPHVAGAAALVKQKNGSWSNVQIRNHLKNTATSLGSTNLYGSGLVNAEAATR

SEQ ID NO: 57827 - protein, 269 aa, Unidentified
AQSVPWGISRVQAPAAHNRGLTGSGVKVAVLDTGISTHPDLNIRGGASFVPGEPSTQDGNGHGTHVAGTIAALNNNIGVLGVAPSAELYAVKVLSASGNGSVSSIAGGLEWAGNNGMHVANLSLGAPSPSATLEQAVNSATSRGVLVVAASGNSGAGSISYPARYANAMAVGATDQNNNRADFSQYGAGLDIVAPGVNVQSTYPGSTYASQNGTSSATPHVAGAAALVKQKNPSWSNVQIRNHLKNTATSLGSTNLYGSGLVNAEAATR

SEQ ID NO: 57828 - protein, 269 aa, Unidentified
AQSVPWGISRVQAPAAHNRGLQGSGVKVAVLDTGISTHPDLNIRGGASFVPGEPSTQDGNGHGTHVAGTIAALNNSIGVLGVAPSAELYAVKVLGASGTGNLSSIAQGLEWAGNNGMHVANLSLGSPSPSATLEQAVNSATSRGVLVVAASGNSGAGSISYPARYANAMAVGATDQNNNRASFSQYGAGLDIVAPGVNVQSTYPGSTYASLNGTSMATPHVAGAATLVKQKNPSWSNVRIRNHLKNTATSLGSTNLYGSGLVNAEAATR

SEQ ID NO: 57829 - protein, 269 aa, Bacillus lentus
AQAVPWGIRRVQAPAAHNLGLTGSGVKVAVLDTGISTHPDLRIRGGASFVPGEPSTQDGDGHGTHVAGTIAALDNSIGVLGVAPSAELYAVKVLGASGSGSVSSIAQGLEWAGNNGMHVANLSLGSPSPSATLEQAVNSATSRGVLVVAASGNSGAGSISYPARYANAMAVGATDQNNNRASFSQYGAGLDIVAPGVNVQSTYPGSTYASLNGTSMATPHVAGAAALVKQKNPSWSNVQIRNHLKNTATSLGSTNLYGSGLVNAEAATR

SEQ ID NO: 57830 - protein, 269 aa, Unidentified
AQSVPWGISRVQAPAAHNRGLQGSGVKVAVLDTGISTHPDLNIRGGASFVPGEPSTQDGNGHGTHVAGTIAALNNSIGVLGVAPSAELYAVKVLGASGTGGISSIAQGLEWAGNNGMHVANLSLGSPSPSATLEQAVNSATSRGVLVVAASGNSGAGSISYPARYANAMAVGATDQNNNRASFSQYGAGLDIVAPGVNVQSTYPGSTYASLNGTSMATPHVAGAATLVKQKNPSWSNVRIRNHLKNTATSLGSTNLYGSGLVNAEAATR

SEQ ID NO: 57831 - protein, 269 aa, Lederbergia lentus
AQSVPWGISEVQAPAAHNRGLTGSGVKVAVLDTGISTHPDLNIRGGASFVPGEPSTQDGNGHGTHVAGTIAALNNSIGVLGVAPSAELYAVKVLGADGEGAISSIAQGLEWAGNNGMHVANLSLGSPSPSATLEQAVNSATSRGVLVVAASGNSGASSISYPARYANAMAVGATDQNNNRASFSQYGAGLDIVAPGVNVQSTYPGSTYASLNGTSMATPHVAGAAALVKQKNPSWSNVQIRNHLKNTATSLGSTNLYGSGLVNAEAATR

SEQ ID NO: 57832 - protein, 269 aa, Unidentified
AQSVPWGISRVQAPAAHNRGLAGRGVKVAVLDTGISTHPDLNIRGGASFVPGEPSTQDGNGHGTHVAGTIAALNNSIGVLGVAPSAELYAVKVLGASGSGSVSSIAQGLEWAGNNRMHVANLSLGSPSPSATLEQAVNSATSRGVLVVAASGNSGEGSIDYPARYANAMAVGATDQNNNRADFSQYGAGLDIVAPGVNVQSTYPGSTYASLNGTSMATPHVAGAAALVKQKNPSWSNVQIRNHLKNTATSLGSTNLYGSGLVNAEAATR

SEQ ID NO: 57833 - protein, 269 aa, Synthetic construct
AQSVPWGISRVQAPAAHNRGLTGSGVRVAVLDTGISTHPDLNIRGGASFVPGEPSTQDGNGHGTHVAGTIAALDNSIGVLGVAPSAELYAVKVLGASGSGSYSSIAQGLEWAGNNGMHVASLSLGSPSPSATLEQAVNSATSRGVLVVAASGNSGAGSISYPARYANAMAVGATDQNNNRASFSQYGAELDIVAPGVNVQSTYPGSTYASLSGTSMATPHVAGAAALVKQKNPSWSNVQIRNHLKNTATSLGSTNLYGSGLVNAEAATR

SEQ ID NO: 57834 - protein, 269 aa, Unidentified
AQSVPWGISRVQAPAAHNRGLTGSGVKVAVLDTGISTHPDLNIRGGASFVPGEPSTQDGEGHGTHVAGTIAALNNSIGVLGVAPSAELYAVKVLGASGAGAISSIAQGLEWAGNNGMHVANLSLGSPSPSATLEQAVNSATSRGVLVVAASGNSGAGSISYPARYANAMAVGATDQNNNRASFSQYGAGLDIVAPGVNVQSTYPGSTYASLNGTSMATPHVAGAAVLVKQKNPSWSNVRIRNHLKNTATSLGSTNLYGSGLVNAEAATR

SEQ ID NO: 57835 - protein, 269 aa, Unidentified
AQSVPWGISRVQAPAAHNRRLTGRGVKVAVLDTGISTHPDLNIRGGASFVPGEPSTQDGNGHGTHVAGTIAALNNSIGVLGVAPSAELYAVKVLAASGGGSVSSIAGGLEWAGNNGMHVANLSLGAPSPSATLEQAVNSATSRGVLVVAASGNSGAGSISYPARYANAMAVGATDQNNNRASFSQYGAGLDIVAPGVNVQSTYPGSTYASLNGTSMATPHVAGAAALVKQKNPSWSNVQIRNHLKNTATSLGSTNLYGSGLVNAEAATR

SEQ ID NO: 57836 - protein, 269 aa, Lederbergia lentus
AQSVPWGISRVQAPAADNRGLTGSGVKVAVLDTGISTHPDLNIRGGASFVPGEPSTQDGNGHGTHVAGTIAALNNSIGVLGVAPSAELYAVKVLGADGEGAISSIAQGLEWAGNNGMHVANLSLGSPSPSATLEQAVNSATSRGVLVVAASGNSGASSISYPARYANAMAVGATDQNNNRASFSQYGAGLDIVAPGVNVQSTYPGSTYASLNGTSMATPHVAGAAALVKQKNPSWSNVQIRNHLKNTATSLGSTNLYGSGLVNAEAATR

SEQ ID NO: 57837 - protein, 269 aa, Lederbergia lentus
AQSVPWGISRVQAPAAHNRGLTGSGVKVAVLDTGISTHPDLNIRGGASFVPGEPSTQDGNRHGTHVAGTIAALNNSIGVLGVAPSAELYAVKVLGADGEGAISSIAQGLEWAGNNGMHVANLSLGSPSPSATLEQAVNSATSRGVLVVAASGNSGASSISYPARYANAMAVGATDQNNNRASFSQYGAGLDIVAPGVNVQSTYPGSTYASLNGTSMATPHVAGAAALVKQKNPSWSNVQIRNHLKNTATSLGSTNLYGSGLVNAEAATR

SEQ ID NO: 57838 - protein, 269 aa, Unidentified
AQSVPWGISRVQAPAAHNRGLTGSGVKVAVLDTGISTHPDLNIRGGASFVPGEPSTQDGNGHGTHVAGTIAALNNSIGVLGVAPSAELYAVKVLGADGRGAISSIAQGLEWAGNNGMHVANLSLGSPSPSATLEQAVNSATSRGVLVVAASGNSGASSISYPARYANAMAVGATDQNNNRASFSQYGAGLDIMAPGVNVQSTYPGSTYASLNGTSMATPHVAGAAALVKQKNPSWSNVQIRNHLKNTATSLGSTNLYGSGLVNAEAATR

SEQ ID NO: 57839 - protein, 269 aa, Synthetic construct
AQSVPWGISRVQAPAAHNRGLTGSGVKVAVLDTGISTHPDLNIRGGASFVPGEPSTQDGNGHGTHVAGTIAALNNSIGVLGVAPSAELYAVKVLGASGSGSVSSIAQGLEWAGNNGMHVANLSLGSPSPSATLEQAVNSATSRGVLVVAASGNSGAGSISYPARYANAMAVGATDQNNNRASFSQYGAGLDIVPPSVNCQSTASGSTYDSLNGTSMATPHVAGAAALVKQKNPSWSNVQIRNHLKNTATSLGSTNLYGSGLVNAEAATR

SEQ ID NO: 57840 - protein, 269 aa, Unidentified
AQSVPWGISRVQAPAAHNRGLTGSGVKVAVLDTGISTHPDLNIRGGASFVPGEPSTQDGNGHGTHVAGTIAALNNSIGVLGVAPSAELYAVKVLGADGRGAISSIAQGLEWAGNNGMHVANLSLGSPSPSATLEQAVNSATSRGVLVVAASGNSGASSISYPARYANAMAVGATDQNNNRASFSQYGAGLDIVAPGVNVQSTYPGSTYASLSGTSMATPHVAGAAALVKQKNPSWSNVQIRNHLKNTATSLGSTNLYGSGLVNAEAATR

SEQ ID NO: 57841 - protein, 269 aa, Unidentified
AQSVPWGISRVQAPAAHNRGLRGSGVKVAVLDTGISTHPDLNIRGGASFVPGEPSTQDGNGHGTHVAGTIAALNNSIGVLGVAPSAELYAVKVLGASGTGAISSIAQGLEWAGNNGMHVANLSLGSPSPSATLEQAVNSATSRGVLVVAASGNSGAGSISYPARYANAMAVGATDQNNNRASFSQYGAGLDIVAPGVNVQSTYPGSTYASLNGTSMATPHVAGAAVLVKQKNPSWSNVWIRNHLKNTATSLGSTNLYGSGLVNAEAATR

SEQ ID NO: 57842 - protein, 269 aa, Unidentified
AQSVPWGISRVQAPAAHNRGLWGRGVKVAVLDTGISTHPDLNITGGASFVPGEPSTQDGNGHGTHVAGTIAALNNSIGVLGVAPSAELYAVKVLGASGAGSVSSIAQGLEWAGNNGMHVANLSLGSPSPSATLEQAVNSATSRGVLVVAASGNSGAGSISYPARYANAMAVGATDQNNNRASFSQYGAGLDIVAPGVNVQSTYIQSTYASLNGTSMATPHVAGAAALVKQKNPSWSNVQIRNHLKNTATSLGSTNLYGSGLVNAEAATR

SEQ ID NO: 57843 - protein, 269 aa, Unidentified
AQSVPWGISRVQAPAAHNRGLRGSGVKVAVLDTGISTHPDLNIRGGASFVPGEPSTQDGNGHGTHVAGTIAALNNSIGVLGVAPSAELYAVKVLGASGTGNISSIAQGLEWAGNNGMHVANLSLGSPSPSATLEQAVNSATSRGVLVVAASGNSGAGSISYPARYANAMAVGATDQNNNRASFSQYGAGLDIVAPGVNVQSTYPGSTYASLNGTSMATPHVAGAAVLVKQKNPSWSNVRIRNHLKNTATSLGSTNLYGSGLVNAEAATR

SEQ ID NO: 57844 - protein, 269 aa, Unidentified
AQSVPWGISRVQAPAAHNRGLTGRGVKVAVLDTGISTHPDLNIRGGASFVPGEPSTQDGNGHGTHVAGTIAALNNNIGVLGVAPSAELYAVKVLSASGAGSVSSIAGGLEWAGNNGMHVANLSLGAPSPSATLEQAVNSATSRGVLVVAASGNSGAGSISYPARYANAMAVGATDQNNNRASFSQYGAGLDIVAPGVNVQSTYPGSTYASLNGTSMATPHVAGAAALVKQKNPSWSNVQIRNHLKNTATSLGSTNLYGSGLVNAEAATR

SEQ ID NO: 57845 - protein, 269 aa, Unidentified
AQSVPWGISRVQAPAAHNRGLAGSGVKVAVLDSGISTHPDLNIRGGASFVPGEPSTQDGNGHGTHVAGTIAALNNSIGVLGVAPSAELYAVKVLGASGSGSVSSIAQGLEWAGNNRMHVANLSLGIPSPSATLEQAVNSATSRGVLVVAASGNSGEGSIDYPARYANAMAVGATDQNNNRASFSQYGAGLDIVAPGVNVQSTYPGSTYASLNGTSMATPHVAGAAALVKQKNPSWSNVQIRNHLKNTATSLGSTNLYGSGLVNAEAATR

SEQ ID NO: 57846 - protein, 269 aa, Unidentified
AQSVPWGISRVQAPAAHNRKLTGSGVKVAVLDTGISTHPDLNIRGGASFVPGEPSTQDGEGHGTHVAGTIAALNNNIGVLGVAPSAELYAVKVLGASGSGSVSSVAQGLEWAGNNGMHVAGLSLGIPSPSATLEQAVNSATSRGVLVVAASGNSGAGSISYPARYANAMAVGATDQNNNRASFSQYGAGLDIVAPGVNVQSTYPGSTYASLNGTSMATPHVAGAAALVKQKNPSWSNVQIRNHLKNTATSLGSTNLYGSGLVNAEAATR

SEQ ID NO: 57847 - protein, 269 aa, Unidentified
AQSVPWGISRVQAPAAHNRGLKGSGVKVAVLDTGISTHPDLNIRGGASFVPGEPSTQDGNGHGTHVAGTIAALNNSIGVLGVAPSAELYAVKVLGASGTGGISSIAQGLEWAGNNGMHVANLSLGSPSPSATLEQAVNSATSRGVLVVAASGNSGAGSISYPARYANAMAVGATDQNNNRASFSQYGAGLDIVAPGVNVQSTYPGSTYASLNGTSMATPHVAGAAMLVKQKNPSWSNVSIRNHLKNTATSLGSTNLYGSGLVNAEAATR

SEQ ID NO: 57848 - protein, 269 aa, Unidentified
AQSVPWGISRVQAPAAHNRGLRGSGVKVAVLDTGISTHPDLNIRGGASFVPGEPSTQDGNGHGTHVAGTIAALNNSIGVLGVAPSAELYAVKVLGASGNGALSSIAQGLEWAGNNGMHVANLSLGSPSPSATLEQAVNSATSRGVLVVAASGNSGAGSISYPARYANAMAVGATDQNNNRASFSQYGAGLDIVAPGVNVQSTYPGSTYASLNGTSMATPHVAGAATLVKQKNPSWSNVWIRNHLKNTATSLGSTNLYGSGLVNAEAATR

SEQ ID NO: 57849 - protein, 269 aa, Unidentified
AQSVPWGISRVQAPAAHNRGLQGSGVKVAVLDTGISTHPDLNIRGGASFVPGEPSTQDGNGHGTHVAGTIAALNNSIGVLGVAPSAELYAVKVLGASGNGNLSSIAQGLEWAGNNGMHVANLSLGSPSPSATLEQAVNSATSRGVLVVAASGNSGAGSISYPARYANAMAVGATDQNNNRASFSQYGAGLDIVAPGVNVQSTYPGSTYASLNGTSMATPHVAGAALLVKQKNPSWSNVRIRNHLKNTATSLGSTNLYGSGLVNAEAATR

SEQ ID NO: 57850 - protein, 269 aa, Unidentified
AQSVPWGISRVQAPAAHNRKLLGSGVKVAVLDTGISTHPDLNIRGGASFVPGEPSTQDGNGHGTHVAGTIAALNNGIGVLGVAPSAELYAVKVLGASGSGSVSSIAQGLEWAGNNSMHVANLSLGSESPSATLEQAVNSATSRGVLVVAASGNSGADSISYPARYANAMAVGATDQNNNRASFSQYGAGLDIVAPGVNVQSTYPGSTYASLNGTSMATPHVAGAAALVKQKNPSWSNVQIRNHLKNTATSLGSTNLYGSGLVNAEAATR

SEQ ID NO: 57851 - protein, 269 aa, Unidentified
AQSVPWGISRVQAPAAHNRGLKGSGVKVAVLDTGISTHPDLNIRGGASFVPGEPSTQDGNGHGTHVAGTIAALNNSIGVLGVAPSAELYAVKVLGASGTGGISSIAQGLEWAGNNGMHVANLSLGSPSPSATLEQAVNSATSRGVLVVAASGNSGAGSISYPARYANAMAVGATDQNNNRASFSQYGAGLDIVAPGVNVQSTYPGSTYASLNGTSMATPHVAGAAVLVKQKNPSWSNVRIRNHLKNTATSLGSTNLYGSGLVNAEAATR

SEQ ID NO: 57852 - protein, 269 aa, Unidentified
AQSVPWGISRVQAPAAHNRGLKGSGVKVAVLDTGISTHPDLNIRGGASFVPGEPSTQDGNGHGTHVAGTIAALNNSIGVLGVAPSAELYAVKVLGASGGGNISSIAQGLEWAGNNGMHVANLSLGSPSPSATLEQAVNSATSRGVLVVAASGNSGAGSISYPARYANAMAVGATDQNNNRASFSQYGAGLDIVAPGVNVQSTYPGSTYASLNGTSMATPHVAGAAVLVKQKNPSWSNVRIRNHLKNTATSLGSTNLYGSGLVNAEAATR

SEQ ID NO: 57853 - protein, 269 aa, Unidentified
AQSVPWGISRVQAPAAHNRGLTGSGVKVAVLDTGISTHPDLNIRGGWSFVPGEPSTQDGNGHGTHVAGTIAALNNSIGVLGVAPSAELYAVKVLGADGRGAISSIAQGLEWAGNNGMHVANLSLGSPSPSATLEQAVNSATSRGVLVVAASGNSGASSISYPARYANAMAVGATDQNNNRASFSQYGAGLDIVAPGVNVQSTYPGSTYASLNGTSMATPHVAGAAALVKQKNPSWSNVQIRNHLKNTATSLGSTNLYGSGLVNAEAATR

SEQ ID NO: 57854 - protein, 269 aa, Unidentified
AQSVPWGISRVQAPAAHNRGLKGSGVKVAVLDTGISTHPDLNIRGGASFVPGEPSTQDGNGHGTHVAGTIAALNNSIGVLGVAPSAELYAVKVLGASGTGNISSIAQGLEWAGNNGMHVANLSLGSPSPSATLEQAVNSATSRGVLVVAASGNSGAGSISYPARYANAMAVGATDQNNNRASFSQYGAGLDIVAPGVNVQSTYPGSTYASLNGTSMATPHVAGAATLVKQKNPSWSNVRIRNHLKNTATSLGSTNLYGSGLVNAEAATR

SEQ ID NO: 57855 - protein, 269 aa, Unidentified
AQSVPWGISRVQAPAAHNRGLTGSGVKVAVLDTGISTHPDLNIRGGASFVPGEPSTQDGNGHGTHVAGTIAALNNSIGVLGVAPSAELYAVKVLGADGRGAISSIAQGLEWAGNNGMHVANLSLGSPSPSATLEQAVNSATSRGVLVVAASGNSGASSISYPARYANAMAVGATDQNNNRASFSQYGAGLDIVAPGVNVQSTYPGSTYASLNGTSMATPHVAGAAALVKQKNPSWSNVQIRAHLKNTATSLGSTNLYGSGLVNAEAATR

SEQ ID NO: 57856 - protein, 269 aa, Unidentified
AQSVPWGISRVQAPAAHNRGLTGGGVKVAVLDTGISTHPDLNIRGGASFVPGEPSTQDGNGHGTHVAGTIAALNNNIGVLGVAPSAELYAVKVLAASGQGSVSSIAQGLEWAGNNGMHVANLSLGSPSPSATLEQAVNSATSRGVLVVAASGNSGAGSISYPARYANAMAVGATDQNNNRADFSQYGAGLDIVAPGVNVQSTYPGSTYASQNGTSMATPHVAGAAALVKQKNPSWSNVQIRNHLKNTATSLGSTNLYGSGLVNAEAATR

SEQ ID NO: 57857 - protein, 269 aa, Unidentified
AQSVPWGISRVQAPAAHNRGLRGSGVKVAVLDTGISTHPDLNIRGGASFVPGEPSTQDGNGHGTHVAGTIAALNNSIGVLGVAPSAELYAVKVLGASGNGAISSIAQGLEWAGNNGMHVANLSLGSPSPSATLEQAVNSATSRGVLVVAASGNSGAGSISYPARYANAMAVGATDQNNNRASFSQYGAGLDIVAPGVNVQSTYPGSTYASLNGTSMATPHVAGAALLVKQKNPSWSNVSIRNHLKNTATSLGSTNLYGSGLVNAEAATR

SEQ ID NO: 57858 - protein, 269 aa, Unidentified
AQSVPWGISRVQAPAAHNRGLAGSGVKVAVLDTGISTHPDLNIRGGASFVPGEPSTQDGNGHGTHVAGTIAALNNSIGVLGVAPSAELYAVKVLGASGTGNISSIAQGLEWAGNNGMHVANLSLGSPSPSATLEQAVNSATSRGVLVVAASGNSGAGSISYPARYANAMAVGATDQNNNRASFSQYGAGLDIVAPGVNVQSTYPGSTYASLNGTSMATPHVAGAAVLVKQKNPSWSNVSIRNHLKNTATSLGSTNLYGSGLVNAEAATR

SEQ ID NO: 57859 - protein, 269 aa, Unidentified
AQSVPWGISRVQAPAAHNRGLTGSGVKVAVLDTGIATHPDLNIRGGASFVPGEPSTQDGNGHGTHVAGTIAALNNSIGVLGVAPSAELYAVKVLGADGRGAISSIAQGLEWAGNNGMHVANLSLGSPSPSATLEQAVNSATSRGVLVVAASGNSGASSISYPARYANAMAVGATDQNNNRASFSQYGAGLDIVAPGVNVQSTYPGSTYASLNGTSMATPHVAGAAALVKQKNPSWSNVQIRNHLKNTATSLGSTNLYGSGLVNAEAATR

SEQ ID NO: 57860 - protein, 269 aa, Unidentified
AQSVPWGISRVQAPAAHNRRLTGRGVKVAVLDTGISTHPDLNIRGGASFVPGEPSTQDGNGHGTHVAGTIAALNNSIGVLGVAPSAELYAVKVLGASGAGSVSSIAGGLEWAGLNGMHVANLSLGAPSPSATLEQAVNSATSRGVLVVAASGNSGAGSISYPARYANAMAVGATDQNNNRASFSQYGAGLDIVAPGVNVQSTYPGSTYASLNGTSMATPHVAGAAALVKQKNPSWSNVQIRNHLKNTATSLGSTNLYGSGLVNAEAATR

SEQ ID NO: 57861 - protein, 269 aa, Unidentified
AQSVPWGISRVQAPAAHNRGLTGSGVKVAVLDTGISTHPDLNIRGGASFVPGEPSTQDGNGHGTHVAGTIAALNNSIGVLGVAPNAELYAVKVLGASGSGSVSSIAQGLEWAGNNVMHVANLSLGLNVPSATLEQAVNSATSRGVLVVAASGNSGEGSISYPARYANAMAVGATDQNNNRASFSQYGAGLDIVAPGVNVQSTYPGSTYASLNGTSMATPHVAGAAALVKQKNPSWSNVQIRNHLKNTATSLGSTNLYGSGLVNAEAATR

SEQ ID NO: 57862 - protein, 269 aa, Unidentified
AQSVPWGISRVQAPAAHNRGLTGSGVKVAVLDTGISTHPDLNIRGGASFVPGEPSTQDGNGHGTHVAGTIAALNNSIGVLGVAPSAELYAVKVLGADGRGAISTIAQGLEWAGNNGMHVANLSLGSPSPSATLEQAVNSATSRGVLVVAASGNSGASSISYPARYANAMAVGATDQNNNRASFSQYGAGLDIVAPGVNVQSTYPGSTYASLNGTSMATPHVAGAAALVKQKNPSWSNVQIRNHLKNTATSLGSTNLYGSGLVNAEAATR

SEQ ID NO: 57863 - protein, 269 aa, Unidentified
AQSVPWGISRVQAPAAHNRRLTGRGVKVAVLDTGISTHPDLNIRGGASFVPGEPSTQDGNGHGTHVAGTIAALNNSIGVLGVAPSAELYAVKVLGASGQGSVSSIAQGLEWAGLNGMHVANLSLGAPSPSATLEQAVNSATSRGVLVVAASGNSGAGSISYPARYANAMAVGATDQNNNRASFSQYGAGLDIVAPGVNVQSTYPGSTYASQNGTSMATPHVAGAAALVKQKNPSWSNVQIRNHLKNTATSLGSTNLYGSGLVNAEAATR

SEQ ID NO: 57864 - protein, 269 aa, Unidentified
AQSVPWGISRVQAPAAHNRGLTGSGVKVAVLDTGISTHPDLNIRGGASFVPGEPSTQDGNGHGTHVAGTIAALNNSIGVLGVAPSAELYAVKVLGADGRGAISSIAQGLEWAGNNGMHVANLSLGSPSPSATLEQAVNSATSRGVLVVAASGNSGASSISYPARYANAMAVGATDQNNNRASFSQYGAGLDIVAPGVNVQSTYPVSTYASLNGTSMATPHVAGAAALVKQKNPSWSNVQIRNHLKNTATSLGSTNLYGSGLVNAEAATR

SEQ ID NO: 57865 - protein, 269 aa, Unidentified
AQSVPWGISRVQAPAAHNRRLTGRGVKVAVLDTGISTHPDLNIRGGASFVPGEPSTQDGEGHGTHVAGTIAALNNGIGVLGVAPSAELYAVKVLGASGSGSVSSIAQGLEWAGNNDMHVANLSLGSPSPSATLEQAVNSATSRGVLVVAASGNSGAGSISYPARYANAMAVGATDQNNNRASFSQYGAGLDIVAPGVNVQSTYPGSTYASLNGTSMATPHVAGAAALVKQKNPSWSNVQIRNRLKNTATSLGSTNLYGSGLVNAEAATR

SEQ ID NO: 57866 - protein, 269 aa, Unidentified
AQSVPWGISRVQAPAAHNRGLTGSGVKVAVLDTGISTHPDLNIRGGASFVPGEPSTQDGNGHGTHVAGTIAALDNNIGVLGVAPDAELYAVKVLGASGSGSVSSIAQGLEWAGNNRMHVANLSLGSPSPSATLEQAVNSATSRGVLVVAASGNSGAGSISYPARYANAMAVGATDQNNNRASFSQYGAGLDIVAPGVNVQSTWPGSTYASLNGTSMATPHVAGAAALVKQKNPSWSNVQIRNRLKNTATSLGSTNLYGSGLVNAEAATR

SEQ ID NO: 57867 - protein, 269 aa, Unidentified
AQSVPWGISRVQAPAAHRRGLTGRGVKVAVLDTGISTHPDLNIRGGASFVPGEPSTQDGNGHGTHVAGTIAALDNSIGVLGVAPSAELYAVKVLGASGSGSVSSIAQGLEWAGNNGMHVANLSLGSPSPSATLEQAVNSATSRGVLVVAASGNSGAGSISYPARYANAMAVGATDQDNNRASFSQYGAGLDIVAPGVNVQSTYPQSTYASLNGTSMATPHVAGAAALVKQKNPSWSRVQIRNHLKNTATSLGSTNLYGSGLVNAEAATR

SEQ ID NO: 57868 - protein, 269 aa, Unidentified
AQSVPWGISRVQAPAAHNRGLTGSGVKVAVLDTGISTHPDLNIRGGASFVPGEPSTQDGNGHGTHVAGTIAALNNSIGVLGVAPNAELYAVKVLGASGSGSVSSIAQGLEWAGNNVMHVANLSLGREKPSATLEQAVNSATSRGVLVVAASGNSGAGSIDYPARYANAMAVGATDQNNNRASFSQYGAGLDIVAPGVNVQSTYPGSTYASLNGTSMATPHVAGAAALVKQKNPSWSNVQIRNHLKNTATSLGSTNLYGSGLVNAEAATR

SEQ ID NO: 57869 - protein, 269 aa, Unidentified
AQSVPWGISRVQAPAAHNRGLTGSGVKVAVLDTGISTHPDLNIRGGASFVPGEPSTQDGNGHGTHVAGTIAALDNSIGVLGVAPSAELYAVKVLGASGSGAISSIAQGLEWAGNNGMHVANLSLGSPSPSATLEQAVNSATSRGVLVVAASGNSGAGSIGYPARYANAMAVGATDQNNNRASFSQYGAGLDIVAPGVNVQSTYPGSTYASLNGTSMATPHVAGAAALVKRKNPSWSNVQIRNHLRNTATSLGSTNLYGSGLVNAEAATR

SEQ ID NO: 57870 - protein, 269 aa, Bacillus lentus
AQTVPWGIRRVQAPAAHNLGLTGSGVKVAVLDTGISTHPDLRIRGGASFVPGEPSTQDGDGHGTHVAGTIAALDNSIGVLGVAPSAELYAVKVLGASGSGSVSSIAQGLEWAGNNGMHVANLSLGSPSPSATLEQAVNSATSRGVLVVAASGNSGAGSISYPARYANAMAVGATDQNNNRASFSQYGAGLDIVAPGVNVQSTYPGSTYASLNGTSMATPHVAGAAALVKQKNPSWSNVQIRNHLKNTATSLGSTNLYGSGLVNAEAATR

SEQ ID NO: 57871 - protein, 269 aa, Unidentified
AQSVPWGISRVQAPAAHNRGLTGSGVKVAVLDTGISTHPDLNIRGGASFVPGEPSTQDGNGHGTHVAGTIAALNNSIGVLGVAPNAELYAVKVLGASGSGSVSSIAQGLEWAGNNVMHVANLSLGLNVPSATLEQAVNSATSRGVLVVAASGNSGAGSISYPARYANAMAVGATDQNNNRASFSQYGAGLDIVAPGVNVQSTWPGSTYASLNGTSMATPHVAGAAALVKQKNPSWSNVQIRNHLKNTATSLGSTNLYGSGLVNAEAATR

SEQ ID NO: 57872 - protein, 269 aa, Unidentified
AQSVPWGISRVQAPAAHNRGLTGSGVKVAVLDTGISTHPDLNIRGGASFVPGEPSTQDGNGHGTHVAGTIAALNNSIGVLGVAPSAELYAVKVLGADGEGAISSIAQGLEWAGNNGMHVANLSLGSPSPSATLEQAVNSATSRGVLVVAASGNSGASSISYPARYANAMAVGATDQNNNRASFSQYGAGLDIVAPGVNVQSTYPGSTYASLNGTSMATPHVAGAAALVKQKNPSWSNPQIRNHLKNTATSLGSTNLYGSGLVNAEAATR

SEQ ID NO: 57873 - protein, 269 aa, Unidentified
AQSVPWGISRVQAPAAHNRGLTGSGVKVAVLDTGISTHPDLNIRGGASFVPGEPSTQDGNGHGTHVAGTIAALNNSIGVLGVAPSAELYAVKVLGIDGRGAISSIAQGLEWAGNNGMHVANLSLGSPSPSATLEQAVNSATSRGVLVVAASGNSGASSISYPARYANAMAVGATDQNNNRASFSQYGAGLDIVAPGVNVQSTYPGSTYASLNGTSMATPHVAGAAALVKQKNPSWSNVQIRNHLKNTATSLGSTNLYGSGLVNAEAATR

SEQ ID NO: 57874 - protein, 269 aa, Unidentified
AQSVPWGISRVQAPAAHSRGLWGRGVKVAVLDTGISTHPDLRIRGGASFVPGEPSTQDGNGHGTHVAGTIAALNNSIGVLGVAPSAELYAVKVLGASGAGSVSSIAQGLEWAGNNGMHVANLSLGSPSPSATLEQAVNSATSRGVLVVAASGNSGAGSISYPARYANAMAVGATDQNNNRASFSQYGAGLDIVAPGVNVQSTYPQSTYASLNGTSMATPHVAGAAALVKQKNPSWSNVQIRNHLKNTATSLGSTNLYGSGLVNAEAATR

SEQ ID NO: 57875 - protein, 269 aa, Unidentified
AQSVPWGISRVQAPAAHNRGLKGSGVKVAVLDTGISTHPDLNIRGGASFVPGEPSTQDGNGHGTHVAGTIAALNNSIGVLGVAPSAELYAVKVLGASGAGNISSIAQGLEWAGNNGMHVANLSLGSPSPSATLEQAVNSATSRGVLVVAASGNSGAGSISYPARYANAMAVGATDQNNNRASFSQYGAGLDIVAPGVNVQSTYPGSTYASLNGTSMATPHVAGAALLVKQKNPSWSNVRIRNHLKNTATSLGSTNLYGSGLVNAEAATR

SEQ ID NO: 57876 - protein, 269 aa, Unidentified
AQSVPWGISRVQAPAAHNRGLTGRGVKVAVLDTGISTHPDLNIRGGASFVPGEPSTQDGNGHGTHVAGTIAALNNGIGVLGVAPSAELYAVKVLGASGSGSVSSIAQGLEWAGNNDMHVANLSLGSESPSATLEQAVNSATSRGVLVVAASGNSGADSISYPARYANAMAVGATDQNNNRADFSQYGAGLDIVAPGVNVQSTYPGSTYASLNGTSMATPHVAGAAALVKQKNPSWSNVQIRNHLKNTATSLGSTNLYGSGLVNAEAATR

SEQ ID NO: 57877 - protein, 269 aa, Unidentified
AQSVPWGISRVQAPAAHNRGLAGSGVKVAVLDTGISTHPDLNIRGGASFVPGEPSTQDGNGHGTHVAGTIAALNNSIGVLGVAPSAELYAVKVLGASGTGNISSIAQGLEWAGNNGMHVANLSLGSPSPSATLEQAVNSATSRGVLVVAASGNSGAGSISYPARYANAMAVGATDQNNNRASFSQYGAGLDIVAPGVNVQSTYPGSTYASLNGTSMATPHVAGAALLVKQKNPSWSNVRIRNHLKNTATSLGSTNLYGSGLVNAEAATR

SEQ ID NO: 57878 - protein, 269 aa, Unidentified
AQSVPWGISRVQAPAAHNRGLTGGGVKVAVLDTGISTHPDLNIRGGASFVPGEPSTQDGNGHGTHVAGTIAALNNNIGVLGVAPSAELYAVKVLGASGGGSVSSIAQGLEWAGNNGMHVANLSLGAPSPSATLEQAVNSATSRGVLVVAASGNSGAGSISYPARYANAMAVGATDQNNNRADFSQYGAGLDIVAPGVNVQSTYPGSTYASQNGTSMATPHVAGAAALVKQKNPSWSNVQIRNHLKNTATSLGSTNLYGSGLVNAEAATR

SEQ ID NO: 57879 - protein, 269 aa, Unidentified
AQSVPWGISRVQAPAAHNRGLYGSGVKVAVLDTGISTHPDLNIRGGASFVPGEPSTQDGNGHGTHVAGTIAALNNSIGVLGVAPSAELYAVKVLGASGNGNLSSIAQGLEWAGNNGMHVANLSLGSPSPSATLEQAVNSATSRGVLVVAASGNSGAGSISYPARYANAMAVGATDQNNNRASFSQYGAGLDIVAPGVNVQSTYPGSTYASLNGTSMATPHVAGAAVLVKQKNPSWSNVRIRNHLKNTATSLGSTNLYGSGLVNAEAATR

SEQ ID NO: 57880 - protein, 269 aa, Unidentified
AQSVPWGISRVQAPAAHNRGLAGRGVKVAVLDSGISTHPDLNIRGGASFVPGEPSTQDGEGHGTHVAGTIAALNNSIGVLGVAPSAELYAVKVLGASGSGSVSSIAQGLEWAGNNRMHVANLSLGSPSPSATLEQAVNSATSRGVLVVAASGNSGAGSISYPARYANAMAVGATDQNNNRADFSQYGAGLDIVAPGVNVQSTYPGSTYASLNGTSMATPHVAGAAALVKQKNPSWSNVQIRNHLKNTATSLGSTNLYGSGLVNAEAATR

SEQ ID NO: 57881 - protein, 269 aa, Unidentified
AQSVPWGISRVRAPAAHNRGLTGSGVKVAVLDTGISTHPDLNIRGGASFVPGEPSTQDGNGHGTHVAGTIAALDNSIGVLGVAPSAELYAVKVLGASGSGATSSIAQGLEWAGNNGMHVANLSLGSPTPSATLEQAVNSATSRGVLVVAASGNSGAGSISYPARYANAMAVGATDQNNNRASFSQYGAGLDIVAPGVNVQSTYPGSTYASLNGTSSATPHVAGAAALVKQKNPSWSNVRIRNHLKNTATSLGSTNLYGSGLANAEAATR

SEQ ID NO: 57882 - protein, 269 aa, Unidentified
AQSVPWGISRVQAPAAHNRGLRGSGVKVAVLDTGISTHPDLNIRGGASFVPGEPSTQDGNGHGTHVAGTIAALNNSIGVLGVAPSAELYAVKVLGASGGGNISSIAQGLEWAGNNGMHVANLSLGSPSPSATLEQAVNSATSRGVLVVAASGNSGAGSISYPARYANAMAVGATDQNNNRASFSQYGAGLDIVAPGVNVQSTYPGSTYASLNGTSMATPHVAGAALLVKQKNPSWSNVSIRNHLKNTATSLGSTNLYGSGLVNAEAATR

SEQ ID NO: 57883 - protein, 269 aa, Unidentified
AQSVPWGISRVQAPAAHNRGLTGRGVKVAVLDTGISTHPDLNIRGGASFVPGEPSTQDGNGHGTHVAGTIAALNNSIGVLGVAPSAELYAVKVLGASGSGSVSSIAQGLEWAGLNGMHVANLSLGIPSPSATLEQAVNSATSRGVLVVAASGNSGEGSIDYPARYANAMAVGATDQNNNRADFSQYGAGLDIVAPGVNVQSTYPGSTYASLNGTSMATPHVAGAAALVKQKNPSWSNVQIRNHLKNTATSLGSTNLYGSGLVNAEAATR

SEQ ID NO: 57884 - protein, 269 aa, Unidentified
AQSVPWGISRVQAPAAHNRRLTGSGVKVAVLDTGISTHPDLNIRGGASFVPGEPSTQDGNGHGTHVAGTIAALNNGIGVLGVAPSAELYAVKVLGASGSGSVSSIAQGLEWAGNNDMHVANLSLGSPSPSATLEQAVNSATSRGVLVVAASGNSGADSISYPARYANAMAVGATDQNNNRADFSQYGAGLDIVAPGVNVQSTYPGSTYASLNGTSMATPHVAGAAALVKQKNPSWSNVRIRNHLKNTATSLGSTNLYGSGLVNAEAATR

SEQ ID NO: 57885 - protein, 269 aa, Unidentified
AQSVPWGISRVQAPAAHNRRLTGRGVKVAVLDTGISTHPDLNIRGGASFVPGEPSTQDGNGHGTHVAGTIAALNNSIGVLGVAPSAELYAVKVLGASGAGSVSSIAQGLEWAGNNGMHVANLSLGSPSPSATLEQAVNSATSRGVLVVAASGNSGAGSISYPARYANAMAVGATDQNNNRASFSQYGAGLDIVAPGVNVQSAYIQSTYASLNGTSMATPHVAGAAALVKQKNPSWSNVQIRNHLKNTATSLGSTNLYGSGLVNAEAATR

SEQ ID NO: 57886 - protein, 269 aa, Unidentified
AQSVPWGISRVQAPAAHNRGLTGSGVKVAVLDTGISTHPDLNIRGGASFVPGEPSTQDGNGHGTHVAGTIAALNNSIGVLGVAPSAELYAVKVLGADGRGAISSIAQGLEWAGNNGMHVANLSLGSPSPSATLEQAVNSATSRGVLVVAASGNSGASSISYPARYANAMAVGATDQNNNRASFSQYGAGLDIVAPGVNVQSTYPGSTYASLNGTSMATPHVAGAAALVKQKNPSWTNVQIRNHLKNTATSLGSTNLYGSGLVNAEAATR

SEQ ID NO: 57887 - protein, 269 aa, Unidentified
AQSVPWGISRVQAPAAHNRGLRGSGVKVAVLDTGISTHPDLNIRGGASFVPGEPSTQDGNGHGTHVAGTIAALNNSIGVLGVAPSAELYAVKVLGASGTGNISSIAQGLEWAGNNGMHVANLSLGSPSPSATLEQAVNSATSRGVLVVAASGNSGAGSISYPARYANAMAVGATDQNNNRASFSQYGAGLDIVAPGVNVQSTYPGSTYASLNGTSMATPHVAGAAVLVKQKNPSWSNVSIRNHLKNTATSLGSTNLYGSGLVNAEAATR

SEQ ID NO: 57888 - protein, 269 aa, Unidentified
AQSVPWGISRVQAPAAHNRGLRGSGVKVAVLDTGISTHPDLNIRGGASFVPGEPSTQDGNGHGTHVAGTIAALNNSIGVLGVAPSAELYAVKVLGASGTGGLSSIAQGLEWAGNNGMHVANLSLGSPSPSATLEQAVNSATSRGVLVVAASGNSGAGSISYPARYANAMAVGATDQNNNRASFSQYGAGLDIVAPGVNVQSTYPGSTYASLNGTSMATPHVAGAATLVKQKNPSWSNVSIRNHLKNTATSLGSTNLYGSGLVNAEAATR

SEQ ID NO: 57889 - protein, 269 aa, Unidentified
AQSVPWGISRVQAPAAHNRGLTGRGVKVAVLDTGISTHPDLNIRGGASFVPGEPSTQDGNGHGTHVAGTIAALDNSIGVLGVAPRAELYAVKVLGASGSGSVSSIAQGLEWAGNNGMHVANLSLGSPSPSATLEQAVNSATSRGVLVVAASGNSGAGSISYPARYANAMAVGATDQNNNRASFSQYGAGLDIVAPGVNVYSTYPGSAYASLNGTSQATPHVAGAAALVKQKNPSWSNVQIRNRLKNTATSLGSTNLYGSGLVNAEAATR

SEQ ID NO: 57890 - protein, 269 aa, Unidentified
AQSVPWGISRVQAPAAHNRGLTGSGVKVAVLDTGISTHPDLNIRGGASFVPGEPSTQDGNGHGTHVAGTIAALNNSIGVLGVAPSAELYAVKVLGADGRGAISSIAQGLEWAGNNGMHVANLSLGSPSPSATLEQAVNSATSRGVLVVAASGNSGASSISYPARYANAMAVGATDQNNNRASFSQYGAGLDIVAPGVNVQSTYPGSTYASLNGTSMATPHVAGAAALVKQKNPSWSNVQIRNHLKNTATSLGSTNLYGSGLVNAEAAVR

SEQ ID NO: 57891 - protein, 269 aa, Unidentified
AQSVPWGISRVQAPAAHNRGLTGSGVKVAVLDTGISTHPDLNIRGGASFVPGEPSTQDGNGHGTHVAGTIAALNNSIGVLGVAPDAELYAVKVLGASGGGAISSIAQGLEWAGNNGMHVANLSLGSPSPSATLEQAVNSATSRGVLVVAASGNSGAGSISYPARYANAMAVGATDQNNNRASFSQYGAGLDIVAPGVNVQSTYPGSTYASLNGTSMATPHVAGAAVLVKQKNPSWSNVRIRNHLKNTATSLGSTNLYGSGLVNAEAATR

SEQ ID NO: 57892 - protein, 269 aa, Unidentified
AQSVPWGISRVQAPAAHNRGLKGSGVKVAVLDTGISTHPDLNIRGGASFVPGEPSTQDGNGHGTHVAGTIAALNNSIGVLGVAPSAELYAVKVLGASGNGNISSIAQGLEWAGNNGMHVANLSLGSPSPSATLEQAVNSATSRGVLVVAASGNSGAGSISYPARYANAMAVGATDQNNNRASFSQYGAGLDIVAPGVNVQSTYPGSTYASLNGTSMATPHVAGAAVLVKQKNPSWSNVWIRNHLKNTATSLGSTNLYGSGLVNAEAATR

SEQ ID NO: 57893 - protein, 269 aa, Unidentified
AQSVPWGISRVQAPAAHNRGLAGSGVKVAVLDTGISTHPDLNIRGGASFVPGEPSTQDGNGHGTHVAGTIAALNNSIGVLGVAPSAELYAVKVLGASGGGNISSIAQGLEWAGNNGMHVANLSLGSPSPSATLEQAVNSATSRGVLVVAASGNSGAGSISYPARYANAMAVGATDQNNNRASFSQYGAGLDIVAPGVNVQSTYPGSTYASLNGTSMATPHVAGAATLVKQKNPSWSNVWIRNHLKNTATSLGSTNLYGSGLVNAEAATR

SEQ ID NO: 57894 - protein, 269 aa, Unidentified
AQSVPWGISRVQAPAAHNRGLKGSGVKVAVLDTGISTHPDLNIRGGASFVPGEPSTQDGNGHGTHVAGTIAALNNSIGVLGVAPSAELYAVKVLGASGTGNISSIAQGLEWAGNNGMHVANLSLGSPSPSATLEQAVNSATSRGVLVVAASGNSGAGSISYPARYANAMAVGATDQNNNRASFSQYGAGLDIVAPGVNVQSTYPGSTYASLNGTSMATPHVAGAAMLVKQKNPSWSNVSIRNHLKNTATSLGSTNLYGSGLVNAEAATR

SEQ ID NO: 57895 - protein, 269 aa, Unidentified
AQSVPWGISRVQAPAAHNRGLKGSGVKVAVLDTGISTHPDLNIRGGASFVPGEPSTQDGNGHGTHVAGTIAALNNSIGVLGVAPSAELYAVKVLGASGNGAISSIAQGLEWAGNNGMHVANLSLGSPSPSATLEQAVNSATSRGVLVVAASGNSGAGSISYPARYANAMAVGATDQNNNRASFSQYGAGLDIVAPGVNVQSTYPGSTYASLNGTSMATPHVAGAALLVKQKNPSWSNVRIRNHLKNTATSLGSTNLYGSGLVNAEAATR

SEQ ID NO: 57896 - protein, 269 aa, Unidentified
AQSVPWGISRVQAPAAHNRGLRGSGVKVAVLDTGISTHPDLNIRGGASFVPGEPSTQDGNGHGTHVAGTIAALNNSIGVLGVAPSAELYAVKVLGASGTGGISSIAQGLEWAGNNGMHVANLSLGSPSPSATLEQAVNSATSRGVLVVAASGNSGAGSISYPARYANAMAVGATDQNNNRASFSQYGAGLDIVAPGVNVQSTYPGSTYASLNGTSMATPHVAGAATLVKQKNPSWSNVSIRNHLKNTATSLGSTNLYGSGLVNAEAATR

SEQ ID NO: 57897 - protein, 269 aa, Unidentified
AQSVPWGISRVQAPAAHNRGLTGRGVKVAVLDTGISTHPDLNIRGGASFVPGEPSTQDGEGHGTHVAGTIAALNNDIGVLGVAPSAELYAVKVLGASGSGSVSSIAQGLEWAGNNSMHVANLSLGSESPSATLEQAVNSATSRGVLVVAASGNSGAGSISYPARYANAMAVGATDQNNNRASFSQYGAGLDIVAPGVNVQSTYPGSTYASLNGTSMATPHVAGAAALVKQKNPSWSNVRIRNHLKNTATSLGSTNLYGSGLVNAEAATR

SEQ ID NO: 57898 - protein, 269 aa, Unidentified
AQSVPWGISRVQAPAAHNRRLTGSGVKVAVLDTGISTHPDLRIRGGASFVPGEPSTQDGNGHGTHVAGTIAALNNNIGVLGVAPSAELYAVKVLGASGQGSVSSIAGGLEWAGNNGMHVANLSLGSPSPSATLEQAVNSATSRGVLVVAASGNSGAGSISYPARYANAMAVGATDQNNNRASFSQYGAGLDIVAPGVNVQSTYPGSTYASQNGTSMATPHVAGAAALVKQKNPSWSNVQIRNHLKNTATSLGSTNLYGSGLVNAEAATR

SEQ ID NO: 57899 - protein, 269 aa, Unidentified
AQSVPWGISRVQAPAAHNRGLTGRGVKVAVLDTGISTHPDLNIRGGASFVPGEPSTQDGNGHGTHVAGTIAALNNGIGVLGVAPSAELYAVKVLGASGSGSVSSIAQGLEWAGNNSMHVANLSLGSESPSATLEQAVNSATSRGVLVVAASGNSGAGSISYPARYANAMAVGATDQNNNRASFSQYGAGLDIVAPGVNVQSTYPGSTYASLNGTSMATPHVAGAAALVKQKNPSWSNVRIRDHLKNTATSLGSTNLYGSGLVNAEAATR

SEQ ID NO: 57900 - protein, 269 aa, Unidentified
AQSVPWGISRVQAPAAHNRGLTGRGVKVAVLDTGISTHPDLNIRGGASFVPGEPSTQDGNGHGTHVAGTIAALNNDIGVLGVAPSAELYAVKVLGASGSGSVSSIAQGLEWAGNNSMHVANLSLGSPSPSATLEQAVNSATSRGVLVVAASGNSGADSISYPARYANAMAVGATDQNNNRADFSQYGAGLDIVAPGVNVQSTYPGSTYASLNGTSMATPHVAGAAALVKQKNPSWSNVQIRDHLKNTATSLGSTNLYGSGLVNAEAATR

SEQ ID NO: 57901 - protein, 269 aa, Unidentified
AQSVPWGISRVQAPAAHNRGLAGSGVKVAVLDTGISTHPDLNIRGGASFVPGEPSTQDGNGHGTHVAGTIAALNNSIGVLGVAPSAELYAVKVLGASGTGNISSIAQGLEWAGNNGMHVANLSLGSPSPSATLEQAVNSATSRGVLVVAASGNSGAGSISYPARYANAMAVGATDQNNNRASFSQYGAGLDIVAPGVNVQSTYPGSTYASLNGTSMATPHVAGAAMLVKQKNPSWSNVSIRNHLKNTATSLGSTNLYGSGLVNAEAATR

SEQ ID NO: 57902 - protein, 269 aa, Unidentified
AQSVPWGISRVQAPAAHNRGLYGSGVKVAVLDTGISTHPDLNIRGGASFVPGEPSTQDGNGHGTHVAGTIAALNNSIGVLGVAPSAELYAVKVLGASGNGNLSSIAQGLEWAGNNGMHVANLSLGSPSPSATLEQAVNSATSRGVLVVAASGNSGAGSISYPARYANAMAVGATDQNNNRASFSQYGAGLDIVAPGVNVQSTYPGSTYASLNGTSMATPHVAGAAMLVKQKNPSWSNVRIRNHLKNTATSLGSTNLYGSGLVNAEAATR

SEQ ID NO: 57903 - protein, 269 aa, Unidentified
AQSVPWGISRVQAPAAHNRKLTGGGVKVAVLDTGISTHPDLNIRGGASFVPGEPSTQDGEGHGTHVAGTIAALNNSIGVLGVAPSAELYAVKVLSASGNGSVSSIAQGLEWAGLNGMHVANLSLGSPSPSATLEQAVNSATSRGVLVVAASGNSGAGSISYPARYANAMAVGATDQNNNRASFSQYGAGLDIVAPGVNVQSTYPGSTYASLNGTSMATPHVAGAAALVKQKNPSWSNVQIRNHLKNTATSLGSTNLYGSGLVNAEAATR

SEQ ID NO: 57904 - protein, 269 aa, Unidentified
AQSVPWGISRVQAPAAHNRGLTGSGVKVAVLDTGISTHPDLNIRGGASFVPGEPSTQDGEGHGTHVAGTIAALNNSIGVLGVAPSAELYAVKVLGASGSGSLSSIAQGLEWAGNNGMHVANLSLGSPSPSATLEQAVNSATSRGVLVVAASGNSGEGSISYPARYANAMAVGATDQNNNRADFSQYGAGLDIVAPGVNVQSTYPGSTYASLNGTSMATPHVAGAAALVKQKNPSWSNVQIRNRLKNTATSLGSTNLYGSGLVNAFAATR

SEQ ID NO: 57905 - protein, 269 aa, Unidentified
AQSVPWGISRVQAPAAHNRRLWGSGVKVAVLDTGISTHPDLRITGGASFVPGEPSTQDGNGHGTHVAGTIAALNNSIGVLGVAPSAELYAVKVLGASGAGSVSSIAQGLEWAGNNGMHVANLSLGSPSPSATLEQAVNSATSRGVLVVAASGNSGAGSISYPARYANAMAVGATDQNNNRASFSQYGAGLDIVAPGVNVQSTYPGSAYASLNGTSMATPHVAGAAALVKQKNPSWSNVQIRNHLKNTATSLGSTNLYGSGLVNAEAATR

SEQ ID NO: 57906 - protein, 269 aa, Unidentified
AQSVPWGISRVQAPASHNRGLAGSGVKVAVLDTGISTHPDLNIRGGASFVPGEPSTQDGNGHGTHVAGTIAALNNSIGVLGVAPSAELYAVKVLGASGAGGVSSIAQGLEWAGNNGMHVANLSLGNPSPSATLEQAVNSATSRGVIVVAASGNSGAGSISYPARYANAMAVGATDQNNNRASFSQYGAGLDIVAPGVNVQSTYPGSTYASLNGTSMATPHVAGAAALVKQKNPSWSNVQIRNHLKNTATSLGSTNLYGSGLVNAEAATR

SEQ ID NO: 57907 - protein, 269 aa, Unidentified
AQSVPWGISRVQAPAAHNRGLQGSGVKVAVLDTGISTHPDLNIRGGASFVPGEPSTQDGNGHGTHVAGTIAALNNSIGVLGVAPSAELYAVKVLGASGAGNLSSIAQGLEWAGNNGMHVANLSLGSPSPSATLEQAVNSATSRGVLVVAASGNSGAGSISYPARYANAMAVGATDQNNNRASFSQYGAGLDIVAPGVNVQSTYPGSTYASLNGTSMATPHVAGAAMLVKQKNPSWSNVRIRNHLKNTATSLGSTNLYGSGLVNAEAATR

SEQ ID NO: 57908 - protein, 269 aa, Unidentified
AQSVPWGISRVQAPAAHNRGLTGRGVKVAVLDTGISTHPDLRITGGASFVPGEPSTQDGNGHGTHVAGTIAALDNSIGVLGVAPSAELYAVKVLGASGSGSVSSIAQGLEWAGNNGMHVANLSLGSPSPSATLEQAVNSATSRGVLVVAASGNSGAGSISYPARYANAMAVGATDQNNNRASFSQYGAGLDIVAPGVNVQSTYPGSTYASLNGTSMATPHVAGEAALVKQKNPSWSNVQIRNRLKNTATSLGSTNLYGSGLVNAEAATR

SEQ ID NO: 57909 - protein, 269 aa, Unidentified
AQSVPWGISRVQAPAAHNRGLTGRGVKVAVLDSGISTHPDLNIRGGASFVPGEPSTQDGNGHGTHVAGTIAALNNSIGVLGVAPSAELYAVKVLGASGSGSVSSIAQGLEWAGNNRMHVANLSLGSPSPSATLEQAVNSATSRGVLVVAASGNSGEGSIDYPARYANAMAVGATDQNNNRADFSQYGAGLDIVAPGVNVQSTYPGSTYASLNGTSMATPHVAGAAALVKQKNPSWSNVQIRNHLKNTATSLGSTNLYGSGLVNAEAATR

SEQ ID NO: 57910 - protein, 269 aa, Unidentified
AQSVPWGISRVQAPAAHNRGLTGRGVKVAVLDTGISTHPDLNIRGGASFVPGEPSTQDGNGHGTHVAGTIAALNNGIGVLGVAPSAELYAVKVLGASGSGSVSSIAQGLEWAGNNSMHVANLSLGSPSPSATLEQAVNSATSRGVLVVAASGNSGADSISYPARYANAMAVGATDQNNNRADFSQYGAGLDIVAPGVNVQSTYPGSTYASLNGTSMATPHVAGAAALVKQKNPSWSNVRIRNHLKNTATSLGSTNLYGSGLVNAEAATR

SEQ ID NO: 57911 - protein, 269 aa, Unidentified
AQSVPWGISRVQAPAAHNRGLTGSGVKVAVLDTGISTHPDLNIRGGASFVPGEPSTQDGNGHGTHVAGTIAALDNSIGVLGVAPRAELYAVKVLGASGSGSVSSIAQGLEWAGNNRMHVANLSLGKPSPSATLEQAVNSATSRGVLVTAASGNSGAGSISYPARYANAMAVGATDQNNNRASFSQYGAGLDIVAPGVNVQSTYPGSTYASKNGTSMATPHVAGAAALVKQKNPSWSNVQIRNHLKNTATSLGSTNLYGSGLVNAEAATR

SEQ ID NO: 57912 - protein, 269 aa, Unidentified
AQSVPWGISRVQAPAAHNRGLTGRGVKVAVLDSGISTHPDLNIRGGASFVPGEPSTQDGNGHGTHVAGTIAALNNSIGVLGVAPSAELYAVKVLGASGSGSVSSIAQGLEWAGLNGMHVANLSLGIPSPSATLEQAVNSATSRGVLVVAASGNSGAGSIDYPARYANAMAVGATDQNNNRADFSQYGAGLDIVAPGVNVQSTYPGSTYASLNGTSMATPHVAGAAALVKQKNPSWSNVQIRNHLKNTATSLGSTNLYGSGLVNAEAATR

SEQ ID NO: 57913 - protein, 269 aa, Unidentified
AQSVPWGISRVQAPAAHNRGLQGSGVKVAVLDTGISTHPDLNIRGGASFVPGEPSTQDGNGHGTHVAGTIAALNNSIGVLGVAPSAELYAVKVLGASGAGNLSSIAQGLEWAGNNGMHVANLSLGSPSPSATLEQAVNSATSRGVLVVAASGNSGAGSISYPARYANAMAVGATDQNNNRASFSQYGAGLDIVAPGVNVQSTYPGSTYASLNGTSMATPHVAGAALLVKQKNPSWSNVRIRNHLKNTATSLGSTNLYGSGLVNAEAATR

SEQ ID NO: 57914 - protein, 269 aa, Unidentified
AQSVPWGISRVQAPAAHNRGLTGSGVKVAVLDTGISTHPDLFIRGGASFVPGEPSTQDGNGHGTHVAGTIAALNNSIGVLGVAPSAELYAVKVLGADGRGAISSIAQGLEWAGNNGMHVANLSLGSPSPSATLEQAVNSATSRGVLVVAASGNSGASSISYPARYANAMAVGATDQNNNRASFSQYGAGLDIVAPGVNVQSTYPGSTYASLNGTSMATPHVAGAAALVKQKNPSWSNVQIRNHLKNTATSLGSTNLYGSGLVNAEAATR

SEQ ID NO: 57915 - protein, 269 aa, Unidentified
AQSVPWGISRVQAPAAHNRGLTGSGVKVAVLDTGISTHPDLNIRGGASFVPGEPSTQDGNGHGTHVAGTIAALNNSIGVLGVAPSAELYAVKVLGADGRGAISSIAQGLEWAGNNGMHVSNLSLGSPSPSATLEQAVNSATSRGVLVVAASGNSGASSISYPARYANAMAVGATDQNNNRASFSQYGAGLDIVAPGVNVQSTYPGSTYASLNGTSMATPHVAGAAALVKQKNPSWSNVQIRNHLKNTATSLGSTNLYGSGLVNAEAATR

SEQ ID NO: 57916 - protein, 269 aa, Unidentified
AQSVPWGISRVQAPAAHNRGLLGFGVKVAVLDTGISTHPDLNIRGGASFVPGEPSTQDGNGHGTHVAGTIAALNNNIGVLGVAPSAELYAVKVLGASGSGSVSSIAQGLEWAGNNGMHVANLSLGDPSPSATLEQAVNSATSRGVLVVAASGNSGAGSIDYPARYANAMAVGATDQNNNRASFSQYGAGLDIVAPGVNVQSTYPGSAYASLNGTSMATPHVAGAAALVKQKNPSWSNVQIRNHLKNTATSLGSTNLYGSGLVNAEAATR

SEQ ID NO: 57917 - protein, 269 aa, Unidentified
AQSVPWGISRVQAPAAHNRKLTGSGVKVAVLDTGISTHPDLNIRGGASFVPGEPSTQDGEGHGTHVAGTNAALNNSIGVLGVAPSAELYAVKVLGASGDGSVSSIAQGLEWAGLNGMHVANLSLGQPSPSATLEQAVNSATSRGVLVVAASGNSGAGSISYPARYANAMAVGATDQNNNRASFSQYGAGLDIVAPGVNVQSTYPGSTYASLNGTSMATPHVAGAAALVKQKNPSWSNVQIRNHLKNTATSLGSTNLYGSGLVNAEAATR

SEQ ID NO: 57918 - protein, 269 aa, Unidentified
AQSVPWGISRVQAPAAHNRGLTGSGVKVAVLDTGISTHPDLNIRGGASFVPGEPSTQDGNGHGTHVAGTIAALNNSIGVLGVAPSAELYAVKVLGASGSGAISSIAQGLEWAGNNGMHVANLSLGSPSPSATLEQAVNSATSRGVLVVAASGNSGADSISYPARYANAMAVGATDQNNNRASFSQYGAGLDIVAPGVNVQSTYPGSTYASLNGTSMATPHVAGAAVLVKHKNPSWSNVQIRNHLKKTATSLGSTNLYGSGLVNAEAATR

SEQ ID NO: 57919 - protein, 269 aa, Unidentified
AQSVPWGISRVQAPAAHNRGLTGRGVKVAVLDTGISTHPDLNIRGGASFVPGEPSTQDGEGHGTHVAGTIAALNNGIGVLGVAPSAELYAVKVLGASGSGSVSSIAQGLEWAGNNSMHVANLSLGSPSPSATLEQAVNSATSRGVLVVAASGNSGADSISYPARYANAMAVGATDQNNNRASFSQYGAGLDIVAPGVNVQSTYPGSTYASLNGTSMATPHVAGAAALVKQKNPSWSNVQIRDHLKNTATSLGSTNLYGSGLVNAEAATR

SEQ ID NO: 57920 - protein, 269 aa, Unidentified
AQSVPWGISRVQAPAAHNRGLTGSGVKVAVLDTGISTHPDLNIRGGASFVPGEPSTQDGNGHGTHVAGTIAALNNSIGVLGVAPSAELYAVKVLGADGRGAISSIAQGLEWAGNNGMHVANLSLGSPSPSATLEQAVNSATSRGVLVVAASGNSGASSISYPARYANAMAVGATDQNNNRASFSQYGAGLDIVAPGVNMQSTYPGSTYASLNGTSMATPHVAGAAALVKQKNPSWSNVQIRNHLKNTATSLGSTNLYGSGLVNAEAATR

SEQ ID NO: 57921 - protein, 269 aa, unidentified
AQSVPWGISRVQAPAAHNRGLTGSGVKVAVLDTGISTHPDLNIRGGASFVPGEPSTQDGNGHGTHVAGTIAALNNSIGVLGVAPSAELYAVKVLGASGSGSVSSIAQGLEWAGNNGMHVANLSLGSPSAGGTLEQAVNSATSRGVLVVAASGNSGAGSISAPASYANAMAVGATDQNNNRASFSQYGPGLDIVAPGVNVQSTYPGSTYASLNGTSMATPHVAGAAALVKQKNPSWSNVQIRNHLKNTATSLGSTNLYGSGLVNAEAATR

SEQ ID NO: 57922 - protein, 269 aa, Unidentified
AQSVPWGISRVQAPAAHNRGLTGSGVKVAVLDTGISTHPDLNIRGGASFVPGEPSTQDGNGHGTHVAGTIAALNNSIGVLGVAPSAELYAVKVLGADGRGAISSIAQGLEWAGNNGMHVANLSLGSPSPSATLEQAVNSATSRGVLVVAASGNDGASSISYPARYANAMAVGATDQNNNRASFSQYGAGLDIVAPGVNVQSTYPGSTYASLNGTSMATPHVAGAAALVKQKNPSWSNVQIRNHLKNTATSLGSTNLYGSGLVNAEAATR

SEQ ID NO: 57923 - protein, 269 aa, Unidentified
AQSVPWGISRVQAPAAHNRRLWGRGVKVAVLDTGISTHPDLRIRGGASFVPGEPSTQDGNGHGTHVAGTIAALNNSIGVLGVAPSAELYAVKVLGASGAGSVSSIAQGLEWAGNNGMHVANLSLGSPSPSATLEQAVNSATSRGVLVVAASGNSGAGSISYPARYANAMAVGATDQNNNRASFSQYGAGLDIVAPGVNVQSTYPGSAYASLNGTSMATPHVAGAAALVKQKNPSWSNVQIRNHLKNTATSLGSTNLYGSGLVNAEAATR

SEQ ID NO: 57924 - protein, 269 aa, Unidentified
AQSVPWGISRVQAPAAHNRGLTGRGVKVAVLDSGISTHPDLNIRGGASFVPGEPSTQDGNGHGTHVAGTIAALNNSIGVLGVAPSAELYAVKVLGASGSGSVSSIAQGLEWAGLNGMHVANLSLGIPSPSATLEQAVNSATSRGVLVVAASGNSGEGSIDYPARYANAMAVGATDQNNNRASFSQYGAGLDIVAPGVNVQSTYPGSTYASLNGTSMATPHVAGAAALVKQKNPSWSNVQIRNHLKNTATSLGSTNLYGSGLVNAEAATR

SEQ ID NO: 57925 - protein, 269 aa, Unidentified
AQSVPWGISRVQAPAAHNRRLTGRGVKVAVLDTGISTHPDLNIRGGASFVPGEPSTQDGNGHGTHVAGTIAALNNSIGVLGVAPSAELYAVKVLGASGAGSVSSIANGLEWAGLNGMHVANLSLGAPSPSATLEQAVNSATSRGVLVVAASGNSGAGSISYPARYANAMAVGATDQNNNRASFSQYGAGLDIVAPGVNVQSTYPGSTYASLNGTSMATPHVAGAAALVKQKNPSWSNVQIRNHLKNTATSLGSTNLYGSGLVNAEAATR

SEQ ID NO: 57926 - protein, 269 aa, Unidentified
AQSVPWGISRVQAPAAHNRRLTGRGVKVAVLDTGISTHPDLNIRGGASFVPGEPSTQDGNGHGTHVAGTIAALNNSIGVLGVAPSAELYAVKVLAASGNGSVSSIAGGLEWAGLNGMHVANLSLGSPSPSATLEQAVNSATSRGVLVVAASGNSGAGSISYPARYANAMAVGATDQNNNRASFSQYGAGLDIVAPGVNVQSTYPGSTYASLNGTSMATPHVAGAAALVKQKNPSWSNVQIRNHLKNTATSLGSTNLYGSGLVNAEAATR

SEQ ID NO: 57927 - protein, 269 aa, Unidentified
AQSVPWGISRVQAPAAHNRRLWGSGVKVAVLDTGISTHPDLNITGGASFVPGEPSTQDGNGHGTHVAGTIAALNNSIGVLGVAPSAELYAVKVLGASGAGSVSSIAQGLEWAGNNGMHVANLSLGSPSPSATLEQAVNSATSRGVLVVAASGNSGAGSISYPARYANAMAVGATDQNNNRASFSQYGAGLDIVAPGVNVQSTYIQSTYASLNGTSMATPHVAGAAALVKQKNPSWSNVQIRNHLKNTATSLGSTNLYGSGLVNAEAATR

SEQ ID NO: 57928 - protein, 269 aa, Unidentified
AQSVPWGISRVQAPAAHNRKLTGSGVKVAVLDTGISTHPDLNIRGGASFVPGEPSTQDGEGHGTHVAGTIAALNNSIGVLGVAPSAELYAVKVLGASGNGSVSSIAGGLEWAGLNGMHVANLSLGAPSPSATLEQAVNSATSRGVLVVAASGNSGAGSISYPARYANAMAVGATDQNNNRADFSQYGAGLDIVAPGVNVQSTYPGSTYASLNGTSSATPHVAGAAALVKQKNPSWSNVQIRNHLKNTATSLGSTNLYGSGLVNAEAATR

SEQ ID NO: 57929 - protein, 269 aa, Unidentified
AQSVPWGISRVQAPAAHNRKLTGFGVKVAVLDTGISTHPDLNIRGGASFVPGEPSTQDGEGHGTHVAGTIAALNNSIGVLGVAPSAELYAVKVLGASGSGSVSSIAQGLEWAGLNRMHVANLSLGSPSPSATLEQAVNSATSRGVLVVAASGNSGAGSISYPARYANAMAVGATDQNNNRADFSQYGAGLDIVAPGVNVQSTYPGSTYASLNGTSMATPHVAGAAALVKQKNPSWSNVQIRNHLKNTATSLGSTNLYGSGLVNAEAATR

SEQ ID NO: 57930 - protein, 269 aa, Unidentified
AQSVPWGISRVQAPAAHNRGLTGSGVKVAVLDTGISTHPDLNIRGGASFVPGEPSTQDGNGHGTHVAGTIAALNNSIGVLGVAPSAELYAVKVLGADGRGAISSIAQGLEWAGNNGMHVANLSLGSPSPSATLEQAVNSATSRGVLVVAASGNSGASSISYPARYANAMAVGATDQNNNRASFSQYGPGLDIVAPGVNVQSTYPGSTYASLNGTSMATPHVAGAAALVKQKNPSWSNVQIRNHLKNTATSLGSTNLYGSGLVNAEAATR

SEQ ID NO: 57931 - protein, 269 aa, Unidentified
AQSVPWGISRVQAPAAHNRRLTGRGVKVAVLDTGISTHPDLNIRGGASFVPGEPSTQDGNGHGTHVAGTIAALNNGIGVLGVAPSAELYAVKVLGASGSGSVSSIAQGLEWAGNNSMHVANLSLGSESPSATLEQAVNSATSRGVLVVAASGNSGAGSISYPARYANAMAVGATDQNNNRADFSQYGAGLDIVAPGVNVQSTYPGSTYASLNGTSMATPHVAGAAALVKQKNPSWSNVQIRNHLKNTATSLGSTNLYGSGLVNAEAATR

SEQ ID NO: 57932 - protein, 269 aa, Unidentified
AQSVPWGISRVQAPAAHNRRLTGSGVKVAVLDTGISTHPDLNIRGGASFVPGEPSTQDGNGHGTHVAGTIAALNNDIGVLGVAPSAELYAVKVLGASGSGSVSSIAQGLEWAGNNSMHVANLSLGSESPSATLEQAVNSATSRGVLVVAASGNSGAGSISYPARYANAMAVGATDQNNNRADFSQYGAGLDIVAPGVNVQSTYPGSTYASLNGTSMATPHVAGAAALVKQKNPSWSNVQIRDHLKNTATSLGSTNLYGSGLVNAEAATR

SEQ ID NO: 57933 - protein, 269 aa, Unidentified
AQSVPWGISRVQAPAAHNRGLTGSGVKVAVLDTGISTHPDLNIRGGASFVPGEPSTQDGNGHGTHVAGTIAALNNSIGVLGVAPSAELYAVKVLGADGRGAISSIAQGLEWAGNNGMHVANLSLGSPSPSATLEQAVNSATSRGVLVVAASGNSGASSISYPARYANAMAVGATDQNNNRASFSQYGAGLDIVAPGVNVQSTYPGSTYASENGTSMATPHVAGAAALVKQKNPSWSNVQIRNHLKNTATSLGSTNLYGSGLVNAEAATR

SEQ ID NO: 57934 - protein, 269 aa, Unidentified
AQSVPWGISRVQAPAAHNRGLTGSGVKVAVLDTGISTHPDLNIRGGASFVPGEPSTQDGNGHGTHVAGTIAALNNSIGVLGVAPSAELYAVKVLGADGRGAISSIAQGLEWAGNNGMHVANLSLGSPSPSATLEQAVNSATSRGVLVVAASGNSGASSISYPARYANAMAVGATDQNNNRASFSQYGAGLDIVAPGVNVQSTYPGSTYASLNGTSMATPHVAGAAALVKQKNPSWSNVQIRNALKNTATSLGSTNLYGSGLVNAEAATR

SEQ ID NO: 57935 - protein, 269 aa, Unidentified
AQSVPWGISRVQAPAAHNRGLTGFGVKVAVLDTGISTHPDLNIRGGASFVPGEPSTQDGNGHGTHVAGTIAALNNNIGVLGVAPSAELYAVKVLGASGSGSVSSIAQGLEWAGNNRMHVANLSLGDPSPSATLEQAVNSATSRGVLVVAASGNSGAGSIDYPARYANAMAVGATDQNNNRASFSQYGAGLDIVAPGVNVQSTYPGSTYASENGTSMATPHVAGAAALVKQKNPSWSNVQIRNHLKNTATSLGSTNLYGSGLVNAEAATR

SEQ ID NO: 57936 - protein, 269 aa, Unidentified
AQSVPWGISRVQAPAAHNRGLTGSGVKVAVLDTGISTHPDLNIRGGASFVPGEPSTQDGNGHGTHVAGTIAALDNNIGVLGVAPRAELYAVKVLGASGSGSVSSIAQGLEWAGNNRMHVANLSLTSPSPSATLEQAVNSATSRGVLVVAASGNSGAGSISYPARYANAMAVGATDQNNNRASFSQYGAGLDIVAPGVNVLSTYPGSTYASLNGTSMATPHVAGAAALVKQKNPSWSNVQIRNHLKNTATSLGSTNLYGSGLVNAEAATR

SEQ ID NO: 57937 - protein, 269 aa, Unidentified
AQSVPWGISRVQAPAAHNRKLTGSGVKVAVLDTGISTHPDLNIRGGASFVPGEPSTQDGEGHGTHVAGTIAALNNNIGVLGVAPSAELYAVKVLGASGSGSVSSIAQGLEWAGNNGMHVANLSLGIPSPSATLEQAVNSATSRGVLVVAASGNSGAGSISYPARYANAMAVGATDQNNNRASFSQYGAGLDIVAPGVNVQSTYPGSAYASNNGTSMATPHVAGAAALVKQKNPSWSNVQIRNHLKNTATSLGSTNLYGSGLVNAEAATR

SEQ ID NO: 57938 - protein, 269 aa, Unidentified
AQSVPWGISRVQAPAAHNRRLTGRGVKVAVLDTGISTHPDLNIRGGASFVPGEPSTQDGNGHGTHVAGTIAALNNDIGVLGVAPSAELYAVKVLGASGSGSVSSIAQGLEWAGNNDMHVANLSLGSPSPSATLEQAVNSATSRGVLVVAASGNSGADSISYPARYANAMAVGATDQNNNRADFSQYGAGLDIVAPGVNVQSTYPGSTYASLNGTSMATPHVAGAAALVKQKNPSWSNVQIRNHLKNTATSLGSTNLYGSGLVNAEAATR

SEQ ID NO: 57939 - protein, 269 aa, Unidentified
AQSVPWGISRVHAPAAHNRGLTGSGVKVAVLDTGISTHPDLNIRGGASFVPGEPSTQDGHGHGTHVAGTIAALQNSIGVLGVAPSAELYAVKVLGASGSGAISSIAQGLEWAGNNGMHVANLSLGSPSPSATLEQAVNSATSRGVLVVAASGNSGADSISYPARYANAMAVGATDQNNNRASFSQYGAGLDIVAPGVNVQSTYPGSTYASLNGTSMATPHVAGAAALVKQKNPSWSNVQIRNHLKNTATSLGSTNLYGSGLVNAEAATR

SEQ ID NO: 57940 - protein, 269 aa, Unidentified
AQSVPWGISRVQAPAAHNRGLAGRGVKVAVLDSGISTHPDLNIRGGASFVPGEPSTQDGNGHGTHVAGTIAALNNSIGVLGVAPSAELYAVKVLGASGSGSVSSIAQGLEWAGNNRMHVANLSLGSPSPSATLEQAVNSATSRGVLVVAASGNSGEGSIDYPARYANAMAVGATDQNNNRASFSQYGAGLDIVAPGVNVQSTYPGSTYASLNGTSMATPHVAGAAALVKQKNPSWSNVQIRNHLKNTATSLGSTNLYGSGLVNAEAATR

SEQ ID NO: 57941 - protein, 269 aa, Unidentified
AQSVPWGISRVQAPAAHNRGLLGFGVKVAVLDTGISTHPDLNIRGGASFVPGEPSTQDGNGHGTHVAGTIAALNNNIGVLGVAPSAELYAVKVLGASGSGSVSSIAQGLEWAGNNGMHVANLSLGDPSPSATLEQAVNSATSRGVLVVAASGNSGAGSISYPARYANAMAVGATDQNNNRASFSQYGAGLDIVAPGVNVQSTYPGSAYASENGTSMATPHVAGAAALVKQKNPSWSNVQIRNHLKNTATSLGSTNLYGSGLVNAEAATR

SEQ ID NO: 57942 - protein, 269 aa, Unidentified
AQSVPWGISRVQAPAAHNRGLLGSGVKVAVLDSGISTHPDLNIRGGASFVPGEPSTQDGNGHGTHVAGTIAALNNSIGVLGVAPSAELYAVKVLGASGSGSLSSIAQGLEWAGLNGMHVANLSLGSPSPSATLEQAVNSATSRGVLVVAASGNSGAGDISYPARYANAMAVGATDQNNNKASFSQYGAGLDIVAPGVNVQSTYPGSTYASLNGTSMATPHVAGAAALVKQKNPSWSNVQIRNHLKNTATSLGSTNLYGSGLVNAEAATR

SEQ ID NO: 57943 - protein, 269 aa, Unidentified
AQSVPWGISRVQAPAAHNRGLAGRGVKVAVLDSGISTHPDLNIRGGASFVPGEPSTQDGNGHGTHVAGTIAALNNSIGVLGVAPSAELYAVKVLGASGSGSVSSIAQGLEWAGLNGMHVANLSLGSPSPSATLEQAVNSATSRGVLVVAASGNSGEGSISYPARYANAMAVGATDQNNNRADFSQYGAGLDIVAPGVNVQSTYPGSTYASLNGTSMATPHVAGAAALVKQKNPSWSNVQIRNHLKNTATSLGSTNLYGSGLVNAEAATR

SEQ ID NO: 57944 - protein, 269 aa, Unidentified
AQSVPWGISRVQAPAAHNRGLTGSGVKVAVLDTGISTHPDLNIRGGASFVPGEPSTQDGEGHGTHVAGTIAALNNGIGVLGVAPSAELYAVKVLGASGSGSVSSIAQGLEWAGNNSMHVANLSLGSPSPSATLEQAVNSATSRGVLVVAASGNSGADSISYPARYANAMAVGATDQNNNRASFSQYGAGLDIVAPGVNVQSTYPGSTYASLNGTSMATPHVAGAAALVKQKNPSWSNVRIRDHLKNTATSLGSTNLYGSGLVNAEAATR

SEQ ID NO: 57945 - protein, 269 aa, Unidentified
AQSVPWGISRVQAPAAHNRGLTGSGVKVAVLDTGISTHPDLNIRGGASFVPGEPSTQDGNGHGTHVAGTIAALNNSIGVLGVAPSAELYAVKVLGASGGGAISSIAQGLEWAGNNGMHVANLSLGSPSPSATLEQAVNSATSRGVLVVAASGNSGAGSISYPARYANAMAVGATDQNNNRASFSQYGAGLDIVAPGVNVQSTYPGSTYASLNGTSMATPHVAGAAVLVKQKNPSWSNVRIRNHLKNTATSLGSTNLYGSGLVNALAATR

SEQ ID NO: 57946 - protein, 269 aa, Unidentified
AQSVPWGISRVQAPAAHNRGLQGSGVKVAVLDTGISTHPDLNIRGGASFVPGEPSTQDGNGHGTHVAGTIAALNNSIGVLGVAPSAELYAVKVLGASGNGNLSSIAQGLEWAGNNGMHVANLSLGSPSPSATLEQAVNSATSRGVLVVAASGNSGAGSISYPARYANAMAVGATDQNNNRASFSQYGAGLDIVAPGVNVQSTYPGSTYASLNGTSMATPHVAGAAVLVKQKNPSWSNVRIRNHLKNTATSLGSTNLYGSGLVNAEAATR

SEQ ID NO: 57947 - protein, 269 aa, Unidentified
AQSVPWGISRVQAPAAHNRKLLGSGVKVAVLDTGISTHPDLNIRGGASFVPGEPSTQDGNGHGTHVAGTIAALNNNIGVLGVAPSAELYAVKVLGASGSGSVSSIAQGLEWAGNNRMHVANLSLGSPSPSATLEQAVNSATSRGVLVVAASGNSGAGSISYPARYANAMAVGATDQNNNRASFSQYGAGLDIVAPGVNVQSTYPGSAYASENGTSMATPHVAGAAALVKQKNPSWSNVQIRNHLKNTATSLGSTNLYGSGLVNAEAATR

SEQ ID NO: 57948 - protein, 270 aa, Synthetic construct
AQSVPWGISRVQAPAAHNRGLTGSGVKVAVLDTGIDSTHPDLNIRGGASFVPGEPSTQDGNGHGTHVAGTIAALNNSIGVLGVAPSAELYAVKVLNASGSGSYSSIAQGLEWAGNNGMDVANLSLGSPSPSATLEQAVNSATSRGVLVVAASGNSGAGSISYPARYANAMAVGATDQNNNRASFSQYGPELDIVAPGVNVQSTYPGSTYASLNGTSMATPHVAGAAALVLQKNPSWSNVQIRNHLKNTATSLGSTNLYGSGLVNAEAATR

SEQ ID NO: 57949 - protein, 269 aa, Bacillus lentus
AQAVPWGIRRVQAPAAHNLGLTGSGVKVAVLDTGISTHPDLNIRGGASFVPGEPSTQDGDGHGTHVAGTIAALNNSIGVLGVAPSAELYAVKVLGASGSGSVSSIAQGLEWAGNNGMHVANLSLGSPSPSATLEQAVNSATSRGVLVVAASGNSGAGSISYPARYANAMAVGATDQNNNRASFSQYGAGLDIVAPGVNVQSTYPGSTYASLNGTSMATPHVAGAAALVKQKNPSWSNVRIRNHLKNTATSLGDTNLYGSGLVNAEAATR

SEQ ID NO: 57950 - protein, 269 aa, Unidentified
AQSVPWGISRVQAPAAHNRGLTGSGVKVAVLDTGISTHPDLNIRGGASFVPGEPSTQDGNGHGTHVAGTIAALNNDIGVLGVAPSAELYAVKVLGASGSGSVSSIAQGLEWAGNNSMHVANLSLGSESPSATLEQAVNSATSRGVLVVAASGNSGADSISYPARYANAMAVGATDQNNNRASFSQYGAGLDIVAPGVNVQSTYPGSTYASLNGTSMATPHVAGAAALVKQKNPSWSNVRIRNRLKNTATSLGSTNLYGSGLVNAEAATR

SEQ ID NO: 57951 - protein, 269 aa, Unidentified
AQSVPWGISRVQAPAAHNRRLTGSGVKVAVLDTGISTHPDLRIRGGASFVPGEPSTQDGNGHGTHVAGTIAALNNSIGVLGVAPSAELYAVKVLAASGQGSVSSIAQGLEWAGLNGMHVANLSLGAPSPSATLEQAVNSATSRGVLVVAASGNSGAGSISYPARYANAMAVGATDQNNNRASFSQYGAGLDIVAPGVNVQSTYPGSTYASLNGTSMATPHVAGAAALVKQKNPSWSNVQIRNHLKNTATSLGSTNLYGSGLVNAEAATR

SEQ ID NO: 57952 - protein, 269 aa, Unidentified
AQSVPWGISRVQAPAAHNRGLQGSGVKVAVLDTGISTHPDLNIRGGASFVPGEPSTQDGNGHGTHVAGTIAALNNSIGVLGVAPSAELYAVKVLGASGNGNISSIAQGLEWAGNNGMHVANLSLGSPSPSATLEQAVNSATSRGVLVVAASGNSGAGSISYPARYANAMAVGATDQNNNRASFSQYGAGLDIVAPGVNVQSTYPGSTYASLNGTSMATPHVAGAAMLVKQKNPSWSNVSIRNHLKNTATSLGSTNLYGSGLVNAEAATR

SEQ ID NO: 57953 - protein, 269 aa, Unidentified
AQSVPWGISRVQAPAAHNRGLQGSGVKVAVLDTGISTHPDLNIRGGASFVPGEPSTQDGNGHGTHVAGTIAALNNSIGVLGVAPSAELYAVKVLGASGGGAISSIAQGLEWAGNNGMHVANLSLGSPSPSATLEQAVNSATSRGVLVVAASGNSGAGSISYPARYANAMAVGATDQNNNRASFSQYGAGLDIVAPGVNVQSTYPGSTYASLNGTSMATPHVAGAATLVKQKNPSWSNVRIRNHLKNTATSLGSTNLYGSGLVNAEAATR

SEQ ID NO: 57954 - protein, 269 aa, Unidentified
AQSVPWGISRVQAPAAHRRRLTGRGVKVAVLDTGISTHPDLNIRGGASFVPGEPSTQDGNGHGTHVAGTIAALDNSIGVLGVAPSAELYAVKVLGASGSGSVSSIAQGLEWAGANGMHVANLSLGSPSPSATLEQAVNSATSRGVLVVAASGNSGAGSISYPARYANAMAVGATDQNNNRASFSQYGAGLDIVAPGVNVQSTYPGSTYASLNGTSMATPHVAGAAALVKQKNPSWSNVQIRNRLKNTATSLGSTNLYGSGLVNAEAATR

SEQ ID NO: 57955 - protein, 269 aa, Unidentified
AQSVPWGISRVQAPAAHNRGLLGSGVKVAVLDTGISTHPDLNIRGGASFVPGEPSTQDGNGHGTHVAGTIAALNNNIGVLGVAPSAELYAVKVLGASGSGSVSSIAQGLEWAGNNGMHVANLSLGDPSPSATLEQAVNSATSRGVLVVAASGNSGAGSISYPARYANAMAVGATDQNNNRASFSQYGAGLDIVAPGVNVQSTYPGSAYASENGTSMATPHVAGAAALVKQKNPSWSNVQIRNHLKNTATSLGSTNLYGSGLVNAEDATR

SEQ ID NO: 57956 - protein, 269 aa, Unidentified
AQSVPWGISRVQAPASHNRGLAGSGVKVAVLDTGISTHPDLNIRGGASFVPGEPSTQDGNGHGTHVAGTIAALNNSIGVLGVAPSAELYAVKVLGASGGGAISSIAQGLEWAGNNGMHVANLSLGSPSPSATLEQAVNSATSRGVIVVAASGNSGAGSISYPARYANAMAVGATDQNNNRASFSQYGAGLDIVAPGVNVQSTYPGSTYASLNGTSMATPHVAGAAALVKQKNPSWSNVQIRNHLKNTATSLGSTNLYGSGLVNAEAATR

SEQ ID NO: 57957 - protein, 269 aa, Unidentified
AQSVPWGISRVQAPAAHNRRLTGRGVKVAVLDTGISTHPDLNIRGGASFVPGEPSTQDGNGHGTHVAGTIAALNNNIGVLGVAPSAELYAVKVLSASGNGSVSSIANGLEWAGNNGMHVANLSLGSPSPSATLEQAVNSATSRGVLVVAASGNSGAGSISYPARYANAMAVGATDQNNNRASFSQYGAGLDIVAPGVNVQSTYPGSTYASLNGTSMATPHVAGAAALVKQKNPSWSNVQIRNHLKNTATSLGSTNLYGSGLVNAEAATR

SEQ ID NO: 57958 - protein, 269 aa, Unidentified
AQSVPWGISRVQAPAAHRRGLTGRGVKVAVLDTGISTHPDLNIRGGASFVPGEPSTQDGNGHGTHVAGTIAALDNSIGVLGVAPSAELYAVKVLGASGSGSVSSIAQGLEWAGNNGMHVANLSLGSPSPSATLEQAVNSATSRGVLVVAASGNSGAGSISYPARYANAMAVGATDQDNNRASFSQYGAGLDIVAPGVNVQSTYPGSAYASLNGTSMATPHVAGAAALVKQKNPSWSRVQIRNHLKNTATSLGSTNLYGSGLVNAEAATR

SEQ ID NO: 57959 - protein, 269 aa, Unidentified
AQSVPWGISRVQAPAAHNRKLTGSGVKVAVLDTGISTHPDLNIRGGASFVPGEPSTQDGNGHGTHVAGTIAALNNNIGVLGVAPSAELYAVKVLGASGDGSVSSIAQGLEWAGNNGMHVANLSLGLPSPSATLEQAVNSATSRGVLVVAASGNSGAGSISYPARYANAMAVGATDQNNNRASFSQYGAGLDIVAPGVNVQSTYPGSTYASLNGTSMATPHVAGAAALVKQKNPRWSNVQIRNHLKNTATSLGSTNLYGSGLVNALAATR

SEQ ID NO: 57960 - protein, 269 aa, Unidentified
AQSVPWGISRVQAPAAHNRRLTGSGVKVAVLDTGISTHPDLNIRGGASFVPGEPSTQDGNGHGTHVAGTIAALNNGIGVLGVAPSAELYAVKVLGASGSGSVSSIAQGLEWAGNNDMHVANLSLGSESPSATLEQAVNSATSRGVLVVAASGNSGAGSISYPARYANAMAVGATDQNNNRADFSQYGAGLDIVAPGVNVQSTYPGSTYASLNGTSMATPHVAGAAALVKQKNPSWSNVQIRDHLKNTATSLGSTNLYGSGLVNAEAATR

SEQ ID NO: 57961 - protein, 269 aa, Unidentified
AQSVPWGISRVQAPAAHNRGLTGSGVKVAVLDTGISTHPDLNIRGGASFVPGEPSTQDGNGHGTHVAGTIAALNNSIGVLGVAPSAELYAVKVLGASGAGSLSSIAQGLEWAGNNGMHVANLSLGSPSPSATLEQAVNSATSRGVLVVAASGNSGEGSISYPARYANAMAVGATDQNNNHADFSQYGAGLDIVAPGVNVQSTYPGSTYASLNGTSMATPHVAGAAALVKQKNPSWSNVQIRNHLKNTATSLGSTNLYGSGLVNAFAATR

SEQ ID NO: 57962 - protein, 269 aa, Unidentified
AQSVPWGISRVQAPAAHNRRLWGRGVKVAVLDTGISTHPDLNIRGGASFVPGEPSTQDGNGHGTHVAGTIAALNNSIGVLGVAPSAELYAVKVLGASGAGSVSSIAQGLEWAGLNGMHVANLSLGSPSPSATLEQAVNSATSRGVLVVAASGNSGAGSISYPARYANAMAVGATDQNNNRASFSQYGAGLDIVAPGVNVQSTYPQSTYASLNGTSMATPHVAGAAALVKQKNPSWSNVQIRNHLKNTATSLGSTNLYGSGLVNAEAATR

SEQ ID NO: 57963 - protein, 269 aa, Unidentified
AQSVPWGISRVQAPAAHNRGLYGSGVKVAVLDTGISTHPDLNIRGGASFVPGEPSTQDGNGHGTHVAGTIAALNNSIGVLGVAPSAELYAVKVLGASGNGAISSIAQGLEWAGNNGMHVANLSLGSPSPSATLEQAVNSATSRGVLVVAASGNSGAGSISYPARYANAMAVGATDQNNNRASFSQYGAGLDIVAPGVNVQSTYPGSTYASLNGTSMATPHVAGAALLVKQKNPSWSNVSIRNHLKNTATSLGSTNLYGSGLVNAEAATR

SEQ ID NO: 57964 - protein, 269 aa, Unidentified
AQSVPWGISRVQAPAAHNRGLYGSGVKVAVLDTGISTHPDLNIRGGASFVPGEPSTQDGNGHGTHVAGTIAALNNSIGVLGVAPSAELYAVKVLGASGTGAISSIAQGLEWAGNNGMHVANLSLGSPSPSATLEQAVNSATSRGVLVVAASGNSGAGSISYPARYANAMAVGATDQNNNRASFSQYGAGLDIVAPGVNVQSTYPGSTYASLNGTSMATPHVAGAALLVKQKNPSWSNVRIRNHLKNTATSLGSTNLYGSGLVNAEAATR

SEQ ID NO: 57965 - protein, 269 aa, Unidentified
AQSVPWGISRVQAPAAHNRRLAGRGVKVAVLDTGISTHPDLNITGGASFVPGEPSTQDGNGHGTHVAGTIAALNNSIGVLGVAPSAELYAVKVLGASGAGSVSSIAQGLEWAGNNGMHVANLSLGSPSPSATLEQAVNSATSRGVLVVAASGNSGAGSISYPARYANAMAVGATDQNNNRASFSQYGAGLDIVAPGVNVQSTYPGSAYASLNGTSMATPHVAGAAALVKQKNPSWSNVQIRNHLKNTATSLGSTNLYGSGLVNAEAATR

SEQ ID NO: 57966 - protein, 269 aa, Unidentified
AQSVPWGISRVQAPAAHNRGLLGSGVKVAVLDTGISTHPDLNIRGGASFVPGEPSTQDGNGHGTHVAGTIAALNNNIGVLGVAPSAELYAVKVLGASGSGSVSSIAQGLEWAGNNRMHVANLSLGSPSPSATLEQAVNSATSRGVLVVAASGNSGAGSIDYPARYANAMAVGATDQNNNRASFSQYGAGLDIVAPGVNVQSTYPGSAYASENGTSMATPHVAGAAALVKQKNPSWSNVQIRNHLKNTATSLGSTNLYGSGLVNAEAATR

SEQ ID NO: 57967 - protein, 269 aa, Unidentified
AQSVPWGISRVQAPAAHNRRLTGSGVKVAVLDTGISTHPDLNIRGGASFVPGEPSTQDGNGHGTHVAGTIAALNNSIGVLGVAPSAELYAVKVLGASGGGGISSIAQGLEWAGNNGMHVANLSLGSPSPSATLEQAVNSATSRGVLVVAASGNSGAGSISYPARYANAMAVGATDQNNNRASFSQYGAGLDIVAPGVNVQSTYPGSTYASLNGTSMATPHVAGAAVLVKQKNPSWSNVRIRNHLKNTATSLGSTNLYGSGLVNAEAATR

SEQ ID NO: 57968 - protein, 269 aa, Unidentified
AQSVPWGISRVQAPAAHNRGLKGSGVKVAVLDTGISTHPDLNIRGGASFVPGEPSTQDGNGHGTHVAGTIAALNNSIGVLGVAPSAELYAVKVLGASGNGNLSSIAQGLEWAGNNGMHVANLSLGSPSPSATLEQAVNSATSRGVLVVAASGNSGAGSISYPARYANAMAVGATDQNNNRASFSQYGAGLDIVAPGVNVQSTYPGSTYASLNGTSMATPHVAGAALLVKQKNPSWSNVRIRNHLKNTATSLGSTNLYGSGLVNAEAATR

SEQ ID NO: 57969 - protein, 269 aa, Unidentified
AQSVPWGISRVQAPAAHNRGLYGSGVKVAVLDTGISTHPDLNIRGGASFVPGEPSTQDGNGHGTHVAGTIAALNNSIGVLGVAPSAELYAVKVLGASGNGNISSIAQGLEWAGNNGMHVANLSLGSPSPSATLEQAVNSATSRGVLVVAASGNSGAGSISYPARYANAMAVGATDQNNNRASFSQYGAGLDIVAPGVNVQSTYPGSTYASLNGTSMATPHVAGAAVLVKQKNPSWSNVWIRNHLKNTATSLGSTNLYGSGLVNAEAATR

SEQ ID NO: 57970 - protein, 269 aa, Unidentified
AQSVPWGISRVQAPAAHNRGLTGSGVKVAVLDTGISTHPDLNIRGGASFVPGEPSTQDGNGHGTHVAGTIAALNNNIGVLGVAPSAELYAVKVLAASGGGSVSSIANGLEWAGNNGMHVANLSLGAPSPSATLEQAVNSATSRGVLVVAASGNSGAGSISYPARYANAMAVGATDQNNNRADFSQYGAGLDIVAPGVNVQSTYPGSTYASLNGTSMATPHVAGAAALVKQKNPSWSNVQIRNHLKNTATSLGSTNLYGSGLVNAEAATR

SEQ ID NO: 57971 - protein, 269 aa, Unidentified
AQSVPWGISRVQAPAAHNRGLTGSGVKVAVLDTGISTHPDLRIRGGASFVPGEPSTQDGEGHGTHVAGTIAALNNNIGVLGVAPSAELYAVKVLGASGDGSVSSIAQGLEWAGNNGMHVANLSLGLPSPSATLEQAVNSATSRGVLVVAASGNSGAGSISYPARYANAMAVGATDQNNNRASFSQYGAGLDIVAPGVNVQSTYPGSTYASLNGTSMATPHVAGAAALVKQKNPRWSNVQIRNHLKNTATSLGSTNLYGSGLVNAEAATR

SEQ ID NO: 57972 - protein, 269 aa, Unidentified
AQSVPWGISRVQAPAAHNRGLAGSGVKVAVLDTGISTHPDLNIRGGASFVPGEPSTQDGNGHGTHVAGTIAALNNSIGVLGVAPSAELYAVKVLGASGTGNISSIAQGLEWAGNNGMHVANLSLGSPSPSATLEQAVNSATSRGVLVVAASGNSGAGSISYPARYANAMAVGATDQNNNRASFSQYGAGLDIVAPGVNVQSTYPGSTYASLNGTSMATPHVAGAAMLVKQKNPSWSNVWIRNHLKNTATSLGSTNLYGSGLVNAEAATR

SEQ ID NO: 57973 - protein, 269 aa, Unidentified
AQSVPWGISRVQAPAAHNRGLYGSGVKVAVLDTGISTHPDLNIRGGASFVPGEPSTQDGNGHGTHVAGTIAALNNSIGVLGVAPSAELYAVKVLGASGAGGLSSIAQGLEWAGNNGMHVANLSLGSPSPSATLEQAVNSATSRGVLVVAASGNSGAGSISYPARYANAMAVGATDQNNNRASFSQYGAGLDIVAPGVNVQSTYPGSTYASLNGTSMATPHVAGAATLVKQKNPSWSNVRIRNHLKNTATSLGSTNLYGSGLVNAEAATR

SEQ ID NO: 57974 - protein, 269 aa, Unidentified
AQSVPWGISRVQAPAAHNRGLTGSGVKVAVLDTGISTHPDLNIRGGASFVPGEPSTQDGNGHGTHVAGTIAALNNSIGVLGVAPSAELYAVKVLGADGRGAISSIAQGLEWAGNNGMHVANLSLGSPSPAATLEQAVNSATSRGVLVVAASGNSGASSISYPARYANAMAVGATDQNNNRASFSQYGAGLDIVAPGVNVQSTYPGSTYASLNGTSMATPHVAGAAALVKQKNPSWSNVQIRNHLKNTATSLGSTNLYGSGLVNAEAATR

SEQ ID NO: 57975 - protein, 269 aa, Unidentified
AQSVPWGISRVQAPAAHNRGLTASGVKVAVLDTGISTHPDLWIRGGASFVPGEPSTQDGEGHGTHVAGTIAALNNSIGVLGVAPSAELYAVKVLGASGSGSVSSIAQGLEWAGLNRMHVANLSLGSPSPSATLEQAVNSATSRGVLVVAASGNSGAGSISYPARYANAMAVGATDQNNNRASFSQYGAGLDIVAPGVNVQSTYPGSAYASLNGTSMATPHVAGAAALVKQKNPSWSNVQIRNHLKNTATSLGSTNLYGSGLVNAEAATR

SEQ ID NO: 57976 - protein, 269 aa, Unidentified
AQSVPWGISRVQAPAAHNRGLRGSGVKVAVLDTGISTHPDLNIRGGASFVPGEPSTQDGNGHGTHVAGTIAALNNSIGVLGVAPSAELYAVKVLGASGTGAISSIAQGLEWAGNNGMHVANLSLGSPSPSATLEQAVNSATSRGVLVVAASGNSGAGSISYPARYANAMAVGATDQNNNRASFSQYGAGLDIVAPGVNVQSTYPGSTYASLNGTSMATPHVAGAAMLVKQKNPSWSNVRIRNHLKNTATSLGSTNLYGSGLVNAEAATR

SEQ ID NO: 57977 - protein, 269 aa, Unidentified
AQSVPWGISRVQAPAAHNRGLTGSGVKVAVLDTGISTHPDLNIRGGASFVPGEPSTQDGNGHGTHVAGTIAALNNSIGVLGVAPSAELYAVKVLGADGRGAISSIAQGLEWAGNNGMHVANLSLGSPSPSATLEQAVNTATSRGVLVVAASGNSGASSISYPARYANAMAVGATDQNNNRASFSQYGAGLDIVAPGVNVQSTYPGSTYASLNGTSMATPHVAGAAALVKQKNPSWSNVQIRNHLKNTATSLGSTNLYGSGLVNAEAATR

SEQ ID NO: 57978 - protein, 269 aa, Unidentified
AQSVPWGISRVQAPAAHNRGLRGSGVKVAVLDTGISTHPDLNIRGGASFVPGEPSTQDGNGHGTHVAGTIAALNNSIGVLGVAPSAELYAVKVLGASGAGNISSIAQGLEWAGNNGMHVANLSLGSPSPSATLEQAVNSATSRGVLVVAASGNSGAGSISYPARYANAMAVGATDQNNNRASFSQYGAGLDIVAPGVNVQSTYPGSTYASLNGTSMATPHVAGAAMLVKQKNPSWSNVWIRNHLKNTATSLGSTNLYGSGLVNAEAATR

SEQ ID NO: 57979 - protein, 269 aa, Unidentified
AQSVPWGISRVQAPAAHNRGLAGSGVKVAVLDTGISTHPDLNIRGGASFVPGEPSTQDGNGHGTHVAGTIAALNNSIGVLGVAPSAELYAVKVLGASGSGSVSSIAQGLEWAGLNRMHVANLSLGSPSPSATLEQAVNSATSRGVLVVAASGNSGEGSIDYPARYANAMAVGATDQNNNRADFSQYGAGLDIVAPGVNVQSTYPGSTYASLNGTSMATPHVAGAAALVKQKNPSWSNVQIRNHLKNTATSLGSTNLYGSGLVNAEAATR

SEQ ID NO: 57980 - protein, 269 aa, Unidentified
AQSVPWGISRVQAPAAHNRGLTGSGVKVAVLDTGISTHPDLNIRGGASFVPGEPSTQDGNGHGTHVAGTIAALNNNIGVLGVAPSAELYAVKVLAASGGGSVSSIANGLEWAGNNGMHVANLSLGAPSPSATLEQAVNSATSRGVLVVAASGNSGAGSISYPARYANAMAVGATDQNNNRASFSQYGAGLDIVAPGVNVQSTYPGSTYASQNGTSMATPHVAGAAALVKQKNPSWSNVQIRNHLKNTATSLGSTNLYGSGLVNAEAATR

SEQ ID NO: 57981 - protein, 269 aa, Unidentified
AQSVPWGISRVQAPAAHNRRLTGSGVKVAVLDTGISTHPDLNIRGGASFVPGEPSTQDGNGHGTHVAGTIAALNNGIGVLGVAPSAELYAVKVLGASGSGSVSSIAQGLEWAGNNSMHVANLSLGSPSPSATLEQAVNSATSRGVLVVAASGNSGADSISYPARYANAMAVGATDQNNNRADFSQYGAGLDIVAPGVNVQSTYPGSTYASLNGTSMATPHVAGAAALVKQKNPSWSNVRIRNHLKNTATSLGSTNLYGSGLVNAEAATR

SEQ ID NO: 57982 - protein, 269 aa, Unidentified
AQSVPWGISRVQAPAAHNRGLAGRGVKVAVLDTGISTHPDLNIRGGASFVPGEPSTQDGNGHGTHVAGTIAALNNSIGVLGVAPSAELYAVKVLGASGSGSVSSIAQGLEWAGLNRMHVANLSLGIPSPSATLEQAVNSATSRGVLVVAASGNSGAGSISYPARYANAMAVGATDQNNNRADFSQYGAGLDIVAPGVNVQSTYPGSTYASLNGTSMATPHVAGAAALVKQKNPSWSNVQIRNHLKNTATSLGSTNLYGSGLVNAEAATR

SEQ ID NO: 57983 - protein, 269 aa, Unidentified
AQSVPWGISRVQAPAAHNRGLAGSGVKVAVLDTGISTHPDLNIRGGASFVPGEPSTQDGNGHGTHVAGTIAALNNSIGVLGVAPSAELYAVKVLGASGGGGISSIAQGLEWAGNNGMHVANLSLGSPSPSATLEQAVNSATSRGVLVVAASGNSGAGSISYPARYANAMAVGATDQNNNRASFSQYGAGLDIVAPGVNVQSTYPGSTYASLNGTSMATPHVAGAAMLVKQKNPSWSNVRIRNHLKNTATSLGSTNLYGSGLVNAEAATR

SEQ ID NO: 57984 - protein, 269 aa, Unidentified
AQSVPWGISRVQAPAAHNRGLKGSGVKVAVLDTGISTHPDLNIRGGASFVPGEPSTQDGNGHGTHVAGTIAALNNSIGVLGVAPSAELYAVKVLGASGGGGISSIAQGLEWAGNNGMHVANLSLGSPSPSATLEQAVNSATSRGVLVVAASGNSGAGSISYPARYANAMAVGATDQNNNRASFSQYGAGLDIVAPGVNVQSTYPGSTYASLNGTSMATPHVAGAALLVKQKNPSWSNVRIRNHLKNTATSLGSTNLYGSGLVNAEAATR

SEQ ID NO: 57985 - protein, 269 aa, Unidentified
AQSVPWGISRVQAPAAHNRGLKGSGVKVAVLDTGISTHPDLNIRGGASFVPGEPSTQDGNGHGTHVAGTIAALNNSIGVLGVAPSAELYAVKVLGASGTGAISSIAQGLEWAGNNGMHVANLSLGSPSPSATLEQAVNSATSRGVLVVAASGNSGAGSISYPARYANAMAVGATDQNNNRASFSQYGAGLDIVAPGVNVQSTYPGSTYASLNGTSMATPHVAGAATLVKQKNPSWSNVWIRNHLKNTATSLGSTNLYGSGLVNAEAATR

SEQ ID NO: 57986 - protein, 269 aa, Unidentified
AQSVPWGISRVQAPAAHNRGLTGRGVKVAVLDTGISTHPDLNIRGGASFVPGEPSTQDGNGHGTHVAGTIAALDNNIGVLGVAPDAELYAVKVLGASGSGSVSSIAQGLEWAGNNRMHVANLSLGSPSPSATLEQAVNSATSRGVLVVAASGNSGAGSISYPARYANAMAVGATDQNNNRASFSQYGAGLDIVAPGVNVQSTWPGSTYASLNGTSSATPHVAGAAALVKQKNPSWSNVQIRNRLKNTATSLGSTNLYGSGLVNAEAATR

SEQ ID NO: 57987 - protein, 269 aa, Unidentified
AQSVPWGISRVQAPASHNRGLAGSGVKVAVLDTGISTHPDLNIRGGASFVPGEPSTQDGNGHGTHVAGTIAALNNSIGVLGVAPSAELYAVKVLGASGSGGLSSIAQGLEWAGNNGMHVANLSLGNPSPSATLEQAVNSATSRGVIVVAASGNSGAGSISYPARYANAMAVGATDQNNNRASFSQYGAGLDIVAPGVNVQSTYPGSTYASLNGTSMATPHVAGAAALVKQKNPSWSNVQIRNHLKNTATSLGSTNLYGSGLVNAEAATR

SEQ ID NO: 57988 - protein, 269 aa, Unidentified
AQSVPWGISRVQAPAAHNRKLLGSGVKVAVLDTGISTHPDLNIRGGASFVPGEPSTQDGNGHGTHVAGTIAALNNSIGVLGVAPSAELYAVKVLGASGSGSVSSIAQGLEWAGNNRMHVANLSLGDPSPSATLEQAVNSATSRGVLVVAASGNSGAGSISYPARYANAMAVGATDQNNNRASFSQYGAGLDIVAPGVNVQSTYPGSAYASENGTSMATPHVAGAAALVKQKNPSWSNVQIRNHLKNTATSLGSTNLYGSGLVNAEAATR

SEQ ID NO: 57989 - protein, 269 aa, Unidentified
AQSVPWGISRVQAPAAHNRKLTGFGVKVAVLDTGISTHPDLNIRGGASFVPGEPSTQDGNGHGTHVAGTIAALNNNIGVLGVAPSAELYAVKVLGASGSGSVSSIAQGLEWAGNNGMHVANLSLGDPSPSATLEQAVNSATSRGVLVVAASGNSGAGSIDYPARYANAMAVGATDQNNNRASFSQYGAGLDIVAPGVNVQSTYPGSAYASLNGTSMATPHVAGAAALVKQKNPSWSNVQIRNHLKNTATSLGSTNLYGSGLVNAEAATR

SEQ ID NO: 57990 - protein, 269 aa, Unidentified
AQSVPWGISRVQAPAAHNRGLRGSGVKVAVLDTGISTHPDLNIRGGASFVPGEPSTQDGNGHGTHVAGTIAALNNSIGVLGVAPSAELYAVKVLGASGTGAISSIAQGLEWAGNNGMHVANLSLGSPSPSATLEQAVNSATSRGVLVVAASGNSGAGSISYPARYANAMAVGATDQNNNRASFSQYGAGLDIVAPGVNVQSTYPGSTYASLNGTSMATPHVAGAAVLVKQKNPSWSNVRIRNHLKNTATSLGSTNLYGSGLVNAEAATR

SEQ ID NO: 57991 - protein, 269 aa, Unidentified
AQSVPWGISRVQAPAAHNRGLTGSGVKVAVLDTGISTHPDLNIRGGASFVPGEPSTQDGNTHGTHVAGTIAALNNSIGVLGVAPSAELYAVKVLGADGRGAISSIAQGLEWAGNNGMHVANLSLGSPSPSATLEQAVNSATSRGVLVVAASGNSGASSISYPARYANAMAVGATDQNNNRASFSQYGAGLDIVAPGVNVQSTYPGSTYASLNGTSMATPHVAGAAALVKQKNPSWSNVQIRNHLKNTATSLGSTNLYGSGLVNAEAATR

SEQ ID NO: 57992 - protein, 269 aa, Unidentified
AQSVPWGISRVQAPAAHNRGLTGSGVKVAVLDTGISTHPDLNIRGGASFVPGEPSTQDGEGHGTHVAGTIAALNNRIGVLGVAPSAELYAVKVLGASGSGSVSSIAQGLEWAGNNGMHVANLSLGSESPSATLEQAVNSATSRGVLVVAASGNSGAGSISYPARYANAMAVGATDQNNNRADFSQYGAGLDIVAPGVNVQSTYPGSTYASLNGTSMATPHVAGAAALVKQKNPSWSNVRIRDHLKNTATSLGSTNLYGSGLVNAEAATR

SEQ ID NO: 57993 - protein, 269 aa, Unidentified
AQSVPWGISRVQAPAAHNRKLTGGGVKVAVLDTGISTHPDLNIRGGASFVPGEPSTQDGEGHGTHVAGTIAALNNSIGVLGVAPSAELYAVKVLGASGNGSVSSIAQGLEWAGLNGMHVANLSLGAPSPSATLEQAVNSATSRGVLVVAASGNSGAGSISYPARYANAMAVGATDQNNNRASFSQYGAGLDIVAPGVNVQSTYPGSTYASLNGTSMATPHVAGAAALVKQKNPSWSNVQIRNHLKNTATSLGSTNLYGSGLVNAEAATR

SEQ ID NO: 57994 - protein, 269 aa, Unidentified
AQSVPWGISRVQAPAAHRRGLTGRGVKVAVLDTGISTHPDLNIRGGASFVPGEPSTQDGNGHGTHVAGTIAALDNSIGVLGVAPSAELYAVKVLGASGSGSVSSIAQGLEWAGNNGMHVANLSLGSPSPSATLEQAVNSATSRGVLVVAASGNSGAGSISYPARYANAMAVGATDQDNNRASFSQYGAGLDIVAPGVNVQSTYPGSFYASLNGTSMATPHVAGAAALVKQKNPSWSRVQIRNHLKNTATSLGSTNLYGSGLVNAEAATR

SEQ ID NO: 57995 - protein, 269 aa, Unidentified
AQSVPWGISRVQAPAAHNRRLTGRGVKVAVLDTGISTHPDLNIRGGASFVPGEPSTQDGEGHGTHVAGTIAALNNDIGVLGVAPSAELYAVKVLGASGSGSVSSIAQGLEWAGNNDMHVANLSLGSPSPSATLEQAVNSATSRGVLVVAASGNSGAGSISYPARYANAMAVGATDQNNNRASFSQYGAGLDIVAPGVNVQSTYPGSTYASLNGTSMATPHVAGAAALVKQKNPSWSNVQIRNRLKNTATSLGSTNLYGSGLVNAEAATR

SEQ ID NO: 57996 - protein, 269 aa, Unidentified
AQSVPWGISRVQAPAAHNRGLRGSGVKVAVLDTGISTHPDLNIRGGASFVPGEPSTQDGNGHGTHVAGTIAALNNSIGVLGVAPSAELYAVKVLGASGNGNLSSIAQGLEWAGNNGMHVANLSLGSPSPSATLEQAVNSATSRGVLVVAASGNSGAGSISYPARYANAMAVGATDQNNNRASFSQYGAGLDIVAPGVNVQSTYPGSTYASLNGTSMATPHVAGAALLVKQKNPSWSNVSIRNHLKNTATSLGSTNLYGSGLVNAEAATR

SEQ ID NO: 57997 - protein, 269 aa, Unidentified
AQSVPWGISRVQAPAAHNRGLRGSGVKVAVLDTGISTHPDLNIRGGASFVPGEPSTQDGNGHGTHVAGTIAALNNSIGVLGVAPSAELYAVKVLGASGAGAISSIAQGLEWAGNNGMHVANLSLGSPSPSATLEQAVNSATSRGVLVVAASGNSGAGSISYPARYANAMAVGATDQNNNRASFSQYGAGLDIVAPGVNVQSTYPGSTYASLNGTSMATPHVAGAALLVKQKNPSWSNVSIRNHLKNTATSLGSTNLYGSGLVNAEAATR

SEQ ID NO: 57998 - protein, 269 aa, Unidentified
AQSVPWGISRVQAPAAHNRGLTGGGVKVAVLDTGISTHPDLNIRGGASFVPGEPSTQDGNGHGTHVAGTIAALNNNIGVLGVAPSAELYAVKVLAASGGGSVSSIAGGLEWAGNNGMHVANLSLGSPSPSATLEQAVNSATSRGVLVVAASGNSGAGSISYPARYANAMAVGATDQNNNRADFSQYGAGLDIVAPGVNVQSTYPGSTYASLNGTSMATPHVAGAAALVKQKNPSWSNVQIRNHLKNTATSLGSTNLYGSGLVNAEAATR

SEQ ID NO: 57999 - protein, 269 aa, Unidentified
AQSVPWGISRVQAPAAHNRGLTGSGVKVAVLDTGISTHPDLNIRGGASFVPGEPSTQDGNGHGTHVAGTIAALDNSIGVLGVAPSAELYAVKVLGASGAGAISSIAQGLEWAGNNGMHVANLSLGSPSPSATLEQAVNSATSRGVLVVAASGNSGAGSISYPARYANAMAVGATDQNNNRADFSQYGAGLDIVAPGVNVQSTYPGSTYASLNGTSSATPHVAGAAVLVKQKNPSWSNVRIRNHLKNTATSLGSTNLYGSGLVNAEAATR

SEQ ID NO: 58000 - protein, 269 aa, Unidentified
AQSVPWGISRVQAPAAHNRGLTGSGVKVAVLDTGISTHPDLNIRGGASFVPGEPSTQDGNGHGTHVAGTIAALDNNIGVLGVAPRAELYAVKVLGASGSGSVSSIAQGLEWAGNNRMHVANLSLGLPSPSATLEQAVNSATSRGVLVVAASGNSGAGSISYPARYANAMAVGATDQNNNRASFSQYGAGLDIVAPGVNVLSTYPGSTYASLNGTSMATPHVAGAAALVKQKNPSWSNVQIRNHLKNTATSLGSTNLYGSGLVNAEAATR

SEQ ID NO: 58001 - protein, 269 aa, Unidentified
AQSVPWGISRVQAPAAHNRGLTGSGVKVAVLDTGISTHPDLNIRGGASFVPGEPSTQDGNGHGTHVAGTIAALNNSIGVLGVAPSAELYAVKVLGADGRGAISSIAQGLEWAGNNGMHVANLSLGSPSPTATLEQAVNSATSRGVLVVAASGNSGASSISYPARYANAMAVGATDQNNNRASFSQYGAGLDIVAPGVNVQSTYPGSTYASLNGTSMATPHVAGAAALVKQKNPSWSNVQIRNHLKNTATSLGSTNLYGSGLVNAEAATR

SEQ ID NO: 58002 - protein, 269 aa, Unidentified
AQSVPWGISRVQAPAAHNRRLWGRGVKVAVLDTGISTHPDLNITGGASFVPGEPSTQDGNGHGTHVAGTIAALNNSIGVLGVAPSAELYAVKVLGASGAGSVSSIAQGLEWAGNNGMHVANLSLGSPSPSATLEQAVNSATSRGVLVVAASGNSGAGSISYPARYANAMAVGATDQNNNRASFSQYGAGLDIVAPGVNVQSTYPGSAYASLNGTSMATPHVAGAAALVKQKNPSWSNVQIRNHLKNTATSLGSTNLYGSGLVNAEAATR

SEQ ID NO: 58003 - protein, 269 aa, Unidentified
AQVVPWGVSRVQAPAAHNRGLTGSGVKVAVLDTGISTHEDLNIRGGASFVPGEPSTQDGNGHGTHVAGTIAALDNSIGVLGVAPSAELYAVKVLGASGSGSVSSIAQGLEWAGNNRMHVANLSLGRPSPSATLEQAVNSATSRGVLVVAASGNSGAGSISYPARYANAMAVGATDQNNNRASFSQYGAGLDIVAPGVNVQSTYPGSTYASLNGTSMATPHVAGAAALVKQKNPSWSNVQIRNHLKNTATSLGSTNLYGSGLVNAEAATR

SEQ ID NO: 58004 - protein, 269 aa, Unidentified
AQSVPWGISRVQAPAAHNRGLTGRGVKVAVLDTGISTHPDLNIRGGASFVPGEPSTQDGNGHGTHVAGTIAALNNGIGVLGVAPSAELYAVKVLGASGSGSVSSIAQGLEWAGNNSMHVANLSLGSPSPSATLEQAVNSATSRGVLVVAASGNSGADSISYPARYANAMAVGATDQNNNRADFSQYGAGLDIVAPGVNVQSTYPGSTYASLNGTSMATPHVAGAAALVKQKNPSWSNVQIRDHLKNTATSLGSTNLYGSGLVNAEAATR

SEQ ID NO: 58005 - protein, 269 aa, Unidentified
AQSVPWGISRVQAPAAHNRGLYGSGVKVAVLDTGISTHPDLNIRGGASFVPGEPSTQDGNGHGTHVAGTIAALNNSIGVLGVAPSAELYAVKVLGASGAGNLSSIAQGLEWAGNNGMHVANLSLGSPSPSATLEQAVNSATSRGVLVVAASGNSGAGSISYPARYANAMAVGATDQNNNRASFSQYGAGLDIVAPGVNVQSTYPGSTYASLNGTSMATPHVAGAAMLVKQKNPSWSNVRIRNHLKNTATSLGSTNLYGSGLVNAEAATR

SEQ ID NO: 58006 - protein, 269 aa, Unidentified
AQSVPWGISRVQAPAAHNRGLTGGGVKVAVLDTGISTHPDLNIRGGASFVPGEPSTQDGNGHGTHVAGTIAALNNNIGVLGVAPSAELYAVKVLAASGQGSVSSIAQGLEWAGNNGMHVANLSLGAPSPSATLEQAVNSATSRGVLVVAASGNSGAGSISYPARYANAMAVGATDQNNNRADFSQYGAGLDIVAPGVNVQSTYPGSTYASLNGTSMATPHVAGAAALVKQKNPSWSNVQIRNHLKNTATSLGSTNLYGSGLVNAEAATR

SEQ ID NO: 58007 - protein, 269 aa, Unidentified
AQSVPWGISRVQAPAAHNRGLQGSGVKVAVLDTGISTHPDLNIRGGASFVPGEPSTQDGNGHGTHVAGTIAALNNSIGVLGVAPSAELYAVKVLGASGTGNISSIAQGLEWAGNNGMHVANLSLGSPSPSATLEQAVNSATSRGVLVVAASGNSGAGSISYPARYANAMAVGATDQNNNRASFSQYGAGLDIVAPGVNVQSTYPGSTYASLNGTSMATPHVAGAAMLVKQKNPSWSNVSIRNHLKNTATSLGSTNLYGSGLVNAEAATR

SEQ ID NO: 58008 - protein, 269 aa, Unidentified
AQSVPWGISRVQAPAAHNRGLQGSGVKVAVLDTGISTHPDLNIRGGASFVPGEPSTQDGNGHGTHVAGTIAALNNSIGVLGVAPSAELYAVKVLGASGGGALSSIAQGLEWAGNNGMHVANLSLGSPSPSATLEQAVNSATSRGVLVVAASGNSGAGSISYPARYANAMAVGATDQNNNRASFSQYGAGLDIVAPGVNVQSTYPGSTYASLNGTSMATPHVAGAALLVKQKNPSWSNVRIRNHLKNTATSLGSTNLYGSGLVNAEAATR

SEQ ID NO: 58009 - protein, 269 aa, Unidentified
AQSVPWGISRVQAPAAHNRGLQGSGVKVAVLDTGISTHPDLNIRGGASFVPGEPSTQDGNGHGTHVAGTIAALNNSIGVLGVAPSAELYAVKVLGASGNGAISSIAQGLEWAGNNGMHVANLSLGSPSPSATLEQAVNSATSRGVLVVAASGNSGAGSISYPARYANAMAVGATDQNNNRASFSQYGAGLDIVAPGVNVQSTYPGSTYASLNGTSMATPHVAGAATLVKQKNPSWSNVSIRNHLKNTATSLGSTNLYGSGLVNAEAATR

SEQ ID NO: 58010 - protein, 269 aa, Unidentified
AQSVPWGISRVQAPAAHNRGLTGRGVKVAVLDTGISTHPDLNIRGGASFVPGEPSTQDGNGHGTHVAGTIAALDNSIGVLGVAPSAELYAVKVLGASGSGSVSSIAQGLEWAGNNRMHVANLSLGSPSPSATLEQAVNSATSRGVLVVAASGNSGAGSINYPARYANAMAVGATDQNNNRASFSQYGAGLDIVAPGVNVLSTWPGSTYASLNGTSMATPHVAGAAALVKQKNPSWSNVQIRNHLKNTATSLGSTNLYGSGLVNAEAATR

SEQ ID NO: 58011 - protein, 269 aa, Unidentified
AQSVPWGISRVQAPAAHNRKLLGSGVKVAVLDTGISTHPDLNIRGGASFVPGEPSTQDGNGHGTHVAGTIAALNNNIGVLGVAPSAELYAVKVLGASGSGSVSSIAQGLEWAGNNGMHVANLSLGSPSPSATLEQAVNSATSRGVLVVAASGNSGAGSIDYPARYANAMAVGATDQNNNRASFSQYGAGLDIVAPGVNVQSTYPGSAYASENGTSMATPHVAGAAALVKQKNPSWSNVQIRNHLKNTATSLGSTNLYGSGLVNAEAATR

SEQ ID NO: 58012 - protein, 269 aa, Unidentified
AQSVPWGISRVQAPAAHNRKLTGSGVKVAVLDTGISTHPDLNIRGGASFVPGEPSTQDGNGHGTHVAGTIAALNNSIGVLGVAPSAELYAVKVLGASSSGSVSSIAQGLEWAGLNGMHVANLSLGSPSPSATLEQAVNSATSRGVLVVAASGNSGEGSIDYPARYANAMAVGATDQNNNRASFSQYGAGLDIVAPGVNVQSTYPGSTYASLNGTSMATPHVAGAAALVKQKNPSWSFVQIRNHLKNTATSLGSTNLYGSGLVNAEAATR

SEQ ID NO: 58013 - protein, 268 aa, Unidentified
AQSVPWGISRVQAPAAHNRRLTGSGVKVAVLDTGISTHPDLNIRGGASFVPGEPSTQDGNGHGTHVAGTIAALNNIGVLGVAPSAELYAVKVLGASGSGSVSSIAQGLEWAGNNSMHVANLSLGSPSPSATLEQAVNSATSRGVLVVAASGNSGADSISYPARYANAMAVGATDQNNNRADFSQYGAGLDIVAPGVNVQSTYPGSTYASLNGTSMATPHVAGAAALVKQKNPSWSNVQIRDRLKNTATSLGSTNLYGSGLVNAEAATR

SEQ ID NO: 58014 - protein, 268 aa, Bacillus lentus
AQAVPWGIRRVQAPAAHNLGLTGSGVKVAVLDTGISTHPDLNIRGGASFVPGEPSTQDGDGHGTHVAGTIAALNNSIGVLGVAPSAELYAVKVLGASGSGSVSSIAQGLEWAGNNGMHVANLSLGSPSSATLEQAVNSATSRGVLVVAASGNSGAGSISYPARYANAMAVGATDQNNNRASFSQYGAGLDIVAPGVNVQSTYPGSTYASLNGTSMATPHVAGAAALVKQKNPSWSNVRIRNHLKNTATSLGDTNLYGSGLVNAEAATR

SEQ ID NO: 58015 - protein, 268 aa, Unidentified
AQSVPWGISRVQAPAAHNRGLAGRGVKVAVLDTGISTHPDLNIRGGASFVPGEPSTQDGNGHGTHVAGTIAALNNSIGVLGVAPSAELYAVKVLGASGSGSVSSIAQGLEWAGNNRMHVANLSLGPSPSATLEQAVNSATSRGVLVVAASGNSGEGSIDYPARYANAMAVGATDQNNNRADFSQYGAGLDIVAPGVNVQSTYPGSTYASLNGTSMATPHVAGAAALVKQKNPSWSNVQIRNHLKNTATSLGSTNLYGSGLVNAEAATR

SEQ ID NO: 58016 - protein, 268 aa, Bacillus lentus
AQSVPWGIRRVQAPAAHNLGLTGSGVKVAVLDTGISTHPDLNIRGGASFVPGEPSTQDGDGHGTHVAGTIAALNNSIGVLGVAPSAELYAVKVLGASGSGSVSSIAQGLEWAGNNGMHVANLSLGSPSSATLEQAVNSATSRGVLVVAASGNSGAGSISYPARYANAMAVGATDQNNNRASFSQYGPGLDIVAPGVNVQSTYPGSTYASLNGTSMATPHVAGAAALVKQKNPSWSNVRIRNHLKNTATSLGDTNLYGSGLVNAEAATR

SEQ ID NO: 58017 - protein, 268 aa, Bacillus lentus
AQSVPWGIRRVQAPAAHNLGLTGSGVKVAVLDTGISTHPDLRIRGGASFVPGEPSTQDGDGHGTHVAGTIAALDNSIGVLGVAPSAELYAVKVLGASGSGSVSSIAQGLEWAGNNGMHVANLSLGSPSSATLEQAVNSATSRGVLVVAASGNSGAGSISYPARYANAMAVGATDQNNNRASFSQYGPGLDIVAPGVNVQSTYPGSTYASLNGTSMATPHVAGAAALVKQKNPSWSNVQIRNHLKNTATSLGSTNLYGSGLVNAEAATR

SEQ ID NO: 58018 - protein, 268 aa, Unidentified
AQSVPWGISRVQAPAAHNRRLTGRGVKVAVLDTGISTHPDLNIRGGASFVPGEPSTQDGEGHGTHVAGTIAALNNIGVLGVAPSAELYAVKVLGASGSGSVSSIAQGLEWAGNNDMHVANLSLGSPSPSATLEQAVNSATSRGVLVVAASGNSGAGSISYPARYANAMAVGATDQNNNRASFSQYGAGLDIVAPGVNVQSTYPGSTYASLNGTSMATPHVAGAAALVKQKNPSWSNVQIRDRLKNTATSLGSTNLYGSGLVNAEAATR

SEQ ID NO: 58019 - protein, 268 aa, Bacillus lentus
AQTVPWGIRRVQAPAAHNLGLTGSGVKVAVLDTGISTHPDLNIRGGASFVPGEPSTQDGDGHGTHVAGTIAALNNSIGVLGVAPSAELYAVKVLGASGSGSVSSIAQGLEWAGNNGMHVANLSLGSPSSATLEQAVNSATSRGVLVVAASGNSGAGSISYPARYANAMAVGATDQNNNRASFSQYGAGLDIVAPGVNVQSTYPGSTYASLNGTSMATPHVAGAAALVKQKNPSWSNVRIRNHLKNTATSLGDTNLYGSGLVNAEAATR

SEQ ID NO: 58020 - protein, 268 aa, Unidentified
AQSVPWGISRVQAPAAHNRGLTGRGVKVAVLDSGISTHPDLNIRGGASFVPGEPSTQDGNGHGTHVAGTIAALNNSIGVLGVAPSAELYAVKVLGASGSGSVSSIAQGLEWAGLNRMHVANLSLGPSPSATLEQAVNSATSRGVLVVAASGNSGEGSISYPARYANAMAVGATDQNNNRADFSQYGAGLDIVAPGVNVQSTYPGSTYASLNGTSMATPHVAGAAALVKQKNPSWSNVQIRNHLKNTATSLGSTNLYGSGLVNAEAATR

SEQ ID NO: 58021 - protein, 268 aa, Unidentified
AQSVPWGISRVQAPAAHNRRLTGSGVKVAVLDTGISTHPDLNIRGGASFVPGEPSTQDGEGHGTHVAGTIAALNNIGVLGVAPSAELYAVKVLGASGSGSVSSIAQGLEWAGNNSMHVANLSLGSPSPSATLEQAVNSATSRGVLVVAASGNSGADSISYPARYANAMAVGATDQNNNRADFSQYGAGLDIVAPGVNVQSTYPGSTYASLNGTSMATPHVAGAAALVKQKNPSWSNVQIRNRLKNTATSLGSTNLYGSGLVNAEAATR

SEQ ID NO: 58022 - protein, 268 aa, Bacillus lentus
AQAVPWGIRRVQAPAAHNLGLTGSGVKVAVLDTGISTHPDLRIRGGASFVPGEPSTQDGDGHGTHVAGTIAALDNSIGVLGVAPSAELYAVKVLGASGSGSVSSIAQGLEWAGNNGMHVANLSLGSPSSATLEQAVNSATSRGVLVVAASGNSGAGSISYPARYANAMAVGATDQNNNRASFSQYGAGLDIVAPGVNVQSTYPGSTYASLNGTSMATPHVAGAAALVKQKNPSWSNVQIRNHLKNTATSLGSTNLYGSGLVNAEAATR

SEQ ID NO: 58023 - protein, 268 aa, Unidentified
AQSVPWGISRVQAPAAHNRRLTGRGVKVAVLDTGISTHPDLNIRGGASFVPGEPSTQDGNGHGTHVAGTIAALNNIGVLGVAPSAELYAVKVLGASGSGSVSSIAQGLEWAGNNDMHVANLSLGSESPSATLEQAVNSATSRGVLVVAASGNSGAGSISYPARYANAMAVGATDQNNNRADFSQYGAGLDIVAPGVNVQSTYPGSTYASLNGTSMATPHVAGAAALVKQKNPSWSNVQIRDHLKNTATSLGSTNLYGSGLVNAEAATR

SEQ ID NO: 58024 - protein, 268 aa, Unidentified
AQSVPWGISRVQAPAAHNRRLTGRGVKVAVLDTGISTHPDLNIRGGASFVPGEPSTQDGNGHGTHVAGTIAALNNGIGVLGVAPSAELYAVKVLGASGSGSVSSIAQGLEWAGNNMHVANLSLGSPSPSATLEQAVNSATSRGVLVVAASGNSGAGSISYPARYANAMAVGATDQNNNRASFSQYGAGLDIVAPGVNVQSTYPGSTYASLNGTSMATPHVAGAAALVKQKNPSWSNVRIRDRLKNTATSLGSTNLYGSGLVNAEAATR

SEQ ID NO: 58025 - protein, 268 aa, Bacillus lentus
AQSVPWGIRRVQAPAAHNLGLTGSGVKVAVLDTGISTHPDLRIRGGASFVPGEPSTQDGDGHGTHVAGTIAALNNSIGVLGVAPSAELYAVKVLGASGSGSVSSIAQGLEWAGNNGMHVANLSLGSPSSATLEQAVNSATSRGVLVVAASGNSGAGSISYPARYANAMAVGATDQNNNRASFSQYGPGLDIVAPGVNVQSTYPGSTYASLNGTSMATPHVAGAAALVKQKNPSWSNVQIRNHLKNTATSLGSTNLYGSGLVNAEAATQ

SEQ ID NO: 58026 - protein, 268 aa, Bacillus lentus
AQAVPWGIRRVQAPAAHNLGLTGSGVKVAVLDTGISTHPDLRIRGGASFVPGEPSTQDGDGHGTHVAGTIAALNNSIGVLGVAPSAELYAVKVLGASGSGSVSSIAQGLEWAGNNGMHVANLSLGSPSSATLEQAVNSATSRGVLVVAASGNSGAGSISYPARYANAMAVGATDQNNNRASFSQYGAGLDIVAPGVNVQSTYPGSTYASLNGTSMATPHVAGAAALVKQKNPSWSNVQIRNHLKNTATSLGSTNLYGSGLVNAEAATQ

SEQ ID NO: 58027 - protein, 268 aa, Unidentified
AQSVPWGISRVQAPAAHNRGLAGSGVKVAVLDSGISTHPDLNIRGGASFVPGEPSTQDGNGHGTHVAGTIAALNNSIGVLGVAPSAELYAVKVLGASGSGSVSSIAQGLEWAGLNRMHVANLSLGPSPSATLEQAVNSATSRGVLVVAASGNSGAGSIDYPARYANAMAVGATDQNNNRADFSQYGAGLDIVAPGVNVQSTYPGSTYASLNGTSMATPHVAGAAALVKQKNPSWSNVQIRNHLKNTATSLGSTNLYGSGLVNAEAATR

SEQ ID NO: 58028 - protein, 268 aa, Bacillus lentus
AQTVPWGIRRVQAPAAHNLGLTGSGVKVAVLDTGISTHPDLRIRGGASFVPGEPSTQDGDGHGTHVAGTIAALDNSIGVLGVAPSAELYAVKVLGASGSGSVSSIAQGLEWAGNNGMHVANLSLGSPSSATLEQAVNSATSRGVLVVAASGNSGAGSISYPARYANAMAVGATDQNNNRASFSQYGAGLDIVAPGVNVQSTYPGSTYASLNGTSMATPHVAGAAALVKQKNPSWSNVQIRNHLKNTATSLGSTNLYGSGLVNAEAATR

SEQ ID NO: 58029 - protein, 268 aa, Bacillus lentus
AQTVPWGIRRVQAPAAHNLGLTGSGVKVAVLDTGISTHPDLRIRGGASFVPGEPSTQDGDGHGTHVAGTIAALNNSIGVLGVAPSAELYAVKVLGASGSGSVSSIAQGLEWAGNNGMHVANLSLGSPSSATLEQAVNSATSRGVLVVAASGNSGAGSISYPARYANAMAVGATDQNNNRASFSQYGAGLDIVAPGVNVQSTYPGSTYASLNGTSMATPHVAGAAALVKQKNPSWSNVQIRNHLKNTATSLGSTNLYGSGLVNAEAATQ

SEQ ID NO: 58030 - protein, 268 aa, Unidentified
AQSVPWGISRVQAPAAHNRGLTGRGVKVAVLDTGISTHPDLNIRGGASFVPGEPSTQDGNGHGTHVAGTIAALNNSIGVLGVAPSAELYAVKVLGASGAGAISSIAQGLEWAGNNGMHVANLSLGSPSPSATLEQAVNSATSRGVLVVAASGNSGAGSISYPARYANAMAVGATDQNNNRASFSQYGAGLDIVAPGVNVQSTYGSTYASLNGTSMATPHVAGAAVLVKQKNPSWSNVRIRNHLKNTATSLGSTNLYGSGLVNAEAATR

SEQ ID NO: 58031 - protein, 268 aa, Unidentified
QSVPWGISRVQAPAAHNRRLTGRGVKVAVLDTGISTHPDLNIRGGASFVPGEPSTQDGNGHGTHVAGTIAALNNGIGVLGVAPSAELYAVKVLGASGSGSVSSIAQGLEWAGNNDMHVANLSLGSPSPSATLEQAVNSATSRGVLVVAASGNSGADSISYPARYANAMAVGATDQNNNRADFSQYGAGLDIVAPGVNVQSTYPGSTYASLNGTSMATPHVAGAAALVKQKNPSWSNVQIRNHLKNTATSLGSTNLYGSGLVNAEAATR

SEQ ID NO: 58032 - protein, 268 aa, Unidentified
AQSVPWGISRVQAPAAHNRGLQGSGVKVAVLDTGISTHPDLNIRGGASFVPGEPSTQDGNGHGTHVAGTIAALNNSIGVLGVAPSAELYAVKVLGASGTGNISSIAQGLEWAGNNGMHVANLSLGSPSPSATLEQAVNSATSRGVLVVAASGNSGAGSISYPARYANAMAVGATDQNNNRASFSQYGAGLDIVAPGVNVQSTYPGSTYASLNGTSMATPHVAGAALLVKQKNPSWSNVRIRNHLKNTATSLGSTNLYGSGLVNAEAAT

SEQ ID NO: 58033 - protein, 268 aa, Unidentified
QSVPWGISRVQAPAAHRRGLTGRGVKVAVLDTGISTHPDLNIRGGASFVPGEPSTQDGNGHGTHVAGTIAALDNSIGVLGVAPSAELYAVKVLGASGSGSVSSIAQGLEWAGANGMHVANLSLGSPSPSATLEQAVNSATSRGVLVVAASGNSGAGSISYPARYANAMAVGATDQNNNRASFSQYGAGLDIVAPGVNVQSTYPGSAYASLNGTSMATPHVAGAAALVKQKNPSWSNVQIRNRLKNTATSLGSTNLYGSGLVNAEAATR

SEQ ID NO: 58034 - protein, 268 aa, Unidentified
QSVPWGISRVQAPAAHRRGLTGRGVKVAVLDTGISTHPDLNIRGGASFVPGEPPTQDGNGHGTHVAGTIAALNNSIGVLGVAPSAELYAVKVLGASGSGSVSSIAQGLEWAGNNGMHVANLSLTSPSPSATLEQAVNSATSRGVLVVAASGNSGAGSISYPARYANAMAVGATDQNNNRASFSQYGAGLDIVAPGVNVLSTWPGSTYASLNGTSMATPHVAGAAALVKQKNPSWSNVQIRNHLKNTATSLGSTNLYGSGLVNAEAATR

SEQ ID NO: 58035 - protein, 268 aa, Unidentified
AQSVPWGISRVQAPAAHRRRLTGRGVKVAVLDTGISTHPDLDITGGASFVPGEPSTQDGNGHGTHVAGTIAALNNSIGVLGVAPSAELYAVKVLGASGSGSVSSIAQGLEWAGNNGMHVANLSLGSPSPSATLEQAVNSATSRGVLVVAASGNSGAGSISYPARYANAMAVGATDQNNNRASFSQYGAGLDIVAPGVNVQSTYPGSTYASLNGTSMATPHVAGAAAVKQKNPSWRNVQIRNHLKNTATSLGSTNLYGSGLVNAEAATR

SEQ ID NO: 58036 - protein, 382 aa, Alkalihalobacillus clausii
MMRKKSFWLGMLTAFMLVFTMAFSDSASAAEEAKEKYLIGFNEQEAVSEFVEQVEANDEVAILSEEEEVEIELLHEFETIPVLSVELSPEDVDALELDPAISYIEEDAEVTTMAQSVPWGIERVQAPAAHNRGLTGSGVKVAVLDTGISTHPDLRIRGGASFVPGEPSTQDGNGHGTHVAGTIAALDNSIGVLGVAPSAELYAVKVLGASGSGSVSSIAQGLEWAGNNGMHVANLSLGSPSPSATLEQAVNSATSRGVLVVAASGNSGAGSISYPARYANAMAVGATDQNNNRASFSQYGAGLDIVAPGVNILSTWPGSTYASLNGTSMATPHVAGAAALVKQKNPSWSNVQIRNHLKNTATSLGDTWEYGSGLVNAEAATR

SEQ ID NO: 58037 - protein, 266 aa, Unidentified
AQSVPWGISRVQAPAAHNRGLTGSGVKVAVLDTGISTHPDLNIRGGASFVVGGSAEDVQGHHVAGTIAALNNSIGVLGVAPSAELYAVKVLGASGSGSVSSIAQGLEWAGNNGMHVANLSLGSPSPSATLEQAVNSATSRGVLVVAASGNSGAGSISYPARYANAMAVGATDQNNNRASFSQYGAGLDIVAPGVNVQSTYPGSTYASLNGTSMATPHVAGAAALVKQKNPSWSNVQIRNHLKNTATSLGSTNLYGSGLVNAEAATR

SEQ ID NO: 58038 - protein, 266 aa, Unidentified
AQSVPWGISRVQAPAAHNRGLTGSGVKVAVLDTGISTHPDLNIRGGASFVVGGSPEDVQGHHVAGTIAALNNSIGVLGVAPSAELYAVKVLGASGSGSVSSIAQGLEWAGNNGMHVANLSLGSPSPSATLEQAVNSATSRGVLVVAASGNSGAGSISYPARYANAMAVGATDQNNNRASFSQYGAGLDIVAPGVNVQSTYPGSTYASLNGTSMATPHVAGAAALVKQKNPSWSNVQIRNHLKNTATSLGSTNLYGSGLVNAEAATR

SEQ ID NO: 58039 - protein, 301 aa, Unidentified
AEEAKEKYLIGFNEQEAVSEFVEQVEANDEVAILSEEEEVEIELLHEFETIPVLSVELSPEDVDALELDPAISYIEEDAEVTTMAQSVPWGISRVQAPAAHNRGLTGSGVKVAVLDTGISTHPDLNIRGGASFVPGEPSTQDGNGHGTHVAGTIAALNNSIGVLGVAPSAELYAVKVLGASGSGSVSSIAQGLEWAGNNGMHVANLSLGSPSPSATLEQAVNSATSRGVLVVAASGNSGAGSISYPARYANAMAVGATDQNNNRASFSQYGAGLDIVAPGVNVQSTYPGCLAPGTKILTEH

SEQ ID NO: 58040 - protein, 301 aa, Unidentified
AEEAKEKYLIGFNEQEAVSEFVEQVEANDEVAILSEEEEVEIELLHEFETIPVLSVELSPEDVDALELDPAISYIEEDAEVTTMAQSVPWGISRVQAPAAHNRGLTGSGVKVAVLDTGISTHPDLNIRGGASFVPGEPSTQDGNGHGTHVAGTIAALNNSIGVLGVAPSAELYAVKVLGASGSGSVSSIAQGLEWAGNNGMHVANLSLGSPSPSATLEQAVNSATSRGVLVVAASGNSGAGSISYPARYANAMAVGATDQNNNRASFSQYGAGLDIVAPGVNVQSTYPGCLAPGTRVLTEH

SEQ ID NO: 58041 - protein, 298 aa, Unidentified
AEEAKEKYLIGFNEQEAVSEFVEQVEANDEVAILSEEEEVEIELLHEFETIPVLSVELSPEDVDALELDPAISYIEEDAEVTTMAQSVPWGISRVQAPAAHNRGLTGSGVKVAVLDTGISTHPDLNIRGGASFVPGEPSTQDGNGHGTHVAGTIAALNNSIGVLGVAPSAELYAVKVLGASGSGSVSSIAQGLEWAGNNGMHVANLSLGSPSPSATLEQAVNSATSRGVLVVAASGNSGAGSISYPARYANAMAVGATDQNNNRASFSQYGAGLDIVAPGVNVQSTYPGCVHGDTRVT

SEQ ID NO: 58042 - protein, 261 aa, Unidentified
PVTHSLIANGLVAHNSGVKVAVLDTGISTHPDLNIRGGASFVPGEPSTQDGNGHGTHVAGTIAALNNSIGVLGVAPSAELYAVKVLGASGSGSVSSIAQGLEWAGNNGMHVANLSLGSPSPSATLEQAVNSATSRGVLVVAASGNSGAGSISYPARYANAMAVGATDQNNNRASFSQYGAGLDIVAPGVNVQSTYPGSTYASLNGTSMATPHVAGAAALVKQKNPSWSNVQIRNHLKNTATSLGSTNLYGSGLVNAEAATR

SEQ ID NO: 58043 - protein, 257 aa, Unidentified
AGKNEGFAVSNSGVKVAVLDTGISTHPDLNIRGGASFVPGEPSTQDGNGHGTHVAGTIAALNNSIGVLGVAPSAELYAVKVLGASGSGSVSSIAQGLEWAGNNGMHVANLSLGSPSPSATLEQAVNSATSRGVLVVAASGNSGAGSISYPARYANAMAVGATDQNNNRASFSQYGAGLDIVAPGVNVQSTYPGSTYASLNGTSMATPHVAGAAALVKQKNPSWSNVQIRNHLKNTATSLGSTNLYGSGLVNAEAATR

SEQ ID NO: 58044 - protein, 254 aa, Unidentified
SHGLVLHNSGVKVAVLDTGISTHPDLNIRGGASFVPGEPSTQDGNGHGTHVAGTIAALNNSIGVLGVAPSAELYAVKVLGASGSGSVSSIAQGLEWAGNNGMHVANLSLGSPSPSATLEQAVNSATSRGVLVVAASGNSGAGSISYPARYANAMAVGATDQNNNRASFSQYGAGLDIVAPGVNVQSTYPGSTYASLNGTSMATPHVAGAAALVKQKNPSWSNVQIRNHLKNTATSLGSTNLYGSGLVNAEAATR

SEQ ID NO: 58045 - protein, 254 aa, Unidentified
ANGIGVHNSGVKVAVLDTGISTHPDLNIRGGASFVPGEPSTQDGNGHGTHVAGTIAALNNSIGVLGVAPSAELYAVKVLGASGSGSVSSIAQGLEWAGNNGMHVANLSLGSPSPSATLEQAVNSATSRGVLVVAASGNSGAGSISYPARYANAMAVGATDQNNNRASFSQYGAGLDIVAPGVNVQSTYPGSTYASLNGTSMATPHVAGAAALVKQKNPSWSNVQIRNHLKNTATSLGSTNLYGSGLVNAEAATR

SEQ ID NO: 58046 - protein, 217 aa, Unidentified
GEPSTQDGNGHGTHVAGTIAALNNSIGVLGVAPSAELYAVKVLGADGRGAISSIAQGLEWAGNNGMHVANLSLGSPSPSATLEQAVNSATSRGVLVVAASGNSGASSISYPARYANAMAVGATDQNNNRASFSQYGAGLDIVAPGVNVQSTYPGSTYASLNGTSMATPHVAGAAALVKQKNPSWSNVQIRNHLKNTATSLGSTNLYGSGLVNAEAAT

SEQ ID NO: 58047 - protein, 216 aa, Unidentified
AQSVPWGISRVQAPAAHNRGLTGSGVKVAVLDTGISTHPDLNIRGGASFVPGEPSTQDGNGHGTHVAGTIAALNNSIGVLGVAPSAELYAVKVLGASGSGSVSSIAQGLEWAGNNGMHVANLSLGSPSPSATLEQAVNSATSRGVLVVAASGNSGAGSISYPARYANAMAVGATDQNNNRASFSQYGAGLDIVAPGVNVQSTYPGCFAAGTLIKTP

SEQ ID NO: 58048 - protein, 214 aa, Unidentified
AQSVPWGISRVQAPAAHNRGLTGSGVKVAVLDTGISTHPDLNIRGGASFVPGEPSTQDGNGHGTHVAGTIAALNNSIGVLGVAPSAELYAVKVLGASGSGSVSSIAQGLEWAGNNGMHVANLSLGSPSPSATLEQAVNSATSRGVLVVAASGNSGAGSISYPARYANAMAVGATDQNNNRASFSQYGAGLDIVAPGVNVQSTYPGCVDGDTSVT

SEQ ID NO: 58049 - protein, 384 aa, Bacillus lentus
MMRKKSFWLGMLTAFMLVFTMAFSDSASAARAEEAKEKYLIGFNEQEAVSEFVEQVEANDEVAILSEEEEVEIELLHEFETIPVLSVELSPEDVDALELDPAISYIEEDAEVTTMAQTIPWGISRVQAPAAHNRGLTGSGVKVAVLDTGISTHPDLNIRGGASFVPGEPSTQDGNGHGTHVAGTIAALNNSIGVLGVAPSAELYAVKVLGADGRGAISSIAQGLEWAGNNGMHVANLSLGSPSPSATLEQAVNSATSRGVLVVAASGNSGASSISYPARYANAMAVGATDQNNNRASFSQYGAGLDIVAPGVNVQSTYPGSTYASLNGTSMATPHVAGVAALVKQKNPSWSNVQIRNHLKNTATGLGNTNLYGSGLVNAEAATR

SEQ ID NO: 58050 - protein, 274 aa, Bacillus licheniformis
AQTVPYGIPLIKADKVQAQGFKGANVKVAVLDTGIQASHPDLNVVGGASFVAGEAYNTDGNGHGTHVSGTVAALDNNTGVLGVAPSVSLYAVKVLNSSGSGSYSGIVSGIEWATTNGMDVINMSLGGPSGSTAMKQAVDNAYARGVVVVAAAGNNGSSGNTNTIQYPAKYDSVIAVGAVDSNSQRASFSSVGAELEVMAPGVGVYSTYPTNTYATLSGTSMASPHVAGAAALILSKHPNLSASQVRNRLSSTATYLGSSFYYGKGLINVEAAAQ

SEQ ID NO: 58051 - protein, 274 aa, Bacillus licheniformis
AQTVPYGIPLIKADKVQAQGFKGANVKVAVLDTGIQASHPDLNVVGGASFVAGEAYNTDGNGHGTHVSGTVAALDNNTGVLGVAPSVSLYAVKVLNSSGSGSYSGIVSGIEWATTNGMDVINMSLGGPSGSTAMKQAVDNAYARGVVVVAAAGNSGSSGNTNTIQYPAKYDSVIAVGAVDSNSQRAPFSSVGAELEVMAPGVGVYSTYPTNTYATLSGTSMASPHVAGAAALILSKHPNLSASQVRNRLSSTATYLGSSFYYGKGLINVEAAAQ

SEQ ID NO: 58052 - protein, 274 aa, Bacillus licheniformis
AQTVPYGIPLIKADKVQAQGFKGANVKVAVLDTGIQASHPDLNVVGGASFVAGEAYNTDGNGHGTHVSGTVAALDNNTGVLGVAPSVSLYAVKVLNSSGSGSYSGIVSGIEWATTNGMDVINMSLGGPHGSTAMKQAVDNAYARGVVVVAAAGNSGSSGNTNTIQYPAKYDSVIAVGAVDSNSQRASFSSVGAELEVMAPGVGVYSTYPTNTYATLSGTSMASPHVAGAAALILSKHPNLSASQVRNRLSSTATYLGSSFYYGKGLINVEAAAQ

SEQ ID NO: 58053 - protein, 274 aa, Bacillus licheniformis
AQTVPYGIPLIKADKVQAQGFKGANVKVAVLDTGIQASHPDLNVVGGASFVAGEAYNTDGNGHGTHVSGTVAALDNNTGVLGVAPSVSLYAVKVLNSSGSGSYSGIVSGIEWANTNGMDVINISLGGPSGSTAMKQAVDNAYARGVVVVAAAGNSGSSGNTNTIQYPAKYDSVIAVGAVDSNSQRASFSSVGAELEVMAPGAGVYSTYPTNTYATLSGTSMASPHVAGAAALILSKHPNLSASQVRNRLSSTATYLGSSFYYGKGLINVEAAAQ

SEQ ID NO: 58054 - protein, 274 aa, Synthetic construct
AQTVPYGIPLIKADKVQAQGFKGANVKVAVLDTGIQASHPDLNVVGGASFVAGEAYNTDGNGHGDHVAGTVAALDNTTGVLGVAPSVSLYAVKVLNSSGSGSYSGIVSGIEWATTNGMDVINMSLGGASGSEAMKQAVDNAYARGVVVVAAAGDSGNSGSTNTIGYPAKYDSVIAVGAVDSNSNRASFSSVGAELEVMAPGAGVYSTYPTNEYATGSGTSMASPHVAGAAALILSKHPNLSASQVRNRLSSTATYLGSSFYYGKGLINVEAAAQ

SEQ ID NO: 58055 - protein, 274 aa, Bacillus licheniformis
AQTVPYGIPLIKADKVQAQGFKGANVKVAVLDTGIQASHPDLNVVGGASFVAGEAYNTDGNGHGTHVSGTVAALDNNTGVLGVAPSVSLYAVKVLNSSGSGSYSGIVSGIEWATTNGMDVINMSLGTPSGSTAMKQAVDNAYARGVVVVAAAGNSGSSGNTNTIQYPAKYDSVIAVGAVDSNSQRASFSSVGAELEVMAPGAGVYSTYPTNTYATLSGTSMASPHVAGAAALILSKHPNLSASQVRNRLSSTATYLGPSFYYGKGLINVEAAAQ

SEQ ID NO: 58056 - protein, 274 aa, Bacillus licheniformis
AQTVPYGIPLIKADKVQAQGFKGANVKVAVLDTGIQASHPDLNVIGGASFVAGEAYNTDGNGHGTHVSGTVAALDNNTGVLGVAPSVSLYAVKVLNSSGSGSYSGIVSGIEWATTNGMDVINISNGGASGSTAMKQAVDNAYARGVVVVAAAGNSGSSGNTNTIQYPAKYDSVIAVGAVDSNSNRASFSSVGAELEVMAPGAGVYSTYPTNTYATLSGTSMASPHVAGAAALILSKHPNLSASQVRNRLSSTATYLGPSFYYGKGLINVEAAAQ

SEQ ID NO: 58057 - protein, 274 aa, Bacillus licheniformis
AQTVPYGIPLIKADKVQAQGFKGANVKVAVLDTGIQASHPDLNVVGGASFVAGEAYNTDGNGHGTHVAGTVAALDNNTGVLGVAPSVSLYAVKVLNSSGSGSYSGIVSGIEWATTNGMDVINMSLGFASGSTAMKQAVDNAYARGVVVVAAAGNSGSSGNTNTIQYPAKYDSVIAVGAVDSNSNRASFSSVGAELEVMAPGVGVYSTYPPNTYATLSGTSMASPHVAGAAALIWSKHPNLSASQVRNRLSSTATYLGPSFYYGKGLINVEAAAQ

SEQ ID NO: 58058 - protein, 274 aa, Bacillus licheniformis
AQTVPYGIPLIKADKVQAQGFKGANVKVAVLDTGIQASHPDLNVVGGASFVAGEAYNTDGNGHGTHVSGTVAALDNNTGVLGVAPSVSLYAVKVLNSSGSGSYSGIVSGIEWATTNGMDVINMSLGGPSGSTAMKQAVDNAYARGVVVVAAAGNSGSSGNTNTIQYPAKYDSVIAVGAVDSNSQRASFSSVGAELEVMAPGVGVYSTYPTNTYATLSGTSMASPHVAGAAALILSKHPNLSASQVRNRLSSTATYLGPSFYYGKGLINVEAAAQ

SEQ ID NO: 58059 - protein, 274 aa, Bacillus licheniformis
AQTVPYGIPLIKADKVQAQGFKGANVKVAVLDTGIQASHPDLNVVGGASFVAGEAYNTDGNGHGTHVSGTAAALDNNTGVLGVAPSVSLYAVKVLNSSGSGSYSGIVSGIEWATTNGMDVINMSLGGPSGSTAMKQAVDNAYARGVVVVAAAGNSGSSGNTNTIQYPAKYDSVIAVGAVDSNSQRASFSSVGAELEVMAPGVGVYSTYPTNTYATLSGTSMASPHVAGAAALILSKHPNLSASQVRNRLSSTATYLGSSFYYGKGLINVEAAAQ

SEQ ID NO: 58060 - protein, 274 aa, Bacillus licheniformis
AQTVPYGIPLIKADKVQAQGFKGANVKVAVLDTGIQASHPDLNVVGGASFVAGEAYNTDGNGHGTHVSGTVAALDNNTGVLGVAPSVSLYAVKVLNSSGSGSYSGIVSGIEWATTNGMDVINISLGGPSGSTAMKQAVDNAYARGVVVVAAAGNSGSSGNTNTIQYPAKYDSVIAVGAVDSNSQRASFSSVGAELEVMAPGAGVYSTYPPNTYATLSGTSMASPHVAGAAALILSKHPNLSASQVRNRLSSTATYLGSSFYYGKGLINVEAAAQ

SEQ ID NO: 58061 - protein, 274 aa, Bacillus licheniformis
AQTVPYGIPMIKADKVQAQGFKGANVKVAVLDTGAQASHPDLNVVGGASFVAGEAYNTDGNGHGTHVAGTVAALDNTIGVLGVAPSSSLYAVKVLNSSGSGSYSGIVSGIEWATTNGMDVINISLGGASGSTAMKQAVDNAYARGVVVVAAAGNSGSSGNTNTIGYPAKYDSVIAVGAVDSNSNRASFSSVGAELEVMAPGVGVYSTYPTNTYATLNGTSMASPHVAGAAALILSKHPNLSASQVRNRLSSTATYLGSSWYYGHGLINVEAAAQ

SEQ ID NO: 58062 - protein, 274 aa, Bacillus licheniformis
AQTVPYGIPLIKADKVQAQGFKGANVKVAVLDTGIQASHPDLNVVGGASFVAGEAYNTDGNGHGTHVSGTVAALDNNTGVLGVAPSVSLYAVKVLNSSGSGSYSGIVSGIEWANTNGMDVINMSLGTPSGSTAMKQAVDNAYARGVVVVAAAGNSGSSGNTNTIQYPAKYDSVIAVGAVDSNSQRASFSSVGAELEVMAPGAGVYSTYPTNTYATLSGTSMASPHVAGAAALILSKHPNLSASQVRNRLSSTATYLGSSFYYGKGLINVEAAAQ

SEQ ID NO: 58063 - protein, 274 aa, Synthetic construct
AQTVPYGIPLIKADKVQAQGFKGANVKVAVLDTGIQASHPDLNVVGGASFVAGEAYNTDGNGHGTHVAGTVAALDNTTGVLGVAPSVSLYAVKVLGASGSGTYSGIVSGLEWATTNGMDVINMSLGGPSGSTAMKQAVKNAYARGVVVVAAAGNSGSSGNTNTIGYPAKYDSVIAVGAVDSNSNRASFSSVGAELEVMAPGAGVYSTYPTSTYATLNGTSMASPHVAGAAALILSKHPNLSASQVRNRLSSTATYLGSSFYYGKGLINVEAAAR

SEQ ID NO: 58064 - protein, 274 aa, Bacillus licheniformis
AQTVPYGIPLIKADKVQAQGFKGANVKVAVLDTGIQASHPDLNVVGGASFVAGEAYNTDGNGHGTHVSGTVAALDNNTGVLGVAPSVSLYAVKVLNSSGSGSYSGIVSGIEWATTNGMDVINMSLGTPSGSTAMKQAVDNAYARGVVVVAAAGNSGSSGNTNTIQYPAKYDSVIAVGAVDSNSQRASFSSVGAELEVMAPGAQVYSTYPTNTYATLSGTSMASPHVAGAAALILSKHPNLSASQVRNRLSSTATYLGSSFYYGKGLINVEAAAQ

SEQ ID NO: 58065 - protein, 274 aa, Bacillus licheniformis
AQVVPYGIPLIKADKVQAQGFKGANVKVAVLDTGIQASHPDLNVVGGASFVAGEAYNTDGNGHGTHVSGTVAALDNNTGVLGVAPSVSLYAVKVLNSSGSGSYSGIVSGIEWATTNGMDVINISLGGPSGSTAMKQAVDNAYARGVVVVAAAGNSGSSGNTNTIQYPAKYDSVIAVGAVDSNSQRASFSSVGAELEVMAPGAGVYSTYPTNTYATLSGTSMASPHVAGAAALILSKHPNLSASQVRNRLSSTATYLGSSFYYGKGLINVEAAAQ

SEQ ID NO: 58066 - protein, 274 aa, Bacillus licheniformis
AQTVPYGIPLIKADKVQAQGFKGANVKVAVLDTGIQASHPDLNVVGGASFVAGEAYNTDGNGHGTHVSGTVAALDNNTGVLGVAPSSSLYAVKVLNSSGSGSYSGIVSGIEWATTNGMDVINMSLGGPSGSTAMKQAVDNAYARGVVVVAAAGNGGSSGNTNTIQYPAKYDSVIAVGAVDSNSNRASFSSVGAELEVMAPGAGVYSTYPTNTYATLSGTSMASPHVAGAAALILSKHPNLSGSQVRNRLSSTATYLGSSFYYGKGLINVEAAAQ

SEQ ID NO: 58067 - protein, 274 aa, Bacillus licheniformis
AQTVPYGIPLIKADKVQAQGFKGANVKVAVLDTGIQASHPDLNVVGGASFVAGEAYNTDGNGHGTHVSGTVAALDNNTGVLGVAPSVSLYAVKVLNSSGSGSYSGIVSGIEWATTNGMDVINISLGTPSGSTAMKQAVDNAYARGVVVVAAAGNSGSSGNTNTIQYPAKYDSVIAVGAVDSNSQRASFSSVGAELEVMAPGAGVYSTYPTNTYATLSGTSMASPHVAGAAALILSKHPNLSASQVRNRLSSTATYLGSSFYYGKGLINVEAAAQ

SEQ ID NO: 58068 - protein, 274 aa, Bacillus licheniformis
AQTVPYGIPLIKADKVQAQGFKGANVKVAVLDTGIQASHPDLNVVGGASFVAGEAYNTDGNGHGTHVSGTVAALDNNTGVLGVAPSVSLYAVKVLNSSGSGSYSGIVSGIEWANTNGMDVINMSLGGPSGSTAMKQAVDNAYARGVVVVAAAGNSGSSGNTNTIQYPAKYDSVIAVGAVDSNSQRASFSSVGAELEVMAPGAGVYSTYPPNTYATLSGTSMASPHVAGAAALILSKHPNLSASQVRNRLSSTATYLGSSFYYGKGLINVEAAAQ

SEQ ID NO: 58069 - protein, 274 aa, Synthetic construct
AQTVPYGIPLIKADKVQAQGFKGANVKVAVLDTGIQASHPDLNVVGGASFVAGEAYNTDGNGHGTHVAGTVAALDNTTGVLGVAPSVSLYAVKVLNSSGSDSYSGIVSGIEWATTNGMDVINMSLGGDSGSTAMKQAVDNAYARGVVVVAAAGNDGNSGSTNTIGYPAKYDSVIAVGAVDSNSNRADFSSVGAELEVMAPGAGVYSGYPTNQYATLNGTSMASPHVAGAAALILSKHPNLSASQVRNRLSSTATYLGSSFYYGKGLINVEAAAQ

SEQ ID NO: 58070 - protein, 274 aa, Bacillus licheniformis
AQTVPYGIPLIKADKVQAQGFKGANVKVAVLDTGIQASHPDLNVVGGASFVAGEAYNTDGNGHGTHVSGTVAALDNNTGVLGVAPSVSLYAVKVLNSSGSGSYSGIVSGIEWATTNGMDVINMSLGGRSGSTAMKQAVDNAYARGVVVVAAAGNSGSSGNTNTIQYPAKYDSVIAVGAVDSNSQRASFSSVGAELEVMAPGVGVYSTYPTNTYATLSGTSMASPHVAGAAALILSKHPNLSASQVRNRLSSTATYLGDSFYYGKGLINVEAAAQ

SEQ ID NO: 58071 - protein, 274 aa, Bacillus licheniformis
AQTVPYGIPLIKADKVQAQGFKGANVKVAVLDTGIQASHPDLNVVGGASFVAGEAYNTDGNGHGTHVSGTVAALDNNTGVLGVAPSVSLYAVKVLNSSSSGSYSGIVSGIEWATTNGMDVINISLGGPSGSTAMKQAVDNAYARGVVVVAAAGNSGSSGNTNTIQYPAKYDSVIAVGAVDSNSQRASFSSVGAELEVMAPGAGVYSTYPTNTYATLSGTSMASPHVAGAAALILSKHPNLSASQVRNRLSSTATYLGSSFYYGKGLINVEAAAQ

SEQ ID NO: 58072 - protein, 274 aa, Bacillus licheniformis
AQTVPYGIPLIKADKVQAQGFKGANVKVAVLDTGIQASHPDLNVVGGASFVAGEAYNTDGNGHGTHVSGTVAALDNNTGVLGVAPSVSLYAVKVLNSSSSGSYSGIVSGIEWATTNGMDVINMSLGTPSGSTAMKQAVDNAYARGVVVVAAAGNSGSSGNTNTIQYPAKYDSVIAVGAVDSNSQRASFSSVGAELEVMAPGAGVYSTYPTNTYATLSGTSMASPHVAGAAALILSKHPNLSASQVRNRLSSTATYLGSSFYYGKGLINVEAAAQ

SEQ ID NO: 58073 - protein, 274 aa, Bacillus licheniformis
AQTVPYGIPLIKADKVQAQGFKGANVKVAVLDTGAQASHPDLNVVGGASFVAGEAYNTDGNGHGTHVSGTVAALDNNTGVLGVAPSSSLYAVKVLNSSGSGSYSGIVSGIEWATTNGMDVINMSLGGPSGSTAMKQAVDNAYARGVLVVAAAGNSGSSGNTNTIQYPAKYDSVIAVGAVDSNSNRASFSSVGAELEVMAPGAGVYSTYPTNTYATLSGTSMASPHVAGAAALILSKHPNLSASQVRNRLSSTATYLGSSFYYGKGLINVEAAAQ

SEQ ID NO: 58074 - protein, 274 aa, Bacillus licheniformis
AQVVPYGIPLIKADKVQAQGFKGANVKVAVLDTGIQASHPDLNVVGGASFVAGEAYNTDGNGHGTHVSGTVAALDNNTGVLGVAPSVSLYAVKVLNSSGSGSYSGIVHGIEWATTNGMDVINMSLGGPSGSTAMKQAVDNAYARGVVVVAAAGNSGSSGNTNTIQYPAKYDSVIAVGAVDSNSQRASFSSVGAELEVMAPGAGVYSTYPTNTYATLSGTSMASPHVAGAAALILSKHPNLSASQVRNRLSSTATYLGSSFYYGKGLINVEAAAQ

SEQ ID NO: 58075 - protein, 274 aa, Bacillus licheniformis
AQTVPYGIPLIKADKVQAQGFKGANVKVAVLDTGIQASHPDLNVVGGASFVAGEAYNTDGNGHGTHVSGTVAALDNNTGVLGVAPSVSLYAVKVLNSSGSGSYSGIVSGIEWATTNGMDVINMSLGTPSGSTAMKQAVDNAYARGVVVVAAAGNSGSSGNTNTIQYPAKYDSVIAVGAVDSNSQRASFSSVGAELEVMAPGAGVYSTYPPNTYATLSGTSMASPHVAGAAALILSKHPNLSASQVRNRLSSTATYLGSSFYYGKGLINVEAAAQ

SEQ ID NO: 58076 - protein, 274 aa, Bacillus licheniformis
AQTVPYGIPLIKADKVQAQGFKGANVKVAVLDTGIQASHPDLNVVGGASFVAGEAYNTDGNGHGTHVAGTVAALDNHTGVLGVAPSTSLYAVKVLNSSGSGSYSGIVSGIEWATTNGMDVINISLGGASGSTAMKRAVDNAYARGVVVVAAAGNSGSSGNTNTIGYPAKYDSVIAVGAVDSNSQRAPFSSVGAELEVMAPGAGVYSTYPTNTYATLNGTSMASPHVAGAAALILSKHPSLSASQVRNRLSSTATYLGPSFYYGKGLINVEAAAQ

SEQ ID NO: 58077 - protein, 274 aa, Synthetic construct
AQTVPYGIPLIKADKVQAQGFKGANVKVAVLDTGIQASHPDLNVVGGASFVAGEAYNTDGNGHGTHVAGTVAALDNTTGVLGVAPSVSLYAVKVLGASGSGTYSGIVSGLEWATTNGMKVINMSLGGPSGSTAMKQAVDNAYARGVVVVAAAGNSGSSGNTNTIGYPAKYDSVIAVGAVDSNSNRASFSSVGAELEVMAPGAGVYSTYPTSTYATLNGTSMASPHVAGAAALILSKHPNLSASQVRNRLSSTATYLGSSFYYGKGLINVEAAAR

SEQ ID NO: 58078 - protein, 274 aa, Synthetic construct
AQTVPYGIPLIKADKVQAQGFKGANVDVAVLDTGIQASHPDLNVVGGASFVAGEAYNTDGNGHGTHVAGTVAALDNTTGVLGVAPSVSLYAVKVLGASGSGTYSGIVSGLEWATTNGMDVINMSLGGPSGSTAMKQAVDNAYARGVVVVAAAGNSGSSGNTNTIGYPAKYDSVIAVGAVDSNSNRASFSSVGAELEVMAPGAGVYSTYPTSTYATLNGTSMASPHVAGAAALILSKHPNLSASQVRNRLSSTATYLGSSFYYGKGLINVEAAAR

SEQ ID NO: 58079 - protein, 274 aa, Bacillus licheniformis
AQTVPYGIPLIKADKVQAQGFKGANVKVATLDTGAQASHPDLNVVGGASFVAGEAYNTDGNGHGTHVAGTVAALDNNTGVLGVAPSVSLYAVKVLNSSGSGSYSGIVSGIEWATTNGMDVINMSLGGASGSTAMKQAVDNAYARGVVVVAAAGNSGSSGNTNTIQYPAKYDSVIAVGAVDSNSNRASFSSVGAELEVMAPGVGVYSTYPPNTYATLNGTSMASPHVAGAAALILSKHPNLSASQVRNRLGSTATYLGPSFYYGKGLINVEAAAQ

SEQ ID NO: 58080 - protein, 274 aa, Bacillus licheniformis
AQTVPYGIPLIKADKVQAQGFKGANVKVAVLDTGIQASHPDLNVVGGASFVAGEAYNTDGNGHGTHVSGTVAALDNNTGVLGVAPSVSLYAVKVLNSSGSGSYSGIVSGIEWATTNGMDVINMSLGGPSGSTAMKQAVDNAYARGVVVVAAAGNSGSSGNTNTIQYPAKYDSVIAVGAVDSNSQRASFSSVGAELEVMAPGAQVYSTYPTNTYATLSGTSMASPHVAGAAALILSKHPNLSASQVRNRLSSTATYLGPSFYYGKGLINVEAAAQ

SEQ ID NO: 58081 - protein, 274 aa, Bacillus licheniformis
AQTVPYGIPLIKADKVQAQGFKGANVKVAVLDTGIQASHPDLNVVGGASFVAGEAYNTDGNGHGTHVSGTAAALDNNTGVLGVAPSVSLYAVKVANSSGSGSYSGIVSGIEWATTNGMDVINMSLGGASGSTAMKQAVDNAYARGVVVVAAAGNSGSSGNTNTIQYPAKYDSVIAVGAVDSNSQRASFSSVGAELEVMAPGAGVYSTYPPNTYATLNGTSMASPHVAGAAALILSKHPNLSASQVRNRLSSTATYLGPSFYYGKGLINVEAAAQ

SEQ ID NO: 58082 - protein, 274 aa, Bacillus licheniformis
AQTVPYGIPLIKADKVQAQGFKGANVKVAVLDTGIQASHPDLNVVGGASFVAGEAYNTDGNGHGTHVSGTVAALDNNTGVLGVAPSVSLYAVKVLNSSGSGSYSGIVSGIEWATTNGMDVINMSLGGPRGSTAMKQAVDNAYARGVVVVAAAGNSGSSGNTNTIQYPAKYDSVIAVGAVDSNSQRASFSSVGAELEVMAPGAGVYSTYPTNTYATLSGTSMASPHVAGAAALILSKHPNLSASQVRNRLSSTATYLGDSFYYGKGLINVEAAAQ

SEQ ID NO: 58083 - protein, 274 aa, Bacillus licheniformis
AQTVPYGIPMIKADKVQAQGFKGANVKVAVLDTGAQASHPDLNVVGGASFVAGEAYNTDGNGHGTHVAGTVAALDNTIGVLGVAPSSSLYAVKVLNSSGSGSYSGIVSGIEWATTNGMDVINISLGGASGSTAMKQAVDNAYARGVVVVAAAGNSGSSGNTNTIGYPAKYDSVIAVGAVDSNSNRASFSSVGAELEVMAPGVGVYSTYPTNTYATLNGTSMASPHVAGAAALILSKHPNLSASQVRNRLSSTATYLGDSWYYGKGLINVEAAAQ

SEQ ID NO: 58084 - protein, 274 aa, Bacillus licheniformis
AQTVPYGIPLIKADKVQAQGFKGANVKVAVLDTGIQASHPDLNVVGGASFVAGEAYNTDGNGHGTHVSGTVAALDNNTGVLGVAPSVSLYAVKVLNSSSSGSYSGIVSGIEWATTNGMDVINMSLGGPSGSTAMKQAVDNAYARGVVVVAAAGNSGSSGNTNTIQYPAKYDSVIAVGAVDSNSQRASFSSVGAELEVMAPGAGVYSTYPPNTYATLSGTSMASPHVAGAAALILSKHPNLSASQVRNRLSSTATYLGSSFYYGKGLINVEAAAQ

SEQ ID NO: 58085 - protein, 274 aa, Synthetic construct
AQTVPYGIPLIKADKVQAQGFKGANVKVAVLDTGIQASHPDLNVVGGASFVAGEAYNTDGNGHGTHVAGTVAALDNTTGVLGVAPSVSLYAVKVLNSSGSGSYSGIVSGIEWATTNGMDVINMSLGEASGSTAMKQAVDNAYARGVVVVAAAGNSGNSGSTETIGYPAKYDSVIAVGAVDSNSNRASMSSVGAELEVMAPGGSVYSTYPTNTYATLNNTSMASPHVAGAAALILSKHPNLSASQVRNRLSSTATYLGSSFYYGKGLINVEAAAQ

SEQ ID NO: 58086 - protein, 376 aa, Unidentified
LGKIVASTALLISVAFSSSIASAAEEAKEKYLIGFNEQEAVSEFVEQVEANDEVAILSEEEEVEIELLHEFETIPVLSVELSPEDVDALELDPAISYIEEDAEVTTMAQSVPWGISRVQAPAAHNRGLTGSGVKVAVLDTGISTHPDLNIRGGASFVPGEPSTQDGNGHGTHVAGTIAALNNSIGVLGVAPSAELYAVKVLGASGSGSVSSIAQGLEWAGNNGMHVANLSLGSPSPSATLEQAVNSATSRGVLVVAASGNSGAGSISYPARYANAMAVGATDQNNNRASFSQYGAGLDIVAPGVNVQSTYPGSTYASLNGTSMATPHVAGAAALVKQKNPSWSNVQIRNHLKNTATSLGSTNLYGSGLVNAEAATR

SEQ ID NO: 58087 - protein, 376 aa, Bacillus sp.
LGKIVASTALLISVAFSSSIASAAEEAKEKYLIGFNEQEAVSEFVEQVEANDEVAILSEEEEVEIELLHEFETIPVLSVELSPEDVDALELDPAISYIEEDAEVTTMAQSVPWGISRVQAPAAHNRGLTGSGVKVAVLDTGISTHPDLNIRGGASFVPGEPSTQDGNGHGTHVAGTIAALNNSIGVLGVAPSAELYAVKVLGASGSGSVSSIAQGLEWAGNNGMHVANLSLGSPSPSATLEQAVNSATSRGVLVVAASGNSGAGSISYPARYANAMAVGATDQNNNRASFSQYGAGLDIVAPGVNVQSTYPGSTYASLNGTSQATPHVAGAAALVKQKNPSWSNVQIRNHLKNTATSLGSTNLYGSGLVNAEAATR

SEQ ID NO: 58088 - protein, 306 aa, Unidentified
AEEAKEKYLIGFNEQEAVSEFVEQVEANDEVAILSEEEEVEIELLHEFETIPVLSVELSPEDVDALELDPAISYIEEDAEVTTMAQSVPWGISRVQAPAAHNRGLTGSGVKVAVLDTGISTHPDLNIRGGASFVPGEPSTQDGNGHGTHVAGTIAALNNSIGVLGVAPSAELYAVKVLGASGSGSVSSIAQGLEWAGNNGMHVANLSLGSPSPSATLEQAVNSATSRGVLVVAASGNSGAGSISYPARYANAMAVGATDQNNNRASFSQYGAGLDIVAPGVNVQSTYPGCFVAGTMILTVAGLVAI

SEQ ID NO: 58089 - protein, 271 aa, Unidentified
TAGAQSVPWGISRVQAPAAHNRGLTGSGVKVAVLDTGISTHPDLNIRGGASFVPGEPSTQDGNGHGTHVAGTIAALNNSIGVLGVAPSAELYAVKVLGADGRGAISSIAQGLEWAGNNGMHVANLSLGSPSPSATLEQAVNSATSRGVLVVAASGNSGASSISYPARYANAMAVGATDQNNNRASFSQYGAGLDIVAPGVNVQSTYPGSTYASLNGTSMATPHVAGAAALVKQKNPSWSNVQIRNHLKNTATSLGSTNLYGSGLVNAEAAT

SEQ ID NO: 58090 - protein, 269 aa, Unidentified
AQSVPWGISRVQAPAAHNRGLAGSGVKVAVLDTGISTHPDLNIRGGASFVPGEPSTQDGNGHGTHVAGTIAALNNSIGVLGVAPSAELYAVKVLGASGQGAISSIAQGLEWAGNNGMHVANLSLGSPSPSATLEQAVNSATSRGVLVVAASGNSGAGSISYPARYANAMAVGATDQNNNRASFSQYGAGLDIVAPGVNVQSTYPGSTYASQNGTSMATPHVAGAAVLVKQKNPSWSNVRIRNHLKNTATSLGSTNLYGSGLVNAEAATR

SEQ ID NO: 58091 - protein, 269 aa, Unidentified
AQSVPWGISRVQAPAAHNRGLTGRGVKVAVLDTGISTHPDLNIRGGASFVPGEPSTQDGNGHGTHVAGTIAALNNGIGVLGVAPSAELYAVKVLGASGSGSVSSIAQGLEWAGNNDMHVANLSLGSESPSATLEQAVNSATSRGVLVVAASGNSGADSISYPARYANAMAVGATDQNNNRADFSQYGAGLDIVAPGVNVQSTYPGSTYASLNGTSMATPHVAGAAALVKQKNPSWSNVRIRNHLKNTATSLGSTNLYGSGLVNAEAATR

SEQ ID NO: 58092 - protein, 269 aa, Bacillus clausii
AQSVPWGISRVQAPAAHNRGLTGSGVKVAVLDTGISTHPDLNIRGGASFVPGEPSTQDGNGHGTHVAGTIAALNNSIGVLGVAPSAELYAVKVLGADGEGAISSIAQGLEWAGNNGMHVANLSLGSPSPSATLEQAVNSATSRGVLVVAASGNDGASSISYPARYANAMAVGATDQNNNRASFSQYGAGLDIVAPGVNVQSTYPGSTYASLNGTSMATPHVAGAAALVKQKNPSWSNVQIRNHLKNTATSLGSTNEYGSGLVNAEAATR

SEQ ID NO: 58093 - protein, 269 aa, Unidentified
AQSVPWGISRVQAPAAHNRGLTGSGVKVAVLDTGISTHEDLNIRGGASFVPGEPSTQDGNGHGTHVAGTIAALDNGIGVLGVAPSAELYAVKVLGASGSGSVSSIAQGLEWAGNNRMHVANLSLGRPSPSATLEQAVNSATSRGVLVVAASGNSGAGSISYPARYANAMAVGATDQNNNRASFSQYGAGLDIVAPGVNVYSTYPGSTYASLNGTSMATPHVAGAAALVKQKNPSWSNVQIRNHLKNTATSLGSTNQYGSGLVNAEAATR

SEQ ID NO: 58094 - protein, 269 aa, Unidentified
AQSVPWGISRVQAPAAHNRGLTGSGVKVAVLDTGISTHPDLNIRGGASFVPGEPSTQDGNGHGTHVAGTIAALNNWRGVLGVAPSAELYAVKVLGADGRGAISSIAQGLEWAGNNGMHVANLSLGSPSPSATLEQAVNSATSRGVLVVAASGNSGASSISYPARYANAMAVGATDQNNNRASFSQYGAGLDIVAPGVNVQSTYPGSTYASLNGTSMATPHVAGAAALVKQKNPSWSNVQIRNHLKNTATSLGSTNLYGSGLVNAEAATR

SEQ ID NO: 58095 - protein, 269 aa, Unidentified
AQSVPWGISRVQAPAAHNRRLTGSGVKVAVLDTGISTHPDLNIRGGASFVPGEPSTQDGEGHGTHVAGTIAALNNDIGVLGVAPSAELYAVKVLGASGSGSVSSIAQGLEWAGNNSMHVANLSLGSPSPSATLEQAVNSATSRGVLVVAASGNSGADSISYPARYANAMAVGATDQNNNRADFSQYGAGLDIVAPGVNVQSTYPGSTYASLNGTSMATPHVAGAAALVKQKNPSWSNVQIRNRLKNTATSLGSTNLYGSGLVNAEAATR

SEQ ID NO: 58096 - protein, 269 aa, Unidentified
AQSVPWGISRVQAPAAHNRKLLGSGVKVAVLDTGISTHPDLNIRGGASFVPGEPSTQDGNGHGTHVAGTIAALNNNIGVLGVAPSAELYAVKVLGASGSGSVSSIAQGLEWAGNNRMHVANLSLGDPSPSATLEQAVNSATSRGVLVVAASGNSGAGSIDYPARYANAMAVGATDQNNNRASFSQYGAGLDIVAPGVNVQSTYPGSAYASLNGTSMATPHVAGAAALVKQKNPSWSNVQIRNHLKNTATSLGSTNLYGSGLVNAEAATR

SEQ ID NO: 58097 - protein, 269 aa, Unidentified
AQSVPWGISRVQAPAAHNRRLTGRGVKVAVLDTGISTHPDLNIRGGASFVPGEPSTQDGEGHGTHVAGTIAALNNGIGVLGVAPSAELYAVKVLGASGSGSVSSIAQGLEWAGNNDMHVANLSLGSPSPSATLEQAVNSATSRGVLVVAASGNSGAGSISYPARYANAMAVGATDQNNNRASFSQYGAGLDIVAPGVNVQSTYPGSTYASLNGTSMATPHVAGAAALVKQKNPSWSNVRIRDHLKNTATSLGSTNLYGSGLVNAEAATR

SEQ ID NO: 58098 - protein, 269 aa, Unidentified
AQSVPWGISRVQAPAAHNRGLTGSGVKVAVLDTGISTHPDLNIRGGASFVPGEPSTQDGNGHGTHVAGTIAALNNSIGVLGVAPSAELYAVKVLGADGEGAISSIAQGLEWAGNNGMHVANLSLGSPSPSATLEQAVNSATSRGVLVVAASGNSGASSISYPARYANAMAVGATDQNNNRASFSQYGLGLDIVAPGVNVQSTYPGSTYASLNGTSMATPHVAGAAALVKQKNPSWSNVQIRNHLNNTATSLGSTNLYGSGLVNAEAATR

SEQ ID NO: 58099 - protein, 269 aa, Unidentified
AQSVPWGISRVQAPAAHRRRLTGRGVKVAVLDTGISTHPDLNIRGGASFVPGEPSTQDGNGHGTHVAGTIAALDNSIGVLGVAPSAELYAVKVLGASGSGSVSSIAQGLEWAGNNGMHVANLSLGSPSPSATLEQAVNSATSRGVLVVAASGNSGAGSISYPARYANAMAVGATDQDNNRASFSQYGAGLDLVAPGVNVQSTYPGSTYASLNGTSMATPHVAGAAALVKQKNPSWSNVQIRNRLKNTATSLGSTNLYGSGLVNAEAATR

SEQ ID NO: 58100 - protein, 269 aa, Unidentified
AQSVPWGISRVQAPAAHNRRLWGSGVKVAVLDTGISTHPDLNITGGASFVPGEPSTQDGNGHGTHVAGTIAALNNSIGVLGVAPSAELYAVKVLGASGAGSVSSIAQGLEWAGNNGMHVANLSLGSPSPSATLEQAVNSATSRGVLVVAASGNSGAGSISYPARYANAMAVGATDQNNNRASFSQYGAGLDIVAPGVNVQSTYIQSAYASLNGTSMATPHVAGAAALVKQKNPSWSNVQIRNHLKNTATSLGSTNLYGSGLVNAEAATR

SEQ ID NO: 58101 - protein, 269 aa, Unidentified
AQSVPWGISRVQAPAAHRRGLWGRGVKVAVLDTGISTHPDLNIRGGASFVPGEPSTQDGNGHGTHVAGTIAALDNSIGVLGVAPSAELYAVKVLGASGSGSVSSIAQGLEWAGANGMHVANLSLGSPSPSATLEQAVNSATSRGVLVVAASGNSGAGSISYPARYANAMAVGATDQNNNRASFSQYGAGLDIVAPGVNVQSTYPQSTYASLNGTSMATPHVAGAAALVKQKNPSWSNVQIRNRLKNTATSLGSTNLYGSGLVNAEAATR

SEQ ID NO: 58102 - protein, 269 aa, Unidentified
AQSVPWGISRVQAPAAHRRGLTGRGVKVAVLDTGISTHPDLNIRGGASFVPGEPSTQDGNGHGTHVAGTIAALDNSIGVLGVAPSAELYAVKVLGASGAGSVSSIAQGLEWAGNNGMHVANLSLGSPSPSATLEQAVNSATSRGVLVVAASGNSGAGSISYPARYANAMAVGATDQNNNRASFSQYGAGLDLVAPGVNVQSTYPGSTYFSLNGTSMATPHVAGAAALVKQKNPSWSNVQIRNRLKNTATSLGSTNLYGSGLVNAEAATR

SEQ ID NO: 58103 - protein, 269 aa, Unidentified
AQSVPWGISRVQAPAAHNRRLTGRGVKVAVLDTGISTHPDLNIRGGASFVPGEPSTQDGEGHGTHVAGTIAALNNGIGVLGVAPSAELYAVKVLGASGSGSVSSIAQGLEWAGNNSMHVANLSLGSPSPSATLEQAVNSATSRGVLVVAASGNSGAGSISYPARYANAMAVGATDQNNNRADFSQYGAGLDIVAPGVNVQSTYPGSTYASLNGTSMATPHVAGAAALVKQKNPSWSNVQIRDHLKNTATSLGSTNLYGSGLVNAEAATR

SEQ ID NO: 58104 - protein, 269 aa, Unidentified
AQSVPWGISRVQAPAAHRRGLTGRGVKVAVLDTGISTHPDLNIRGGASFVPGEPSTQDGNGHGTHVAGTIAALDNSIGVLGVAPSAELYAVKVLGASGSGSVSSIAQGLEWAGANGMHVANLSLGSPSPSATLEQAVNSATSRGVLVVAASGNSGAGSISYPARYANAMAVGATDQDNNRASFSQYGAGLDIVAPGVNVQSTYPGSAYASLNGTSMATPHVAGAAALVKQKNPSWSNVQIRNRLKNTATSLGSTNLYGSGLVNAEAATR

SEQ ID NO: 58105 - protein, 269 aa, Unidentified
AQSVPWGISRVQAPAAHRRGLTGRGVKVAVLDTGISTHPDLNIRGGASFVPGEPSTQDGNGHGTHVAGTIAALDNSIGVLGVAPSAELYAVKVLGASGSGSVSSIAQGLEWAGNNGMHVANLSLGSPSPSATLEQAVNSATSRGVLVVAASGNSGAGSISYPARYANAMAVGATDQDNNRASFSQYGAGLDLVAPGVNVQSTYPGSAYASLNGTSMATPHVAGAAALVKQKNPSWSNVQIRNRLKNTATSLGSTNLYGSGLVNAEAATR

SEQ ID NO: 58106 - protein, 269 aa, Unidentified
AQSVPWGISRVQAPAAHNRGLTGSGVKVAVLDTGISTHPDLDIRGGASFVPGEPSTQDGNGHGTHVAGTIAALNNRIGVLGVAPSAELYAVKVLGASGGGAISSIAQGLEWAGNNGMHVANLSLGSPSPSATLEQAVNSATSRGVLVVAASGNSGAGSISYPARYANAMAVGATDQNNNRASFSQYGAGLDIVAPGVNVQSTYPGSTYASLNGTSMATPHVAGAAVLVKQKNPSWSNVRIRNHLKNTATSLGSTNLYGSGLVNAEAATR

SEQ ID NO: 58107 - protein, 269 aa, Unidentified
AQSVPWGISRVQAPAAHNRRLWGSGVKVAVLDTGISTHPDLRITGGASFVPGEPSTQDGNGHGTHVAGTIAALNNSIGVLGVAPSAELYAVKVLGASGAGSVSSIAQGLEWAGNNGMHVANLSLGSPSPSATLEQAVNSATSRGVLVVAASGNSGAGSISYPARYANAMAVGATDQNNNRASFSQYGAGLDIVAPGVNVQSTYPQSAYASLNGTSMATPHVAGAAALVKQKNPSWSNVQIRNHLKNTATSLGSTNLYGSGLVNAEAATR

SEQ ID NO: 58108 - protein, 269 aa, Unidentified
AQSVPWGISRVQAPAAHNRRLTGRGVKVAVLDTGISTHPDLNIRGGASFVPGEPSTQDGNGHGTHVAGTIAALNNSIGVLGVAPSAELYAVKVLGASGSGSVSSIAQGLEWAGNNRMHVANLSLGSPSPSATLEQAVNSATSRGVLVVAASGNSGADSISYPARYANAMAVGATDQNNNRADFSQYGAGLDIVAPGVNVQSTYPGSTYASLNGTSMATPHVAGAAALVKQKNPSWSNVRIRDHLKNTATSLGSTNLYGSGLVNAEAATR

SEQ ID NO: 58109 - protein, 269 aa, Unidentified
AQSVPWGISRVQAPAAHNRRLTGRGVKVAVLDTGISTHPDLNIRGGASFVPGEPSTQDGNGHGTHVAGTIAALNNGIGVLGVAPSAELYAVKVLGASGSGSVSSIAQGLEWAGNNDMHVANLSLGSPSPSATLEQAVNSATSRGVLVVAASGNSGADSISYPARYANAMAVGATDQNNNRASFSQYGAGLDIVAPGVNVQSTYPGSTYASLNGTSMATPHVAGAAALVKQKNPSWSNVRIRDHLKNTATSLGSTNLYGSGLVNAEAATR

SEQ ID NO: 58110 - protein, 269 aa, Unidentified
AQSVPWGISRVQAPAAHNRGLAGRGVKVAVLDSGISTHPDLNIRGGASFVPGEPSTQDGNGHGTHVAGTIAALNNSIGVLGVAPSAELYAVKVLGASGSGSVSSIAQGLEWAGLNGMHVANLSLGIPSPSATLEQAVNSATSRGVLVVAASGNSGAGSIDYPARYANAMAVGATDQNNNRADFSQYGAGLDIVAPGVNVQSTYPGSTYASLNGTSMATPHVAGAAALVKQKNPSWSNVQIRNHLKNTATSLGSTNLYGSGLVNAEAATR

SEQ ID NO: 58111 - protein, 269 aa, Unidentified
AQSVPWGISRVQAPAAHNRGLTGSGVKVAVLDTGISTHPDLNIRGGASFVPGEPSTQDGNGHGTHVAGTIAALNNSIGVLGVAPSAELYAVKVLGASGGGAISSIAQGLEWAGNNGMHVANLSLGSPSPSATLEQAVNSATSRGVLVVAASGNSGARSISYPARYANAMAVGATDQNNNRASFSQYGAGLDIVAPGVNVQSTYPGSTYASLNGTSMATPHVAGAAVLVKQKNPSWSNVRIRRHLKNTATSLGSTNLYGSGLVNAEAATR

SEQ ID NO: 58112 - protein, 269 aa, Unidentified
AQSVPWGISRVQAPAAHNRGLTGRGVKVAVLDTGISTHPDLNIRGGASFVPGEPSTQDGNGHGTHVAGTIAALNNSIGVLGVAPSAELYAVKVLGASGGGAISSIAQGLEWAGNNGMHVANLSLGSPSPSATLEQAVNSATSRGVLVLAASGNSGAGSISYPARYANAMAVGATDQNNNRASFSQYGAGLDIVAPGVNVQSTYPGSTYASLNGTSMATPHVAGAAVLVKQKNPSWSNVRIRNHLKNTATSLGSTNLYGSGLVNAEAATR

SEQ ID NO: 58113 - protein, 269 aa, Unidentified
AQSVPWGISRVQAPAAHNRGLTGRGVKVAVLDTGISTHPDLNIRGGASFVPGEPSTQDGNGHGTHVAGTIAALDNSIGVLGVAPSAELYAVKVLGASGGGAISSIAQGLEWAGNNGMHVANLSLGSPSPSATLEQAVNSATSRGVLVVAASGNSGAGSISYPARYANALAVGATDQNNNRASFSQYGAGLDIVAPGVNVQSTYPGSTYASLNGTSMATPHVAGAAALVKQKNPSWSNVQIRNRLKNTATSLGSTNLYGSGLVNAEAATR

SEQ ID NO: 58114 - protein, 269 aa, Unidentified
AQSVPWGISRVQAPAAHNRGLTGSGVKVAVLDTGISTHPDLRIRGGASFVPGEPSTQDGNGHGTHVAGTIAALDNSIGVLGVAPSAELYAVKVLGASGGGAISSIAQGLEWAGNNGMHVANLSLGSPSPSATLEQAVNSATSRGVLVVAASGNSGAGSISYPARYANAMAVGATDQNNNRASFSQYGAGLDIVAPGVNVQSTYPGSTYASLNGTSMATPHVAGAAVLVKQKNPSWSNVRIRNHLKNTATSLGSTNLYGSGLVNAEAATR

SEQ ID NO: 58115 - protein, 269 aa, Unidentified
AQSVPWGISRVQAPAAHNRGLTGSGVKVAVLDTGISTHPDLNIRGGASFVPGEPSTQDGNGHGTHVAGTIAALNNSIGVLGVAPSAELYAVKVLGASGGGAISSIAQGLEWAGNNGMHVANLSLGSPSPSATLEQAVNSATSRGVLVVAASGNSGAGSISYPARYANAMAVGATDQNNNRASFSQYGAGLDIVAPGVNVQSTYPGSTYASLNGTSMATPHVAGAAVLVKHKNPSWSNVRIRNHLKKTATSLGSTNLYGSGLVNAEAATR

SEQ ID NO: 58116 - protein, 269 aa, Unidentified
AQSVPWGISRVQAPAAHNRRLTGRGVKVAVLDTGISTHPDLKITGGASFVPGEPSTQDGNGHGTHVAGTIAALNNSIGVLGVAPSAELYAVKVLGASGAGSVSSIAQGLEWAGLNGMHVANLSLGSPSPSATLEQAVNSATSRGVLVVAASGNSGAGSISYPARYANAMAVGATDQNNNRASFSQYGAGLDIVAPGVNVQSTYIGSTYASLNGTSMATPHVAGAAALVKQKNPSWSNVQIRNHLKNTATSLGSTNLYGSGLVNAEAATR

SEQ ID NO: 58117 - protein, 269 aa, Unidentified
AQSVPWGISRVQAPAAHNRGLAGSGVKVAVLDTGISTHPDLNIRGGASFVPGEPSTQDGNGHGTHVAGTIAALNNNIGVLGVAPSAELYAVKVLGASGNGAISSIAQGLEWAGNNGMHVANLSLGSPSPSATLEQAVNSATSRGVLVVAASGNSGAGSISYPARYANAMAVGATDQNNNRASFSQYGAGLDIVAPGVNVQSTYPGSTYASLNGTSMATPHVAGAAVLVKQKNPSWSNVRIRNHLKNTATSLGSTNLYGSGLVNAEAATR

SEQ ID NO: 58118 - protein, 269 aa, Unidentified
AQSVPWGISRVQAPAAHRRGLTGRGVKVAVLDTGISTHPDLNIRGGASFVPGEPSTQDGNGHGTHVAGTIAALDNSIGVLGVAPSAELYAVKVLGASGAGSVSSIAQGLEWAGNNGMHVANLSLGSPSPSATLEQAVNSATSRGVLVVAASGNSGAGSISYPARYANAMAVGATDQNNNRASFSQYGAGLDIVAPGVNVQSTYPQSAYASLNGTSMATPHVAGAAALVKQKNPSWSNVQIRNRLKNTATSLGSTNLYGSGLVNAEAATR

SEQ ID NO: 58119 - protein, 269 aa, Unidentified
AQSVPWGISRVQAPAAHRRGLWGRGVKVAVLDTGISTHPDLNIRGGASFVPGEPSTQDGNGHGTHVAGTIAALDNSIGVLGVAPSAELYAVKVLGASGAGSVSSIAQGLEWAGNNGMHVANLSLGSPSPSATLEQAVNSATSRGVLVVAASGNSGAGSISYPARYANAMAVGATDQNNNRASFSQYGAGLDIVAPGVNVQSTYPGSAYASLNGTSMATPHVAGAAALVKQKNPSWSNVQIRNRLKNTATSLGSTNLYGSGLVNAEAATR

SEQ ID NO: 58120 - protein, 269 aa, Unidentified
AQSVPWGISRVQAPAAHNRGLTGRGVKVAVLDTGISTHPDLNIRGGASFVPGEPSTQDGNGHGTHVAGTIAALNNDIGVLGVAPSAELYAVKVLGASGSGSVSSIAQGLEWAGNNSMHVANLSLGSESPSATLEQAVNSATSRGVLVVAASGNSGAGSISYPARYANAMAVGATDQNNNRADFSQYGAGLDIVAPGVNVQSTYPGSTYASLNGTSMATPHVAGAAALVKQKNPSWSNVRIRNRLKNTATSLGSTNLYGSGLVNAEAATR

SEQ ID NO: 58121 - protein, 269 aa, Unidentified
AQSVPWGISRVQAPAAHNRGLRGSGVKVAVLDTGISTHPDLNIRGGASFVPGEPSTQDGNGHGTHVAGTIAALNNSIGVLGVAPSAELYAVKVLGASGGGAISSIAQGLEWAGNNGMHVANLSLGSPSPSATLEQAVNSATSRGVLVVAASGNSGAGSISYPARYANAMAVGATDQNNNRASFSQYGAGLDIVAPGVNVQSTYPGSTYASLNGTSMATPHVAGAAVLVKQKNGSWSNVRIRNHLKNTATSLGSTNLYGSGLVNAEAATR

SEQ ID NO: 58122 - protein, 269 aa, Unidentified
AQSVPWGISRVQAPAAHNRGLTGSGVKVAVLDTGISTHPDLNIRGGASFVPGEPSTQDGNGHGTHVAGTIAALNNSRGVLGVAPSAELYAVKVLGADGEGAISSIAQGLEWAGNNGMHVANLSLGSPSPSATLEQAVNSATSRGVLVVAASGNSGASSISYPARYANAMAVGATDQNNNRASFSQYGAGLDIVAPGVNVQSTYPGSTYASLNGTSMATPHVAGAAALVKQKNPSWSNRQIRNHLKNTATSLGSTNLYGSGLVNAEAATR

SEQ ID NO: 58123 - protein, 269 aa, Unidentified
AQSVPWGISRVQAPAAHNRRLTGSGVKVAVLDTGISTHPDLRITGGASFVPGEPSTQDGNGHGTHVAGTIAALNNSIGVLGVAPSAELYAVKVLGASGAGSVSSIAQGLEWAGNNGMHVANLSLGSPSPSATLEQAVNSATSRGVLVVAASGNSGAGSISYPARYANAMAVGATDQNNNRASFSQYGAGLDIVAPGVDVQSTYIQSTYASLNGTSMATPHVAGAAALVKQKNPSWSNVQIRNHLKNTATSLGSTNLYGSGLVNAEAATR

SEQ ID NO: 58124 - protein, 269 aa, Unidentified
AQSVPWGISRVQAPAAHNRRLTGRGVKVAVLDTGISTHPDLNIRGGASFVPGEPSTQDGNGHGTHVAGTIAALNNDIGVLGVAPSAELYAVKVLGASGSGSVSSIAQGLEWAWNNDMHVANLSLGSPSPSATLEQAVNSATSRGVLVVAASGNSGADSISYPARYANAMAVGATDQNNNRASFSQYGAGLDIVAPGVNVQSTYPGSTYASLNGTSMATPHVAGAAALVKQKNPSWSNVQIRDHLKNTATSLGSTNLYGSGLVNAEAATR

SEQ ID NO: 58125 - protein, 269 aa, Unidentified
AQSVPWGISRVQAPAAHRRGLTGRGVKVAVLDTGISTHPDLNIRGGASFVPGEPSTQDGNGHGTHVAGTIAALDNSIGVLGVAPSAELYAVKVLGASGAGSVSSIAQGLEWAGNNGMHVANLSLGSPSPSATLEQAVNSATSRGVLVVAASGNSGAGSISYPARYANAMAVGATDQDNNRASFSQYGAGLDIVAPGVNVQSTYPGSTYFSLNGTSMATPHVAGAAALVKQKNPSWSNVQIRNRLKNTATSLGSTNLYGSGLVNAEAATR

SEQ ID NO: 58126 - protein, 269 aa, Unidentified
AQSVPWGISRVQAPAAHNRKLTGGGVKVAVLDTGISTHPDLNIRGGASFVPGEPSTQDGEGHGTHVAGTIAALNNNIGVLGVAPSAELYAVKVLGASGQGSVSSIAGGLEWAGLNGMHVANLSLGSPSPSATLEQAVNSATSRGVLVVAASGNSGAGSISYPARYANAMAVGATDQNNNRADFSQYGAGLDIVAPGVNVQSTYPGSTYASLNGTSSATPHVAGAAALVKQKNPSWSNVQIRNHLKNTATSLGSTNLYGSGLVNAEAATR

SEQ ID NO: 58127 - protein, 269 aa, Unidentified
AQSVPWGISRVQAPAAHNRKLTGGGVKVAVLDTGISTHPDLNIRGGASFVPGEPSTQDGEGHGTHVAGTIAALNNSIGVLGVAPSAELYAVKVLGASGQGSVSSIANGLEWAGLNGMHVANLSLGSPSPSATLEQAVNSATSRGVLVVAASGNSGAGSISYPARYANAMAVGATDQNNNRADFSQYGAGLDIVAPGVNVQSTYPGSTYASLNGTSMATPHVAGAAALVKQKNPSWSNVQIRNHLKNTATSLGSTNLYGSGLVNAEAATR

SEQ ID NO: 58128 - protein, 269 aa, Unidentified
AQSVPWGISRVQAPAAHRRGLTGSGVKVAVLDTGISTHPDLNIRGGASFVPGEPSTQDGNGHGTHVAGTIAALDNSIGVLGVAPSAELYAVKVLGASGGGAISSIAQGLEWAGNNGMHVANLSLGSPSPSATLEQAVNSATSRGVLVVAASGNSGAGSISYPARYANAMAVGATDQNNNRASFSQYGAGLDIVAPGVNVQSTYPGSTYASLNGTSMATPHVAGAAVLVKQKNPSWSNVRIRNHLKNTATSLGSTNLYGSGLVNAEAATR

SEQ ID NO: 58129 - protein, 269 aa, Unidentified
AQSVPWGISRVQAPAAHNRGLAGRGVKVAVLDTGISTHPDLNIRGGASFVPGEPSTQDGNGHGTHVAGTIAALNNSIGVLGVAPSAELYAVKVLGASGSGSVSSIAQGLEWAGLNRMHVANLSLGIPSPSATLEQAVNSATSRGVLVVAASGNSGAGSIDYPARYANAMAVGATDQNNNRADFSQYGAGLDIVAPGVNVQSTYPGSTYASLNGTSMATPHVAGAAALVKQKNPSWSNVQIRNHLKNTATSLGSTNLYGSGLVNAEAATR

SEQ ID NO: 58130 - protein, 269 aa, Unidentified
AQSVPWGISRVQAPAAHNRGLAGSGVKVAVLDTGISTHPDLNIRGGASFVPGEPSTQDGNGHGTHVAGTIAALDNSIGVLGVAPSAELYAVKVLGASGNGAISSIAQGLEWAGNNGMHVANLSLGSPSPSATLEQAVNSATSRGVLVVAASGNSGAGSISYPARYANAMAVGATDQNNNRASFSQYGAGLDIVAPGVNVQSTYPGSTYASLNGTSMATPHVAGAAVLVKQKNPSWSNVRIRNHLKNTATSLGSTNLYGSGLVNAEAATR

SEQ ID NO: 58131 - protein, 269 aa, Unidentified
AQSVPWGISRVQAPAAHNRGLTGSGVKVAVLDTGISTHPDLNIRGGASFVPGEPSTQDGNGHGTHVAGTIAALNNSIGVLGVAPSAELYAVKVLGASGAGAISSIAQGLEWAGNNGMHVANLSLGSPSPSATLEQAVNSATSRGVLVVAASGNSGAGSISYPARYANAMAVGATDQNNNRADFSQYGAGLDIVAPGVNVQSTYIGSTYASLNGTSMATPHVAGAAVLVKQKNPSWSNVRIRNHLKNTATSLGSTNLYGSGLVNAEAATR

SEQ ID NO: 58132 - protein, 269 aa, Unidentified
AQSVPWGISRVQAPAAHNRGLAGRGVKVAVLDSGISTHPDLNIRGGASFVPGEPSTQDGEGHGTHVAGTIAALNNSIGVLGVAPSAELYAVKVLGASGSGSVSSIAQGLEWAGNNRMHVANLSLGIPSPSATLEQAVNSATSRGVLVVAASGNSGAGSIDYPARYANAMAVGATDQNNNRASFSQYGAGLDIVAPGVNVQSTYPGSTYASLNGTSMATPHVAGAAALVKQKNPSWSNVQIRNHLKNTATSLGSTNLYGSGLVNAEAATR

SEQ ID NO: 58133 - protein, 269 aa, Unidentified
AQSVPWGISRVQAPAAHNRKLLGFGVKVAVLDTGISTHPDLNIRGGASFVPGEPSTQDGNGHGTHVAGTIAALNNNIGVLGVAPSAELYAVKVLGASGSGSVSSIAQGLEWAGNNGMHVANLSLGDPSPSATLEQAVNSATSRGVLVVAASGNSGAGSISYPARYANAMAVGATDQNNNRASFSQYGAGLDIVAPGVNVQSTYPGSAYASENGTSMATPHVAGAAALVKQKNPSWSNVQIRNHLKNTATSLGSTNLYGSGLVNAEAATR

SEQ ID NO: 58134 - protein, 269 aa, Unidentified
AQSVPWGISRVQAPAAHRRRLTGRGVKVAVLDTGISTHPDLNIRGGASFVPGEPSTQDGNGHGTHVAGTIAALDNSIGVLGVAPSAELYAVKVLGASGSGSVSSIAQGLEWAGNNGMHVANLSLGSPSPSATLEQAVNSATSRGVLVVAASGNSGAGSISYPARYANAMAVGATDQNNNRASFSQYGAGLDIVAPGVDVQSTYPGSAYASLNGTSMATPHVAGAAALVKQKNPSWSNVQIRNRLKNTATSLGSTNLYGSGLVNAEAATR

SEQ ID NO: 58135 - protein, 269 aa, Unidentified
AQSVPWGISRVQAPAAHNRGLRGSGVKVAVLDTGISTHPDLNIRGGASFVPGEPSTQDGNGHGTHVAGTIAALNNSIGVLGVAPSAELYAVKVLGASGGGAISSIAQGLEWAGNNGMHVANLSLGSPSPSATLEQAVNSATSRGVLVLAASGNSGAGSISYPARYANAMAVGATDQNNNRASFSQYGAGLDIVAPGVNVQSTYPGSTYASLNGTSMATPHVAGAAVLVKQKNPSWSNVRIRNHLKNTATSLGSTNLYGSGLVNAEAATR

SEQ ID NO: 58136 - protein, 269 aa, Unidentified
AQSVPWGISRVQAPAAHRRGLTGRGVKVAVLDTGISTHPDLNIRGGASFVPGEPSTQDGNGHGTHVAGTIAALDNSIGVLGVAPSAELYAVKVLGASGSGSVSSIAQGLEWAGANGMHVANLSLGSPSPSATLEQAVNSATSRGVLVVAASGNSGAGSISYPARYANAMAVGATDQDNNRASFSQYGAGLDIVAPGVNVQSTYPGSTYFSLNGTSMATPHVAGAAALVKQKNPSWSNVQIRNRLKNTATSLGSTNLYGSGLVNAEAATR

SEQ ID NO: 58137 - protein, 269 aa, Unidentified
AQSVPWGISRVQAPAAHNRGLTGSGVKVAVLDTGISTHPDLNIRGGASFVPGEPSTQDGNGHGTHAAGTIAARDNSIGVLGVAPSAELYAVKVLGASGSGAISSIAQGLEWAGNNGMHVANLSLGSPSPSATLEQAVNSATSRGVLVVAASGNSGADSISYPARYANAMAVGATDQNNNRASFSQYGAGLDIVAPGVNVQSTYPGSTYASLNGTSMATPHVAGAAALVKHKNPSWSNVQIRNHLKNTATSLGSTNLYGSGLVNAEAATR

SEQ ID NO: 58138 - protein, 269 aa, Unidentified
AQSVPWGISRVQAPAAHNRGLTGSGVKVAVLDTGISTHPDLNIRGGASFVPGEPSTQDGNGHGTHAAGTIAALNNSIGVLGVAPSAELYAVKVLGASGSGAISSIAQGLEWAGNNGMHVANLSLGSPSPSATLEQAVNSATSRGVLVVAASGNSGADSISYPARYANAMAVGATDQNNNRASFSQYGAGLDIVAPGVNVQSTYPGSTYASLNGTSMATPHVAGAAVLVKHKNPSWSNVRIRNHLKNTATSLGSTNLYGSGLVNAEAATR

SEQ ID NO: 58139 - protein, 269 aa, Bacillus lentus
AQTVPWGIRRVQAPAAHNLGLTGSGVKVAVLDTGISTHPDLRIRGGASFVPGEPSTQDGDGHGTHVAGTIAALNNSIGVLGVAPSAELYAVKVLGASGSGSVSSIAQGLEWAGNNGMHVANLSLGSPSPSATLEQAVNSATSRGVLVVAASGNSGAGSISYPARYANAMAVGATDQNNNRASFSQYGPGLDIVAPGVNVQSTYPGSTYASLNGTSMATPHVAGAAALVKQKNPSWSNVQIRNHLKNTATSLGSTNLYGSGLVNAEAATQ

SEQ ID NO: 58140 - protein, 269 aa, Unidentified
AQSVPWGISRVQAPAAHNRRLTGRGVKVAVLDTGISTHPDLNIRGGASFVPGEPSTQDGNGHGTHVAGTIAALNNSIGVLGVAPSAELYAVKVLAASGAGSVSSIANGLEWAGLNGMHVANLSLGAPSPSATLEQAVNSATSRGVLVVAASGNSGAGSISYPARYANAMAVGATDQNNNRASFSQYGAGLDIVAPGVNVQSTYPGSTYASLNGTSMATPHVAGAAALVKQKNPSWSNVQIRNHLKNTATSLGSTNLYGSGLVNAEAATR

SEQ ID NO: 58141 - protein, 269 aa, Unidentified
AQSVPWGISRVQAPAAHNRGLTGSGVKVAVLDTGISTHPDLNIRGGASFVPGEPSTQDGNGHGTHVAGTIAALDNSIGVLGVAPDAELYAVKVLGASGGGAISSIAQGLEWAGNNGMHVANLSLGSPSPSATLEQAVNSATSRGVLVVAASGNSGAGSISYPARYANAMAVGATDQNNNRASFSQYGAGLDIVAPGVNVQSTYPGSTYASLNGTSMATPHVAGAAVLVKQKNPSWSNVRIRNHLKNTATSLGSTNLYGSGLVNAEAATR

SEQ ID NO: 58142 - protein, 269 aa, Unidentified
AQSVPWGISRVQAPAAHNRGLRGSGVKVAVLDTGISTHPDLNIRGGASFVPGEPSTQDGNGHGTHVAGTIAALNNSIGVLGVAPSAELYAVKVLGVSGGGNLSSIAQGLEWAGNNGMHVANLSLGSPSPSATLEQAVNSATSRGVLVVAASGNSGAGSISYPARYANAMAVGATDQNNNRASFSQYGAGLDIVAPGVNVQSTYPGSTYASLNGTSMATPHVAGAATLVKQKNPSWSNVRIRNHLKNTATSLGSTNLYGSGLVNAEAATR

SEQ ID NO: 58143 - protein, 269 aa, Unidentified
AQSVPWGISRVQAPAAHNRGLTGSGVKVAVLDTGISTHPDLNIRGGASFVPGEPSTQDGNGHGTHVAGTIAALDNNIGVLGVAPRAELYAVKVLGASGSGSVSSIAQGLEWAGNNRMHVANLSLGKPSPSATLEQAVNSATSRGVLVTAASGNSGAGSISYPARYANAMAVGATDQNNNRASFSQYGAGLDIVAPGVNVQSTYPGSTYASKNGTSMATPHVAGAAALVKQKNPSWSNVQIRNHLKNTATSLGSTNLYGSGLVNAEAATR

SEQ ID NO: 58144 - protein, 269 aa, Unidentified
AQSVPWGISRVQAPAAHNRGLTGRGVKVAVLDTGISTHPDLNIRGGASFVPGEPSTQDGEGHGTHVAGTIAALNNDIGVLGVAPSAELYAVKVLGASGSGSVSSIAQGLEWAGNNDMHVANLSLGSESPSATLEQAVNSATSRGVLVVAASGNSGAGSISYPARYANAMAVGATDQNNNRADFSQYGAGLDIVAPGVNVQSTYPGSTYASLNGTSMATPHVAGAAALVKQKNPSWSNVQIRNRLKNTATSLGSTNLYGSGLVNAEAATR

SEQ ID NO: 58145 - protein, 269 aa, Unidentified
AQSVPWGISRVQAPAAHNRKLTGFGVKVAVLDTGISTHPDLNIRGGASFVPGEPSTQDGNGHGTHVAGTIAALNNSIGVLGVAPSAELYAVKVLGASGSGSVSSIAQGLEWAGNNRMHVANLSLGDPSPSATLEQAVNSATSRGVLVVAASGNSGAGSIDYPARYANAMAVGATDQNNNRASFSQYGAGLDIVAPGVNVQSTYPGSAYASENGTSMATPHVAGAAALVKQKNPSWSNVQIRNHLKNTATSLGSTNLYGSGLVNAEAATR

SEQ ID NO: 58146 - protein, 269 aa, Unidentified
AQSVPWGISRVQAPAAHNRRLTGRGVKVAVLDTGISTHPDLNIRGGASFVPGEPSTQDGNGHGTHVAGTIAALNNDIGVLGVAPSAELYAVKVLGASGSGSVSSIAQGLEWAGNNSMHVANLSLGSESPSATLEQAVNSATSRGVLVVAASGNSGADSISYPARYANAMAVGATDQNNNRASFSQYGAGLDIVAPGVNVQSTYPGSTYASLNGTSMATPHVAGAAALVKQKNPSWSNVQIRNRLKNTATSLGSTNLYGSGLVNAEAATR

SEQ ID NO: 58147 - protein, 269 aa, Unidentified
AQSVPWGISRVQAPAAHNRGLTGSGVKVAVLDTGISTHPDLNIRGGASFVPGEPSTQDGNGHGTHVAGTIAALDNSIGVLGVAPSAELYAVKVLGASGGGAISSIAQGLEWAGNNGMHVANLSLGSPSPSATLEQAVNSATSRGVLVVAASGNSGAGSISYPARYANAMAVGATDQNNNRASFSQYGAGLDIVAPGVNVQSTYPGSTYASLNGTSMATPHVAGAAVLVKQKNPSWSNVRIRNHLKNTATSLGSTNLYGSGLVRAEAATR

SEQ ID NO: 58148 - protein, 269 aa, Unidentified
AQSVPWGISRVQAPAAHNRKLLGSGVKVAVLDTGISTHPDLNIRGGASFVPGEPSTQDGNGHGTHVAGTIAALNNNIGVLGVAPSAELYAVKVLGASGSGSVSSIAQGLEWAGNNRMHVANLSLGDPSPSATLEQAVNSATSRGVLVVAASGNSGAGSISYPARYANAMAVGATDQNNNRASFSQYGAGLDIVAPGVNVQSTYPGSAYASENGTSMATPHVAGAAALVKQKNPSWSNVQIRNHLKNTATSLGSTNLYGSGLVNAEAATR

SEQ ID NO: 58149 - protein, 269 aa, Unidentified
AQSVPWGISRVQAPAAHNRRLWGRGVKVAVLDTGISTHPDLNIRGGASFVPGEPSTQDGNGHGTHVTGTIAALNNSIGVLGVAPSAELYAVKVLGASGAGSVSSIAQGLEWAGNNGMHVANLSLGSPSPSATLEQAVNSATSRGVLVVAASGNSGAGSISYPARYANAMAVGATDQNNNRASFSQYGAGLDIVAPGVNVQSTYIGSAYASLNGTSMATPHVAGAAALVKQKNPSWSNVQIRNHLKNTATSLGSTNLYGSGLVNAEAATR

SEQ ID NO: 58150 - protein, 269 aa, Unidentified
AQSVPWGISRVQAPAAHNRGLAGSGVKVAVLDTGISTHPDLNIRGGASFVPGEPSTQDGNGHGTHVAGTIAALNNSIGVLGVAPSAELYAVKVLGASGQGAISSIAQGLEWAGNNGMHVANLSLGAPSPSATLEQAVNSATSRGVLVVAASGNSGAGSISYPARYANAMAVGATDQNNNRASFSQYGAGLDIVAPGVNVQSTYPGSTYASLNGTSMATPHVAGAAVLVKQKNPSWSNVRIRNHLKNTATSLGSTNLYGSGLVNAEAATR

SEQ ID NO: 58151 - protein, 269 aa, Unidentified
AQSVPWGISRVQAPAAHNRGLTGSGVKVAVLDTGISTHPDLNIRGGASFVPGEPSTQDGEGHGTHVAGTIAALNNGIGVLGVAPSAELYAVKVLGASGSGSVSSIAQGLEWAGNNDMHVANLSLGSPSPSATLEQAVNSATSRGVLVVAASGNSGAGSISYPARYANAMAVGATDQNNNRADFSQYGAGLDIVAPGVNVQSTYPGSTYASLNGTSMATPHVAGAAALVKQKNPSWSNVRIRDRLKNTATSLGSTNLYGSGLVNAEAATR

SEQ ID NO: 58152 - protein, 269 aa, Unidentified
AQSVPWGISRVQAPAAHNRRLTGSGVKVAVLDTGISTHPDLNIRGGASFVPGEPSTQDGEGHGTHVAGTIAALNNDIGVLGVAPSAELYAVKVLGASGSGSVSSIAQGLEWAGNNDMHVANLSLGSPSPSATLEQAVNSATSRGVLVVAASGNSGAGSISYPARYANAMAVGATDQNNNRADFSQYGAGLDIVAPGVNVQSTYPGSTYASLNGTSMATPHVAGAAALVKQKNPSWSNVRIRDHLKNTATSLGSTNLYGSGLVNAEAATR

SEQ ID NO: 58153 - protein, 269 aa, Unidentified
AQSVPWGISRVQAPAAHNRGLWGRGVKVAVLDTGISTHPDLRITGGASFVPGEPSTQDGNGHGTHVAGTIAALNNSIGVLGVAPSAELYAVKVLGASGAGSVSSIAQGLEWAGNNGMHVANLSLGSPSPSATLEQAVNSATSRGVLVVAASGNSGAGSISYPARYANAMAVGATDQNNNRASFSQYGAGLDIVAPGVNVQSTYPQSAYASLNGTSMATPHVAGAAALVKQKNPSWSNVQIRNHLKNTATSLGSTNLYGSGLVNAEAATR

SEQ ID NO: 58154 - protein, 269 aa, Unidentified
AQSVPWGISRVQAPAAHRRRLTGRGVKVAVLDTGISTHPDLNIRGGASFVPGEPSTQDGNGHGTHVAGTIAALDNSIGVLGVAPSAELYAVKVLGASGSGSVSSIAQGLEWAGNNGMHVANLSLGSPSPSATLEQAVNSATSRGVLVVAASGNSGAGSISYPARYANAMAVGATDQNNNRASFSQYGAGLDLVAPGVNVQSTYPGSTYFSLNGTSMATPHVAGAAALVKQKNPSWSNVQIRNRLKNTATSLGSTNLYGSGLVNAEAATR

SEQ ID NO: 58155 - protein, 269 aa, Unidentified
AQSVPWGISRVQAPAAHNRRLTGSGVKVAVLDTGISTHPDLNIRGGASFVPGEPSTQDGEGHGTHVAGTIAALNNGIGVLGVAPSAELYAVKVLGASGSGSVSSIAQGLEWAGNNDMHVANLSLGSPSPSATLEQAVNSATSRGVLVVAASGNSGAGSISYPARYANAMAVGATDQNNNRASFSQYGAGLDIVAPGVNVQSTYPGSTYASLNGTSMATPHVAGAAALVKQKNPSWSNVRIRDRLKNTATSLGSTNLYGSGLVNAEAATR

SEQ ID NO: 58156 - protein, 269 aa, Unidentified
AQVVPWGIERVQAPAAHNRGLTGSGVKVAVLDTGISTHPDLNIRGGASFVPGEPSTQDGNGHGTHVAGTIAALNNNIGVLGVAPSAELYAVKVLGASGSGSVSSIAQGLEWAGNNGMHVANLSLGSPSPSATLEQAVNSATSRGVLVVAASGNSGAGSIQYPARYANAMAVGATDQNNQRASFSQYGAGLDIVAPGVNVQSTYPGSTYASLSGTSMATPHVAGAAALVKQKNPSWSNVQIRNHLKNTATSLGPTNLYGSGLVNAEAATR

SEQ ID NO: 58157 - protein, 269 aa, Unidentified
AQSVPWGISRVQAPAAHNRGLTGSGVKVAVLDTGISTHPDLNIRGGASFVPGEPSTQDGNGHGTHVAGTIAALNNSIGVLGVAPSAELYAVKVLGADGEGAISSIAQGLEWAGNNGMHVANLSLGSPSPSATLEQAVNSATSRGVLVVAASGNSGASSISYPARYANAMAVGATDQNNNRASFSQYGLGLDIVAPGVNVQSTYPGSTYASLNGTSMATPHVAGAAALVKQKNPSWSNRQIRNHLKNTATSLGSTNLYGSGLVNAEAATR

SEQ ID NO: 58158 - protein, 269 aa, Unidentified
AQSVPWGISRVQAPAAHNRRLTGRGVKVAVLDTGISTHPDLNIRGGASFVPGEPSTQDGEGHGTHVAGTIAALNNDIGVLGVAPSAELYAVKVLGASGSGSVSSIAQGLEWAGNNSMHVANLSLGSPSPSATLEQAVNSATSRGVLVVAASGNSGAGSISYPARYANAMAVGATDQNNNRADFSQYGAGLDIVAPGVNVQSTYPGSTYASLNGTSMATPHVAGAAALVKQKNPSWSNVQIRNRLKNTATSLGSTNLYGSGLVNAEAATR

SEQ ID NO: 58159 - protein, 269 aa, Unidentified
AQSVPWGISRVQAPAAHNRGLTGRGVKVAVLDTGISTHPDLNIRGGASFVPGEPSTQDGEGHGTHVAGTIAALNNDIGVLGVAPSAELYAVKVLGASGSGSVSSIAQGLEWAGNNDMHVANLSLGSESPSATLEQAVNSATSRGVLVVAASGNSGAGSISYPARYANAMAVGATDQNNNRASFSQYGAGLDIVAPGVNVQSTYPGSTYASLNGTSMATPHVAGAAALVKQKNPSWSNVRIRNRLKNTATSLGSTNLYGSGLVNAEAATR

SEQ ID NO: 58160 - protein, 269 aa, Unidentified
AQSVPWGISRVQAPAAHNRRLTGSGVKVAVLDTGISTHPDLNIRGGASFVPGEPSTQDGEGHGTHVAGTIAALNNDIGVLGVAPSAELYAVKVLGASGSGSVSSIAQGLEWAGNNSMHVANLSLGSESPSATLEQAVNSATSRGVLVVAASGNSGADSISYPARYANAMAVGATDQNNNRASFSQYGAGLDIVAPGVNVQSTYPGSTYASLNGTSMATPHVAGAAALVKQKNPSWSNVRIRNHLKNTATSLGSTNLYGSGLVNAEAATR

SEQ ID NO: 58161 - protein, 269 aa, Unidentified
AQSVPWGISRVQAPAAHNRGLTGSGVKVAVLDTGISTHPDLNIRGGASFVPGEPSTQDGNGHGTHVAGTIAALNNSIGVLGVAPSAELYAVKVLGASGGGAISSIAQGLEWAGLNGMHVANLSLGNPSPSATLEQAVNSATSRGVLVVAASGNSGAGSISYPARYANAMAVGATDQNNNRASFSQYGAGLDIVAPGVNVQSTVPGSTYASLNGTSMATPHVAGAAVLVKQKNPSWSNVQIRNHLKNTATSLGSTNLYGSGLVNAEAATR

SEQ ID NO: 58162 - protein, 269 aa, Unidentified
AQSVPWGISRVQAPAAHNRGLTGSGVKVAVLDTGISTHPDLNIRGGASFVPGEPSTQDGNGHGTHVAGTIAALNNKIGVLGVAPSAELYAVKVLGADGRGAISSIAQGLEWAGNNGMHVANLSLGSPSPSATLEQAVNSATSRGVLVVAASGNSGASSISYPARYANAMAVGATDQNNNRASFSQYGLGLDIVAPGVNVQSTYPGSTYASLNGTSMATPHVAGAAALVKQKNPSWSNVQIRNHLKNTATSLGSTNLYGSGLVNAEAATR

SEQ ID NO: 58163 - protein, 269 aa, Unidentified
AQSVPWGISRVQAPAAHNRGLRGSGVKVAVLDTGISTHPDLRIRGGASFVPGEPSTQDGNGHGTHVAGTIAALNNSIGVLGVAPSAELYAVKVLGASGGGAISSIAQGLEWAGNNGMHVANLSLGSPSPSATLEQAVNSATSRGVLVVAASGNSGAGSISYPARYANAMAVGATDQNNNRASFSQYGAGLDIVAPGVNVQSTYPGSTYASLNGTSMATPHVAGAAVLVKQKNPSWSNVRIRNHLKNTATSLGSTNLYGSGLVNAEAATR

SEQ ID NO: 58164 - protein, 269 aa, Unidentified
AQSVPWGISRVQAPAAHNRGLTGSGVKVAVLDTGISTHPDLRIRGGASFVPGEPSTQDGNGHGTHVAGTIAALNNSIGVLGVAPSAELYAVKVLGASGGGAISSIAQGLEWAGNNGMHVANLSLGSPSPSATLEQAVNSATSRGVLVLAASGNSGAGSISYPARYANAMAVGATDQNNNRASFSQYGAGLDIVAPGVNVQSTYPGSTYASLNGTSMATPHVAGAAVLVKQKNPSWSNVRIRNHLKNTATSLGSTNLYGSGLVNAEAATR

SEQ ID NO: 58165 - protein, 269 aa, Unidentified
AQSVPWGISRVQAPAAHNRGLTGRGVKVAVLDTGISTHPDLNIRGGASFVPGEPSTQDGNGHGTHVAGTIAALNNSIGVLGVAPDAELYAVKVLGASGGGAISSIAQGLEWAGNNGMHVANLSLGSPSPSATLEQAVNSATSRGVLVVAASGNSGAGSISYPARYANAMAVGATDQNNNRASFSQYGAGLDIVAPGVNVQSTYPGSTYASLNGTSMATPHVAGAAVLVKQKNPSWSNVRIRNHLKNTATSLGSTNLYGSGLVNAEAATR

SEQ ID NO: 58166 - protein, 269 aa, Unidentified
AQSVPWGISRVQAPAAHRRRLWGRGVKVAVLDTGISTHPDLNIRGGASFVPGEPSTQDGNGHGTHVAGTIAALDNSIGVLGVAPSAELYAVKVLGASGSGSVSSIAQGLEWAGNNGMHVANLSLGSPSPSATLEQAVNSATSRGVLVVAASGNSGAGSISYPARYANAMAVGATDQNNNRASFSQYGAGLDIVAPGVNVQSTYPGSAYASLNGTSMATPHVAGAAALVKQKNPSWSNVQIRNRLKNTATSLGSTNLYGSGLVNAEAATR

SEQ ID NO: 58167 - protein, 269 aa, Unidentified
AQSVPWGISRVQAPAAHNRKLTGGGVKVAVLDTGISTHPDLNIRGGASFVPGEPSTQDGEGHGTHVAGTIAALNNSIGVLGVAPSAELYAVKVLSASGQGSVSSIAQGLEWAGLNGMHVANLSLGAPSPSATLEQAVNSATSRGVLVVAASGNSGAGSISYPARYANAMAVGATDQNNNRASFSQYGAGLDIVAPGVNVQSTYPGSTYASLNGTSMATPHVAGAAALVKQKNPSWSNVQIRNHLKNTATSLGSTNLYGSGLVNAEAATR

SEQ ID NO: 58168 - protein, 269 aa, Unidentified
AQSVPWGISRVQAPAAHNRRLTGRGVKVAVLDTGISTHPDLNIRGGASFVPGEPSTQDGNGHGTHVAGTIAALNNGIGVLGVAPSAELYAVKVLGASGSGSVSSIAQGLEWAGNNSMHVANLSLGSESPSATLEQAVNSATSRGVLVVAASGNSGAGSISYPARYANAMAVGATDQNNNRASFSQYGAGLDIVAPGVNVQSTYPGSTYASLNGTSMATPHVAGAAALVKQKNPSWSNVRIRDHLKNTATSLGSTNLYGSGLVNAEAATR

SEQ ID NO: 58169 - protein, 269 aa, Unidentified
AQSVPWGISRVQAPAAHNRGLTGSGVKVAVLDTGISTHPDLNIRGGASFVPGEPSTQDGNGHGTHVAGTIAALNNSIGVLGVAPDAELYAVKVLGASGGGAISSIAQGLEWAGNNGMHVANLSLGSPSPSATLEQAVNSATSRGVLVVAASGNSGAGSISYPARYANAMAVGATDQNNNRASFSQYGAGLDIVAPGVNVQSTYPGSTYASLNGTSMATPHVAGAAVLVKQKNPSWSNVRIRNHLKNTATSLGSTNLYGSGLVRAEAATR

SEQ ID NO: 58170 - protein, 269 aa, Unidentified
AQSVPWGISRVQAPAAHNRGLTGSGVKVAVLDTGISTHPDLNIRGGASFVPGEPSTQDGNGHGTHVAGTIAALNNSIGVLGVAPSAELYAVKVLGASGSGGVSSIAQGLEWAGNNGMHVANLSLGSPSPSATLEQAVNSATSRGVLVVAASGNSGEGSISYPARYANAMAVGATDQNNNRADFSQYGAGLDIVAPGVNVQSTYPGSTYASLNGTSMATPHVAGAAVLVKQKNPSWSNVRIRDRLKNTATSLGSTNLYGSGLVNAEAATR

SEQ ID NO: 58171 - protein, 269 aa, Unidentified
AQSVPWGISRVQAPAAHNRGLTGSGVKVAVLDTGISTHPDLNIRGGASFVPGEPSTQDGNGHGTHVAGTIAALNNWRGVLGVAPSAELYAVKVLGADGEGAISSIAQGLEWAGNNGMHVANLSLGSPSPSATLEQAVNSATSRGVLVVAASGNSGASSISYPARYANAMAVGATDQNNNRASFSQYGAGLDIVAPGVNVQSTYPGSTYASLNGTSMATPHVAGAAALVKQKNPSWSNVQIRNHLKNTATSLGSTNLYGSGLVNAEAATR

SEQ ID NO: 58172 - protein, 269 aa, Unidentified
AQSVPWGISRVQAPAAHNRRLTGSGVKVAVLDTGISTHPDLRIRGGASFVPGEPSTQDGNGHGTHVAGTIAALNNSIGVLGVAPSAELYAVKVLGASGGGAISSIAQGLEWAGNNGMHVANLSLGSPSPSATLEQAVNSATSRGVLVVAASGNSGAGSISYPARYANAMAVGATDQNNNRASFSQYGAGLDIVAPGVNVQSTYPGSTYASLNGTSMATPHVAGAAVLVKQKNPSWSNVRIRNHLKNTATSLGSTNLYGSGLVNAEAATR

SEQ ID NO: 58173 - protein, 269 aa, Unidentified
AQSVPWGISRVQAPAAHNRGLTGSGVKVAVLDTGISTHPDLNIRGGASFVPGEPSTQDGEGHGTHVAGTIAALNNGIGVLGVAPSAELYAVKVLGASGSGSVSSIAQGLEWAGNNSMHVANLSLGSESPSATLEQAVNSATSRGVLVVAASGNSGADSISYPARYANAMAVGATDQNNNRASFSQYGAGLDIVAPGVNVQSTYPGSTYASLNGTSMATPHVAGAAALVKQKNPSWSNVQIRDRLKNTATSLGSTNLYGSGLVNAEAATR

SEQ ID NO: 58174 - protein, 269 aa, Unidentified
AQSVPWGISRVQAPAAHNRRLTGRGVKVAVLDTGISTHPDLNIRGGASFVPGEPSTQDGNGHGTHVAGTIAALNNGIGVLGVAPSAELYAVKVLGASGSGSVSSIAQGLEWAGNNSMHVANLSLGSPSPSATLEQAVNSATSRGVLVVAASGNSGAGSISYPARYANAMAVGATDQNNNRADFSQYGAGLDIVAPGVNVQSTYPGSTYASLNGTSMATPHVAGAAALVKQKNPSWSNVQIRDRLKNTATSLGSTNLYGSGLVNAEAATR

SEQ ID NO: 58175 - protein, 269 aa, Unidentified
AQSVPWGISRVQAPAAHNRRLTGRGVKVAVLDTGISTHPDLNIRGGASFVPGEPSTQDGNGHGTHVAGTIAALNNDIGVLGVAPSAELYAVKVLGASGSGSVSSIAQGLEWAGNNDMHVANLSLGSESPSATLEQAVNSATSRGVLVVAASGNSGAGSISYPARYANAMAVGATDQNNNRADFSQYGAGLDIVAPGVNVQSTYPGSTYASLNGTSMATPHVAGAAALVKQKNPSWSNVQIRDHLKNTATSLGSTNLYGSGLVNAEAATR

SEQ ID NO: 58176 - protein, 269 aa, Unidentified
AQSVPWGISRVQAPAAHNRGLTGSGVKVAVLDTGISTHPDLNIRGGASFVPGEPSTQDGNGHGTHVAGTIAALNNSIGVLGVAPSAELYAVKVLGASGGGAISSIAQGLEWAGNNGMHVANLSLGSPSPSATLEQAVNSATSRGVLVVAASGNSGAGSISYPARYANAMAVGATDQNNNRASFSQYGAGLDIVAPGVNVQSTYPGSTYASLNGTSMATPHVAGAAVLVKQKNPSWSNVRIRNRLKNTATSLGSTNLYGSGLVRAEAATR

SEQ ID NO: 58177 - protein, 269 aa, Unidentified
AQSVPWGISRVQAPAAHNRGLTGSGVKVAVLDTGISTHPDLNIRGGASFVPGEPSTQDGNGHGTHVAGTIAALNNGIGVLGVAPSAELYAVKVLGASGSGSVSSIAQGLEWAGNNDMHVANLSLGSESPSATLEQAVNSATSRGVLVVAASGNSGADSISYPARYANAMAVGATDQNNNRASFSQYGAGLDIVAPGVNVQSTYPGSTYASLNGTSMATPHVAGAAALVKQKNPSWSNVVIREHLKNTATSLGSTNLYGSGLVNAFAATR

SEQ ID NO: 58178 - protein, 269 aa, Unidentified
AQSVPWGISRVQAPAAHNRGLTGSGVKVAVLDTGISTHPDLDIRGGASFVPGEPSTQDGNGHGTHVAGTIAALNNSIGVLGVAPSAELYAVKVLGASGGGAISSIAQGLEWAGNNGMHVANLSLGSPSPSATLEQAVNSATSRGVLVVAASGNSGAGSISYPARYANAMAVGATDQNNNRASFSQYGAGLDIVAPGVNVQSTYPGSTYASLNGTSMATPHVAGAAVLVKQKNPSWSNVRIRNHLKNTATSLGSTNLYGSGLVRAEAATR

SEQ ID NO: 58179 - protein, 269 aa, Unidentified
AQSVPWGISRVQAPAAHNRKLTGSGVKVAVLDTGISTHPDLNIRGGASFVPGEPSTQDGEGHGTHVAGTIAALNNNIGVLGVAPSAELYAVKVLGASGQGSVSSIAGGLEWAGLNGMHVANLSLGAPSPSATLEQAVNSATSRGVLVVAASGNSGAGSISYPARYANAMAVGATDQNNNRASFSQYGAGLDIVAPGVNVQSTYPGSTYASLNGTSMATPHVAGAAALVKQKNPSWSNVQIRNHLKNTATSLGSTNLYGSGLVNAEAATR

SEQ ID NO: 58180 - protein, 269 aa, Unidentified
AQSVPWGISRVQAPAAHNRRLTGRGVKVAVLDTGISTHPDLNIRGGASFVPGEPSTQDGNGHGTHVAGTIAALNNNIGVLGVAPSAELYAVKVLSASGNGSVSSIANGLEWAGLNGMHVANLSLGSPSPSATLEQAVNSATSRGVLVVAASGNSGAGSISYPARYANAMAVGATDQNNNRASFSQYGAGLDIVAPGVNVQSTYPGSTYASLNGTSMATPHVAGAAALVKQKNPSWSNVQIRNHLKNTATSLGSTNLYGSGLVNAEAATR

SEQ ID NO: 58181 - protein, 269 aa, Unidentified
AQSVPWGISRVQAPAAHNRGLTGSGVKVAVLDTGISTHPDLNIRGGASFVPGEPSTQDGNGHGTHVAGTIAALDNRIGVLGVAPSAELYAVKVLGASGGGAISSIAQGLEWAGNNGMHVANLSLGSPSPSATLEQAVNSATSRGVLVVAASGNSGAGSISYPARYANAMAVGATDQNNNRASFSQYGAGLDIVAPGVNVQSTYPGSTYASLNGTSMATPHVAGAAVLVKQKNPSWSNVRIRNHLKNTATSLGSTNLYGSGLVNAEAATR

SEQ ID NO: 58182 - protein, 269 aa, Unidentified
AQSVPWGISRVQAPAAHNRRLTGRGVKVAVLDTGISTHPDLNIRGGASFVPGEPSTQDGNGHGTHVAGTIAALNNGIGVLGVAPSAELYAVKVLGASGSGSVSSIAQGLEWAGNNDMHVANLSLGSESPSATLEQAVNSATSRGVLVVAASGNSGADSISYPARYANAMAVGATDQNNNRASFSQYGAGLDIVAPGVNVQSTYPGSTYASLNGTSMATPHVAGAAALVKQKNPSWSNVQIRNRLKNTATSLGSTNLYGSGLVNAEAATR

SEQ ID NO: 58183 - protein, 269 aa, Unidentified
AQSVPWGISRVQAPAAHNRRLTGSGVKVAVLDTGISTHPDLNIRGGASFVPGEPSTQDGNGHGTHVAGTIAALNNSIGVLGVAPSAELYAVKVLGASGAGAISSIAQGLEWAGNNRMHVANLSLGSPSPSATLEQAVNSATSRGVLVVAASGNSGAGSISYPARYANAMAVGATDQNNNRASFSQYGAGLDIVAPGVNVQSTYPGSTYASLNGTSMATPHVAGAAVLVKQKNPSWSNVRIRNHLKNTATSLGSTNLYGSGLVNAEAATR

SEQ ID NO: 58184 - protein, 269 aa, Unidentified
AQSVPWGISRVQAPAAHRRGLTGSGVKVAVLDTGISTHPDLDIRGGASFVPGEPSTQDGNGHGTHVAGTIAALNNSIGVLGVAPSAELYAVKVLGASGGGAISSIAQGLEWAGNNGMHVANLSLGSPSPSATLEQAVNSATSRGVLVVAASGNSGAGSISYPARYANAMAVGATDQNNNRASFSQYGAGLDIVAPGVNVQSTYPGSTYASLNGTSMATPHVAGAAVLVKQKNPSWSNVRIRNHLKNTATSLGSTNLYGSGLVNAEAATR

SEQ ID NO: 58185 - protein, 269 aa, Unidentified
AQSVPWGISRVQAPAAHNRGLAGSGVKVAVLDTGISTHPDLNIRGGASFVPGEPSTQDGNGHGTHVAGTIAALNNNIGVLGVAPSAELYAVKVLGASGGGAISSIAQGLEWAGNNGMHVANLSLGSPSPSATLEQAVNSATSRGVLVVAASGNSGAGSISYPARYANAMAVGATDQNNNRASFSQYGAGLDIVAPGVNVQSTYPGSTYASLNGTSMATPHVAGAAVLVKQKNPSWSNVRIRNHLKNTATSLGSTNLYGSGLVNAEAATR

SEQ ID NO: 58186 - protein, 269 aa, Unidentified
AQSVPWGISRVQAPAAHRRGLTGRGVKVAVLDTGISTHPDLNIRGGASFVPGEPSTQDGNGHGTHVAGTIAALDNSIGVLGVAPSAELYAVKVLGASGSGSVSSIAQGLEWAGNNGMHVANLSLGSPSPSATLEQAVNSATSRGVLVVAASGNSGAGSISYPARYANAMAVGATDQNNNRASFSQYGAGLDLVAPGVNVQSTYPQSTYFSLNGTSMATPHVAGAAALVKQKNPSWSNVQIRNRLKNTATSLGSTNLYGSGLVNAEAATR

SEQ ID NO: 58187 - protein, 269 aa, Unidentified
AQSVPWGISRVQAPAAHNRRLTGSGVKVAVLDTGISTHPDLNIRGGASFVPGEPSTQDGNGHGTHVAGTIAALNNDIGVLGVAPSAELYAVKVLGASGSGSVSSIAQGLEWAGNNSMHVANLSLGSESPSATLEQAVNSATSRGVLVVAASGNSGADSISYPARYANAMAVGATDQNNNRADFSQYGAGLDIVAPGVNVQSTYPGSTYASLNGTSMATPHVAGAAALVKQKNPSWSNVRIRNHLKNTATSLGSTNLYGSGLVNAEAATR

SEQ ID NO: 58188 - protein, 269 aa, Unidentified
AQSVPWGISRVQAPAAHNRRLTGRGVKVAVLDTGISTHPDLNIRGGASFVPGEPSTQDGNGHGTHVAGTIAALNNDIGVLGVAPSAELYAVKVLGASGSGSVSSIAQGLEWAGNNSMHVANLSLGSESPSATLEQAVNSATSRGVLVVAASGNSGADSISYPARYANAMAVGATDQNNNRASFSQYGAGLDIVAPGVNVQSTYPGSTYASLNGTSMATPHVAGAAALVKQKNPSWSNVRIRNHLKNTATSLGSTNLYGSGLVNAEAATR

SEQ ID NO: 58189 - protein, 269 aa, Unidentified
AQSVPWGISRVQAPAAHNRRLTGRGVKVAVLDTGISTHPDLNIRGGASFVPGEPSTQDGNGHGTHVAGTIAALNNGIGVLGVAPSAELYAVKVLGASGSGSVSSIAQGLEWAGNNSMHVANLSLGSPSPSATLEQAVNSATSRGVLVVAASGNSGAGSISYPARYANAMAVGATDQNNNRASFSQYGAGLDIVAPGVNVQSTYPGSTYASLNGTSMATPHVAGAAALVKQKNPSWSNVRIRDRLKNTATSLGSTNLYGSGLVNAEAATR

SEQ ID NO: 58190 - protein, 269 aa, Unidentified
AQSVPWGISRVQAPAAHNRGLTGSGVKVAVLDTGISTHPDLNIRGGASFVPGEPSTQDGNGHGTHVAGTIAALNNSIGVLGVAPSAELYAVKVLGASGGGAISSIAQGLEWAGNNGMHVANLSLGSPSPSATLEQAVNSATSRGVLVVAASGNSGADSISYPARYANAMAVGATDQNNNRASFSQYGAGLDIVAPGVNVQSTYPGSTYASLNGTSMATPHVAGVAALVKHKNPSWSNVRIRNHLKNTATSLGSTNLYGSGLVNAEAATR

SEQ ID NO: 58191 - protein, 269 aa, Unidentified
AQSVPWGISRVQAPAAHNRRLTGSGVKVAVLDTGISTHPDLRIRGGASFVPGEPSTQDGNGHGTHVAGTIAALNNNIGVLGVAPSAELYAVKVLSASGNGSVSSIANGLEWAGNNGMHVANLSLGSPSPSATLEQAVNSATSRGVLVVAASGNSGAGSISYPARYANAMAVGATDQNNNRASFSQYGAGLDIVAPGVNVQSTYPGSTYASQNGTSMATPHVAGAAALVKQKNPSWSNVQIRNHLKNTATSLGSTNLYGSGLVNAEAATR

SEQ ID NO: 58192 - protein, 269 aa, Unidentified
AQSVPWGISRVQAPAAHNRGLTGSGVKVAVLDTGISTHPDLNIRGGASFVPGEPSTQDGNGHGTHVAGTIAALNNSIGVLGVAPSAELYAVKVLGASGGGSLSSIAQGLEWAGNNGMHVANLSLGSPSPSATLEQAVNSATSRGVLVVAASGNSGAESISYPARYANAMAVGATDQNNNRASFSQYGAGLDIVAPGVNVQSTYPGSTYASLNGTSMATPHVAGAAVLVKQKNPSWSNVRIRDRLKNTATSLGSTNLYGSGLVNAEAATR

SEQ ID NO: 58193 - protein, 269 aa, Unidentified
AQSVPWGISRVQAPAAHNRGLTGSGVKVAVLDTGISTHPDLNITGGASFVPGEPSTQDGNGHGTHVAGTIAALNNRIGVLGVAPSAELYAVKVLGASGGGAISSIAQGLEWAGNNGMHVANLSLGSPSPSATLEQAVNSATSRGVLVVAASGNSGAGSISYPARYANAMAVGATDQNNNRASFSQYGAGLDIVAPGVNVQSTYPGSTYASLNGTSMATPHVAGAAVLVKQKNPSWSNVRIRNHLKNTATSLGSTNLYGSGLVNAEAATR

SEQ ID NO: 58194 - protein, 269 aa, Unidentified
AQSVPWGISRVQAPAAHNRGLTGRGVKVAVLDTGISTHPDLNIRGGASFVPGEPSTQDGEGHGTHVAGTIAALNNGIGVLGVAPSAELYAVKVLGASGSGSVSSIAQGLEWAGNNDMHVANLSLGSPSPSATLEQAVNSATSRGVLVVAASGNSGADSISYPARYANAMAVGATDQNNNRADFSQYGAGLDIVAPGVNVQSTYPGSTYASLNGTSMATPHVAGAAALVKQKNPSWSNVRIRNHLKNTATSLGSTNLYGSGLVNAEAATR

SEQ ID NO: 58195 - protein, 269 aa, Unidentified
AQSVPWGISRVQAPAAHNRGLRGSGVKVAVLDTGISTHPDLNIRGGASFVPGEPSTQDGNGHGTHVAGTIAALNNSIGVLGVAPSAELYAVKVLGASGGGAISSIAQGLEWAGNNGMHVANLSLGSPSPSATLEQAVNSATSRGVLVVAASGNSGAGSISYPARYANAMAVGATDQNNNRASFSQYGAGLDIVAPGVNVQSTYPGSTYASLNGTSMATPHVAGAAVLVKQKNPSWSNVRIRNHLKNTATSLGSTNLYGSGLVNAAAATR

SEQ ID NO: 58196 - protein, 269 aa, Unidentified
AQSVPWGISRVQAPAAHNRRLTGSGVKVAVLDTGISTHPDLNIRGGASFVPGEPSTQDGNGHGTHVAGTIAALNNSIGVLGVAPSAELYAVKVLGASGGGSISSIAQGLEWAGNNGMHVANLSLGSPSPSATLEQAVNSATSRGVLVVAASGNSGAGSISYPARYANAMAVGATDQNNNRASFSQYGAGLDIVAPGVNVQSTYPGSAYFSLNGTSMATPHVAGAAVLVKQKNPSWSNVRIRNHLKNTATSLGSTNLYGSGLVNAEAATR

SEQ ID NO: 58197 - protein, 269 aa, Unidentified
AQSVPWGISRVQAPAAHNRGLTGSGVKVAVLDTGISTHPDLNIRGGASFVPGEPSTQDGNGHGTHVAGTIAALNNSIGVLGVAPSAELYAVKVLGASGGGAISSIAQGLEWAGLNGMHVANLSLGSPSPSATLEQAVNSATSRGVLVVAASGNSGAGSISYPARYANAMAVGATDQNNNRASFSQYGAGLDIVAPGVNVQSTVPQSTYASLNGTSMATPHVAGAAVLVKQKNPSWSNVQIRNHLKNTATSLGSTNLYGSGLVNAEAATR

SEQ ID NO: 58198 - protein, 269 aa, Unidentified
AQSVPWGISRVQAPAAHNRGLAGRGVKVAVLDTGISTHPDLNIRGGASFVPGEPSTQDGNGHGTHVAGTIAALNNSIGVLGVAPSAELYAVKVLGASGSGSVSSIAQGLEWAGLNGMHVANLSLGIPSPSATLEQAVNSATSRGVLVVAASGNSGEGSIDYPARYANAMAVGATDQNNNRADFSQYGAGLDIVAPGVNVQSTYPGSTYASLNGTSMATPHVAGAAALVKQKNPSWSNVQIRNHLKNTATSLGSTNLYGSGLVNAEAATR

SEQ ID NO: 58199 - protein, 269 aa, Unidentified
AQSVPWGISRVQAPAAHNRGLTGSGVKVAVLDTGISTHPDLNIRGGASFVPGEPSTQDGNGHGTHVAGTIAALNNSIGVLGVAPSAELYAVKVLGASGSGSVSSIAQGLEWAGNNRMHVANLSLGSESPSATLEQAVNSATSRGVLVVAASGNSGADSISYPARYANAMAVGATDQNNNRADFSQYGAGLDIVAPGVNVQSTYPGSTYASLNGTSMATPHVAGAAALVKQRNPSWSNVQIRDRLKNTATSLGSTNLYGSGLVNAEAATR

SEQ ID NO: 58200 - protein, 269 aa, Unidentified
AQSVPWGISRVQAPAAHNRRLTGSGVKVAVLDTGISTHPDLNIRGGASFVPGEPSTQDGNGHGTHVAGTIAALNNGIGVLGVAPSAELYAVKVLGASGSGSVSSIAQGLEWAGNNSMHVANLSLGSESPSATLEQAVNSATSRGVLVVAASGNSGAGSISYPARYANAMAVGATDQNNNRADFSQYGAGLDIVAPGVNVQSTYPGSTYASLNGTSMATPHVAGAAALVKQKNPSWSNVQIRDRLKNTATSLGSTNLYGSGLVNAEAATR

SEQ ID NO: 58201 - protein, 269 aa, Unidentified
AQSVPWGISRVQAPAAHNRKLTGFGVKVAVLDTGISTHPDLNIRGGASFVPGEPSTQDGNGHGTHVAGTIAALNNNIGVLGVAPSAELYAVKVLGASGSGSVSSIAQGLEWAGNNRMHVANLSLGDPSPSATLEQAVNSATSRGVLVVAASGNSGAGSISYPARYANAMAVGATDQNNNRASFSQYGAGLDIVAPGVNVQSTYPGSAYASENGTSMATPHVAGAAALVKQKNPSWSNVQIRNHLKNTATSLGSTNLYGSGLVNAEAATR

SEQ ID NO: 58202 - protein, 269 aa, Unidentified
AQSVPWGISRVQAPAAHNRKLTGSGVKVAVLDTGISTHPDLNIRGGASFVPGEPSTQDGEGHGTHVAGTIAALNNNIGVLGVAPSAELYAVKVLGASGNGSVSSIAGGLEWAGLNGMHVANLSLGSPSPSATLEQAVNSATSRGVLVVAASGNSGAGSISYPARYANAMAVGATDQNNNRADFSQYGAGLDIVAPGVNVQSTYPGSTYASLNGTSMATPHVAGAAALVKQKNPSWSNVQIRNHLKNTATSLGSTNLYGSGLVNAEAATR

SEQ ID NO: 58203 - protein, 269 aa, Unidentified
AQSVPWGISRVQAPAAHNRGLTGSGVKVAVLDTGISTHPDLRIRGGASFVPGEPSTQDGNGHGTHVAGTIAALNNSIGVLGVAPSAELYAVKVLGASGGGAISSIAQGLEWAGNNGMHVANLSLGSPSPSATLEQAVNSATSRGVLVVAASGNSGAGSISYPARYANAMAVGATDQNNNRASFSQYGAGLDIVAPGVNVQSTYPGSTYASLNGTSMATPHVAGAAVLVKQKNPSWSNVRIRNHLKNTATSLGSTNLYGSGLVNALAATR

SEQ ID NO: 58204 - protein, 269 aa, Unidentified
AQSVPWGISRVQAPAAHRRGLTGRGVKVAVLDTGISTHPDLNIRGGASFVPGEPSTQDGNGHGTHVAGTIAALDNSIGVLGVAPSAELYAVKVLGASGSGSVSSIAQGLEWAGANGMHVANLSLGSPSPSATLEQAVNSATSRGVLVVAASGNSGAGSISYPARYANAMAVGATDQNNNRASFSQYGAGLDLVAPGVNVQSTYPQSTYASLNGTSMATPHVAGAAALVKQKNPSWSNVQIRNRLKNTATSLGSTNLYGSGLVNAEAATR

SEQ ID NO: 58205 - protein, 269 aa, Unidentified
AQSVPWGISRVQAPAAHNRKLTAFGVKVAVLDTGISTHPDLNIRGGASFVPGEPSTQDGEGHGTHVAGTIAALNNSIGVLGVAPSAELYAVKVLGASGSGSVSSIAQGLEWAGNNRMHVANLSLGSPSPSATLEQAVNSATSRGVLVVAASGNSGAGSISYPARYANAMAVGATDQNNNRADFSQYGAGLDIVAPGVNVQSTYPGSAYASLNGTSMATPHVAGAAALVKQKNPSWSNVQIRNHLKNTATSLGSTNLYGSGLVNAEAATR

SEQ ID NO: 58206 - protein, 269 aa, Unidentified
AQSVPWGISRVQAPAAHRRGLTGRGVKVAVLDTGISTHPDLNIRGGASFVPGEPSTQDGNGHGTHVAGTIAALDNSIGVLGVAPSAELYAVKVLGASGSGSVSSIAQGLEWAGNNGMHVANLSLGSPSPSATLEQAVNSATSRGVLVVAASGNSGAGSISYPARYANAMAVGATDQDNNRASFSQYGAGLDLVAPGVNVQSTYPGSTYFSLNGTSMATPHVAGAAALVKQKNPSWSNVQIRNRLKNTATSLGSTNLYGSGLVNAEAATR

SEQ ID NO: 58207 - protein, 269 aa, Unidentified
AQSVPWGISRVQAPAAHNRGLTGRGVKVAVLDTGISTHPDLNIRGGASFVPGEPSTQDGEGHGTHVAGTIAALNNGIGVLGVAPSAELYAVKVLGASGSGSVSSIAQGLEWAGNNSMHVANLSLGSPSPSATLEQAVNSATSRGVLVVAASGNSGADSISYPARYANAMAVGATDQNNNRADFSQYGAGLDIVAPGVNVQSTYPGSTYASLNGTSMATPHVAGAAALVKQKNPSWSNVQIRNRLKNTATSLGSTNLYGSGLVNAEAATR

SEQ ID NO: 58208 - protein, 269 aa, Unidentified
AQSVPWGISRVQAPAAHNRRLTGRGVKVAVLDTGISTHPDLNIRGGASFVPGEPSTQDGNGHGTHVAGTIAALNNGIGVLGVAPSAELYAVKVLGASGSGSVSSIAQGLEWAGNNSMHVANLSLGSESPSATLEQAVNSATSRGVLVVAASGNSGADSISYPARYANAMAVGATDQNNNRASFSQYGAGLDIVAPGVNVQSTYPGSTYASLNGTSMATPHVAGAAALVKQKNPSWSNVRIRNHLKNTATSLGSTNLYGSGLVNAEAATR

SEQ ID NO: 58209 - protein, 269 aa, Unidentified
AQSVPWGISRVQAPAAHNRGLTGSGVKVAVLDTGISTHPDLNITGGASFVPGEPSTQDGNGHGTHVAGTIAALNNSIGVLGVAPSAELYAVKVLGASGGGAISSIAQGLEWAGNNGMHVANLSLGSPSPSATLEQAVNSATSRGVLVVAASGNSGAGSISYPARYANAMAVGATDQNNNRASFSQYGAGLDIVAPGVNVQSTYPGSTYASLNGTSMATPHVAGAAVLVKQKNPSWSNVRIRNHLKNTATSLGSTNLYGSGLVRAEAATR

SEQ ID NO: 58210 - protein, 269 aa, Unidentified
AQSVPWGISRVQAPAAHNRGLTGSGVKVAVLDTGISTHPDLNIRGGASFVPGEPSTQDGNGHGTHVAGTIAALNNSIGVLGVAPSAELYAVKVLGASGGGAISSIAQGLEWAGNNGMHVANLSLGSPSPSATLEQAVNSATSRGVLVVAASGNSGEGSISYPARYANAMAVGATDQNNNRASFSQYGAGLDIVAPGVNVQSTYPGSTYASLNGTSMATPHVAGAAVLVKQKNPSWSNVRIRNRLKNTATSLGSTNLYGSGLVNAEAATR

SEQ ID NO: 58211 - protein, 269 aa, Unidentified
AQSVPWGISRVQAPAAHNRGLTGSGVKVAVLDTGISTHPDLDIRGGASFVPGEPSTQDGNGHGTHVAGTIAALNNSIGVLGVAPSAELYAVKVLGASGGGAISSIAQGLEWAGNNGMHVANLSLGSPSPSATLEQAVNSATSRGVLVVAASGNSGAGSISYPARYANAMAVGATDQNNNRASFSQYGAGLDIVAPGVNVQSTYPGSTYASLNGTSMATPHVAGAAVLVKQKNPSWRNVQIRNRLKNTATSLGSTNLYGSGLVNAEAATR

SEQ ID NO: 58212 - protein, 269 aa, Unidentified
AQSVPWGISRVQAPASHNRGLAGSGVKVAVLDTGISTHPDLNIRGGASFVPGEPSTQDGNGHGTHVAGTIAALNNSIGVLGVAPSAELYAVKVLGASGGGALSSIAQGLEWAGNNGMHVANLSLGNPSPSATLEQAVNSATSRGVIVVAASGNSGAGSISYPARYANAMAVGATDQNNNRASFSQYGAGLDIVAPGVNVQSTYPGSTYASLNGTSMATPHVAGAAALVKQKNPSWSNVQIRNHLKNTATSLGSTNLYGSGLVNAEAATR

SEQ ID NO: 58213 - protein, 269 aa, Unidentified
AQSVPWGISRVQAPAAHNRKLTGSGVKVAVLDTGISTHPDLNIRGGASFVPGEPSTQDGEGHGTHVAGTIAALNNSIGVLGVAPSAELYAVKVLSASGNGSVSSIAQGLEWAGLNGMHVANLSLGAPSPSATLEQAVNSATSRGVLVVAASGNSGAGSISYPARYANAMAVGATDQNNNRASFSQYGAGLDIVAPGVNVQSTYPGSTYASQNGTSMATPHVAGAAALVKQKNPSWSNVQIRNHLKNTATSLGSTNLYGSGLVNAEAATR

SEQ ID NO: 58214 - protein, 269 aa, Unidentified
AQSVPWGISRVQAPAAHNRKLTGGGVKVAVLDTGISTHPDLNIRGGASFVPGEPSTQDGEGHGTHVAGTIAALNNNIGVLGVAPSAELYAVKVLAASGNGSVSSIAQGLEWAGLNGMHVANLSLGSPSPSATLEQAVNSATSRGVLVVAASGNSGAGSISYPARYANAMAVGATDQNNNRASFSQYGAGLDIVAPGVNVQSTYPGSTYASLNGTSMATPHVAGAAALVKQKNPSWSNVQIRNHLKNTATSLGSTNLYGSGLVNAEAATR

SEQ ID NO: 58215 - protein, 269 aa, Unidentified
AQSVPWGISRVQAPAAHNRGLTGSGVKVAVLDTGISTHPDLNIRGGASFVPGEPSTQDGNGHGTHVAGTIAALNNSIGVLGVAPSAELYAVKVLGASGSGALSSIAQGLEWAGNNGMHVANLSLGSPSPSATLEQAVNSATSRGVLVVAASGNSGAESISYPARYANAMAVGATDQNNNRASFSQYGAGLDIVAPGVNVQSTYPGSTYASLNGTSMATPHVAGAAVLVKQKNPSWSNVRIRDRLKNTATSLGSTNLYGSGLVNAEAATR

SEQ ID NO: 58216 - protein, 269 aa, Unidentified
AQSVPWGISRVQAPAAHNRRLTGSGVKVAVLDTGISTHPDLNIRGGASFVPGEPSTQDGEGHGTHVAGTIAALNNGIGVLGVAPSAELYAVKVLGASGSGSVSSIAQGLEWAGNNSMHVANLSLGSPSPSATLEQAVNSATSRGVLVVAASGNSGADSISYPARYANAMAVGATDQNNNRASFSQYGAGLDIVAPGVNVQSTYPGSTYASLNGTSMATPHVAGAAALVKQKNPSWSNVRIRDHLKNTATSLGSTNLYGSGLVNAEAATR

SEQ ID NO: 58217 - protein, 269 aa, Unidentified
AQSVPWGISRVQAPAAHNRGLRGSGVKVAVLDTGISTHPDLNIRGGASFVPGEPSTQDGNGHGTHVAGTIAALNNSIGVLGVAPSAELYAVKVLGASGNGAISSIAQGLEWAGNNGMHVANLSLGSPSPSATLEQAVNSATSRGVLVVAASGNSGAGSISYPARYANAMAVGATDQNNNRASFSQYGAGLDIVAPGVNVQSTYPGSTYASQNGTSMATPHVAGAAVLVKQKNPSWSNVRIRNHLKNTATSLGSTNLYGSGLVNAEAATR

SEQ ID NO: 58218 - protein, 269 aa, Unidentified
AQSVPWGISRVQAPASHNRGLAGSGVKVAVLDTGISTHPDLNIRGGASFVPGEPSTQDGNGHGTHVAGTIAALNNSIGVLGVAPSAELYAVKVLGASGGGAISSIAQGLEWAGNNGMHVANLSLGNPSPSATLEQAVNSATSRGVIVVAASGNSGAGSISYPARYANAMAVGATDQNNNRASFSQYGAGLDIVAPGVNVQSTYPGSTYASLNGTSMATPHVAGAAALVKQKNPSWSNVQIRNHLKNTATSLGSTNLYGSGLVNAEAATR

SEQ ID NO: 58219 - protein, 269 aa, Unidentified
AQSVPWGISRVQAPAAHNRGLTGSGVKVAVLDTGISTHPDLNIRGGASFVPGEPSTQDGNGHGTHVAGTIAALNNSIGVLGVAPSAELYAVKVLGADGRGAISSIAQGLEWAGNNGMHVANLSLGSPSPSATLEQAVNSAWSRGVLVVAASGNSGASSISYPARYANAMAVGATDQNNNRASFSQYGAGLDIVAPGVNVQSTYPGSTYASLNGTSMATPHVAGAAALVKQKNPSWSAVQIRNHLKNTATSLGSTNLYGSGLVNAEAATR

SEQ ID NO: 58220 - protein, 269 aa, Unidentified
AQSVPWGISRVQAPAAHNRKLTGSGVKVAVLDTGISTHPDLNIRGGASFVPGEPSTQDGEGHGTHVAGTIAALNNNIGVLGVAPSAELYAVKVLGASGNGSVSSIAGGLEWAGLNGMHVANLSLGAPSPSATLEQAVNSATSRGVLVVAASGNSGAGSISYPARYANAMAVGATDQNNNRASFSQYGAGLDIVAPGVNVQSTYPGSTYASLNGTSMATPHVAGAAALVKQKNPSWSNVQIRNHLKNTATSLGSTNLYGSGLVNAEAATR

SEQ ID NO: 58221 - protein, 269 aa, Synthetic construct
AQSVPWGISRVQAPAAHNRGLTGSGVRVAVLDTGISTHPDLNIRGGASFVPGEPSTQDGNGHGTHVAGTIAALDNSIGVLGVAPSAELYAVKVLGASGSGSYSSIAQGLEWAGNNGMHVASLSLGSPSPSATLEQAVNSATSRGVLVVAASGNSGAGSISYPARYANAMAVGATDQNNNRASFSQYGAELEIVAPGVNVQSTYPGSTYASLSGTSMATPHVAGAAALVKQKNPSWSNVQIRNHLKNTATSLGSTNLYGSGLVNAEAATR

SEQ ID NO: 58222 - protein, 269 aa, Unidentified
AQSVPWGISRVQAPAAHRRGLTGRGVKVAVLDTGISTHPDLNIRGGASFVPGEPSTQDGNGHGTHVAGTIAALDNSIGVLGVAPSAELYAVKVLGASGSGSVSSIAQGLEWAGNNGMHVANLSLGSPSPSATLEQAVNSATSRGVLVVAASGNSGAGSISYPARYANAMAVGATDQNNNRASFSQYGAGLDIVAPGVNVQSTYPGSAYFSLNGTSMATPHVAGAAALVKQKNPSWSNVQIRNRLKNTATSLGSKNLYGSGLVNAEAATR

SEQ ID NO: 58223 - protein, 269 aa, Unidentified
AQSVPWGISRVQAPAAHNRKLTGSGVKVAVLDTGISTHPDLNIRGGASFVPGEPSTQDGEGHGTHVAGTIAALNNSIGVLGVAPSAELYAVKVLSASGNGSVSSIAGGLEWAGLNGMHVANLSLGSPSPSATLEQAVNSATSRGVLVVAASGNSGAGSISYPARYANAMAVGATDQNNNRASFSQYGAGLDIVAPGVNVQSTYPGSTYASQNGTSMATPHVAGAAALVKQKNPSWSNVQIRNHLKNTATSLGSTNLYGSGLVNAEAATR

SEQ ID NO: 58224 - protein, 269 aa, Unidentified
AQSVPWGISRVQAPAAHNRGLTGSGVKVAVLDTGISTHPDLNIRGGASFVPGEPSTQDGNGHGTHVAGTIAALNNSIGVLGVAPSAELYAVKVLGADGEGAISSIAQGLEWAGNNGMHVANLSLGSPSPSATLEQAVNSATSRGVLVVAASGNSGASSISYPARYANAMAVGATDQNNNRASFSQYGAGLDIVAPGVNVQSTYPGSTYASLNGTSMATPHVAGAAALVKQKNPSWSNRQIRNHLNNTATSLGSTNLYGSGLVNAEAATR

SEQ ID NO: 58225 - protein, 269 aa, Unidentified
AQSVPWGISRVQAPAAHNRGLTGRGVKVAVLDTGISTHPDLNIRGGASFVPGEPSTQDGNGHGTHVAGTIAALNNGIGVLGVAPSAELYAVKVLGASGSGSVSSIAQGLEWAGNNDMHVANLSLGSESPSATLEQAVNSATSRGVLVVAASGNSGADSISYPARYANAMAVGATDQNNNRASFSQYGAGLDIVAPGVNVQSTYPGSTYASLNGTSMATPHVAGAAALVKQKNPSWSNVRIRNRLKNTATSLGSTNLYGSGLVNAEAATR

SEQ ID NO: 58226 - protein, 269 aa, Unidentified
AQSVPWGISRVQAPAAHNRRLTGRGVKVAVLDTGISTHPDLNIRGGASFVPGEPSTQDGNGHGTHVAGTIAALNNDIGVLGVAPSAELYAVKVLGASGSGSVSSIAQGLEWAGNNSMHVANLSLGSPSPSATLEQAVNSATSRGVLVVAASGNSGADSISYPARYANAMAVGATDQNNNRADFSQYGAGLDIVAPGVNVQSTYPGSTYASLNGTSMATPHVAGAAALVKQKNPSWSNVRIRNHLKNTATSLGSTNLYGSGLVNAEAATR

SEQ ID NO: 58227 - protein, 269 aa, Unidentified
AQSVPWGISRVQAPAAHNRKLLGSGVKVAVLDTGISTHPDLNIRGGASFVPGEPSTQDGEGHGTHVAGTIAALNNDIGVLGVAPSAELYAVKVLGASGSGSVSSIAQGLEWAGNNSMHVANLSLGSPSPSATLEQAVNSATSRGVLVVAASGNSGADSISYPARYANAMAVGATDQNNNRASFSQYGAGLDIVAPGVNVQSTYPGSTYASLNGTSMATPHVAGAAALVKQKNPSWSNVQIRNRLKNTATSLGSTNLYGSGLVNAEAATR

SEQ ID NO: 58228 - protein, 269 aa, Unidentified
AQSVPWGISRVQAPAAHNRGLTGRGVKVAVLDTGISTHPDLNIRGGASFVPGEPSTQDGEGHGTHVAGTIAALNNGIGVLGVAPSAELYAVKVLGASGSGSVSSIAQGLEWAGNNSMHVANLSLGSPSPSATLEQAVNSATSRGVLVVAASGNSGAGSISYPARYANAMAVGATDQNNNRADFSQYGAGLDIVAPGVNVQSTYPGSTYASLNGTSMATPHVAGAAALVKQKNPSWSNVRIRDHLKNTATSLGSTNLYGSGLVNAEAATR

SEQ ID NO: 58229 - protein, 269 aa, Unidentified
AQSVPWGISRVQAPAAHNRRLTGSGVKVAVLDTGISTHPDLNIRGGASFVPGEPSTQDGEGHGTHVAGTIAALNNGIGVLGVAPSAELYAVKVLGASGSGSVSSIAQGLEWAGNNDMHVANLSLGSESPSATLEQAVNSATSRGVLVVAASGNSGAGSISYPARYANAMAVGATDQNNNRADFSQYGAGLDIVAPGVNVQSTYPGSTYASLNGTSMATPHVAGAAALVKQKNPSWSNVQIRDHLKNTATSLGSTNLYGSGLVNAEAATR

SEQ ID NO: 58230 - protein, 269 aa, Unidentified
AQSVPWGISRVQAPAAHRRGLWGRGVKVAVLDTGISTHPDLNIRGGASFVPGEPSTQDGNGHGTHVAGTIAALDNSIGVLGVAPSAELYAVKVLGASGSGSVSSIAQGLEWAGNNGMHVANLSLGSPSPSATLEQAVNSATSRGVLVVAASGNSGAGSISYPARYANAMAVGATDQDNNRASFSQYGAGLDIVAPGVNVQSTYPQSTYASLNGTSMATPHVAGAAALVKQKNPSWSNVQIRNRLKNTATSLGSTNLYGSGLVNAEAATR

SEQ ID NO: 58231 - protein, 269 aa, Unidentified
AQSVPWGISRVQAPAAHNRGLTGRGVKVAVLDTGISTHPDLNIRGGASFVPGEPSTQDGEGHGTHVAGTIAALNNDIGVLGVAPSAELYAVKVLGASGSGSVSSIAQGLEWAGNNSMHVANLSLGSESPSATLEQAVNSATSRGVLVVAASGNSGAGSISYPARYANAMAVGATDQNNNRASFSQYGAGLDIVAPGVNVQSTYPGSTYASLNGTSMATPHVAGAAALVKQKNPSWSNVRIRDHLKNTATSLGSTNLYGSGLVNAEAATR

SEQ ID NO: 58232 - protein, 269 aa, Unidentified
AQSVPWGISRVQAPAAHNRGLTGSGVKVAVLDTGISTHPDLNIRGGASFVPGEPSTQDGNGHGTHVAGTIAALDNNIGVLGVAPRAELYAVKVLGASGSGSVSSIAQGLEWAGNNRMHVANLSLGLPAPSATLEQAVNSATSRGVLVVAASGNSGAGSISYPARYANAMAVGATDQNNNRASFSQYGAGLDIVAPGVNVLSTYPGSTYASLNGTSMATPHVAGAAALVKQKNPSWSNVQIRNHLKNTATSLGSTNLYGSGLVNAEAATR

SEQ ID NO: 58233 - protein, 269 aa, Unidentified
AQSVPWGISRVQAPAAHNRGLTGSGVKVAVLDTGISTHPDLNIRGGASFVPGEPSTQDGNGHGTHVAGTIAALDNSIGVLGVAPSAELYAVKVLGASGAGAISSIAQGLEWAGNNGMHVANLSLGSPSPSATLEQAVNSATSRGVLVVAASGNSGAGSISYPARYANAMAVGATDQNNNRASFSQYGAGLDIVAPGVNVQSTYIGSTYASLNGTSMATPHVAGAAVLVKQKNPSWSNVRIRNHLKNTATSLGSTNLYGSGLVNAEAATR

SEQ ID NO: 58234 - protein, 269 aa, Unidentified
AQSVPWGISRVQAPAAHNRGLTGSGVKVAVLDTGISTHPDLNIRGGASFVPGEPSTQDGNGHGTHVAGTIAALNNSIGVLGVAPSAELYAVKVLGASGSGAISSIAQGLEWAGNNGMHVANLSLGSPSPSATLEQAVNSATSRGVLVVAASGNSGADSISYPARYANAMAVGATDQNNNRASFSQYGAGLDIVAPGVNVQSTYPGSTYASLNGTSMATPHVAGAAVLVKQKNPSWSNVRIRDHLKKTATSLGSTNLYGSGLVNAEAATR

SEQ ID NO: 58235 - protein, 269 aa, Unidentified
AQSVPWGISRVQAPAAHNRRLTGRGVKVAVLDTGISTHPDLNIRGGASFVPGEPSTQDGNGHGTHVAGTIAALNNNIGVLGVAPSAELYAVKVLAASGGGSVSSIAQGLEWAGLNGMHVANLSLGAPSPSATLEQAVNSATSRGVLVVAASGNSGAGSISYPARYANAMAVGATDQNNNRASFSQYGAGLDIVAPGVNVQSTYPGSTYASLNGTSMATPHVAGAAALVKQKNPSWSNVQIRNHLKNTATSLGSTNLYGSGLVNAEAATR

SEQ ID NO: 58236 - protein, 269 aa, Unidentified
AQSVPWGISRVQAPAAHNRRLTGRGVKVAVLDTGISTHPDLNIRGGASFVPGEPSTQDGNGHGTHVAGTIAALNNSIGVLGVAPSAELYAVKVLAASGNGSVSSIANGLEWAGNNGMHVANLSLGAPSPSATLEQAVNSATSRGVLVVAASGNSGAGSISYPARYANAMAVGATDQNNNRASFSQYGAGLDIVAPGVNVQSTYPGSTYASQNGTSMATPHVAGAAALVKQKNPSWSNVQIRNHLKNTATSLGSTNLYGSGLVNAEAATR

SEQ ID NO: 58237 - protein, 269 aa, Unidentified
AQSVPWGISRVQAPAAHNRGLTGSGVKVAVLDTGISTHPDLRITGGASFVPGEPSTQDGNGHGTHVAGTIAALNNSIGVLGVAPSAELYAVKVLGASGGGAISSIAQGLEWAGNNGMHVANLSLGSPSPSATLEQAVNSATSRGVLVVAASGNSGAGSISYPARYANAMAVGATDQNNNRASFSQYGAGLDIVAPGVNVQSTYPGSTYASLNGTSMATPHVAGAAVLVKQKNPSWSNVRIRNHLKNTATSLGSTNLYGSGLVNAEAATR

SEQ ID NO: 58238 - protein, 269 aa, Unidentified
AQSVPWGISRVQAPAAHNRGLTGSGVKVAVLDTGISTHPDLNIRGGASFVPGEPSTQDGEGHGTHVAGTIAALNNDIGVLGVAPSAELYAVKVLGASGSGSVSSIAQGLEWAGNNSMHVANLSLGSPSPSATLEQAVNSATSRGVLVVAASGNSGADSISYPARYANAMAVGATDQNNNRADFSQYGAGLDIVAPGVNVQSTYPGSTYASLNGTSMATPHVAGAAALVRQKNPSWSNVRIRNHLKNTATSLGSTNLYGSGLVNAEAATR

SEQ ID NO: 58239 - protein, 269 aa, Unidentified
AQSVPWGISRVQAPAAHNRRLTGSGVKVAVLDTGISTHPDLNIRGGASFVPGEPSTQDGEGHGTHVAGTIAALNNDIGVLGVAPSAELYAVKVLGASGSGSVSSIAQGLEWAGNNSMHVANLSLGSESPSATLEQAVNSATSRGVLVVAASGNSGADSISYPARYANAMAVGATDQNNNRADFSQYGAGLDIVAPGVNVQSTYPGSTYASLNGTSMATPHVAGAAALVKQKNPSWSNVQIRNHLKNTATSLGSTNLYGSGLVNAEAATR

SEQ ID NO: 58240 - protein, 269 aa, Unidentified
AQSVPWGIRRVQAPTAHNRGLTGSGVKVAVLDTGISTHPDLNIRGGASFVPGEPSTQDENGHGTHAAGTIAALDNSIGVLGVAPSAELYAVKVLGASGSGSVSSIAQGLEWAGNNGMHVANLSLGSPSPSATLEQAVNSATSRGVLVVAASGNSGAGSISYPARYANAMAVGATDQNNNRASFSQYGAGLDIVAPGVNVQSTYPGSTYASLDGTSMATPHVAGAAALVKQKNPSWSNVRIRNHLKNTATSLGSTNLYGSGLVNAEAATR

SEQ ID NO: 58241 - protein, 269 aa, Unidentified
AQSVPWGISRVQAPAAHNRRLTGSGVKVAVLDTGISTHPDLNIRGGASFVPGEPSTQDGNGHGTHVAGTIAALNNDIGVLGVAPSAELYAVKVLGASGSGSVSSIAQGLEWAGNNDMHVANLSLGSESPSATLEQAVNSATSRGVLVVAASGNSGADSISYPARYANAMAVGATDQNNNRASFSQYGAGLDIVAPGVNVQSTYPGSTYASLNGTSMATPHVAGAAALVKQKNPSWSNVRIRNRLKNTATSLGSTNLYGSGLVNAEAATR

SEQ ID NO: 58242 - protein, 269 aa, Unidentified
AQSVPWGISRVQAPAAHNRKLTGGGVKVAVLDTGISTHPDLNIRGGASFVPGEPSTQDGEGHGTHVAGTIAALNNSIGVLGVAPSAELYAVKVLGASGNGSVSSIAGGLEWAGLNGMHVANLSLGSPSPSATLEQAVNSATSRGVLVVAASGNSGAGSISYPARYANAMAVGATDQNNNRASFSQYGAGLDIVAPGVNVQSTYPGSTYASQNGTSMATPHVAGAAALVKQKNPSWSNVQIRNHLKNTATSLGSTNLYGSGLVNAEAATR

SEQ ID NO: 58243 - protein, 269 aa, Unidentified
AQSVPWGISRVQAPAAHNRRLTGSGVKVAVLDTGISTHPDLNIRGGASFVPGEPSTQDGNGHGTHVAGTIAALNNGIGVLGVAPSAELYAVKVLGASGSGSVSSIAQGLEWAGNNDMHVANLSLGSESPSATLEQAVNSATSRGVLVVAASGNSGADSISYPARYANAMAVGATDQNNNRADFSQYGAGLDIVAPGVNVQSTYPGSTYASLNGTSMATPHVAGAAALVKQKNPSWSNVQIRNRLKNTATSLGSTNLYGSGLVNAEAATR

SEQ ID NO: 58244 - protein, 269 aa, Unidentified
AQSVPWGISRVQAPAAHNRRLTGGGVKVAVLDTGISTHPDLRIRGGASFVPGEPSTQDGNGHGTHVAGTIAALNNNIGVLGVAPSAELYAVKVLSASGGGSVSSIAQGLEWAGLNGMHVANLSLGSPSPSATLEQAVNSATSRGVLVVAASGNSGAGSISYPARYANAMAVGATDQNNNRASFSQYGAGLDIVAPGVNVQSTYPGSTYASLNGTSMATPHVAGAAALVKQKNPSWSNVQIRNHLKNTATSLGSTNLYGSGLVNAEAATR

SEQ ID NO: 58245 - protein, 269 aa, Unidentified
AQSVPWGISRVQAPAAHNRRLTGSGVKVAVLDTGISTHPDLNIRGGASFVPGEPSTQDGEGHGTHVAGTIAALNNGIGVLGVAPSAELYAVKVLGASGSGSVSSIAQGLEWAGNNSMHVANLSLGSESPSATLEQAVNSATSRGVLVVAASGNSGAGSISYPARYANAMAVGATDQNNNRADFSQYGAGLDIVAPGVNVQSTYPGSTYASLNGTSMATPHVAGAAALVKQKNPSWSNVRIRNHLKNTATSLGSTNLYGSGLVNAEAATR

SEQ ID NO: 58246 - protein, 269 aa, Unidentified
AQSVPWGISRVQAPAAHNRGLAGSGVKVAVLDTGISTHPDLNIRGGASFVPGEPSTQDGNGHGTHVAGTIAALNNSIGVLGVAPSAELYAVKVLGASGNGAISSIAQGLEWAGNNGMHVANLSLGAPSPSATLEQAVNSATSRGVLVVAASGNSGAGSISYPARYANAMAVGATDQNNNRASFSQYGAGLDIVAPGVNVQSTYPGSTYASLNGTSMATPHVAGAAVLVKQKNPSWSNVRIRNHLKNTATSLGSTNLYGSGLVNAEAATR

SEQ ID NO: 58247 - protein, 269 aa, Unidentified
AQSVPWGISRVQAPAAHNRGLTGRGVKVAVLDTGISTHPDLNIRGGASFVPGEPSTQDGEGHGTHVAGTIAALNNSIGVLGVAPSAELYAVKVLGASGAGAISSIAQGLEWAGNNGMHVANLSLGSPSPSATLEQAVNSATSRGVLVVAASGNSGAGSISYPARYANAMAVGATDQNNNRADFSQYGAGLDIVAPGVNVQSTYPGSTYASLNGTSSATPHVAGAAVLVKQKNPSWSNVRIRNHLKNTATSLGSTNLYGSGLVNAEAATR

SEQ ID NO: 58248 - protein, 269 aa, Unidentified
AQSVPWGISRVQAPAAHNRRLTGRGVKVAVLDTGISTHPDLRITGGASFVPGEPSTQDGNGHGTHVAGTIAALDNSIGVLGVAPSAELYAVKVLGASGSGSVSSIAQGLEWAGNNGMHVANLSLGSPSPSATLEQAVNSATSRGVLVVAASGNSGAGSISYPARYANAMAVGATDQNNNRASFSQYGAGLDIVAPGVNVQSTYPGSTYASLNGTSMATPHVAGAAALVKQKNPSWRNVQIRNRLKNTATSLGSTNLYGSGLVNAEAATR

SEQ ID NO: 58249 - protein, 269 aa, Unidentified
AQSVPWGISRVQAPAAHNRRLTGSGVKVAVLDTGISTHPDLNIRGGASFVPGEPSTQDGEGHGTHVAGTIAALNNGIGVLGVAPSAELYAVKVLGASGSGSVSSIAQGLEWAGNNSMHVANLSLGSESPSATLEQAVNSATSRGVLVVAASGNSGADSISYPARYANAMAVGATDQNNNRASFSQYGAGLDIVAPGVNVQSTYPGSTYASLNGTSMATPHVAGAAALVKQKNPSWSNVQIRDHLKNTATSLGSTNLYGSGLVNAEAATR

SEQ ID NO: 58250 - protein, 269 aa, Unidentified
AQSVPWGISRVQAPAAHNRGLTGSGVKVAVLDTGISTHPDLNIRGGASFVPGEPSTQDGNGHGTHVAGTIAALNNHIGVLGVAPSAELYAVKVLGADGEGAISSIAQGLEWAGNNGMHVANLSLGSPSPSATLEQAVNSATSRGVLVVAASGNSGASSISYPARYANAMAVGATDQNNNRASFSQYGAGLDIVAPGVNVQSTYPGSTYASLNGTSMATPHVAGAAALVKQKNPSWSNRQIRNHLKNTATSLGSTNLYGSGLVNAEAATR

SEQ ID NO: 58251 - protein, 269 aa, Unidentified
AQSVPWGISRVQAPAAHNRRLTGRGVKVAVLDTGISTHPDLNIRGGASFVPGEPSTQDGNGHGTHVAGTIAALNNNIGVLGVAPSAELYAVKVLGASGAGSVSSIANGLEWAGLNGMHVANLSLGAPSPSATLEQAVNSATSRGVLVVAASGNSGAGSISYPARYANAMAVGATDQNNNRASFSQYGAGLDIVAPGVNVQSTYPGSTYASLNGTSMATPHVAGAAALVKQKNPSWSNVQIRNHLKNTATSLGSTNLYGSGLVNAEAATR

SEQ ID NO: 58252 - protein, 269 aa, Unidentified
AQSVPWGISRVQAPAAHNRGLRGSGVKVAVLDTGISTHPDLNIRGGASFVPGEPSTQDGNGHGTHVAGTIAALNNNIGVLGVAPSAELYAVKVLGASGQGAISSIAQGLEWAGNNGMHVANLSLGSPSPSATLEQAVNSATSRGVLVVAASGNSGAGSISYPARYANAMAVGATDQNNNRASFSQYGAGLDIVAPGVNVQSTYPGSTYASLNGTSMATPHVAGAAVLVKQKNPSWSNVRIRNHLKNTATSLGSTNLYGSGLVNAEAATR

SEQ ID NO: 58253 - protein, 269 aa, Unidentified
AQSVPWGISRVQAPAAHNRKLLGFGVKVAVLDTGISTHPDLNIRGGASFVPGEPSTQDGNGHGTHVAGTIAALNNNIGVLGVAPSAELYAVKVLGASGSGSVSSIAQGLEWAGNNRMHVANLSLGSPSPSATLEQAVNSATSRGVLVVAASGNSGAGSISYPARYANAMAVGATDQNNNRASFSQYGAGLDIVAPGVNVQSTYPGSAYASENGTSMATPHVAGAAALVKQKNPSWSNVQIRNHLKNTATSLGSTNLYGSGLVNAEAATR

SEQ ID NO: 58254 - protein, 269 aa, Unidentified
AQSVPWGISRVQAPAAHRRRLTGRGVKVAVLDTGISTHPDLNIRGGASFVPGEPSTQDGNGHGTHVAGTIAALDNSIGVLGVAPSAELYAVKVLGASGAGSVSSIAQGLEWAGNNGMHVANLSLGSPSPSATLEQAVNSATSRGVLVVAASGNSGAGSISYPARYANAMAVGATDQNNNRASFSQYGAGLDIVAPGVNVQSTYPGSTYASLNGTSMATPHVAGAAVLVKQKNPSWSNVRIRNHLKNTATSLGSTNLYGSGLVNAEAATR

SEQ ID NO: 58255 - protein, 269 aa, Unidentified
AQSVPWGISRVQAPAAHNRGLTGRGVKVAVLDTGISTHPDLNIRGGASFVPGEPSTQDGNGHGTHVAGTIAALNNGIGVLGVAPSAELYAVKVLGASGSGSVSSIAQGLEWAGNNSMHVANLSLGSPSPSATLEQAVNSATSRGVLVVAASGNSGADSISYPARYANAMAVGATDQNNNRADFSQYGAGLDIVAPGVNVQSTYPGSTYASLNGTSMATPHVAGAAALVKQKNPSWSNVRIRDHLKNTATSLGSTNLYGSGLVNAEAATR

SEQ ID NO: 58256 - protein, 269 aa, Unidentified
AQSVPWGISRVQAPAAHRRGLWGRGVKVAVLDTGISTHPDLNIRGGASFVPGEPSTQDGNGHGTHVAGTIAALDNSIGVLGVAPSAELYAVKVLGASGSGSVSSIAQGLEWAGNNGMHVANLSLGSPSPSATLEQAVNSATSRGVLVVAASGNSGAGSISYPARYANAMAVGATDQDNNRASFSQYGAGLDIVAPGVNVQSTYPGSAYASLNGTSMATPHVAGAAALVKQKNPSWSNVQIRNRLKNTATSLGSTNLYGSGLVNAEAATR

SEQ ID NO: 58257 - protein, 269 aa, Unidentified
AQSVPWGISRVQAPAAHNRRLTGSGVKVAVLDTGISTHPDLDIRGGASFVPGEPSTQDGNGHGTHVAGTIAALNNSIGVLGVAPSAELYAVKVLGASGGGAISSIAQGLEWAGNNGMHVANLSLGSPSPSATLEQAVNSATSRGVLVVAASGNSGAGSISYPARYANAMAVGATDQNNNRASFSQYGAGLDIVAPGVNVQSTYPGSTYASLNGTSMATPHVAGAAVLVKQKNPSWSNVRIRNHLKNTATSLGSTNLYGSGLVNAEAATR

SEQ ID NO: 58258 - protein, 269 aa, Unidentified
AQSVPWGISRVQAPAAHNRRLTGRGVKVAVLDTGISTHPDLNIRGGASFVPGEPSTQDGEGHGTHVAGTIAALNNGIGVLGVAPSAELYAVKVLGASGSGSVSSIAQGLEWAGNNSMHVANLSLGSPSPSATLEQAVNSATSRGVLVVAASGNSGADSISYPARYANAMAVGATDQNNNRASFSQYGAGLDIVAPGVNVQSTYPGSTYASLNGTSMATPHVAGAAALVKQKNPSWSNVQIRNRLKNTATSLGSTNLYGSGLVNAEAATR

SEQ ID NO: 58259 - protein, 269 aa, Unidentified
AQSVPWGISRVQAPAAHNRGLTGRGVKVAVLDTGISTHPDLRITGGASFVPGEPSTQDGNGHGTHVAGTIAALNNSIGVLGVAPSAELYAVKVLGASGAGSVSSIAQGLEWAGANGMHVANLSLGSPSPSATLEQAVNSATSRGVLVVAASGNSGAGSISYPARYANAMAVGATDQNNNRASFSQYGAGLDIVAPGVNVQSTYPGSTYFSLNGTSMATPHVAGAAALVKQKNPSWSNVQIRNHLKNTATSLGSTNLYGSGLVRAEAATR

SEQ ID NO: 58260 - protein, 269 aa, Unidentified
AQSVPWGISRVQAPAAHNRGLTGRGVKVAVLDTGISTHPDLNIRGGASFVPGEPSTQDGNGHGTHVAGTIAALDNNIGVLGVAPRAELYAVKVLGASGSGSVSSIAQGLEWAGNNRMHVANLSLGSPSPSATLEQAVNSATSRGVLVVAASGNSGAGSISYPARYANAMAVGATDQNNNRASFSQYGAGLDIVAPGVNVLSTYPGSAYASLNGTSQATPHVAGAAALVKQKNPSWSNVQIRNHLKNTATSLGSTNLYGSGLVNAEAATR

SEQ ID NO: 58261 - protein, 269 aa, Unidentified
AQSVPWGISRVQAPAAHNRRLTGSGVKVAVLDTGISTHPDLNIRGGASFVPGEPSTQDGNGHGTHVAGTIAALNNDIGVLGVAPSAELYAVKVLGASGSGSVSSIAQGLEWAGNNSMHVANLSLGSPSPSATLEQAVNSATSRGVLVVAASGNSGADSISYPARYANAMAVGATDQNNNRASFSQYGAGLDIVAPGVNVQSTYPGSTYASLNGTSMATPHVAGAAALVKQKNPSWSNVRIRDRLKNTATSLGSTNLYGSGLVNAEAATR

SEQ ID NO: 58262 - protein, 269 aa, Unidentified
AQSVPWGISRVQAPAAHNRRLTGRGVKVAVLDTGISTHPDLNIRGGASFVPGEPSTQDGEGHGTHVAGTIAALNNGIGVLGVAPSAELYAVKVLGASGSGSVSSIAQGLEWAGNNSMHVANLSLGSESPSATLEQAVNSATSRGVLVVAASGNSGAGSISYPARYANAMAVGATDQNNNRASFSQYGAGLDIVAPGVNVQSTYPGSTYASLNGTSMATPHVAGAAALVKQKNPSWSNVRIRNHLKNTATSLGSTNLYGSGLVNAEAATR

SEQ ID NO: 58263 - protein, 269 aa, Unidentified
AQSVPWGISRVQAPAAHRRGLWGRGVKVAVLDTGISTHPDLNIRGGASFVPGEPSTQDGNGHGTHVAGTIAALDNSIGVLGVAPSAELYAVKVLGASGAGSVSSIAQGLEWAGNNGMHVANLSLGSPSPSATLEQAVNSATSRGVLVVAASGNSGAGSISYPARYANAMAVGATDQNNNRASFSQYGAGLDLVAPGVNVQSTYPGSTYASLNGTSMATPHVAGAAALVKQKNPSWSNVQIRNRLKNTATSLGSTNLYGSGLVNAEAATR

SEQ ID NO: 58264 - protein, 269 aa, Unidentified
AQSVPWGISRVQAPAAHNRGLTGSGVKVAVLDTGISTHPDLNIRGGASFVPGEPSTQDGNGHGTHVAGTIAALNNSIGVLGVAPSAELYAVKVLGADGRGAISSIAQGLEWAGNNGMHVANLSLGSPSPSATLEQAVNSATSRGVLVVAASGNSGASSISYPARYANAMAVGATDQNNNRASFSQYGLGLDIVAPGVNVQSTYPGSTYASLNGTSMATPHVAGAAALVKQKNPSWSNAQIRNHLKNTATSLGSTNLYGSGLVNAEAATR

SEQ ID NO: 58265 - protein, 269 aa, Unidentified
AQSVPWGISRVQAPAAHRRGLTGRGVKVAVLDTGISTHPDLNIRGGASFVPGEPSTQDGNGHGTHVAGTIAALDNSIGVLGVAPSAELYAVKVLGASGSGSVSSIAQGLEWAGANGMHVANLSLGSPSPSATLEQAVNSATSRGVLVVAASGNSGAGSISYPARYANAMAVGATDQDNNRASFSQYGAGLDIVAPGVNVQSTYPQSTYASLNGTSMATPHVAGAAALVKQKNPSWSNVQIRNRLKNTATSLGSTNLYGSGLVNAEAATR

SEQ ID NO: 58266 - protein, 269 aa, Unidentified
AQSVPWGISRVQAPAAHNRKLTGSGVKVAVLDTGISTHPDLNIRGGASFVPGEPSTQDGEGHGTHVAGTIAALNNNIGVLGVAPSAELYAVKVLSASGNGSVSSIAQGLEWAGLNGMHVANLSLGSPSPSATLEQAVNSATSRGVLVVAASGNSGAGSISYPARYANAMAVGATDQNNNRASFSQYGAGLDIVAPGVNVQSTYPGSTYASQNGTSMATPHVAGAAALVKQKNPSWSNVQIRNHLKNTATSLGSTNLYGSGLVNAEAATR

SEQ ID NO: 58267 - protein, 269 aa, Unidentified
AQSVPWGISRVQAPAAHNRGLAGRGVKVAVLDTGISTHPDLNIRGGASFVPGEPSTQDGEGHGTHVAGTIAALNNSIGVLGVAPSAELYAVKVLGASGSGSVSSIAQGLEWAGLNRMHVANLSLGSPSPSATLEQAVNSATSRGVLVVAASGNSGEGSISYPARYANAMAVGATDQNNNRADFSQYGAGLDIVAPGVNVQSTYPGSTYASLNGTSMATPHVAGAAALVKQKNPSWSNVQIRNHLKNTATSLGSTNLYGSGLVNAEAATR

SEQ ID NO: 58268 - protein, 269 aa, Unidentified
AQSVPWGISRVQAPAAHNRRLTGRGVKVAVLDTGISTHPDLNIRGGASFVPGEPSTQDGEGHGTHVAGTIAALNNDIGVLGVAPSAELYAVKVLGASGSGSVSSIAQGLEWAGNNSMHVANLSLGSESPSATLEQAVNSATSRGVLVVAASGNSGAGSISYPARYANAMAVGATDQNNNRADFSQYGAGLDIVAPGVNVQSTYPGSTYASLNGTSMATPHVAGAAALVKQKNPSWSNVQIRNHLKNTATSLGSTNLYGSGLVNAEAATR

SEQ ID NO: 58269 - protein, 269 aa, Unidentified
AQSVPWGISRVQAPASHNRGLTGSGVKVAVLDTGISTHPDLNIRGGASFVPGEPSTQDGNGHGTHVAGTIAALNNSIGVLGVAPSAELYAVKVLGASGGGAISSIAQGLEWAGANGMHVANLSLGSPSPSATLEQAVNSATSRGVLVVAASGNSGAGSISYPARYANAMAVGATDQNNNRASFSQYGAGLDIVAPGVNVQSTAPGSTYASLNGTSMATPHVAGAAVLVKQKNPSWSNVQIRNHLKNTATSLGSTNLYGSGLVNAEAATR

SEQ ID NO: 58270 - protein, 269 aa, Unidentified
AQSVPWGISRVQAPAAHNRGLTGSGVKVAVLDSGISTHPDLNIRGGASFVPGEPSTQDGNGHGTHVAGTIAALNNSIGVLGVAPSAELYAVKVLGASGGGAISSIAQGLEWAGLNGMHVANLSLGSPSPSATLEQAVNSATSRGVLVVAASGNSGAGSISYPARYANAMAVGATDQNNNRASFSQYGAGLDIVAPGVNVQSTAPGSTYASLNGTSMATPHVAGAAVLVKQKNPSWSNVQIRNHLKNTATSLGSTNLYGSGLVNAEAATR

SEQ ID NO: 58271 - protein, 269 aa, Unidentified
AQSVPWGISRVQAPAAHNRRLTGRGVKVAVLDTGISTHPDLNIRGGASFVPGEPSTQDGNGHGTHVAGTIAALNNGIGVLGVAPSAELYAVKVLGASGSGSVSSIAQGLEWAGNNSMHVANLSLGSPSPSATLEQAVNSATSRGVLVVAASGNSGADSISYPARYANAMAVGATDQNNNRADFSQYGAGLDIVAPGVNVQSTYPGSTYASLNGTSMATPHVAGAAALVKQKNPSWSNVQIRDHLKNTATSLGSTNLYGSGLVNAEAATR

SEQ ID NO: 58272 - protein, 269 aa, Unidentified
AQSVPWGISRVQAPAAHNRRLTGSGVKVAVLDTGISTHPDLNIRGGASFVPGEPSTQDGNGHGTHVAGTIAALNNGIGVLGVAPSAELYAVKVLGASGSGSVSSIAQGLEWAGNNSMHVANLSLGSPSPSATLEQAVNSATSRGVLVVAASGNSGAGSISYPARYANAMAVGATDQNNNRADFSQYGAGLDIVAPGVNVQSTYPGSTYASLNGTSMATPHVAGAAALVKQKNPSWSNVRIRDRLKNTATSLGSTNLYGSGLVNAEAATR

SEQ ID NO: 58273 - protein, 269 aa, Unidentified
AQSVPWGISRVQAPAAHNRKLTASGVKVAVLDTGISTHPDLWIRGGASFVPGEPSTQDGNGHGTHVAGTIAALNNSIGVLGVAPSAELYAVKVLGASGSGSVSSIAQGLEWAGLNGMHVANLSLGSPSPSATLEQAVNSATSRGVLVVAASGNSGAGSISYPARYANAMAVGATDQNNNRADFSQYGAGLDIVAPGVNVQSTYPGSAYASLNGTSMATPHVAGAAALVKQKNGSWSNVQIRNHLKNTATSLGSTNLYGSGLVNAEAATR

SEQ ID NO: 58274 - protein, 269 aa, Unidentified
AQSVPWGISRVQAPAAHNRGLTGRGVKVAVLDTGISTHPDLNIRGGASFVPGEPSTQDGNGHGTHVAGTIAALDNSIGVLGVAPSAELYAVKVLGASGGGAISSIAQGLEWAGNNGMHVANLSLGSPSPSATLEQAVNSATSRGVLVVAASGNSGAGSISYPARYANAMAVGATDQNNNRASFSQYGAGLDIVAPGVNVQSTYPGSTYASLNGTSMATPHVAGAAVLVKQKNPSWSNVRIRNHLKNTATSLGSTNLYGSGLVNAEAATR

SEQ ID NO: 58275 - protein, 269 aa, Unidentified
AQSVPWGISRVQAPAAHNRGLTGSGVKVAVLDTGISTHPDLNIRGGASFVPGEPSTQDGNGHGTHVAGTIAALNNSIGVLGVAPDAELYAVKVLGASGGGAISSIAQGLEWAGNNGMHVANLSLGSPSPSATLEQAVNSATSRGVLVVAASGNSGAGSISYPARYANAMAVGATDQNNNRASFSQYGAGLDIVAPGVNVQSTYPGSTYASLNGTSMATPHVAGAAVLVKQKNPSWRNVRIRNHLKNTATSLGSTNLYGSGLVNAEAATR

SEQ ID NO: 58276 - protein, 269 aa, Unidentified
AQSVPWGISRVQAPAAHNRKLTGSGVKVAVLDTGISTHPDLNIRGGASFVPGEPSTQDGEGHGTHVAGTIAALNNSIGVLGVAPSAELYAVKVLGASGNGSVSSIAGGLEWAGLNGMHVANLSLGAPSPSATLEQAVNSATSRGVLVVAASGNSGAGSISYPARYANAMAVGATDQNNNRASFSQYGAGLDIVAPGVNVQSTYPGSTYASQNGTSMATPHVAGAAALVKQKNPSWSNVQIRNHLKNTATSLGSTNLYGSGLVNAEAATR

SEQ ID NO: 58277 - protein, 269 aa, Unidentified
AQSVPWGISRVQAPAAHRRGLTGSGVKVAVLDTGISTHPDLNIRGGASFVPGEPSTQDGNGHGTHVAGTIAALNNSIGVLGVAPSAELYAVKVLGASGGGAISSIAQGLEWAGNNGMHVANLSLGSPSPSATLEQAVNSATSRGVLVVAASGNSGAGSISYPARYANAMAVGATDQNNNRASFSQYGAGLDIVAPGVNVQSTYPGSTYASLNGTSMATPHVAGAAVLVKQKNPSWSNVRIRNHLKNTATSLGSTNLYGSGLVRAEAATR

SEQ ID NO: 58278 - protein, 269 aa, Unidentified
AQSVPWGISRVQAPAAHNRGLAGSGVKVAVLDSGISTHPDLNIRGGASFVPGEPSTQDGEGHGTHVAGTIAALNNSIGVLGVAPSAELYAVKVLGASGSGSVSSIAQGLEWAGLNRMHVANLSLGSPSPSATLEQAVNSATSRGVLVVAASGNSGEGSISYPARYANAMAVGATDQNNNRADFSQYGAGLDIVAPGVNVQSTYPGSTYASLNGTSMATPHVAGAAALVKQKNPSWSNVQIRNHLKNTATSLGSTNLYGSGLVNAEAATR

SEQ ID NO: 58279 - protein, 269 aa, Unidentified
AQSVPWGISRVQAPAAHNRGLTGRGVKVAVLDTGISTHPDLNIRGGASFVPGEPSTQDGNGHGTHVAGTIAALNNDIGVLGVAPSAELYAVKVLGASGSGSVSSIAQGLEWAGNNDMHVANLSLGSESPSATLEQAVNSATSRGVLVVAASGNSGAGSISYPARYANAMAVGATDQNNNRADFSQYGAGLDIVAPGVNVQSTYPGSTYASLNGTSMATPHVAGAAALVKQKNPSWSNVQIRDRLKNTATSLGSTNLYGSGLVNAEAATR

SEQ ID NO: 58280 - protein, 269 aa, Unidentified
AQSVPWGISRVQAPAAHNRGLTGSGVKVAVLDTGISTHPDLNIRGGASFVPGEPSTQDGNGHGTHVAGTIAALNNSIGVLGVAPSAELYAVKVLGASGGGAISSIAQGLEWAGLNGMHVANLSLGSPSPSATLEQAVNSATSRGVLVVAASGNSGAGSISYPARYANAMAVGATDQNNNRASFSQYGAGLDIVAPGVNVQSTAPGSAYASLNGTSMATPHVAGAAVLVKQKNPSWSNVQIRNHLKNTATSLGSTNLYGSGLVNAEAATR

SEQ ID NO: 58281 - protein, 269 aa, Unidentified
AQSVPWGISRVQAPAAHNRKLLGFGVKVAVLDTGISTHPDLNIRGGASFVPGEPSTQDGNGHGTHVAGTIAALNNNIGVLGVAPSAELYAVKVLGASGSGSVSSIAQGLEWAGNNRMHVANLSLGDPSPSATLEQAVNSATSRGVLVVAASGNSGAGSISYPARYANAMAVGATDQNNNRASFSQYGAGLDIVAPGVNVQSTYPGSAYASLNGTSMATPHVAGAAALVKQKNPSWSNVQIRNHLKNTATSLGSTNLYGSGLVNAEAATR

SEQ ID NO: 58282 - protein, 269 aa, Unidentified
AQSVPWGIERVQAPAAHNRGLTGSGVKVAVLDTGISTHPDLNIRGGASFVPGEPSTQDENGHGTHVAGTIAALDNSIGVLGVAPSAELYAVKVLGASGSGSVSSIAQGLEWAGNNGMHVANLSLGSPSPSATLEQAVNSATSRGVLVVAASGNSGAGSISYPARYANAMAVGATDQNNNRASFSQYGAGLDIVAPGVDVLSTWPGSTYASLNGTSMATPHVAGAAALVKQKNPSWSNVQIRNHLKNTATSLGSTNEYGSGLVNAEAATR

SEQ ID NO: 58283 - protein, 269 aa, Unidentified
AQSVPWGISRVQAPAAHNRRLTGSGVKVAVLDTGISTHPDLNIRGGASFVPGEPSTQDGEGHGTHVAGTIAALNNDIGVLGVAPSAELYAVKVLGASGSGSVSSIAQGLEWAGNNSMHVANLSLGSPSPSATLEQAVNSATSRGVLVVAASGNSGADSISYPARYANAMAVGATDQNNNRASFSQYGAGLDIVAPGVNVQSTYPGSTYASLNGTSMATPHVAGAAALVKQKNPSWSNVQIRDRLKNTATSLGSTNLYGSGLVNAEAATR

SEQ ID NO: 58284 - protein, 269 aa, Unidentified
AQSVPWGISRVQAPAAHNRGLTGRGVKVAVLDTGISTHPDLNIRGGASFVPGEPSTQDGEGHGTHVAGTIAALNNGIGVLGVAPSAELYAVKVLGASGSGSVSSIAQGLEWAGNNSMHVANLSLGSPSPSATLEQAVNSATSRGVLVVAASGNSGAGSISYPARYANAMAVGATDQNNNRADFSQYGAGLDIVAPGVNVQSTYPGSTYASLNGTSMATPHVAGAAALVKQKNPSWSNVQIRDRLKNTATSLGSTNLYGSGLVNAEAATR

SEQ ID NO: 58285 - protein, 269 aa, Unidentified
AQSVPWGISRVQAPAAHNRRLTGSGVKVAVLDTGISTHPDLRITGGASFVPGEPSTQDGNGHGTHVAGTIAALNNSIGVLGVAPSAELYAVKVLGASGAGSVSSIAQGLEWAGLNGMHVANLSLGSPSPSATLEQAVNSATSRGVLVVAASGNSGAGSISYPARYANAMAVGATDQNNNRASFSQYGAGLDIVAPGVNVQSTYPQSAYASLNGTSMATPHVAGAAALVKQKNPSWSNVQIRNHLKNTATSLGSTNLYGSGLVNAEAATR

SEQ ID NO: 58286 - protein, 269 aa, Unidentified
AQSVPWGISRVQAPAAHNRGLTGSGVKVAVLDTGISTHPDLNIRGGASFVPGEPSTQDGNGHGTHVAGTIAALNNHIGVLGVAPSAELYAVKVLGADGEGAISSIAQGLEWAGNNGMHVANLSLGSPSPSATLEQAVNSATSRGVLVVAASGNSGASSISYPARYANAMAVGATDQNNNRASFSQYGLGLDIVAPGVNVQSTYPGSTYASLNGTSMATPHVAGAAALVKQKNPSWSNVQIRNHLKNTATSLGSTNLYGSGLVNAEAATR

SEQ ID NO: 58287 - protein, 269 aa, Unidentified
AQSVPWGISRVQAPAAHRRGLWGRGVKVAVLDTGISTHPDLNIRGGASFVPGEPSTQDGNGHGTHVAGTIAALDNSIGVLGVAPSAELYAVKVLGASGAGSVSSIAQGLEWAGNNGMHVANLSLGSPSPSATLEQAVNSATSRGVLVVAASGNSGAGSISYPARYANAMAVGATDQNNNRASFSQYGAGLDIVAPGVNVQSTYPQSTYASLNGTSMATPHVAGAAALVKQKNPSWSNVQIRNRLKNTATSLGSTNLYGSGLVNAEAATR

SEQ ID NO: 58288 - protein, 269 aa, Unidentified
AQSVPWGISRVQAPAAHNRRLWGRGVKVAVLDTGISTHPDLRITGGASFVPGEPSTQDGNGHGTHVAGTIAALNNSIGVLGVAPSAELYAVKVLGASGAGSVSSIAQGLEWAGNNGMHVANLSLGSPSPSATLEQAVNSATSRGVLVVAASGNSGAGSISYPARYANAMAVGATDQNNNRASFSQYGAGLDIVAPGVNVQSTYPQSTYASLNGTSMATPHVAGAAALVKQKNPSWSNVQIRNHLKNTATSLGSTNLYGSGLVNAEAATR

SEQ ID NO: 58289 - protein, 269 aa, Unidentified
AQSVPWGISRVQAPAAHNRRLTGRGVKVAVLDTGISTHPDLNIRGGASFVPGEPSTQDGEGHGTHVAGTIAALNNGIGVLGVAPSAELYAVKVLGASGSGSVSSIAQGLEWAGNNDMHVANLSLGSPSPSATLEQAVNSATSRGVLVVAASGNSGAGSISYPARYANAMAVGATDQNNNRADFSQYGAGLDIVAPGVNVQSTYPGSTYASLNGTSMATPHVAGAAALVKQKNPSWSNVQIRDHLKNTATSLGSTNLYGSGLVNAEAATR

SEQ ID NO: 58290 - protein, 269 aa, Unidentified
AQSVPWGISRVQAPAAHRRGLTGRGVKVAVLDTGISTHPDLNIRGGASFVPGEPSTQDGNGHGTHVAGTIAALDNSIGVLGVAPSAELYAVKVLGASGSGSVSSIAQGLEWAGANGMHVANLSLGSPSPSATLEQAVNSATSRGVLVVAASGNSGAGSISYPARYANAMAVGATDQDNNRASFSQYGAGLDLVAPGVNVQSTYPGSTYASLNGTSMATPHVAGAAALVKQKNPSWSNVQIRNRLKNTATSLGSTNLYGSGLVNAEAATR

SEQ ID NO: 58291 - protein, 269 aa, Unidentified
AQSVPWGISRVQAPAAHNRGLTGRGVKVAVLDTGISTHPDLRIRGGASFVPGEPSTQDGNGHGTHVAGTIAALNNSIGVLGVAPSAELYAVKVLGASGGGAISSIAQGLEWAGNNGMHVANLSLGSPSPSATLEQAVNSATSRGVLVVAASGNSGAGSISYPARYANAMAVGATDQNNNRASFSQYGAGLDIVAPGVNVQSTYPGSTYASLNGTSMATPHVAGAAVLVKQKNPSWSNVRIRNHLKNTATSLGSTNLYGSGLVNAEAATR

SEQ ID NO: 58292 - protein, 269 aa, Unidentified
AQSVPWGISRVQAPAAHNRGLAGRGVKVAVLDSGISTHPDLNIRGGASFVPGEPSTQDGNGHGTHVAGTIAALNNSIGVLGVAPSAELYAVKVLGASGSGSVSSIAQGLEWAGLNGMHVANLSLGSPSPSATLEQAVNSATSRGVLVVAASGNSGEGSIDYPARYANAMAVGATDQNNNRADFSQYGAGLDIVAPGVNVQSTYPGSTYASLNGTSMATPHVAGAAALVKQKNPSWSNVQIRNHLKNTATSLGSTNLYGSGLVNAEAATR

SEQ ID NO: 58293 - protein, 269 aa, Unidentified
AQSVPWGISRVQAPAAHRRGLWGRGVKVAVLDTGISTHPDLNIRGGASFVPGEPSTQDGNGHGTHVAGTIAALDNSIGVLGVAPSAELYAVKVLGASGSGSVSSIAQGLEWAGNNGMHVANLSLGSPSPSATLEQAVNSATSRGVLVVAASGNSGAGSISYPARYANAMAVGATDQNNNRASFSQYGAGLDLVAPGVNVQSTYPGSTYFSLNGTSMATPHVAGAAALVKQKNPSWSNVQIRNRLKNTATSLGSTNLYGSGLVNAEAATR

SEQ ID NO: 58294 - protein, 269 aa, Unidentified
AQSVPWGISRVQAPAAHRRGLTGRGVKVAVLDTGISTHPDLNIRGGASFVPGEPSTQDGNGHGTHVAGTIAALDNSIGVLGVAPSAELYAVKVLGASGSGSVSSIAQGLEWAGANGMHVANLSLGSPSPSATLEQAVNSATSRGVLVTAASGNSGAGSISYPARYANAMAVGATDQNNNRASFSQYGAGLDIVAPGVNVQSTYPGSAYASLNGTSMATPHVAGAAALVKQKNPSWSNVQIRNRLKNTATSLGSTNLYGSGLVNAEAATR

SEQ ID NO: 58295 - protein, 269 aa, Unidentified
AQSVPWGISRVQAPAAHNRRLTGRGVKVAVLDTGISTHPDLNIRGGASFVPGEPSTQDGEGHGTHVAGTIAALNNDIGVLGVAPSAELYAVKVLGASGSGSVSSIAQGLEWAGNNDMHVANLSLGSESPSATLEQAVNSATSRGVLVVAASGNSGADSISYPARYANAMAVGATDQNNNRASFSQYGAGLDIVAPGVNVQSTYPGSTYASLNGTSMATPHVAGAAALVKQKNPSWSNVQIRNHLKNTATSLGSTNLYGSGLVNAEAATR

SEQ ID NO: 58296 - protein, 269 aa, Unidentified
AQSVPWGISRVQAPAAHNRRLTGRGVKVAVLDTGISTHPDLNIRGGASFVPGEPSTQDGNGHGTHVAGTIAALNNGIGVLGVAPSAELYAVKVLGASGSGSVSSIAQGLEWAGNNDMHVANLSLGSESPSATLEQAVNSATSRGVLVVAASGNSGAGSISYPARYANAMAVGATDQNNNRADFSQYGAGLDIVAPGVNVQSTYPGSTYASLNGTSMATPHVAGAAALVKQKNPSWSNVQIRNRLKNTATSLGSTNLYGSGLVNAEAATR

SEQ ID NO: 58297 - protein, 269 aa, Unidentified
AQSVPWGISRVQAPAAHNRGLTGSGVKVAVLDTGISTHPDLNIRGGASFVPGEPSTQDGNGHGTHVAGTIAALNNRIGVLGVAPDAELYAVKVLGASGGGAISSIAQGLEWAGNNGMHVANLSLGSPSPSATLEQAVNSATSRGVLVVAASGNSGAGSISYPARYANAMAVGATDQNNNRASFSQYGAGLDIVAPGVNVQSTYPGSTYASLNGTSMATPHVAGAAVLVKQKNPSWSNVRIRNHLKNTATSLGSTNLYGSGLVNAEAATR

SEQ ID NO: 58298 - protein, 269 aa, Unidentified
AQSVPWGISRVQAPAAHNRGLTGSGVKVAVLDTGISTHPDLRIRGGASFVPGEPSTQDGNGHGTHVAGTIAALNNSIGVLGVAPSAELYAVKVLGASGGGAISSIAQGLEWAGNNGMHVANLSLGSPSPSATLEQAVNSATSRGVLVVAASGNSGAGSISYPARYANAMAVGATDQNNNRASFSQYGAGLDIVAPGVNVQSTYPGSTYASLNGTSMATPHVAGAAVLVKQKNPSWRNVRIRNHLKNTATSLGSTNLYGSGLVNAEAATR

SEQ ID NO: 58299 - protein, 269 aa, Unidentified
AQSVPWGISRVQAPAAHRRGLTGSGVKVAVLDTGISTHPDLNITGGASFVPGEPSTQDGNGHGTHVAGTIAALNNSIGVLGVAPSAELYAVKVLGASGGGAISSIAQGLEWAGNNGMHVANLSLGSPSPSATLEQAVNSATSRGVLVVAASGNSGAGSISYPARYANAMAVGATDQNNNRASFSQYGAGLDIVAPGVNVQSTYPGSTYASLNGTSMATPHVAGAAVLVKQKNPSWSNVRIRNHLKNTATSLGSTNLYGSGLVNAEAATR

SEQ ID NO: 58300 - protein, 269 aa, Unidentified
AQSVPWGISRVQAPAAHRRRLTGRGVKVAVLDTGISTHPDLNIRGGASFVPGEPSTQDGNGHGTHVAGTIAALDNSIGVLGVAPSAELYAVKVLGASGSGSVSSIAQGLEWAGNNGMHVANLSLGSPSTSATLEQAVNSATSRGVLVVAASGNSGAGSISYPARYANAMAVGATDQNNNRASFSQYGAGLDIVAPGVNVQSTYPGSTYFSLNGTSMATPHVAGAAALVKQKNPSWSNVQIRNRLKNTATSLGSTNLYGSGLVNAEAATR

SEQ ID NO: 58301 - protein, 269 aa, Unidentified
AQSVPWGISRVQAPAAHRRGLTGRGVKVAVLDTGISTHPDLNIRGGASFVPGEPSTQDGNGHGTHVAGTIAALDNSIGVLGVAPSAELYAVKVLGASGAGSVSSIAQGLEWAGNNGMHVANLSLGSPSPSATLEQAVNSATSRGVLVVAASGNSGAGSISYPARYANAMAVGATDQDNNRASFSQYGAGLDIVAPGVNVQSTYPQSTYASLNGTSMATPHVAGAAALVKQKNPSWSNVQIRNRLKNTATSLGSTNLYGSGLVNAEAATR

SEQ ID NO: 58302 - protein, 269 aa, Unidentified
AQSVPWGISRVQAPAAHNRGLTGSGVKVAVLDTGISTHPDLNIRGGASFVPGEPSTQDGNGHGTHVAGTIAALNNSIGVLGVAPSAELYAVKVLGADGRGAISSIAQGLEWAGNNGMHVANLSLGSPSPSATLEQAVNSATSRGVLVVAASGNDGASSISYPARYANAMAVGATDQNNNRASFSQYGAGLDIVAPGVNVQSTYPGSTYASLNGTSMATPHVAGAAALVKQKNPSWSNVQIRNHLKNTATSLGSTNEYGSGLVNAEAATR

SEQ ID NO: 58303 - protein, 269 aa, Unidentified
AQSVPWGISRVQAPAAHNRGLTGSGVKVAVLDTGISTHPDLNIRGGASFVPGEPSTQDGNGHGTHVAGTIAALDNSIGVLGVAPSAELYAVKVLGASGGGAISSIAQGLEWAGNNGMHVANLSLGSPSPSATLEQAVNSATSRGVLVVAASGNSGAGSISYPARYANAMAVGATDQNNNRASFSQYGAGLDIVAPGVNVQSTYPGSTYASLNGTSMATPHVAGAAVLVKQKNPSWSNVRIRNRLKNTATSLGSTNLYGSGLVNAEAATR

SEQ ID NO: 58304 - protein, 269 aa, Unidentified
AQSVPWGISRVQAPAAHNRRLTGSGVKVAVLDTGISTHPDLNIRGGASFVPGEPSTQDGNGHGTHVAGTIAALNNSIGVLGVAPSAELYAVKVLGASGGGAISSIAQGLEWAGANGMHVANLSLGSPSPSATLEQAVNSATSRGVLVVAASGNSGAGSISYPARYANAMAVGATDQNNNRASFSQYGAGLDIVAPGVNVQSTYPGSTYASLNGTSMATPHVAGAAVLVKQKNPSWSNVRIRNHLKNTATSLGSTNLYGSGLVNAEAATR

SEQ ID NO: 58305 - protein, 269 aa, Unidentified
AQSVPWGISRVQAPAAHNRGLTGRGVKVAVLDTGISTHPDLNIRGGASFVPGEPSTQDGEGHGTHVAGTIAALNNGIGVLGVAPSAELYAVKVLGASGSGSVSSIAQGLEWAGNNSMHVANLSLGSESPSATLEQAVNSATSRGVLVVAASGNSGADSISYPARYANAMAVGATDQNNNRADFSQYGAGLDIVAPGVNVQSTYPGSTYASLNGTSMATPHVAGAAALVKQKNPSWSNVQIRNHLKNTATSLGSTNLYGSGLVNAEAATR

SEQ ID NO: 58306 - protein, 269 aa, Unidentified
AQSVPWGISRVQAPAAHNRGLTGSGVKVAVLDTGISTHPDLNIRGGASFVPGEPSTQDGNGHGTHVAGTIAALNNSIGVLGVAPSAELYAVKVLGASGGGAISSIAQGLEWAGNNGMHVANLSLGSPSPSATLEQAVNSATSRGVLVVAASGNSGARSISYPARYANAMAVGATDQNNNRASFSQYGAGLDIVAPGVNVQSTYPGSTYASLNGTSMATPHVAGAAVLVKQKNPSWSNVRIRDHLKNTATSLGSTNLYGSGLVNAEAATR

SEQ ID NO: 58307 - protein, 269 aa, Unidentified
AQSVPWGISRVQAPAAHNRGLRGSGVKVAVLDTGISTHPDLNIRGGASFVPGEPSTQDGNGHGTHVAGTIAALNNSIGVLGVAPDAELYAVKVLGASGGGAISSIAQGLEWAGNNGMHVANLSLGSPSPSATLEQAVNSATSRGVLVVAASGNSGAGSISYPARYANAMAVGATDQNNNRASFSQYGAGLDIVAPGVNVQSTYPGSTYASLNGTSMATPHVAGAAVLVKQKNPSWSNVRIRNHLKNTATSLGSTNLYGSGLVNAEAATR

SEQ ID NO: 58308 - protein, 269 aa, Unidentified
AQSVPWGISRVQAPAAHNRGLTGRGVKVAVLDTGISTHPDLNIRGGASFVPGEPSTQDGNGHGTHVAGTIAALNNGIGVLGVAPSAELYAVKVLGASGSGSVSSIAQGLEWAGNNDMHVANLSLGSPSPSATLEQAVNSATSRGVLVVAASGNSGAGSISYPARYANAMAVGATDQNNNRADFSQYGAGLDIVAPGVNVQSTYPGSTYASLNGTSMATPHVAGAAALVKQKNPSWSNVRIRDRLKNTATSLGSTNLYGSGLVNAEAATR

SEQ ID NO: 58309 - protein, 269 aa, Unidentified
AQSVPWGISRVQAPAAHNRKLTGGGVKVAVLDTGISTHPDLNIRGGASFVPGEPSTQDGEGHGTHVAGTIAALNNNIGVLGVAPSAELYAVKVLGASGGGSVSSIAQGLEWAGLNGMHVANLSLGAPSPSATLEQAVNSATSRGVLVVAASGNSGAGSISYPARYANAMAVGATDQNNNRASFSQYGAGLDIVAPGVNVQSTYPGSTYASLNGTSMATPHVAGAAALVKQKNPSWSNVQIRNHLKNTATSLGSTNLYGSGLVNAEAATR

SEQ ID NO: 58310 - protein, 269 aa, Bacillus lentus
AQSVPWGIRRVQAPTAHNRGLTGSGVKVAVLDTGISTHPDLNIRGGASFVPGEPSTQDGNGHGTHAAGTIAALINSIGVLGVAPSAELYAVKVLGAGGSGSVSSIAQGLEWAGNNGMHVANLSLGSPSPSATLEQAVNSATSRGVLVVAASGNSGAGSISYPARYANAMAVGATDQNNNRASFSQYGAGLDIVAPGVNVQSTYPGSTYASLNGTSMATPHVAGAAALVKQKNPSWSNVRIRNHLKDTATSLGSTNLYGSGLVNAEAATR

SEQ ID NO: 58311 - protein, 269 aa, Unidentified
AQSVPWGISRVQAPAAHRRGLTGRGVKVAVLDTGISTHPDLNIRGGASFVPGEPSTQDGNGHGTHVAGTIAALDNSIGVLGVAPSAELYAVKVLGASGSGSVSSIAQGLEWAGNNGMHVANLSLGSPSPSATLEQAVNSATSRGVLVVAASGNSGAGSISYPARYANAMAVGATDQNNNRASFSQYGAGLDLVAPGVNVQSTYPQSAYASLNGTSMATPHVAGAAALVKQKNPSWSNVQIRNRLKNTATSLGSTNLYGSGLVNAEAATR

SEQ ID NO: 58312 - protein, 269 aa, Unidentified
AQSVPWGISRVQAPAAHRRRLTGRGVKVAVLDTGISTHPDLNIRGGASFVPGEPSTQDGNGHGTHVAGTIAALDNSIGVLGVAPSAELYAVKVLGASGSGSVSSIAQGLEWAGANGMHVANLSLGSPSPSATLEQAVNSATSRGVLVVAASGNSGAGSISYPARYANAMAVGATDQNNNRASFSQYGAGLDIVAPGVNVQSTYPGSTYFSLNGTSMATPHVAGAAALVKQKNPSWSNVQIRNRLKNTATSLGSTNLYGSGLVNAEAATR

SEQ ID NO: 58313 - protein, 269 aa, Unidentified
AQSVPWGISRVQAPAAHNRRLTGRGVKVAVLDTGISTHPDLNIRGGASFVPGEPSTQDGEGHGTHVAGTIAALNNDIGVLGVAPSAELYAVKVLGASGSGSVSSIAQGLEWAGNNSMHVANLSLGSESPSATLEQAVNSATSRGVLVVAASGNSGAGSISYPARYANAMAVGATDQNNNRASFSQYGAGLDIVAPGVNVQSTYPGSTYASLNGTSMATPHVAGAAALVKQKNPSWSNVRIRNHLKNTATSLGSTNLYGSGLVNAEAATR

SEQ ID NO: 58314 - protein, 269 aa, Bacillus lentus
AQSVPWGISRVQAPAAHNRGLTGSGVKVAVLDTGISTHPDLNIRGGASEVPGEPSTQDGNGHGTHVAGTIAALNNSIGVLGVAPNAELYAVKVLGASGSGSVSSIAQGLEWAGNNVMHVANLSLGLQAPSATLEQAVNSATSRGVLVVAASGNSGAGSISYPARYANAMAVGATDQNNNRASESQYGAGLDIVAPGVNVQSTYPGSTYASLNGTSMATPHVAGAAALVKQKNPSWSNVQIRNHLKNTATSLGSTNLYGSGLVNAEAATR

SEQ ID NO: 58315 - protein, 269 aa, Unidentified
AQSVPWGISRVQAPAAHNRGLAGRGVKVAVLDSGISTHPDLNIRGGASFVPGEPSTQDGNGHGTHVAGTIAALNNSIGVLGVAPSAELYAVKVLGASGSGSVSSIAQGLEWAGLNGMHVANLSLGIPSPSATLEQAVNSATSRGVLVVAASGNSGEGSISYPARYANAMAVGATDQNNNRADFSQYGAGLDIVAPGVNVQSTYPGSTYASLNGTSMATPHVAGAAALVKQKNPSWSNVQIRNHLKNTATSLGSTNLYGSGLVNAEAATR

SEQ ID NO: 58316 - protein, 269 aa, Bacillus lentus
AQSVPWGIRRVQAPTAHNRGLTGSGVKVAVLDTGISTHPDLNIRGGASFVPGEPSTQDGNGHGTHAAGTIAALNNSTGVLGVAPSAELYAVKVLGASGSSSVSSIAQGLEWAGNNGMHVANLSLGSPSHSATLEHAVNSATSRGVLVVAASGNSGAGSISYPARYANAMAVGATDQNNNRASFSQYGAGLDIVAPGVNVQSTYPGSTYASLNGTSMATPHVAGAAALVKQKNPSWSNVQIRNHLKNTATSLGSTNLYGSGLVNAEAATR

SEQ ID NO: 58317 - protein, 269 aa, Bacillus lentus
AQSVPWGIRRVQAPTAHNRGLTGSGVKVAVLDTGISTHPDLNIRGGASFVPGEPSTQDGNGHGTHAAGTFAALNNSIGVLGVAPSAELYAVKVLGAGGSGSVSSIAQGLEWAGNNGMHVANLSLGSPSPSATLEQAVNSATSRGVLVVAASGNSGAGSISYPARYANAMAVGATDQNNNRASFSQYGAGLDIVAPGVNVQSTYPGSTYASLNGTSMATPHVAGAAALVKQKNPSWSNVRIRNHLKDTATSLGSTNLYGSGLVNAEAATR

SEQ ID NO: 58318 - protein, 269 aa, Unidentified
AQSVPWGISRVQAPAAHNRRLTGRGVKVAVLDTGISTHPDLNIRGGASFVPGEPSTQDGNGHGTHVAGTIAALNNGIGVLGVAPSAELYAVKVLGASGSGSVSSIAQGLEWAGNNDMHVANLSLGSPSPSATLEQAVNSATSRGVLVVAASGNSGADSISYPARYANAMAVGATDQNNNRASFSQYGAGLDIVAPGVNVQSTYPGSTYASLNGTSMATPHVAGAAALVKQKNPSWSNVQIRDRLKNTATSLGSTNLYGSGLVNAEAATR

SEQ ID NO: 58319 - protein, 269 aa, Unidentified
AQSVPWGISRVQAPAAHNRGLAGGGVKVAVLDTGISTHPDLNIRGGASFVPGEPSTQDGNGHGTHVAGTIAALNNSIGVLGVAPSAELYAVKVLGASGNGAISSIAQGLEWAGNNGMHVANLSLGSPSPSATLEQAVNSATSRGVLVVAASGNSGAGSISYPARYANAMAVGATDQNNNRASFSQYGAGLDIVAPGVNVQSTYPGSTYASLNGTSMATPHVAGAAVLVKQKNPSWSNVRIRNHLKNTATSLGSTNLYGSGLVNAEAATR

SEQ ID NO: 58320 - protein, 269 aa, Unidentified
AQSVPWGISRVQAPAAHNRRLTGRGVKVAVLDTGISTHPDLNIRGGASFVPGEPSTQDGNGHGTHVAGTIAALNNGIGVLGVAPSAELYAVKVLGASGSGSVSSIAQGLEWAGNNSMHVANLSLGSPSPSATLEQAVNSATSRGVLVVAASGNSGADSISYPARYANAMAVGATDQNNNRADFSQYGAGLDIVAPGVNVQSTYPGSTYASLNGTSMATPHVAGAAALVKQKNPSWSNVRIRNHLKNTATSLGSTNLYGSGLVNAEAATR

SEQ ID NO: 58321 - protein, 269 aa, Unidentified
AQSVPWGISRVQAPAAHNRGLTGRGVKVAVLDTGISTHPDLRITGGASFVPGEPSTQDGNGHGTHVAGTIAALNNSIGVLGVAPSAELYAVKVLGASGAGSVSSIAQGLEWAGLNGMHVANLSLGSPSPSATLEQAVNSATSRGVLVVAASGNSGAGSISYPARYANAMAVGATDQNNNRASFSQYGAGLDIVAPGVNVQSTYIGSAYASLNGTSMATPHVAGAAALVKQKNPSWSNVQIRNHLKNTATSLGSTNLYGSGLVNAEAATR

SEQ ID NO: 58322 - protein, 269 aa, Unidentified
AQSVPWGISRVQAPAAHNRRLTGRGVKVAVLDTGISTHPDLNIRGGASFVPGEPSTQDGNGHGTHVAGTIAALNNNIGVLGVAPSAELYAVKVLGASGQGSVSSIANGLEWAGLNGMHVANLSLGSPSPSATLEQAVNSATSRGVLVVAASGNSGAGSISYPARYANAMAVGATDQNNNRASFSQYGAGLDIVAPGVNVQSTYPGSTYASQNGTSMATPHVAGAAALVKQKNPSWSNVQIRNHLKNTATSLGSTNLYGSGLVNAEAATR

SEQ ID NO: 58323 - protein, 269 aa, Unidentified
AQSVPWGISRVQAPAAHNRGLTGRGVKVAVLDTGISTHPDLNIRGGASFVPGEPSTQDGEGHGTHVAGTIAALNNDIGVLGVAPSAELYAVKVLGASGSGSVSSIAQGLEWAGNNSMHVANLSLGSESPSATLEQAVNSATSRGVLVVAASGNSGADSISYPARYANAMAVGATDQNNNRASFSQYGAGLDIVAPGVNVQSTYPGSTYASLNGTSMATPHVAGAAALVKQKNPSWSNVQIRNRLKNTATSLGSTNLYGSGLVNAEAATR

SEQ ID NO: 58324 - protein, 269 aa, Unidentified
AQSVPWGISRVQAPAAHNRRLTGSGVKVAVLDTGISTHPDLNIRGGASFVPGEPSTQDGEGHGTHVAGTIAALNNDIGVLGVAPSAELYAVKVLGASGSGSVSSIAQGLEWAGNNDMHVANLSLGSPSPSATLEQAVNSATSRGVLVVAASGNSGADSISYPARYANAMAVGATDQNNNRADFSQYGAGLDIVAPGVNVQSTYPGSTYASLNGTSMATPHVAGAAALVKQKNPSWSNVRIRNHLKNTATSLGSTNLYGSGLVNAEAATR

SEQ ID NO: 58325 - protein, 269 aa, Unidentified
AQSVPWGISRVQAPAAHNRRLTGRGVKVAVLDTGISTHPDLNIRGGASFVPGEPSTQDGNGHGTHVAGTIAALNNDIGVLGVAPSAELYAVKVLGASGSGSVSSIAQGLEWAGNNSMHVANLSLGSESPSATLEQAVNSATSRGVLVVAASGNSGAGSISYPARYANAMAVGATDQNNNRASFSQYGAGLDIVAPGVNVQSTYPGSTYASLNGTSMATPHVAGAAALVKQKNPSWSNVQIRDRLKNTATSLGSTNLYGSGLVNAEAATR

SEQ ID NO: 58326 - protein, 269 aa, Unidentified
AQSVPWGISRVQAPAAHNRRLTGSGVKVAVLDTGISTHPDLNIRGGASFVPGEPSTQDGEGHGTHVAGTIAALNNDIGVLGVAPSAELYAVKVLGASGSGSVSSIAQGLEWAGNNSMHVANLSLGSPSPSATLEQAVNSATSRGVLVVAASGNSGADSISYPARYANAMAVGATDQNNNRASFSQYGAGLDIVAPGVNVQSTYPGSTYASLNGTSMATPHVAGAAALVKQKNPSWSNVRIRDHLKNTATSLGSTNLYGSGLVNAEAATR

SEQ ID NO: 58327 - protein, 269 aa, Unidentified
AQSVPWGISRVQAPAAHNRGLTGGGVKVAVLDTGISTHPDLNIRGGASFVPGEPSTQDGNGHGTHVAGTIAALDNNIGVLGVAPSAELYAVKVLGASGNGSVSSIAQGLEWAGNNGMQVANLSLGAPSPSATLEQAVNSATSRGVLVVAASGNSGAGSISYPARYANAMAVGATDQNNNRASFSQYGAGLDIVAPGVNVQSTYPGSTYASQNGTSMATPHVAGAAALVKQKNPSWSNVQIRNHLKNTATSLGSTNLYGSGLVNAEAATR

SEQ ID NO: 58328 - protein, 269 aa, Unidentified
AQSVPWGISRVQAPAAHRRGLTGRGVKVAVLDTGISTHPDLNIRGGASFVPGEPSTQDGNGHGTHVAGTIAALDNSIGVLGVAPSAELYAVKVLGASGAGSVSSIAQGLEWAGNNGMHVANLSLGSPSPSATLEQAVNSATSRGVLVVAASGNSGAGSISYPARYANAMAVGATDQDNNRASFSQYGAGLDIVAPGVNVQSTYPGSAYASLNGTSMATPHVAGAAALVKQKNPSWSNVQIRNRLKNTATSLGSTNLYGSGLVNAEAATR

SEQ ID NO: 58329 - protein, 269 aa, Unidentified
AQSVPWGISRVQAPAAHNRGLTGSGVKVAVLDTGISTHPDLNIRGGASFVPGEPSTQDGNGHGTHVAGTIAALNNSIGVLGVASGVELYAVKVLAASGSGSVSSIAQGLEWAGNSGMHVANLSLGAPSPSATLEQAVNSATSRGVLVVAASGNSGAGSISYPARYANAMAVGATDQNNNRASFSQYGAGLDIVAPGVNVQSTYPGSTYASQNGTSMATPHVAGAAALVKQKNPSWSNVQIRNHLKNTATSLGSTNLYGSGLVNAEAATR

SEQ ID NO: 58330 - protein, 269 aa, Unidentified
AQSVPWGISRVQAPAAHNRRLTGSGVKVAVLDTGISTHPDLNIRGGASFVPGEPSTQDGNGHGTHVAGTIAALNNGIGVLGVAPSAELYAVKVLGASGSGSVSSIAQGLEWAGNNDMHVANLSLGSESPSATLEQAVNSATSRGVLVVAASGNSGADSISYPARYANAMAVGATDQNNNRASFSQYGAGLDIVAPGVNVQSTYPGSTYASLNGTSMATPHVAGAAALVKQKNPSWSNVRIRNRLKNTATSLGSTNLYGSGLVNAEAATR

SEQ ID NO: 58331 - protein, 269 aa, Unidentified
AQSVPWGISRVQAPAAHNRRLTGSGVKVAVLDTGISTHPDLNIRGGASFVPGEPSTQDGNGHGTHVAGTIAALNNGIGVLGVAPSAELYAVKVLGASGSGSVSSIAQGLEWAGNNSMHVANLSLGSPSPSATLEQAVNSATSRGVLVVAASGNSGADSISYPARYANAMAVGATDQNNNRADFSQYGAGLDIVAPGVNVQSTYPGSTYASLNGTSMATPHVAGAAALVKQKNPSWSNVRIRDHLKNTATSLGSTNLYGSGLVNAEAATR

SEQ ID NO: 58332 - protein, 269 aa, Unidentified
AQSVPWGISRVQAPAAHNRKLLGSGVKVAVLDTGISTHPDLNIRGGASFVPGEPSTQDGNGHGTHVAGTIAALNNNIGVLGVAPSAELYAVKVLGASGSGSVSSIAQGLEWAGNNGMHVANLSLGDPSPSATLEQAVNSATSRGVLVVAASGNSGAGSIDYPARYANAMAVGATDQNNNRASFSQYGAGLDIVAPGVNVQSTYPGSAYASENGTSMATPHVAGAAALVKQKNPSWSNVQIRNHLKNTATSLGSTNLYGSGLVNAEAATR

SEQ ID NO: 58333 - protein, 269 aa, Unidentified
AQSVPWGISRVQAPAAHNRRLTGSGVKVAVLDTGISTHPDLNIRGGASFVPGEPSTQDGEGHGTHVAGTIAALNNGIGVLGVAPSAELYAVKVLGASGSGSVSSIAQGLEWAGNNDMHVANLSLGSESPSATLEQAVNSATSRGVLVVAASGNSGAGSISYPARYANAMAVGATDQNNNRASFSQYGAGLDIVAPGVNVQSTYPGSTYASLNGTSMATPHVAGAAALVKQKNPSWSNVRIRNRLKNTATSLGSTNLYGSGLVNAEAATR

SEQ ID NO: 58334 - protein, 269 aa, Unidentified
AQSVPWGISRVQAPAAHNRRLTGRGVKVAVLDTGISTHPDLNIRGGASFVPGEPSTQDGNGHGTHVAGTIAALNNSIGVLGVAPSAELYAVKVLAASGAGSVSSIAGGLEWAGLNGMHVANLSLGAPSPSATLEQAVNSATSRGVLVVAASGNSGAGSISYPARYANAMAVGATDQNNNRASFSQYGAGLDIVAPGVNVQSTYPGSTYASLNGTSMATPHVAGAAALVKQKNPSWSNVQIRNHLKNTATSLGSTNLYGSGLVNAEAATR

SEQ ID NO: 58335 - protein, 269 aa, Unidentified
AQSVPWGISRVQAPAAHNRRLTGSGVKVAVLDTGISTHPDLNIRGGASFVPGEPSTQDGNGHGTHVAGTIAALNNSIGVLGVAPSAELYAVKVLGASGSGSVSSIAQGLEWAGNNRMHVANLSLGSESPSATLEQAVNSATSRGVLVVAASGNSGADSISYPARYANAMAVGATDQNNNRASFSQYGAGLDIVAPGVNVQSTYPGSTYASLNGTSMATPHVAGAAALVKQKNPSWSNVRIRDRLKNTATSLGSTNLYGSGLVNAEAATR

SEQ ID NO: 58336 - protein, 269 aa, Unidentified
AQSVPWGISRVQAPAAHNRGLTGRGVKVAVLDTGISTHPDLDIRGGASFVPGEPSTQDGNGHGTHVAGTIAALNNSIGVLGVAPSAELYAVKVLGASGGGAISSIAQGLEWAGNNGMHVANLSLGSPSPSATLEQAVNSATSRGVLVVAASGNSGAGSISYPARYANAMAVGATDQNNNRASFSQYGAGLDIVAPGVNVQSTYPGSTYASLNGTSMATPHVAGAAVLVKQKNPSWSNVRIRNHLKNTATSLGSTNLYGSGLVNAEAATR

SEQ ID NO: 58337 - protein, 269 aa, Unidentified
AQSVPWGISRVQAPAAHRRGLTGSGVKVAVLDTGISTHPDLRIRGGASFVPGEPSTQDGNGHGTHVAGTIAALNNSIGVLGVAPSAELYAVKVLGASGGGAISSIAQGLEWAGNNGMHVANLSLGSPSPSATLEQAVNSATSRGVLVVAASGNSGAGSISYPARYANAMAVGATDQNNNRASFSQYGAGLDIVAPGVNVQSTYPGSTYASLNGTSMATPHVAGAAVLVKQKNPSWSNVRIRNHLKNTATSLGSTNLYGSGLVNAEAATR

SEQ ID NO: 58338 - protein, 269 aa, Unidentified
AQSVPWGISRVQAPAAHRRGLWGRGVKVAVLDTGISTHPDLNIRGGASFVPGEPSTQDGNGHGTHVAGTIAALDNSIGVLGVAPSAELYAVKVLGASGSGSVSSIAQGLEWAGANGMHVANLSLGSPSPSATLEQAVNSATSRGVLVVAASGNSGAGSISYPARYANAMAVGATDQNNNRASFSQYGAGLDIVAPGVNVQSTYPGSAYASLNGTSMATPHVAGAAALVKQKNPSWSNVQIRNRLKNTATSLGSTNLYGSGLVNAEAATR

SEQ ID NO: 58339 - protein, 269 aa, Bacillus lentus
AQAVPWGIRRVQAPAAHNLGLTGSGVKVAVLDTGISTHPDLRIRGGASFVPGEPSTQDGDGHGTHVAGTIAALNNSIGVLGVAPSAELYAVKVLGASGSGSVSSIAQGLEWAGNNGMHVANLSLGSPSPSATLEQAVNSATSRGVLVVAASGNSGAGSISYPARYANAMAVGATDQNNNRASFSQYGPGLDIVAPGVNVQSTYPGSTYASLNGTSMATPHVAGAAALVKQKNPSWSNVQIRNHLKNTATSLGSTNLYGSGLVNAEAATQ

SEQ ID NO: 58340 - protein, 269 aa, Unidentified
AQSVPWGISRVQAPAAHNRRLTGSGVKVAVLDTGISTHPDLNIRGGASFVPGEPSTQDGNGHGTHVAGTIAALNNGIGVLGVAPSAELYAVKVLGASGSGSVSSIAQGLEWAGNNDMHVANLSLGSESPSATLEQAVNSATSRGVLVVAASGNSGAGSISYPARYANAMAVGATDQNNNRADFSQYGAGLDIVAPGVNVQSTYPGSTYASLNGTSMATPHVAGAAALVKQKNPSWSNVRIRNRLKNTATSLGSTNLYGSGLVNAEAATR

SEQ ID NO: 58341 - protein, 269 aa, Unidentified
AQSVPWGISRVQAPAAHNRGLTGSGVKVAVLDTGISTHPDLNIRGGASFVPGEPSTQDPNGHGTHVAGTIAALNNNIGVLGVAPSAELYAVKVLAASGNGSVSSIAQGLEWAGNNGMHVANLSLGAPSPSATLEQAVNSATSRGVLVVAASGNSGAGSISYPARYANAMAVGATDQNNNRASFSQYGAGLDIVAPGYNVQSTYPGSTYASQNGTSMATPHVAGAAALVKQKNPSWSNVQIRNHLKNTATSLGSTNLYGSGLVNAEAATR

SEQ ID NO: 58342 - protein, 269 aa, Unidentified
AQSVPWGISRVQAPAAHRRGLTGRGVKVAVLDTGISTHPDLNIRGGASFVPGEPSTQDGNGHGTHVAGTIAALDNSIGVLGVAPSAELYAVKVLGASGAGSVSSIAQGLEWAGNNGMHVANLSLGSPSPSATLEQAVNSATSRGVLVVAASGNSGAGSISYPARYANAMAVGATDQNNNRASFSQYGAGLDLVAPGVNVQSTYPGSAYASLNGTSMATPHVAGAAALVKQKNPSWSNVQIRNRLKNTATSLGSTNLYGSGLVNAEAATR

SEQ ID NO: 58343 - protein, 269 aa, Unidentified
AQSVPWGISRVQAPAAHRRGLTGRGVKVAVLDTGISTHPDLNIRGGASFVPGEPSTQDGNGHGTHVAGTIAALDNSIGVLGVAPSAELYAVKVLGASGSGSVSSIAQGLEWAGNNGMHVANLSLGSPSPSATLEQAVNSATSRGVLVVAASGNSGAGSISYPARYANAMAVGATDQDNNRASFSQYGAGLDIVAPGVNVQSTYPQSAYASLNGTSMATPHVAGAAALVKQKNPSWSNVQIRNRLKNTATSLGSTNLYGSGLVNAEAATR

SEQ ID NO: 58344 - protein, 269 aa, Unidentified
AQSVPWGISRVQAPAAHNRGLTGSGVKVAVLDTGISTHPDLRIRGGASFVPGEPSTQDGNGHGTHVAGTIAALNNSIGVLGVAPDAELYAVKVLGASGGGAISSIAQGLEWAGNNGMHVANLSLGSPSPSATLEQAVNSATSRGVLVVAASGNSGAGSISYPARYANAMAVGATDQNNNRASFSQYGAGLDIVAPGVNVQSTYPGSTYASLNGTSMATPHVAGAAVLVKQKNPSWSNVRIRNHLKNTATSLGSTNLYGSGLVNAEAATR

SEQ ID NO: 58345 - protein, 269 aa, Unidentified
AQSVPWGISRVQAPAAHRRGLTGRGVKVAVLDTGISTHPDLNIRGGASFVPGEPSTQDGNGHGTHVAGTIAALDNSIGVLGVAPSAELYAVKVLGASGSGAISSIAQGLEWAGNNGMHVANLSLGSPSPSATIEQAVNSATSRGVLVVAASGNSGAGSISYPARYANAMAVGATDQNNNRASFSQYGAGLDIVAPGVNVQSTYPGSTYASLNGTSMATPHVAGAAVLVKQKNPSWSNVQIRNHLKNTATSLGSTNLYGSGLVNAEAATR

SEQ ID NO: 58346 - protein, 269 aa, Unidentified
AQSVPWGISRVQAPAAHNRGLTGRGVKVAVLDTGISTHPDLNIRGGASFVPGEPSTQDGEGHGTHVAGTIAALNNGIGVLGVAPSAELYAVKVLGASGSGSVSSIAQGLEWAGNNSMHVANLSLGSESPSATLEQAVNSATSRGVLVVAASGNSGAGSISYPARYANAMAVGATDQNNNRASFSQYGAGLDIVAPGVNVQSTYPGSTYASLNGTSMATPHVAGAAALVKQKNPSWSNVRIRDHLKNTATSLGSTNLYGSGLVNAEAATR

SEQ ID NO: 58347 - protein, 269 aa, Unidentified
AQSVPWGISRVQAPAAHRRRLTGRGVKVAVLDTGISTHPDLRITGGASFVPGEPSTQDGNGHGTHVAGTIAALDNSIGVLGVAPSAELYAVKVLGASGSGSVSSIAQGLEWAGNNGMHVANLSLGSPSPSATLEQAVNSATSRGVLVVAASGNSGAGSISYPARYANAMAVGATDQNNNRASFSQYGAGLDIVAPGVNVQSTYPGSTYASLNGTSMATPHVAGEAALVKQKNPSWSNVQIRNHLKNTATSLGSTNLYGSGLVNAEAATR

SEQ ID NO: 58348 - protein, 269 aa, Unidentified
AQSVPWGISRVQAPAAHNRGLAGRGVKVAVLDSGISTHPDLNIRGGASFVPGEPSTQDGNGHGTHVAGTIAALNNSIGVLGVAPSAELYAVKVLGASGSGSVSSIAQGLEWAGNNRMHVANLSLGIPSPSATLEQAVNSATSRGVLVVAASGNSGAGSIDYPARYANAMAVGATDQNNNRADFSQYGAGLDIVAPGVNVQSTYPGSTYASLNGTSMATPHVAGAAALVKQKNPSWSNVQIRNHLKNTATSLGSTNLYGSGLVNAEAATR

SEQ ID NO: 58349 - protein, 269 aa, Unidentified
AQSVPWGISRVQAPAAHRRRLTGRGVKVAVLDTGISTHPDLNIRGGASFVPGEPSTQDGNGHGTHVAGTIAALDNSIGVLGVAPSAELYAVKVLGASGSGSVSSIAQGLEWAGNNGMHVANLSLGSPSPSATLEQAVNSATSRGVLVVAASGNSGAGSISYPARYANAMAVGATDQNNNRASFSQYGAGLDIVAPGVNVQSTYPQSTYASLNGTSMATPHVAGAAALVKQKNPSWSDVQIRNRLKNTATSLGSTNLYGSGLVNAEAATR

SEQ ID NO: 58350 - protein, 269 aa, Unidentified
AQSVPWGISRVQAPAAHRRRLTGSGVKVAVLDTGISTHPDLRITGGASFVPGEPSTQDGNGHGTHVAGTIAALDNSIGVLGVAPSAELYAVKVLGASGSGSVSSIAQGLEWAGNNGMHVANLSLGSPSPSATLEQAVNSATSRGVLVVAASGNSGAGSISYPARYANAMAVGATDQNNNRASFSQYGAGLDIVAPGVNVQSTYPGSTYASLNGTSMATPHVAGEAALVKQKNPSWSNVQIRNRLKNTATSLGSTNLYGSGLVNAEAATR

SEQ ID NO: 58351 - protein, 269 aa, Unidentified
AQSVPWGISRVQAPAAHNRGLTGRGVKVAVLDTGISTHPDLNIRGGASFVPGEPSTQDGEGHGTHVAGTIAALNNGIGVLGVAPSAELYAVKVLGASGSGSVSSIAQGLEWAGNNDMHVANLSLGSPSPSATLEQAVNSATSRGVLVVAASGNSGAGSISYPARYANAMAVGATDQNNNRADFSQYGAGLDIVAPGVNVQSTYPGSTYASLNGTSMATPHVAGAAALVKQKNPSWSNVRIRNRLKNTATSLGSTNLYGSGLVNAEAATR

SEQ ID NO: 58352 - protein, 269 aa, Unidentified
AQSVPWGISRVQAPAAHNRGLTGRGVKVAVLDTGISTHPDLNIRGGASFVPGEPSTQDGEGHGTHVAGTIAALNNGIGVLGVAPSAELYAVKVLGASGSGSVSSIAQGLEWAGNNDMHVANLSLGSESPSATLEQAVNSATSRGVLVVAASGNSGADSISYPARYANAMAVGATDQNNNRASFSQYGAGLDIVAPGVNVQSTYPGSTYASLNGTSMATPHVAGAAALVKQKNPSWSNVQIRNRLKNTATSLGSTNLYGSGLVNAEAATR

SEQ ID NO: 58353 - protein, 269 aa, Unidentified
AQSVPWGISRVQAPAAHNRRLTGGGVKVAVLDTGISTHPDLRIRGGASFVPGEPSTQDGNGHGTHVAGTIAALNNNIGVLGVAPSAELYAVKVLSASGGGSVSSIAQGLEWAGNNGMHVANLSLGAPSPSATLEQAVNSATSRGVLVVAASGNSGAGSISYPARYANAMAVGATDQNNNRASFSQYGAGLDIVAPGVNVQSTYPGSTYASLNGTSMATPHVAGAAALVKQKNPSWSNVQIRNHLKNTATSLGSTNLYGSGLVNAEAATR

SEQ ID NO: 58354 - protein, 269 aa, Unidentified
AQSVPWGISRVQAPAAHNRGLTGSGVKVAVLDTGISTHPDLNIRGGASFVPGEPSTQDGNGHGTHVAGTIAALNNSIGVLGVAPSAELYAVKVLGASGGGAISSIARGLEWAGNNGMHVANLSLGSPSPSATLEQAVNSATSRGVLVVAASGNSGAGSISYPARYANAMAVGATDQNNNRASFSQYGAGLDIVAPGVNVQSTYPGPTYASLNGTSMATPHVAGAAVLVKQKNPSWSNVRIRNHLKNTATSLGSTNLYGSGLVNAEAATR

SEQ ID NO: 58355 - protein, 269 aa, Unidentified
AQSVPWGISRVQAPAAHRRGLTGRGVKVAVLDTGISTHPDLNIRGGASFVPGEPSTQDGNGHGTHVAGTIAALDNSIGVLGVAPSAELYAVKVLGASGGGAISSIAQGLEWAGNNGMHVANLSLGSPSPSATLEQAVNSATSRGVLVVAASGNSGAGSISYPARYANAMAVGATDQNNNRASFSQYGAGLDIVAPGVNVQSTYPGSTYASLNGTSMATPHVAGAAVLVKQKNPSWSNVQIRNHLKNTATSLGSTNLYGSGLVNAEAATR

SEQ ID NO: 58356 - protein, 269 aa, Unidentified
AQSVPWGISRVQAPAAHNRGLTGSGVKVAVLDTGISTHPDLNIRGGASFVPGEPSTQDGNGHGTHVAGTIAALNNSIGVLGVAPSAELYAVKVLGASGGGAISSIAQGLEWAGLNGMHVANLSLGSPSPSATLEQAVNSATSRGVLVVAASGNSGAGSISYPARYANAMAVGATDQNNNRASFSQYGAGLDIVAPGVNVQSTAPQSTYASLNGTSMATPHVAGAAVLVKQKNPSWSNVQIRNHLKNTATSLGSTNLYGSGLVNAEAATR

SEQ ID NO: 58357 - protein, 269 aa, Unidentified
AQSVPWGISRVQAPAAHNRGLTGRGVKVAVLDTGISTHPDLNIRGGASFVPGEPSTQDGNGHGTHVAGTIAALDNNIGVLGVAPRAELYAVKVLGASGSGSVSSIAQGLEWAGLNRMHVANLSLGSPSPSATLEQAVNSATSRGVLVVAASGNSGAGSISYPARYANAMAVGATDQNNNRASFSQYGAGLDIVAPGVNVQSTWPGSTYASLNGTSQATPHVAGAAALVKQKNPSWSNVQIRNHLKNTATSLGSTNLYGSGLVNAEAATR

SEQ ID NO: 58358 - protein, 269 aa, Unidentified
AQSVPWGISRVQAPAAHNRKLTGSGVKVAVLDTGISTHPDLNIRGGASFVPGEPSTQDGEGHGTHVAGTIAALNNNIGVLGVAPSAELYAVKVLSASGNGSVSSIAGGLEWAGLNGMHVANLSLGSPSPSATLEQAVNSATSRGVLVVAASGNSGAGSISYPARYANAMAVGATDQNNNRASFSQYGAGLDIVAPGVNVQSTYPGSTYASLNGTSMATPHVAGAAALVKQKNPSWSNVQIRNHLKNTATSLGSTNLYGSGLVNAEAATR

SEQ ID NO: 58359 - protein, 269 aa, Unidentified
AQSVPWGISRVQAPAAHNRRLTGSGVKVAVLDTGISTHPDLNIRGGASFVPGEPSTQDGEGHGTHVAGTIAALNNDIGVLGVAPSAELYAVKVLGASGSGSVSSIAQGLEWAGNNDMHVANLSLGSPSPSATLEQAVNSATSRGVLVVAASGNSGADSISYPARYANAMAVGATDQNNNRASFSQYGAGLDIVAPGVNVQSTYPGSTYASLNGTSMATPHVAGAAALVKQKNPSWSNVRIRDHLKNTATSLGSTNLYGSGLVNAEAATR

SEQ ID NO: 58360 - protein, 269 aa, Unidentified
AQSVPWGVSRVQAPAAHNRGLTGSGVKVAVLDTGISTHPDLNIRGGASFVPGEPSTQDGNGHGTHVAGTIAALDNGIGVLGVAPSAELYAVKVLGASGSGSVSSIAQGLEWAGNNRMHVANLSLGSPSPSATLEQAVNSATSRGVLVVAASGNSGAGSISYPARYANAMAVGATDQNNNRASFSQYGAGLDIVAPGVNVQSTYIGSTYVSLNGTSMATPHVAGAAALVKQKNPSWSNVQIRNHLKNTATSLGSTILYGSGLVNAEAATR

SEQ ID NO: 58361 - protein, 269 aa, Unidentified
AQSVPWGISRVQAPAAHNRGLQGSGVKVAVLDTGISTHPDLNIRGGASFVPGEPSTQDGNGHGTHVAGTIAALNNSIGVLGVAPSAELYAVKVLGASGGGNLSSIAQGLEWAGNNGMHVANLSLGSPSPSATLEQAVNSATSRGVLVVAASGNSGAGSISYPARYANAMAVGATDQNNNRASFSQYGAGLDIVAPGVNVQSTYPGSTYASLNGTSMATPHVAGAAVLVKQKNPSWSNVRIRNHLKNTATSLGSTNLYGSGLVNAEAAIR

SEQ ID NO: 58362 - protein, 269 aa, Unidentified
AQSVPWGISRVQAPAAHNRGLTGRGVKVAVLDTGISTHPDLNIRGGASFVPGEPSTQDGEGHGTHVAGTIAALNNGIGVLGVAPSAELYAVKVLGASGSGSVSSIAQGLEWAGNNSMHVANLSLGSPSPSATLEQAVNSATSRGVLVVAASGNSGADSISYPARYANAMAVGATDQNNNRADFSQYGAGLDIVAPGVNVQSTYPGSTYASLNGTSMATPHVAGAAALVKQKNPSWSNVQIRDHLKNTATSLGSTNLYGSGLVNAEAATR

SEQ ID NO: 58363 - protein, 269 aa, Unidentified
AQSVPWGISRVQAPAAHNRRLTGRGVKVAVLDTGISTHPDLNIRGGASFVPGEPSTQDGEGHGTHVAGTIAALNNGIGVLGVAPSAELYAVKVLGASGSGSVSSIAQGLEWAGNNSMHVANLSLGSPSPSATLEQAVNSATSRGVLVVAASGNSGADSISYPARYANAMAVGATDQNNNRASFSQYGAGLDIVAPGVNVQSTYPGSTYASLNGTSMATPHVAGAAALVKQKNPSWSNVQIRNHLKNTATSLGSTNLYGSGLVNAEDATR

SEQ ID NO: 58364 - protein, 269 aa, Unidentified
AQSVPWGISRVQAPAAHNRRLTGSGVKVAVLDTGISTHPDLNITGGASFVPGEPSTQDGNGHGTHVAGTIAALNNSIGVLGVAPSAELYAVKVLGASGGGAISSIAQGLEWAGNNGMHVANLSLGSPSPSATLEQAVNSATSRGVLVVAASGNSGAGSISYPARYANAMAVGATDQNNNRASFSQYGAGLDIVAPGVNVQSTYPGSTYASLNGTSMATPHVAGAAVLVKQKNPSWSNVRIRNHLKNTATSLGSTNLYGSGLVNAEAATR

SEQ ID NO: 58365 - protein, 269 aa, Unidentified
AQSVPWGISRVQAPAAHNRGLTGRGVKVAVLDTGISTHPDLNIRGGASFVPGEPSTQDGNGHGTHVAGTIAALNNGIGVLGVAPSAELYAVKVLGASGSGSVSSIAQGLEWAGNNSMHVANLSLGSESPSATLEQAVNSATSRGVLVVAASGNSGADSISYPARYANAMAVGATDQNNNRADFSQYGAGLDIVAPGVNVQSTYPGSTYASLNGTSMATPHVAGAAALVKQKNPSWSNVQIRDHLKNTATSLGSTNLYGSGLVNAEAATR

SEQ ID NO: 58366 - protein, 269 aa, Unidentified
AQSVPWGISRVQAPAAHRRGLWGRGVKVAVLDTGISTHPDLNIRGGASFVPGEPSTQDGNGHGTHVAGTIAALDNSIGVLGVAPSAELYAVKVLGASGSGSVSSIAQGLEWAGANGMHVANLSLGSPSPSATLEQAVNSATSRGVLVVAASGNSGAGSISYPARYANAMAVGATDQNNNRASFSQYGAGLDLVAPGVNVQSTYPGSTYASLNGTSMATPHVAGAAALVKQKNPSWSNVQIRNRLKNTATSLGSTNLYGSGLVNAEAATR

SEQ ID NO: 58367 - protein, 269 aa, Unidentified
AQSVPWGISRVQAPAAHNRGLKGSGVKVAVLDTGISIHPDLNIRGGASFVPGEPSTQDGNGHGTHVAGTIAALNNSIGVLGVAPSAELYAVKVLGASGGGAISSIAQGLEWAGNNGMHVANLSLGSPSPSATLEQAVNSATSRGVLVVAASGNSGAGSISYPARYANAMAVGATDQNNNRASFSQYGAGLDIVAPGVNVQSTYPGSTYASLNGTSMATPHVAGAATLVKQKNPSWSNVSIRNHLKNTATSLGSTNLYGSGLVNAEAATR

SEQ ID NO: 58368 - protein, 269 aa, Unidentified
AQSVPWGISRVQAPAAHNRRLTGSGVKVAVLDTGISTHPDLNIRGGASFVPGEPSTQDGNGHGTHVAGTIAALNNSIGVLGVAPDAELYAVKVLGASGGGAISSIAQGLEWAGNNGMHVANLSLGSPSPSATLEQAVNSATSRGVLVVAASGNSGAGSISYPARYANAMAVGATDQNNNRASFSQYGAGLDIVAPGVNVQSTYPGSTYASLNGTSMATPHVAGAAVLVKQKNPSWSNVRIRNHLKNTATSLGSTNLYGSGLVNAEAATR

SEQ ID NO: 58369 - protein, 269 aa, Unidentified
AQSVPWGISRVQAPAAHNRGLAGSGVKVAVLDTGISTHPDLNIRGGASFVPGEPSTQDGNGHGTHVAGTIAALDNSIGVLGVAPSAELYAVKVLGASGQGAISSIAQGLEWAGNNGMHVANLSLGSPSPSATLEQAVNSATSRGVLVVAASGNSGAGSISYPARYANAMAVGATDQNNNRASFSQYGAGLDIVAPGVNVQSTYPGSTYASLNGTSMATPHVAGAAVLVKQKNPSWSNVRIRNHLKNTATSLGSTNLYGSGLVNAEAATR

SEQ ID NO: 58370 - protein, 269 aa, Unidentified
AQSVPWGISRVQAPAAHNRRLTGSGVKVAVLDTGISTHPDLNIRGGASFVPGEPSTQDGEGHGTHVAGTIAALNNDIGVLGVAPSAELYAVKVLGASGSGSVSSIAQGLEWAGNNDMHVANLSLGSPSPSATLEQAVNSATSRGVLVVAASGNSGADSISYPARYANAMAVGATDQNNNRASFSQYGAGLDIVAPGVNVQSTYPGSTYASLNGTSMATPHVAGAAALVKQKNPSWSNVRIRNRLKNTATSLGSTNLYGSGLVNAEAATR

SEQ ID NO: 58371 - protein, 269 aa, Unidentified
AQSVPWGISRVQAPAAHNRGLTGRGVKVAVLDTGISTHPDLNIRGGASFVPGEPSTQDGNGHGTHVAGTIAALNNRIGVLGVAPSAELYAVKVLGASGSGSVSSIAQGLEWAGNNGMHVANLSLGSPSPSATLEQAVNSATSRGVLVVAASGNSGADSISYPARYANAMAVGATDQNNNRADFSQYGAGLDIVAPGVNVQSTYPGSTYASLNGTSMATPHVAGAAALVKQKNPSWSNVRIRDRLKNTATSLGSTNLYGSGLVNAEAATR

SEQ ID NO: 58372 - protein, 269 aa, Unidentified
AQSVPWGISRVQAPAAHNRRLWGSGVKVAVLDTGISTHPDLNIRGGASFVPGEPSTQDGNGHGTHVAGTIAALNNSIGVLGVAPSAELYAVKVLGASGAGAISSIAQGLEWAGNNGMHVANLSLGSPSPSATLEQAVNSATSRGVLVVAASGNSGAGSISYPARYANAMAVGATDQNNNRASFSQYGAGLDIVAPGVNVQSTYPGSTYASLNGTSMATPHVAGAAVLVKQKNPSWSNVRIRNHLKNTATSLGSTNLYGSGLVNAEAATR

SEQ ID NO: 58373 - protein, 269 aa, Unidentified
AQSVPWGISRVQAPAAHNRRLTGRGVKVAVLDTGISTHPDLNIRGGASFVPGEPSTQDGEGHGTHVAGTIAALNNGIGVLGVAPSAELYAVKVLGASGSGSVSSIAQGLEWAGNNDMHVANLSLGSESPSATLEQAVNSATSRGVLVVAASGNSGAGSISYPARYANAMAVGATDQNNNRADFSQYGAGLDIVAPGVNVQSTYPGSTYASLNGTSMATPHVAGAAALVKQKNPSWSNVQIRNHLKNTATSLGSTNLYGSGLVNAEAATR

SEQ ID NO: 58374 - protein, 269 aa, Unidentified
AQSVPWGISRVQAPAAHNRRLTGSGVKVAVLDTGISTHPDLNIRGGASFVPGEPSTQDGEGHGTHVAGTIAALNNGIGVLGVAPSAELYAVKVLGASGSGSVSSIAQGLEWAGNNDMHVANLSLGSPSPSATLEQAVNSATSRGVLVVAASGNSGADSISYPARYANAMAVGATDQNNNRADFSQYGAGLDIVAPGVNVQSTYPGSTYASLNGTSMATPHVAGAAALVKQKNPSWSNVQIRDHLKNTATSLGSTNLYGSGLVNAEAATR

SEQ ID NO: 58375 - protein, 269 aa, Unidentified
AQSVPWGISRVQAPAAHNRRLTGRGVKVAVLDTGISTHPDLNIRGGASFVPGEPSTQDGNGHGTHVAGTIAALNNDIGVLGVAPSAELYAVKVLGASGSGSVSSIAQGLEWAGNNDMHVANLSLGSPSPSATLEQAVNSATSRGVLVVAASGNSGAGSISYPARYANAMAVGATDQNNNRADFSQYGAGLDIVAPGVNVQSTYPGSTYASLNGTSMATPHVAGAAALVKQKNPSWSNVQIRDRLKNTATSLGSTNLYGSGLVNAEAATR

SEQ ID NO: 58376 - protein, 269 aa, Unidentified
AQSVPWGISRVQAPAAHNRGLAGSGVKVAVLDTGISTHPDLNIRGGASFVPGEPSTQDGEGHGTHVAGTIAALNNSIGVLGVAPSAELYAVKVLGASGSGSVSSIAQGLEWAGLNRMHVANLSLGIPSPSATLEQAVNSATSRGVLVVAASGNSGAGSIDYPARYANAMAVGATDQNNNRADFSQYGAGLDIVAPGVNVQSTYPGSTYASLNGTSMATPHVAGAAALVKQKNPSWSNVQIRNHLKNTATSLGSTNLYGSGLVNAEAATR

SEQ ID NO: 58377 - protein, 269 aa, Unidentified
AQSVPWGISRVQAPAAHNRGLTGSGVKVAVLDTGISTHPDLNIRGGASFVPGEPSTQDGEGHGTHVAGTIAALNNDIGVLGVAPSAELYAVKVLGASGSGSVSSIAQGLEWAGNNSMHVANLSLGSPSPSATLEQAVNSATSRGVLVVAASGNSGADSISYPARYANAMAVGATDQNNNRADFSQYGAGLDIVAPGVNVQSTYPGSTYASLNGTSMATPHVAGAAALVKQKNPSWSNVRIRNRLKNTATSLGSTNLYGSGLVNAEAATR

SEQ ID NO: 58378 - protein, 269 aa, Unidentified
AQSVPWGISRVQAPAAHNRKLTAFGVKVAVLDTGISTHPDLNIRGGASFVPGEPSTQDGEGHGTHVAGTIAALNNSIGVLGVAPSAELYAVKVLGASGSGSVSSIAQGLEWAGLNGMHVANLSLGSPSPSATLEQAVNSATSRGVLVVAASGNSGAGSISYPARYANAMAVGATDQNNNRADFSQYGAGLDIVAPGVNVQSTYPGSAYASLNGTSMATPHVAGAAALVKQKNPSWSNVQIRNHLKNTATSLGSTNLYGSGLVNAEAATR

SEQ ID NO: 58379 - protein, 269 aa, Unidentified
AQSVPWGISRVQAPAAHNRGLAGRGVKVAVLDTGISTHPDLNIRGGASFVPGEPSTQDGEGHGTHVAGTIAALNNSIGVLGVAPSAELYAVKVLGASGSGSVSSIAQGLEWAGLNRMHVANLSLGIPSPSATLEQAVNSATSRGVLVVAASGNSGAGSIDYPARYANAMAVGATDQNNNRASFSQYGAGLDIVAPGVNVQSTYPGSTYASLNGTSMATPHVAGAAALVKQKNPSWSNVQIRNHLKNTATSLGSTNLYGSGLVNAEAATR

SEQ ID NO: 58380 - protein, 269 aa, Unidentified
AQSVPWGISRVQAPAAHNRRLTGRGVKVAVLDTGISTHPDLNIRGGASFVPGEPSTQDGNGHGTHVAGTIAALNNGIGVLGVAPSAELYAVKVLGASGSGSVSSIAQGLEWAGNNDMHVANLSLGSESPSATLEQAVNSATSRGVLVVAASGNSGADSISYPARYANAMAVGATDQNNNRADFSQYGAGLDIVAPGVNVQSTYPGSTYASLNGTSMATPHVAGAAALVKQKNPSWSNVQIRNHLKNTATSLGSTNLYGSGLVNAEAATR

SEQ ID NO: 58381 - protein, 269 aa, Unidentified
AQSVPWGISRVQAPAAHRRRLTGRGVKVAVLDTGISTHPDLRITGGASFVPGEPSTQDGNGHGTHVAGTIAALDNSIGVLGVAPSAELYAVKVLGASGSGSVSSIAQGLEWAGNNGMHVANLSLGSPSPSATLEQAVNSATSRGVLVVAASGNSGAGSISYPARYANAMAVGATDQNNNRASFSQYGAGLDIVAPGVNVQSTYPGSTYASLNGTSMATPHVAGAAALVKQKNPSWSNVQIRNRLKNTATSLGSTNLYGSGLVNAEAATR

SEQ ID NO: 58382 - protein, 269 aa, Unidentified
AQSVPWGISRVQAPAAHNRGLTGSGVKVAVLDTGISTHPDLNIRGGASFVPGEPSTQDGEGHGTHVAGTIAALNNGIGVLGVAPSAELYAVKVLGASGSGSVSSIAQGLEWAGNNSMHVANLSLGSESPSATLEQAVNSATSRGVLVVAASGNSGADSISYPARYANAMAVGATDQNNNRADFSQYGAGLDIVAPGVNVQSTYPGSTYASLNGTSMATPHVAGAAALVKQKNPSWSNVQIRNRLKNTATSLGSTNLYGSGLVNAEAATR

SEQ ID NO: 58383 - protein, 269 aa, Unidentified
AQSVPWGISRVQAPAAHNRGLTGSGVKVAVLDTGISTHPDLNIRGGASFVPGEPSTQDGNGHGTHVAGTIAALNNSIGVLGVAPSAELYAVKVLGASGAGAISSIAQGLEWAGNNGMHVANLSLGSPSPSATLEQAVNSATSRGVLVVAASGNSGAGSISYPARYANAMAVGATDQNNNRASFSQYGAGLDIVAPGVNVQSTYPGSAYASLNGTSMATPHVAGAAVLVKQKNPSWSNVRIRNHLKNTATSLGSTNLYGSGLVRAEAATR

SEQ ID NO: 58384 - protein, 269 aa, Unidentified
AQSVPWGISRVQAPAAHNRGLTGSGVKVAVLDTGISTHPDLNIRGGASFVPGEPSTQDGNGHGTHVAGTIAALNNRIGVLGVAPSAELYAVKVLGASGGGAISSIAQGLEWAGNNGMHVANLSLGSPSPSATLEQAVNSATSRGVLVLAASGNSGAGSISYPARYANAMAVGATDQNNNRASFSQYGAGLDIVAPGVNVQSTYPGSTYASLNGTSMATPHVAGAAVLVKQKNPSWSNVRIRNHLKNTATSLGSTNLYGSGLVNAEAATR

SEQ ID NO: 58385 - protein, 269 aa, Unidentified
AQSVPWGISRVQAPAAHNRGLTGGGVKVAVLDTGISTHPDLNIRGGASFVPGEPSTQDGNGHGTHVAGTIAALNNNIGVLGVAPSAELYAVKVLGASGNGSVSSIAGGLEWAGNNGMHVANLSLGAPSPSATLEQAVNSATSRGVLVVAASGNSGAGSISYPARYANAMAVGATDQNNNRASFSQYGAGLDIVAPGVNVQSTYPGSTYASQNGTSMATPHVAGAAALVKQKNPSWSNVQIRNHLKNTATRLGSTNLYGSGLVNAEAATR

SEQ ID NO: 58386 - protein, 269 aa, Unidentified
AQSVPWGISRVQAPAAHNRRLTGRGVKVAVLDTGISTHPDLNIRGGASFVPGEPSTQDGNGHGTHVAGTIAALNNGIGVLGVAPSAELYAVKVLGASGSGSVSSIAQGLEWAGNNDMHVANLSLGSPSPSATLEQAVNSATSRGVLVVAASGNSGAGSISYPARYANAMAVGATDQNNNRADFSQYGAGLDIVAPGVNVQSTYPGSTYASLNGTSMATPHVAGAAALVKQKNPSWSNVRIRDHLKNTATSLGSTNLYGSGLVNAEAATR

SEQ ID NO: 58387 - protein, 269 aa, Unidentified
AQSVPWGISRVQAPAAHNRKLTGGGVKVAVLDTGISTHPDLNIRGGASFVPGEPSTQDGEGHGTHVAGTIAALNNNIGVLGVAPSAELYAVKVLSASGNGSVSSIAQGLEWAGLNGMHVANLSLGSPSPSATLEQAVNSATSRGVLVVAASGNSGAGSISYPARYANAMAVGATDQNNNRADFSQYGAGLDIVAPGVNVQSTYPGSTYASLNGTSSATPHVAGAAALVKQKNPSWSNVQIRNHLKNTATSLGSTNLYGSGLVNAEAATR

SEQ ID NO: 58388 - protein, 269 aa, Unidentified
AQSVPWGISRVQAPAAHNRGLTGFGVKVAVLDTGISTHPDLNIRGGASFVPGEPSTQDGNGHGTHVAGTIAALNNNIGVLGVAPSAELYAVKVLGASGSGSVSSIAQGLEWAGNNRMHVANLSLGDPSPSATLEQAVNSATSRGVLVVAASGNSGAGSIDYPARYANAMAVGATDQNNNRASFSQYGAGLDIVAPGVNVQSTYPGSAYASENGTSMATPHVAGAAALVKQKNPSWSNVQIRNHLKNTATSLGSTNLYGSGLVNAEAATR

SEQ ID NO: 58389 - protein, 269 aa, Unidentified
AQSVPWGISRVQAPAAHNRRLWGRGVKVAVLDTGISTHPDLNITGGASFVPGEPSTQDGNGHGTHVAGTIAALNNSIGVLGVAPSAELYAVKVLGASGAGSVSSIAQGLEWAGNNGMHVANLSLGSPSPSATLEQAVNSATSRGVLVVAASGNSGAGSISYPARYANAMAVGATDQNNNRASFSQYGAGLDIVAPGVSVQSTYPQSTYASLNGTSMATPHVAGAAALVKQKNPSWSNVQIRNHLKNTATSLGSTNLYGSGLVNAEAATR

SEQ ID NO: 58390 - protein, 269 aa, Unidentified
AQSVPWGISRVQAPAAHNRKLTAFGVKVAVLDTGISTHPDLNIRGGASFVPGEPSTQDGEGHGTHVAGTIAALNNSIGVLGVAPSAELYAVKVLGASGSGSVSSIAQGLEWAGNNGMHVANLSLGSPSPSATLEQAVNSATSRGVLVVAASGNSGAGSISYPARYANAMAVGATDQNNNRADFSQYGAGLDIVAPGVNVQSTYPGSAYASLNGTSMATPHVAGAAALVKQKNGSWSNVQIRNHLKNTATSLGSTNLYGSGLVNAEAATR

SEQ ID NO: 58391 - protein, 269 aa, Unidentified
AQSVPWGISRVQAPAAHNRGLTGRGVKVAVLDTGISTHPDLNIRGGASFVPGEPSTQDGNGHGTHVAGTIAALNNDIGVLGVAPSAELYAVKVLGASGSGSVSSIAQGLEWAGNNSMHVANLSLGSESPSATLEQAVNSATSRGVLVVAASGNSGAGSISYPARYANAMAVGATDQNNNRADFSQYGAGLDIVAPGVNVQSTYPGSTYASLNGTSMATPHVAGAAALVKQKNPSWSNVRIRDHLKNTATSLGSTNLYGSGLVNAEAATR

SEQ ID NO: 58392 - protein, 269 aa, Unidentified
AQSVPWGISRVQAPAAHNRGLTGGGVKVAVLDTGISTHPDLNIRGGASFVPGEPSTQDGNGHGTHVAGTIAALNNNIGVLGVAPSAELYAVKVLAASGNGSVSSIANGLEWAGNNGMHVANLSLGAPSPSATLEQAVNSATSRGVLVVAASGNSGAGSISYPARYANAMAVGATDQNNNRADFSQYGAGLDIVAPGVNVQSTYPGSTYASQNGTSSATPHVAGAAALVKQKNPSWSNVQIRNHLKNTATSLGSTNLYGSGLVNAEAATR

SEQ ID NO: 58393 - protein, 269 aa, Unidentified
AQSVPWGISRVQAPAAHNRRLTGSGVKVAVLDTGISTHPDLNIRGGASFVPGEPSTQDGEGHGTHVAGTIAALNNDIGVLGVAPSAELYAVKVLGASGSGSVSSIAQGLEWAGNNDMHVANLSLGSPSPSATLEQAVNSATSRGVLVVAASGNSGAGSISYPARYANAMAVGATDQNNNRADFSQYGAGLDIVAPGVNVQSTYPGSTYASLNGTSMATPHVAGAAALVKQKNPSWSNVRIRNRLKNTATSLGSTNLYGSGLVNAEAATR

SEQ ID NO: 58394 - protein, 269 aa, Unidentified
AQSVPWGISRVQAPAAHNRGLAGSGVKVAVLDTGISTHPDLNIRGGASFVPGEPSTQDGNGHGTHVAGTIAALNNSIGVLGVAPSAELYAVKVLGASGGGAISSIANGLEWAGNNGMHVANLSLGSPSPSATLEQAVNSATSRGVLVVAASGNSGAGSISYPARYANAMAVGATDQNNNRASFSQYGAGLDIVAPGVNVQSTYPGSTYASLNGTSMATPHVAGAAVLVKQKNPSWSNVRIRNHLKNTATSLGSTNLYGSGLVNAEAATR

SEQ ID NO: 58395 - protein, 269 aa, Unidentified
AQSVPWGISRVQAPAAHNRGLTGSGVKVAVLDTGISTHPDLNIRGGASFVPGEPSTQDGNGHGTHVAGTIAALNNSIGVLGVAPSAELYAVKVLGASGSGAISSIAQGLEWAGNNGMHVANLSLGSPSPSATLEQAVNSATSRGVLVVAASGNSGADSISYPARYANAMAVGATDQNNNRASFSQYGAGLDIVAPGVNVQSTYPGSTYASLNGTSMATPHVAGAAVLVKHKNPSWSNVRIRNHLKNTATSVGSTNLYGSGLVNAEAATR

SEQ ID NO: 58396 - protein, 269 aa, Unidentified
AQSVPWGISRVQAPAAHNRRLTGRGVKVAVLDTGISTHPDLNIRGGASFVPGEPSTQDGNGHGTHVAGTIAALNNGIGVLGVAPSAELYAVKVLGASGSGSVSSIAQGLEWAGNNSMHVANLSLGSPSPSATLEQAVNSATSRGVLVVAASGNSGADSISYPARYANAMAVGATDQNNNRASFSQYGAGLDIVAPGVNVQSTYPGSTYASLNGTSMATPHVAGAAALVKQKNPSWSNVRIRDHLKNTATSLGSTNLYGSGLVNAEAATR

SEQ ID NO: 58397 - protein, 269 aa, Unidentified
AQSVPWGISRVQAPAAHNRRLTGSGVKVAVLDTGISTHPDLNIRGGASFVPGEPSTQDGNGHGTHVAGTIAALNNSIGVLGVAPSAELYAVKVLGASGGGAISSIAQGLEWAGNNGMHVANLSLGSPSPSATLEQAVNSATSRGVLVLAASGNSGAGSISYPARYANAMAVGATDQNNNRASFSQYGAGLDIVAPGVNVQSTYPGSTYASLNGTSMATPHVAGAAVLVKQKNPSWSNVRIRNHLKNTATSLGSTNLYGSGLVNAEAATR

SEQ ID NO: 58398 - protein, 269 aa, Unidentified
AQSVPWGISRVQAPAAHNRGLAGSGVKVAVLDTGISTHPDLNIRGGASFVPGEPSTQDGNGHGTHVAGTIAALNNSIGVLGVAPSAELYAVKVLGASGQGAISSIAGGLEWAGNNGMHVANLSLGSPSPSATLEQAVNSATSRGVLVVAASGNSGAGSISYPARYANAMAVGATDQNNNRASFSQYGAGLDIVAPGVNVQSTYPGSTYASLNGTSMATPHVAGAAVLVKQKNPSWSNVRIRNHLKNTATSLGSTNLYGSGLVNAEAATR

SEQ ID NO: 58399 - protein, 269 aa, Unidentified
AQSVPWGISRVQAPAAHNRRLTGRGVKVAVLDTGISTHPDLNIRGGASFVPGEPSTQDGNGHGTHVAGTIAALNNDIGVLGVAPSAELYAVKVLGASGSGSVSSIAQGLEWAGNNSMHVANLSLGSPSPSATLEQAVNSATSRGVLVVAASGNSGAGSISYPARYANAMAVGATDQNNNRADFSQYGAGLDIVAPGVNVQSTYPGSTYASLNGTSMATPHVAGAAALVKQKNPSWSNVRIRNRLKNTATSLGSTNLYGSGLVNAEAATR

SEQ ID NO: 58400 - protein, 269 aa, Unidentified
AQSVPWGISRVQAPAAHNRGLTGRGVKVAVLDTGISTHPDLNIRGGASFVPGEPSTQDGNGHGTHVAGTIAALNNDIGVLGVAPSAELYAVKVLGASGSGSVSSIAQGLEWAGNNDMHVANLSLGSPSPSATLEQAVNSATSRGVLVVAASGNSGADSISYPARYANAMAVGATDQNNNRADFSQYGAGLDIVAPGVNVQSTYPGSTYASLNGTSMATPHVAGAAALVKQKNPSWSNVQIRDRLKNTATSLGSTNLYGSGLVNAEAATR

SEQ ID NO: 58401 - protein, 269 aa, Unidentified
AQSVPWGISRVQAPAAHNRGLTGRGVKVAVLDTGISTHPDLNIRGGASFVPGEPSTQDGEGHGTHVAGTIAALNNGIGVLGVAPSAELYAVKVLGASGSGSVSSIAQGLEWAGNNSMHVANLSLGSESPSATLEQAVNSATSRGVLVVAASGNSGAGSISYPARYANAMAVGATDQNNNRADFSQYGAGLDIVAPGVNVQSTYPGSTYASLNGTSMATPHVAGAAALVKQKNPSWSNVQIRDHLKNTATSLGSTNLYGSGLVNAEAATR

SEQ ID NO: 58402 - protein, 269 aa, Unidentified
AQSVPWGISRVQAPAAHNRRLTGSGVKVAVLDTGISTHPDLNIRGGASFVPGEPSTQDGEGHGTHVAGTIAALNNGIGVLGVAPSAELYAVKVLGASGSGSVSSIAQGLEWAGNNDMHVANLSLGSPSPSATLEQAVNSATSRGVLVVAASGNSGAGSISYPARYANAMAVGATDQNNNRADFSQYGAGLDIVAPGVNVQSTYPGSTYASLNGTSMATPHVAGAAALVKQKNPSWSNVRIRDHLKNTATSLGSTNLYGSGLVNAEAATR

SEQ ID NO: 58403 - protein, 269 aa, Unidentified
AQSVPWGISRVQAPAAHRRGLTGRGVKVAVLDTGISTHPDLNIRGGASFVPGEPSTQDGNGHGTHVAGTIAALDNSIGVLGVAPSAELYAVKVLGASGAGSVSSIAQGLEWAGANGMHVANLSLGSPSPSATLEQAVNSATSRGVLVVAASGNSGAGSISYPARYANAMAVGATDQNNNRASFSQYGAGLDIVAPGVNVQSTYPQSTYASLNGTSMATPHVAGAAALVKQKNPSWSNVQIRNRLKNTATSLGSTNLYGSGLVNAEAATR

SEQ ID NO: 58404 - protein, 269 aa, Unidentified
AQSVPWGISRVQAPAAHNRGLTGSGVKVAVLDTGISTHPDLNIRGGASFVPGEPSTQDGNGHGTHVAGTIAALNNRIGVLGVAPSAELYAVKVLGASGGGAISSIAQGLEWAGNNGMHVANLSLGSPSPSATLEQAVNSATSRGVLVVAASGNSGAGSISYPARYANAMAVGATDQNNNRASFSQYGAGLDIVAPGVNVQSTYPGSTYASLNGTSMATPHVAGAAVLVKQKNPSWSNVRIRNRLKNTATSLGSTNLYGSGLVNAEAATR

SEQ ID NO: 58405 - protein, 269 aa, Unidentified
AQSVPWGISRVQAPAAHNRRLTGSGVKVAVLDTGISTHPDLNIRGGASFVPGEPSTQDGEGHGTHVAGTIAALNNDIGVLGVAPSAELYAVKVLGASGSGSVSSIAQGLEWAGNNDMHVANLSLGSESPSATLEQAVNSATSRGVLVVAASGNSGAGSISYPARYANAMAVGATDQNNNRASFSQYGAGLDIVAPGVNVQSTYPGSTYASLNGTSMATPHVAGAAALVKQKNPSWSNVRIRDHLKNTATSLGSTNLYGSGLVNAEAATR

SEQ ID NO: 58406 - protein, 269 aa, Unidentified
AQSVPWGISRVQAPAAHNRGLRGSGVKVAVLDTGISTHPDLNIRGGASFVPGEPSTQDGNGHGTHVAGTIAALNNSIGVLGVAPSAELYAVKVLGASGGGAISSIAQGLEWAGNNGMHVANLSLGSPSPSATLEQAVNSATSRGVLVVAASGNSGAGSISYPARYANAMAVGATDQNNNRASFSQYGAGLDIVAPGVNVQSTYPGSTYASLNGTSMATPHVAGAAVLVKQKNPSWSNVRIRNHLKNTATSLGSTNLYGSGLVNAFAATR

SEQ ID NO: 58407 - protein, 269 aa, Unidentified
AQSVPWGISRVQAPAAHNRGLTGSGVKVAVLDTGISTHPDLNIRGGASFVPGEPSTQDGNGHGTHVAGTIAALNNSIGVLGVAPSAELYAVKVLGASGAGSLSSIAQGLEWAGNNGMHVANLSLGSPSPSATLEQAVNSATSRGVLVVAASGNSGAESISYPARYANAMAVGATDQNNNRASFSQYGAGLDIVAPGVNVQSTYPGSTYASLNGTSMATPHVAGAAVLVKQKNPSWSNVRIRDRLKNTATSLGSTNLYGSGLVNAEAATR

SEQ ID NO: 58408 - protein, 269 aa, Unidentified
AQSVPWGISRVQAPAAHNRRLTGRGVKVAVLDTGISTHPDLNIRGGASFVPGEPSTQDGNGHGTHVAGTIAALNNSIGVLGVAPSAELYAVKVLGASGAGSVSSIANGLEWAGLNGMHVANLSLGAPSPSATLEQAVNSATSRGVLVVAASGNSGAGSISYPARYANAMAVGATDQNNNRASFSQYGAGLDIVAPGVNVQSTYPGSTYASQNGTSMATPHVAGAAALVKQKNPSWSNVQIRNHLKNTATSLGSTNLYGSGLVNAEAATR

SEQ ID NO: 58409 - protein, 269 aa, Unidentified
AQSVPWGISRVQAPAAHNRGLTGRGVKVAVLDTGISTHPDLNIRGGASFVPGEPSTQDGNGHGTHVAGTIAALNNDIGVLGVAPSAELYAVKVLGASGSGSVSSIAQGLEWAGNNDMHVANLSLGSESPSATLEQAVNSATSRGVLVVAASGNSGADSISYPARYANAMAVGATDQNNNRADFSQYGAGLDIVAPGVNVQSTYPGSTYASLNGTSMATPHVAGAAALVKQKNPSWSNVRIRNHLKNTATSLGSTNLYGSGLVNAEAATR

SEQ ID NO: 58410 - protein, 269 aa, Unidentified
AQSVPWGISRVQAPAAHNRGLTGRGVKVAVLDTGISTHPDLNIRGGASFVPGEPSTQDGNGHGTHVAGTIAALNNGIGVLGVAPSAELYAVKVLGASGSGSVSSIAQGLEWAGNNSMHVANLSLGSESPSATLEQAVNSATSRGVLVVAASGNSGADSISYPARYANAMAVGATDQNNNRASFSQYGAGLDIVAPGVNVQSTYPGSTYASLNGTSMATPHVAGAAALVKQKNPSWSNVRIRDHLKNTATSLGSTNLYGSGLVNAEAATR

SEQ ID NO: 58411 - protein, 269 aa, Unidentified
AQSVPWGISRVQAPAAHNRRLWGSGVKVAVLDTGISTHPDLNIRGGASFVPGEPSTQDGNGHGTHVAGTIAALNNSIGVLGVAPSAELYAVKVLGASGGGAISSIAQGLEWAGNNGMHVANLSLGSPSPSATLEQAVNSATSRGVLVVAASGNSGAGSISYPARYANAMAVGATDQNNNRASFSQYGAGLDIVAPGVNVQSTYPGSTYASLNGTSMATPHVAGAAVLVKQKNPSWSNVRIRNHLKNTATSLGSTNLYGSGLVNAEAATR

SEQ ID NO: 58412 - protein, 269 aa, Unidentified
AQSVPWGISRVQAPAAHNRRLTGRGVKVAVLDTGISTHPDLNIRGGASFVPGEPSTQDGNGHGTHVAGTIAALNNSIGVLGVAPSAELYAVKVLSASGQGSVSSIANGLEWAGLNGMHVANLSLGSPSPSATLEQAVNSATSRGVLVVAASGNSGAGSISYPARYANAMAVGATDQNNNRASFSQYGAGLDIVAPGVNVQSTYPGSTYASQNGTSMATPHVAGAAALVKQKNPSWSNVQIRNHLKNTATSLGSTNLYGSGLVNAEAATR

SEQ ID NO: 58413 - protein, 269 aa, Unidentified
AQSVPWGISRVQAPAAHNRGLTGSGVKVAVLDTGISTHPDLRIRGGASFVPGEPSTQDGNGHGTHVAGTIAALNNSIGVLGVAPSAELYAVKVLGASGGGAISSIAQGLEWAGNNGMHVANLSLGSPSPSATLEQAVNSATSRGVLVVAASGNSGAGSISYPARYANAMAVGATDQNNNRASFSQYGAGLDIVAPGVNVQSTYPGSTYASLNGTSMATPHVAGAAVLVKQKNPSWSNVRIRNHLKNTATSLGSTNLYGSGLVRAEAATR

SEQ ID NO: 58414 - protein, 269 aa, Unidentified
AQSVPWGISRVQAPAAHNRGLTGRGVKVAVLDTGISTHPDLNIRGGASFVPGEPSTQDGNGHGTHVAGTIAALNNDIGVLGVAPSAELYAVKVLGASGSGSVSSIAQGLEWAGNNDMHVANLSLGSESPSATLEQAVNSATSRGVLVVAASGNSGAGSISYPARYANAMAVGATDQNNNRADFSQYGAGLDIVAPGVNVQSTYPGSTYASLNGTSMATPHVAGAAALVKQKNPSWSNVRIRNRLKNTATSLGSTNLYGSGLVNAEAATR

SEQ ID NO: 58415 - protein, 269 aa, Unidentified
AQSVPWGISRVQAPAAHNRKLLGFGVKVAVLDTGISTHPDLNIRGGASFVPGEPSTQDGNGHGTHVAGTIAALNNSIGVLGVAPSAELYAVKVLGASGSGSVSSIAQGLEWAGNNRMHVANLSLGDPSPSATLEQAVNSATSRGVLVVAASGNSGAGSIDYPARYANAMAVGATDQNNNRASFSQYGAGLDIVAPGVNVQSTYPGSTYASENGTSMATPHVAGAAALVKQKNPSWSNVQIRNHLKNTATSLGSTNLYGSGLVNAEAATR

SEQ ID NO: 58416 - protein, 269 aa, Unidentified
AQSVPWGISRVQAPAAHNRRLTGRGVKVAVLDTGISTHPDLRITGGASFVPGEPSTQDGNGHGTHVAGTIAALNNSIGVLGVAPSAELYAVKVLGASGSGSVSSIAQGLEWAGANGMHVANLSLGSPSPSATLEQAVNSATSRGVLVVAASGNSGAGSISYPARYANAMAVGATDQNNNRASFSQYGAGLDIVAPGVNVQSTYPGSAYFSLNGTSMATPHVAGAAALVKQKNPSWSNVQIRNHLKNTATSLGSTNLYGSGLVNAEAATR

SEQ ID NO: 58417 - protein, 269 aa, Unidentified
AQSVPWGISRVQAPAAHNRRLTGRGVKVAVLDTGISTHPDLRITGGASFVPGEPSTQDGNGHGTHVAGTIAALNNSIGVLGVAPSAELYAVKVLGASGAGSVSSIAQGLEWAGNNGMHVANLSLGSPSPSATLEQAVNSATSRGVLVVAASGNSGAGSISYPARYANAMAVGATDQNNNRASFSQYGAGLDIVAPGVNVQSTYIGSAYASLNGTSMATPHVAGAAALVKQKNPSWSNVQIRNHLKNTATSLGSTNLYGSGLVNAEAATR

SEQ ID NO: 58418 - protein, 269 aa, Unidentified
AQSVPWGISRVQAPAAHNRRLTGRGVKVAVLDTGISTHPDLNIRGGASFVPGEPSTQDGNGHGTHVAGTIAALNNNIGVLGVAPSAELYAVKVLAASGQGSVSSIAGGLEWAGLNGMHVANLSLGSPSPSATLEQAVNSATSRGVLVVAASGNSGAGSISYPARYANAMAVGATDQNNNRASFSQYGAGLDIVAPGVNVQSTYPGSTYASLNGTSMATPHVAGAAALVKQKNPSWSNVQIRNHLKNTATSLGSTNLYGSGLVNAEAATR

SEQ ID NO: 58419 - protein, 269 aa, Unidentified
AQSVPWGISRVQAPAAHNRGLTGSGVKVAVLDTGISTHPDLNIRGGASFVPGEPSTQDGNGHGTHVAGTIAALDDSIGVLGVAPSAELYAVKVLGASGSGAISSIAQGLEWAGNNGMHVANLSLGSPSPSTTLEQAVNSATSRGVLVVAASGNSGAGSISYPARYANAMAVGATDQNNDRASFSQYGAGLDIVAPGVNVQSTYPGSTYASLNGTSMATPHVAGAAALVKQKNPSWSNVQIRNHLTNTATSLGSTNLYGSGLVNAEAATR

SEQ ID NO: 58420 - protein, 269 aa, Unidentified
AQSVPWGISRVQAPAAHNRGLTGSGVKVAVLDTGISTHPDLNIRGGASFVPGEPSTQDGNGHGTHVAGTIAALNNGIGVLGVAPSAELYAVKVLGASGSGSVSSIAQGLEWAGNNDMHVANLSLGSPSPSATLEQAVNSATSRGVLVVAASGNSGADSISYPARYANAMAVGATDQNNNRADFSQYGAGLDIVAPGVNVQSTYPGSTYASLNGTSMATPHVAGAAALVKQKNPSWSNVRIRDRLKNTATSLGSTNLYGSGLVNAEAATR

SEQ ID NO: 58421 - protein, 269 aa, Unidentified
AQSVPWGISRVQAPAAHNRGLTGSGVKVAVLDTGISTHPDLNIRGGASFVPGEPSTQDGEGHGTHVAGTIAALNNDIGVLGVAPSAELYAVKVLGASGSGSVSSIAQGLEWAGNNSMHVANLSLGSPSPSATLEQAVNSATSRGVLVVAASGNSGADSISYPARYANAMAVGATDQNNNRADFSQYGAGLDIVAPGVNVQSTYPGSTYASLNGTSMATPHVAGAAALVKQKNPSWSNVRIRDHLKNTATSLGSTNLYGSGLVNAEAATR

SEQ ID NO: 58422 - protein, 269 aa, Unidentified
AQSVPWGISRVQAPAAHNRGLTGRGVKVAVLDTGISTHPDLNIRGGASFVPGEPSTQDGEGHGTHVAGTIAALNNSIGVLGVAPSAELYAVKVLGASGSGSVSSIAQGLEWAGLNRMHVANLSLGIPSPSATLEQAVNSATSRGVLVVAASGNSGEGSISYPARYANAMAVGATDQNNNRADFSQYGAGLDIVAPGVNVQSTYPGSTYASLNGTSMATPHVAGAAALVKQKNPSWSNVQIRNHLKNTATSLGSTNLYGSGLVNAEAATR

SEQ ID NO: 58423 - protein, 269 aa, Unidentified
AQSVPWGISRVQAPAAHRRGLWGRGVKVAVLDTGISTHPDLNIRGGASFVPGEPSTQDGNGHGTHVAGTIAALDNSIGVLGVAPSAELYAVKVLGASGSGSVSSIAQGLEWAGNNGMHVANLSLGSPSPSATLEQAVNSATSRGVLVVAASGNSGAGSISYPARYANAMAVGATDQNNNRASFSQYGAGLDIVAPGVNVQSTYPQSAYASLNGTSMATPHVAGAAALVKQKNPSWSNVQIRNRLKNTATSLGSTNLYGSGLVNAEAATR

SEQ ID NO: 58424 - protein, 269 aa, Unidentified
AQSVPWGISRVQAPAAHNRGLTGSGVKVAVLDTGISTHPDLNIRGGASFVPGEPSTQDGNGHGTHVAGTIAALNNSIGVLGVAPSAELYAVKVLGADGEGAISSIAQGLEWAGNNGMHVANLSLGSPSPSATLEQAVNSATSRGVLVVAASGNSGASSIGYPARYANAMAVGATDQNNNRASFSRYGAGLDIVAPGVNVQSTYPGSTYASLNGTSMATPHVAGAAALVKQKNPSWSNVQIRNHLKNTATSLGSTNLYGSGLVNAEAATR

SEQ ID NO: 58425 - protein, 269 aa, Unidentified
AQSVPWGISRVRAPAAHNRGLTGSGVKVAVLDTGISTHPDLNIRGGASFVPGEPSTQDGNGHGTHVAGTIAALDNSIGVLGVAPSAELYAVKVLGASGSGATSSIAQGLEWAGNNGMHVANLSLGSPTPSATLEQAVNSATSRGVLVVAASGNSGAGSISYPARYANAMAVGATDQNNNRASFSQYGAGLDIVAPGVNVQSTYPGSTYASLNGTSSATPHVAGAAALVKQKNPSWSNVRIRSHLKNTATSLGSTNMYGSGLVNAEAATR

SEQ ID NO: 58426 - protein, 269 aa, Unidentified
AQSVPWGISRVQAPAAHNRGLTGSGVKVAVLDTGISTHPDLNIRGGASFVPGEPSTQDGNGHGTHVAGTIAALNNSIGVLGVAPSAELYAVKVLGASGGGAISSIAQGLEWAGNNGMHVANLSLGSPSPSATLEQAVNSATSRGVLVVAASGNSGADSISYPARYANAMAVGATDQNNNRASFSQYGAGLDIVAPGVNVQSTYPGSTYASLNGTSMATPHVAGAAVLVKQKNPSWSNVRIRDHLKNTATSLGSTNLYGSGLVNAEAATR

SEQ ID NO: 58427 - protein, 269 aa, Unidentified
AQSVPWGISRVQAPAAHNRGLTGRGVKVAVLDTGISTHPDLNIRGGASFVPGEPSTQDGNGHGTHVAGTIAALNNSIGVLGVAPSAELYAVKVLGASGGGAISSIAQGLEWAGNNGMHVANLSLGSQSPSATLEQAVNSATSRGVLVVAASGNSGEGSISYPARYANAMAVGATDQNNNRADFSQYGAGLDIVAPGVNVQSTYPGSTYASLNGTSMATPHVAGAAALVKQKNPSWSNVQIRNHLKNTATSLGSTNLYGSGLVNAEAATR

SEQ ID NO: 58428 - protein, 269 aa, Unidentified
AQSVPWGISRVQAPAAHRRGLTGRGVKVAVLDTGISTHPDLNIRGGASFVPGEPSTQDGNGHGTHVAGTIAALDNSIGVLGVAPSAELYAVKVLGASGSGSVSSIAQGLEWAGNNGMHVANLSLGSPSPSATLEQAVNSATSRGVLVVAASGNSGAGSISYPARYANAMAVGATDQNNNRASFSQYGAGLDLVAPGVNVQSTYPGSAYFSLNGTSMATPHVAGAAALVKQKNPSWSNVQIRNRLKNTATSLGSTNLYGSGLVNAEAATR

SEQ ID NO: 58429 - protein, 269 aa, Unidentified
AQSVPWGISRVQAPAAHNRGLRGSGVKVAVLDTGISTHPDLNIRGGASFVPGEPSTQDGNGHGTHVAGTIAALDNSIGVLGVAPSAELYAVKVLGASGGGAISSIAQGLEWAGNNGMHVANLSLGSPSPSATLEQAVNSATSRGVLVVAASGNSGAGSISYPARYANAMAVGATDQNNNRASFSQYGAGLDIVAPGVNVQSTYPGSTYASLNGTSMATPHVAGAAVLVKQKNPSWSNVRIRNHLKNTATSLGSTNLYGSGLVNAEAATR

SEQ ID NO: 58430 - protein, 269 aa, Unidentified
AQSVPWGISRVQAPAAHNRGLTGSGVKVAVLDTGISTHPDLNIRGGASFVPGEPSTQDGNGHGTHVAGTIAALDNNIGVLGVAPRAELYAVKVLGASGSGSVSSIAQGLEWAGNNRMHVANLSLGLQAPSATLEQAVNSATSRGVLVVAASGNSGAGSISYPARYANAMAVGATDQNNNRASFSQYGAGLDIVAPGVNVQSTYPGSTYASLNGTSMATPHVAGAAALVKQKNPSWSNVQIRNHLKNTATSLGSTNLYGSGLVNAEAATR

SEQ ID NO: 58431 - protein, 269 aa, Unidentified
AQSVPWGISRVQAPAAHNRRLTGSGVKVAVLDTGISTHPDLNIRGGASFVPGEPSTQDGNGHGTHVAGTIAALNNSIGVLGVAPSAELYAVKVLGASGGGSISSIAQGLEWAGNNGMHVANLSLGSPSPSATLEQAVNSATSRGVLVVAASGNSGAGSISYPARYANAMAVGATDQNNNRASFSQYGAGLDIVAPGVNVQSTYPGSTYFSLNATSMATPHVAGAAVLVKQKNPSWSNVRIRNHLKNTATSLGSTNLYGSGLVNAEAATR

SEQ ID NO: 58432 - protein, 269 aa, Unidentified
AQSVPWGISRVQAPAAHNRGLTGRGVKVAVLDTGISTHPDLNIRGGASFVPGEPSTQDGNGHGTHVAGTIAALNNDIGVLGVAPSAELYAVKVLGASGSGSVSSIAQGLEWAGNNDMHVANLSLGSESPSATLEQAVNSATSRGVLVVAASGNSGADSISYPARYANAMAVGATDQNNNRADFSQYGAGLDIVAPGVNVQSTYPGSTYASLNGTSMATPHVAGAAALVKQKNPSWSNVQIRNRLKNTATSLGSTNLYGSGLVNAEAATR

SEQ ID NO: 58433 - protein, 269 aa, Unidentified
AQSVPWGISRVQAPAAHNRGLAGSGVKVAVLDTGISTHPDLNIRGGASFVPGEPSTQDGNGHGTHVAGTIAALNNSIGVLGVAPSAELYAVKVLGASGGGAISSIAQGLEWAGNNGMHVANVSLGSPSPSATLEQAVNSATSRGVLVVAASGNSGAGSISYPARYANAMAVGATDQNNNRASFSQYGAGLDIVAPGVNVQSTYPGSTYASLNGTSMATPHVAGAAVLVKQKNPSWSNVRIRNHLKNTATSLGSTNLYGSGLVNAEAATR

SEQ ID NO: 58434 - protein, 269 aa, Unidentified
AQSVPWGISRVQAPAAHNRGLTGGGVKVAVLDTGISTHPDLNIRGGASFVPGEPSTQDGNGHGTHVAGTIAALNNNIGVLGVAPSAELYAVKVLSASGNGSVSSIANGLEWAGNNGMHVANLSLGAPSPSATLEQAVNSATSRGVLVVAASGNSGAGSISYPARYANAMAVGATDQNNNRADFSQYGAGLDIVAPGVNVQSTYPGSTYASLNGTSMATPHVAGAAALVKQKNPSWSNVQIRNHLKNTATSLGSTNLYGSGLVNAEAATR

SEQ ID NO: 58435 - protein, 269 aa, Unidentified
AQSVPWGISRVQAPAAHNRGLRGSGVKVAVLDTGISTHPDLNIRGGASFVPGEPSTQDGNGHGTHVAGTIAALNNSIGVLGVAPSAELYAVKVLGASGGGAISSIAQGLEWAGNNGMHVANLSLGSPSPSATLEQAVNSATSRGVLVVAASGNSGAGSISYPARYANAMAVGATDQNNNRASFSQYGAGLDIVAPGVNVQSTYPGSTYASLNGTSMATPHVAGAAVLVKQKNPSWSNVRIRDHLKNTATSLGSTNLYGSGLVNAEAATR

SEQ ID NO: 58436 - protein, 269 aa, Unidentified
AQSVPWGISRVQAPAAHNRRLTGRGVKVAVLDTGISTHPDLNIRGGASFVPGEPSTQDGNGHGTHVAGTIAALNNGIGVLGVAPSAELYAVKVLGASGSGSVSSIAQGLEWAGNNDMHVANLSLGSPSPSATLEQAVNSATSRGVLVVAASGNSGADSISYPARYANAMAVGATDQNNNRADFSQYGAGLDIVAPGVNVQSTYPGSTYASLNGTSMATPHVAGAAALVKQKNPSWSNVRIRNHLKNTATSLGSTNLYGSGLVNAEAATR

SEQ ID NO: 58437 - protein, 269 aa, Unidentified
AQSVPWGISRVQAPAAHRRGLTGRGVKVAVLDTGISTHPDLNIRGGASFVPGEPSTQDGNGHGTHVAGTIAALDNSIGVLGVAPSAELYAVKVLGASGAGSVSSIAQGLEWAGANGMHVANLSLGSPSPSATLEQAVNSATSRGVLVVAASGNSGAGSISYPARYANAMAVGATDQNNNRASFSQYGAGLDLVAPGVNVQSTYPGSTYASLNGTSMATPHVAGAAALVKQKNPSWSNVQIRNRLKNTATSLGSTNLYGSGLVNAEAATR

SEQ ID NO: 58438 - protein, 269 aa, Unidentified
AQSVPWGISRVQAPAAHRRRLTGRGVKVAVLDTGISTHPDLDITGGASFVPGEPSTQDGNGHGTHVAGTIAALNNSIGVLGVAPSAELYAVKVLGASGSGSVSSIAQGLEWAGNNGMHVANLSLGSPSPSATLEQAVNSATSRGVLVVAASGNSGAGSISYPARYANAMAVGATDQNNNRASFSQYGAGLDIVAPGVNVQSTYPGSTYASLNGTSMATPHVAGAAAIVKQKNPSWRNVQIRNHLKNTATSLGSTNLYGSGLVNAEAATR

SEQ ID NO: 58439 - protein, 269 aa, Unidentified
AQSVPWGISRVQAPAAHNRGLTGSGVKVAVLDTGISTHPDLNIRGGASFVPGEPSTQDGNGHGTHVAGTIAALNNSIGVLGVAPSAELYAVKVLGASGGGAISSIAQGLEWAGNNGMHVANLSLGSPSPSATLEQAVNSATSRGVLVVAASGNSGADSISYPARYANAMAVGATDQNNNRASFSQYGAGLDIVAPGVNVQSTYPGSTYASLNGTSMATPHVAGAAVLVKQKNPSWSNVRIRRHLKNTATSLGSTNLYGSGLVNAEAATR

SEQ ID NO: 58440 - protein, 269 aa, Unidentified
AQSVPWGISRVQAPAAHRRGLTGRGVKVAVLDTGISTHPDLNIRGGASFVPGEPSTQDGNGHGTHVAGTIAALDNSIGVLGVAPSAELYAVKVLGASGSGSVSSIAQGLEWAGANGMHVANLSLGSPSPSATLEQAVNSATSRGVLVVAASGNSGAGSISYPARYANAMAVGATDQNNNRASFSQYGAGLDLVAPGVNVQSTYPGSAYASLNGTSMATPHVAGAAALVKQKNPSWSNVQIRNRLKNTATSLGSTNLYGSGLVNAEAATR

SEQ ID NO: 58441 - protein, 269 aa, Unidentified
AQSVPWGISRVQAPAAHNRGLTGRGVKVAVLDTGISTHPDLNIRGGASFVPGEPSTQDGEGHGTHVAGTIAALNNSIGVLGVAPSAELYAVKVLGASGSGSVSSIAQGLEWAGLNRMHVANLSLGIPSPSATLEQAVNSATSRGVLVVAASGNSGAGSIDYPARYANAMAVGATDQNNNRADFSQYGAGLDIVAPGVNVQSTYPGSTYASLNGTSMATPHVAGAAALVKQKNPSWSNVQIRNHLKNTATSLGSTNLYGSGLVNAEAATR

SEQ ID NO: 58442 - protein, 269 aa, Unidentified
AQSVPWGISRVQAPAAHNRGLWGRGVKVAVLDTGISTHPDLNIPGGASFVPGEPSTQDGNGHGTHVAGTIAALNNSIGVLGVAPSAELYAVKVLGASGAGSVSSIAQGLEWAGNNGMHVANLSLGSPSPSATLEQAVNSATSRGVLVVAASGNSGAGSISYPARYANAMAVGATDQNNNRASFSQYGAGLDIVAPGVNVQSTYIQSAYASLNGTSMATPHVAGAAALVKQKNPSWSNVQIRNHLKNTATSLGSTNLYGSGLVNAEAATR

SEQ ID NO: 58443 - protein, 269 aa, Unidentified
AQSVPWGISRVRAPAAHNRGLTGSGVKVAVLDTGISTHPDLNIRGGASFVPGEPSTQDGNGHGTHAAGTIAALDNSIGVLGVAPSAELYAVKVLGASGSGAISSIAQGLEWAGNNGMHVANLSLGSPSPSATLEQAVNSATSRGVLVVAASGNSGADSISYPARYANAMAVGATDQNNNRASFSQYGAGLDIVAPGVNVQSTYPGSTYASLNGTSMATPHVAGAAALVKHKNPSWSNVQIRNHLKNTATSLGSTNLYGSGLVNAEAATR

SEQ ID NO: 58444 - protein, 269 aa, Unidentified
AQSVPWGISRVQAPAAHNRGLTGRGVKVAVLDTGISTHPDLRIRGGASFVPGEPSTQDGNGHGTHVAGTIAALDNNIGVLGVAPRAELYAVKVLGASGSGSVSSIAQGLEWAGNNRMHVANLSLGSPSPSATLEQAVNSATSRGVLVVAASGNSGAGSISYPARYANAMAVGATDQNNNRASFSQYGAGLDIVAPGVNVQSTWPGSTYASLNGTSQATPHVAGAAALVKQKNPSWSNVQIRNHLKNTATSLGSTNLYGSGLVNAEAATR

SEQ ID NO: 58445 - protein, 269 aa, Unidentified
AQSVPWGISRVQAPAAHRRGLWGRGVKVAVLDTGISTHPDLNIRGGASFVPGEPSTQDGNGHGTHVAGTIAALDNSIGVLGVAPSAELYAVKVLGASGAGSVSSIAQGLEWAGNNGMHVANLSLGSPSPSATLEQAVNSATSRGVLVVAASGNSGAGSISYPARYANAMAVGATDQNNNRASFSQYGAGLDIVAPGVNVQSTYPGSTYFSLNGTSMATPHVAGAAALVKQKNPSWSNVQIRNRLKNTATSLGSTNLYGSGLVNAEAATR

SEQ ID NO: 58446 - protein, 269 aa, Unidentified
AQSVPWGISRVQAPAAHNRGLTGSGVKVAVLDTGISTHPDLDIRGGASFVPGEPSTQDGNGHGTHVAGTIAALNNSIGVLGVAPSAELYAVKVLGASGGGAISSIAQGLEWAGNNGMHVANLSLGSPSPSATLEQAVNSATSRGVLVVAASGNSGAGSISYPARYANAMAVGATDQNNNRASFSQYGAGLDIVAPGVNVQSTYPGSTYASLNGTSMATPHVAGAAVLVKQKNPSWSNVRIRNRLKNTATSLGSTNLYGSGLVNAEAATR

SEQ ID NO: 58447 - protein, 269 aa, Unidentified
AQSVPWGISRVQAPAAHNRGLTGSGVKVAVLDTGISTHPDLNIRGGASFVPGEPSTQDGNGHGTHVAGTIAALNNSIGVLGVAPSAELYAVKVLGASGGGAISSIAQGLEWAGANGMHVANLSLGSPSPSATLEQAVNSATSRGVLVVAASGNSGAGSISYPARYANAMAVGATDQNNNRASFSQYGAGLDIVAPGVNVQSTVPGSAYASLNGTSMATPHVAGAAVLVKQKNPSWSNVQIRNHLKNTATSLGSTNLYGSGLVNAEAATR

SEQ ID NO: 58448 - protein, 269 aa, Unidentified
AQSVPWGISRVQAPAAHNRGLTGSGVKVAVLDTGISTHPDLNIRGGASFVPGEPSTQDGNGHGTHVAGTIAALNNHIGVLGVAPSAELYAVKVLGADGRGAISSIAQGLEWAGNNGMHVANLSLGSPSPSATLEQAVNSATSRGVLVVAASGNSGASSISYPARYANAMAVGATDQNNNRASFSQYGLGLDIVAPGVNVQSTYPGSTYASLNGTSMATPHVAGAAALVKQKNPSWSNVQIRNHLKNTATSLGSTNLYGSGLVNAEAATR

SEQ ID NO: 58449 - protein, 269 aa, Unidentified
AQSVPWGISRVRAPAAHNRGLTGSGVKVAVLDTGISTHPDLNIRGGASFVPGEPSTQDGNGHGTHVAGTIAALDNSIGVLGVAPSAELYAVKVLGASGSGATSSIAQGLEWAGNNGMHVANLSLGSPTPSATLEQAVNSATSRGVLVVAASGNSGAGSISYPARYANAMAVGATDQNNNRASFSQYGAGLDIVAPGVNVQSTYPGSTYASLNGTSSATPHAAGAAALVKQKNPSWSNVRIRNHLKNTATSLGSTNSYGSGLVNAEAATR

SEQ ID NO: 58450 - protein, 269 aa, Unidentified
AQSVPWGISRVQAPAAHNRGLTGRGVKVAVLDTGISTHPDLNIRGGASFVPGEPSTQDGNGHGTHVAGTIAALDNNIGVLGVAPDAELYAVKVLGASGSGSVSSIAQGLEWAGNNRMHVANLSLGSPSPSATLEQAVNSATSRGVLVVAASGNSGAGSISYPARYANAMAVGATDQNNNRASFSQYGAGLDIVAPGVNVQSTWPGSTYASLNGTSMATPHVAGAAALVKQKNPSWSNVQIRNRLKNTATSLGSTNLYGSGLVNAEAATR

SEQ ID NO: 58451 - protein, 269 aa, Bacillus lentus
AQSVPWGIRRVQAPTAHNRGLTGSGVKVAVLDTGISTHPDLNIRGGASFVPGEPSTQDGNGHGTHAAGTIAALNNSIGVLGVAPSAELYAVKVLGAGGSGSVSSIAQGLEWAGNNGMHVANLSLGSPSPSATLEQAVNSATSRGVLVVAASGNSGAGSISYPARYANAMAVGATDQNNNRASFSQYGPGLDIVAPGVNVQSTYPGSTYASLNGTSMATPHVAGAAALVKQKNPSWSNVRIRNHLKDTATSLGSTNLYGSGLVNAEAATR

SEQ ID NO: 58452 - protein, 269 aa, Unidentified
AQSVPWGISRVQAPAAHNRGLTGSGVKVAVLDTGISTHPDLDITGGASFVPGEPSTQDGNGHGTHVAGTIAALNNSIGVLGVAPSAELYAVKVLGASGGGAISSIAQGLEWAGNNGMHVANLSLGSPSPSATLEQAVNSATSRGVLVVAASGNSGAGSISYPARYANAMAVGATDQNNNRASFSQYGAGLDIVAPGVNVQSTYPGSTYASLNGTSMATPHVAGAAVLVKQKNPSWSNVRIRNHLKNTATSLGSTNLYGSGLVNAEAATR

SEQ ID NO: 58453 - protein, 269 aa, Unidentified
AQSVPWGISRVQAPAAHNRKLTGSGVKVAVLDTGISTHPDLNIRGGASFVPGEPSTQDGEGHGTHVAGTIAALNNNIGVLGVAPSAELYAVKVLAASGQGSVSSIAGGLEWAGLNGMHVANLSLGSPSPSATLEQAVNSATSRGVLVVAASGNSGAGSISYPARYANAMAVGATDQNNNRASFSQYGAGLDIVAPGVNVQSTYPGSTYASLNGTSMATPHVAGAAALVKQKNPSWSNVQIRNHLKNTATSLGSTNLYGSGLVNAEAATR

SEQ ID NO: 58454 - protein, 269 aa, Unidentified
AQSVPWGISRVQAPAAHNRGLTGSGVKVAVLDSGISTHPDLNIRGGASFVPGEPSTQDGNGHGTHVAGTIAALNNSIGVLGVAPSAELYAVKVLGASGSGSVSSIAQGLEWAGLNRMHVANLSLGIPSPSATLEQAVNSATSRGVLVVAASGNSGEGSIDYPARYANAMAVGATDQNNNRADFSQYGAGLDIVAPGVNVQSTYPGSTYASLNGTSMATPHVAGAAALVKQKNPSWSNVQIRNHLKNTATSLGSTNLYGSGLVNAEAATR

SEQ ID NO: 58455 - protein, 269 aa, Unidentified
AQSVPWGISRVQAPAAHNRGLTGSGVKVAVLDTGISTHPDLNIRGGASFVPGEPSTQDGNGHGTHAAGTIAALDNSIGVLGVAPSAELYAVKVLGASGSGAISSIAQGLEWAGNNGMHVANLSLGSPSPSATLEQAVNSATSRGVLVVAASGNSGADSISYPARYANAMAVGATDQNNNRASFSQYGAGLDIVAPGVNVQSTYPGSTYASLNGTSMATPHVAGAAALVKHKNPSWSNVRIRNHLKNTATSLGSTNLYGSGLVNAEAATR

SEQ ID NO: 58456 - protein, 269 aa, Unidentified
AQSVPWGISRVQAPAAHNRGLTGSGVKVAVLDTGISTHPDLNIRGGASFVPGEPSTQDGNGHGTHVAGTIAALNNWIGVLGVAPSAELYAVKVLGADGEGAISSIAQGLEWAGNNGMHVANLSLGSPSPSATLEQAVNSATSRGVLVVAASGNSGASSISYPARYANAMAVGATDQNNNRASFSQYGAGLDIVAPGVNVQSTYPGSTYASLNGTSMATPHVAGAAALVKQKNPSWSNRQIRNHLKNTATSLGSTNLYGSGLVNAEAATR

SEQ ID NO: 58457 - protein, 269 aa, Bacillus lentus
AQSVPWGISRVQAPAAHNRGLTGSGVKVAVLDTGISTHPDLNIRGGASFVPGEPSTQDGNGHGTHVAGTIAALNNSIGVLGVAPSAELYAVKVLGADGRGAISSIAQGLEWAGNNGMHVANLSLGSPSPSATLEQAVNSATSRGVLVVAASGNSGASSISYPARYANAMAVGATDQNNNRASFSQYGPGLDIVAPGVNVQSTYPGSTYASDNGTSMATPHVAGAAALVKQKNPSWSNVQIRNHLKNTATSLGSTNLYGSGLVNAEAATR

SEQ ID NO: 58458 - protein, 269 aa, Unidentified
AQSVPWGISRVQAPAAHNRGLTGRGVKVAVLDTGISTHPDLNIRGGASFVPGEPSTQDGEGHGTHVAGTIAALNNDIGVLGVAPSAELYAVKVLGASGSGSVSSIAQGLEWAGNNDMHVANLSLGSESPSATLEQAVNSATSRGVLVVAASGNSGAGSISYPARYANAMAVGATDQNNNRASFSQYGAGLDIVAPGVNVQSTYPGSTYASLNGTSMATPHVAGAAALVKQKNPSWSNVQIRDRLKNTATSLGSTNLYGSGLVNAEAATR

SEQ ID NO: 58459 - protein, 269 aa, Unidentified
AQSVPWGISRVQAPAAHNRGLTGRGVKVAVLDTGISTHPDLNIRGGASFVPGEPSTQDGNGHGTHVAGTIAALNNGIGVLGVAPSAELYAVKVLGASGSGSVSSIAQGLEWAGNNSMHVANLSLGSESPSATLEQAVNSATSRGVLVVAASGNSGADSISYPARYANAMAVGATDQNNNRADFSQYGAGLDIVAPGVNVQSTYPGSTYASLNGTSMATPHVAGAAALVKQKNPSWSNVRIRNHLKNTATSLGSTNLYGSGLVNAEAATR

SEQ ID NO: 58460 - protein, 269 aa, Unidentified
AQSVPWGISRVQAPAAHNRRLTGSGVKVAVLDTGISTHPDLNIRGGASFVPGEPSTQDGNGHGTHVAGTIAALNNDIGVLGVAPSAELYAVKVLGASGSGSVSSIAQGLEWAGNNDMHVANLSLGSPSPSATLEQAVNSATSRGVLVVAASGNSGADSISYPARYANAMAVGATDQNNNRADFSQYGAGLDIVAPGVNVQSTYPGSTYASLNGTSMATPHVAGAAALVKQKNPSWSNVRIRDHLKNTATSLGSTNLYGSGLVNAEAATR

SEQ ID NO: 58461 - protein, 269 aa, Unidentified
AQSVPWGISRVQAPAAHNRRLTGSGVKVAVLDTGISTHPDLNIRGGASFVPGEPSTQDGNGHGTHVAGTIAALNNSIGVLGVAPSAELYAVKVLGASGAGAISSIAQGLEWAGNNGMHVANLSLGSPSPSATLEQAVNSATSRGVLVVAASGNSGAGSISYPARYANAMAVGATDQNNNRASFSQYGAGLDIVAPGVNVQSTYPGSTYFSLNGTSMATPHVAGAAVLVKQKNPSWSNVRIRNHLKNTATSLGSTNLYGSGLVNAEAATR

SEQ ID NO: 58462 - protein, 269 aa, Unidentified
AQSVPWGISRVQAPAAHNRRLTGSGVKVAVLDTGISTHPDLNIRGGASFVPGEPSTQDGEGHGTHVAGTIAALNNDIGVLGVAPSAELYAVKVLGASGSGSVSSIAQGLEWAGNNDMHVANLSLGSESPSATLEQAVNSATSRGVLVVAASGNSGADSISYPARYANAMAVGATDQNNNRASFSQYGAGLDIVAPGVNVQSTYPGSTYASLNGTSMATPHVAGAAALVKQKNPSWSNVQIRNRLKNTATSLGSTNLYGSGLVNAEAATR

SEQ ID NO: 58463 - protein, 269 aa, Unidentified
AQSVPWGISRVQAPAAHNRGLTGSGVKVAVLDTGISTHPDLNIRGGASFVPGEPSTQDGNGHGTHVAGTIAALDNNIGVLGVAPRAELYAVKVLGASGSGSVSSIAQGLEWAGNNRMHVANLSLGLQSPSATLEQAVNSATSRGVLVVAASGNSGAGSISYPARYANAMAVGATDQNNNRASFSQYGAGLDIVAPGVNVLSTYPGSTYASLNGTSMATPHVAGAAALVKQKNPSWSNVQIRNHLKNTATSLGSTNLYGSGLVNAEAATR

SEQ ID NO: 58464 - protein, 269 aa, Unidentified
AQSVPWGISRVQAPAAHNRGLTGSGVKVAVLDTGISTHPDLNIRGGASFVPGEPSTQDGEGHGTHVAGTIAALNNGIGVLGVAPSAELYAVKVLGASGSGSVSSIAQGLEWAGNNSMHVANLSLGSPSPSATLEQAVNSATSRGVLVVAASGNSGAGSISYPARYANAMAVGATDQNNNRADFSQYGAGLDIVAPGVNVQSTYPGSTYASLNGTSMATPHVAGAAALVKQKNPSWSNVRIRDRLKNTATSLGSTNLYGSGLVNAEAATR

SEQ ID NO: 58465 - protein, 269 aa, Bacillus lentus
AQAVPWGIRRVQAPAAHNLGLTGSGVKVAVLDTGISTHPDLRIRGGASFVPGEPSTQDGDGHGTHVAGTIAALDNSIGVLGVAPSAELYAVKVLGASGSGSVSSIAQGLEWAGNNGMHVANLSLGSPSPSATLEQAVNSATSRGVLVVAASGNSGAGSISYPARYANAMAVGATDQNNNRASFSQYGPGLDIVAPGVNVQSTYPGSTYASLNGTSMATPHVAGAAALVKQKNPSWSNVQIRNHLKNTATSLGSTNLYGSGLVNAEAATR

SEQ ID NO: 58466 - protein, 269 aa, Unidentified
AQSVPWGISRVQAPAAHNRRLTGRGVKVAVLDTGISTHPDLNIRGGASFVPGEPSTQDGNGHGTHVAGTIAALNNDIGVLGVAPSAELYAVKVLGASGSGSVSSIAQGLEWAGNNDMHVANLSLGSESPSATLEQAVNSATSRGVLVVAASGNSGAGSISYPARYANAMAVGATDQNNNRASFSQYGAGLDIVAPGVNVQSTYPGSTYASLNGTSMATPHVAGAAALVKQKNPSWSNVRIRDHLKNTATSLGSTNLYGSGLVNAEAATR

SEQ ID NO: 58467 - protein, 269 aa, Unidentified
AQSVPWGISRVQAPAAHNRKLTGGGVKVAVLDTGISTHPDLNIRGGASFVPGEPSTQDGEGHGTHVAGTIAALNNSIGVLGVAPSAELYAVKVLSASGQGSVSSIAQGLEWAGLNGMHVANLSLGSPSPSATLEQAVNSATSRGVLVVAASGNSGAGSISYPARYANAMAVGATDQNNNRASFSQYGAGLDIVAPGVNVQSTYPGSTYASQNGTSMATPHVAGAAALVKQKNPSWSNVQIRNHLKNTATSLGSTNLYGSGLVNAEAATR

SEQ ID NO: 58468 - protein, 269 aa, Unidentified
AQSVPWGISRVQAPAAHNRGLTGSGVKVAVLDTGISTHPDLNIRGGASFVPGEPSTQDGNGHGTHVAGTIAALNNRIGVLGVAPSAELYAVKVLGASGGGAISSIAQGLEWAGNNGMHVANLSLGSPSPSATLEQAVNSATSRGVLVVAASGNSGAGSISYPARYANAMAVGATDQNNNRASFSQYGAGLDIVAPGVNVQSTYPGSTYASLNGTSMATPHVAGAAVLVKQKNPSWSNVRIRNHLKNTATSLGSTNLYGSGLVRAEAATR

SEQ ID NO: 58469 - protein, 269 aa, Unidentified
AQSVPWGISRVQAPAAHNRGLTGRGVKVAVLDTGISTHPDLNIRGGASFVPGEPSTQDGNGHGTHVAGTIAALDNNIGVLGVAPRAELYAVKVLGASGSGSVSSIAQGLEWAGNNRMHVANLSLGSPSPSATLEQAVNSATSRGVLVVAASGNSGAGSISYPARYANAMAVGATDQNNNRASFSQYGAGLDIVAPGVNVQSTWPGSTYASLNGTSQATPHVAGAAALVKQKNPSWSNVQIRNRLKNTATSLGSTNLYGSGLVNAEAATR

SEQ ID NO: 58470 - protein, 269 aa, Unidentified
AQSVPWGISRVQAPAAHNRGLTGGGVKVAVLDTGISTHPDLNIRGGASFVPGEPSTQDGNGHGTHVAGTIAALNNNIGVLGVAPSAELYAVKVLGASGNGSVSSIAQGLEWAGNNGMHVANLSLGAPSPSATLEQAVNSATSRGVLVVAASGNSGSGSISYPARYANAMAVGATDQNNNRASFSQYGAGLDIVAPGVNVQSTYPGSTYASQNGTSMATPHVAGAAALVKQKNPSWSNVQIRNHLKNTATSGGSTNLYGSGLVNAEAATR

SEQ ID NO: 58471 - protein, 269 aa, Unidentified
AQSVPWGISRVQAPAAHRRGLTGRGVKVAVLDTGISTHPDLNIRGGASFVPGEPSTQDGNGHGTHVAGTIAALDNNIGVLGVAPSAELYAVKVLGASGSGSVSSIAQGLEWAGNNRMHVANLSLGSPSPSATLEQAVNSATSRGVLVVAASGNSGAGSISYPARYANAMAVGATDQNNNRASFSQYGAGLDIVAPGVNVLSTYPGSTYASLNGTSMATPHVAGAAALVKQKNPSWSNVQIRNHLRNTATSLGSTNLYGSGLVNAEAATR

SEQ ID NO: 58472 - protein, 269 aa, Bacillus lentus
AQSVPWGIRRVQAPTAHNRGLTGSGVKVAVLDTGISTHPDLNIRGGASFVPGEPSTQDENGHGTHVAGTIAALNNSIGVLGVTPSAQLYAVKVLGASGSGSVSSIAQGLEWAGNNGMHVANLSLGSPSPSATLEQAVNSATSRGVLVVAASGNSGAGSISYPARYANAMAVGATDQNNNRASFSQYGAGLDIVAPGVNVQSTYPGSTYASLNGTSMATPHVAGAAALVKQKNLSWSNVCIRNHLKNTATSLGSTNLYGSGLVNAEAATR

SEQ ID NO: 58473 - protein, 269 aa, Unidentified
AQSVPWGISRVQAPAAHNRGLTGRGVKVAVLDTGISTHPDLRITGGASFVPGEPSTQDGNGHGTHVAGTIAALNNSIGVLGVAPSAELYAVKVLGASGAGSVSSIAQGLEWAGNNGMHVANLSLGSPSPSATLEQAVNSATSRGVLVVAASGNSGAGSISYPARYANAMAVGATDQNNNRASFSQYGAGLDIVAPGVNVQSTYIQSAYASLNGTSMATPHVAGAAALVKQKNPSWSNVQIRNHLKNTATSLGSTNLYGSGLVNAEAATR

SEQ ID NO: 58474 - protein, 269 aa, Unidentified
AQSVPWGISRVQAPAAHNRGLTGRGVKVAVLDTGISTHPDLNIRGGASFVPGEPSTQDGNGHGTHVAGTIAALNNSIGVLGVAPSAELYAVKVLGASGAGAISSIAQGLEWAGNNGMHVANLSLGSPSPSATLEQAVNSATSRGVLVVAASGNSGAGSISYPARYANAMAVGATDQNNNRADFSQYGAGLDIVAPGVNVQSTYPGSTYASLNGTSMATPHVAGAAVLVKQKNPSWSNVRIRNHLKNTATSLGSTNLYGSGLVNAEAATR

SEQ ID NO: 58475 - protein, 270 aa, Synthetic construct
AQSVPWGISRVQAPAAHNRGLTGSGVRVAVLDTGIDSTHPDLNIRGGASFVPGEPSTQDGNGHGTHVAGTIAALNNSIGVLGVAPSAELYAVKVLNASGSGSVSSIAQGLEWAGNNGMHVANLSLGSPSPSATLEQAVNSATSRGVLVVAASGNSGAGSISYPARYANAMAVGATDQNNNRASFSQYGPGLDIVAPGVNVQSTYPGSTYASLNGTSMATPHVAGAAALVRQRNPSWSNVQIRNHLENTATSLGSTNLFGSGLVNAEAATR

SEQ ID NO: 58476 - protein, 269 aa, Unidentified
AQSVPWGISRVQAPAAHNRGLTGSGVKVAVLDTGISTHPDLNIRGGASFVPGEPSTQDGNGHGTHVAGTIAALNNSIGVLGVAPSAELYAVKVLGADGEGAISSIAQGLEWAGNNGMHVANLSLGSPSPSATLEQAVNSATSRGVLVVAASGNSGASSISYPARYANAMAVGATDQNNNRASFSQYGLGLDIVAPGVNVQSTYPGSTYASLNGTSMATPHVAGAAALVKQKNPSWSNAQIRNHLKNTATSLGSTNLYGSGLVNAEAATR

SEQ ID NO: 58477 - protein, 269 aa, Unidentified
AQSVPWGISRVQAPAAHNRKLLGSGVKVAVLDTGISTHPDLNIRGGASFVPGEPSTQDGNGHGTHVAGTIAALNNNIGVLGVAPSAELYAVKVLGASGSGSVSSIAQGLEWAGNNRMHVANLSLGDPSPSATLEQAVNSATSRGVLVVAASGNSGAGSIDYPARYANAMAVGATDQNNNRASFSQYGAGLDIVAPGVNVQSTYPGSTYASENGTSMATPHVAGAAALVKQKNPSWSNVQIRNHLKNTATSLGSTNLYGSGLVNAEAATR

SEQ ID NO: 58478 - protein, 269 aa, Unidentified
AQSVPWGISRVQAPAAHNRGLAGRGVKVAVLDTGISTHPDLNIRGGASFVPGEPSTQDGNGHGTHVAGTIAALNNSIGVLGVAPSAELYAVKVLGASGSGSVSSIAQGLEWAGLNRMHVANLSLGSPSPSATLEQAVNSATSRGVLVVAASGNSGEGSIDYPARYANAMAVGATDQNNNRADFSQYGAGLDIVAPGVNVQSTYPGSTYASLNGTSMATPHVAGAAALVKQKNPSWSNVQIRNHLKNTATSLGSTNLYGSGLVNAEAATR

SEQ ID NO: 58479 - protein, 269 aa, Unidentified
AQSVPWGISRVQAPAAHNRRLTGSGVKVAVLDTGISTHPDLNIRGGASFVPGEPSTQDGNGHGTHVAGTIAALNNRIGVLGVAPSAELYAVKVLGASGAGAISSIAQGLEWAGNNGMHVANLSLGSPSPSATLEQAVNSATSRGVLVVAASGNSGAGSISYPARYANAMAVGATDQNNNRASFSQYGAGLDIVAPGVNVQSTYPGSTYASLNGTSMATPHVAGAAVLVKQKNPSWSNVRIRNHLKNTATSLGSTNLYGSGLVNAEAATR

SEQ ID NO: 58480 - protein, 269 aa, Unidentified
AQSVPWGISRVQAPAAHNRGLTGSGVKVAVLDTGISTHPDLNIRGGASFVPGEPSTQDGNGHGTHVAGTIAALDNNIGVLGVAPRAELYAVKVLGASGSGSVSSIAQGLEWAGNNRMHVANLSLGRQAPSATLEQAVNSATSRGVLVVAASGNSGAGSISYPARYANAMAVGATDQNNNRASFSQYGAGLDIVAPGVNVQSTYPGSTYASLNGTSMATPHVAGAAALVKQKNPSWSNVQIRNHLKNTATSLGSTNLYGSGLVNAEAATR

SEQ ID NO: 58481 - protein, 269 aa, Unidentified
AQSVPWGISRVQAPAAHNRGLAGSGVKVAVLDTGISTHPDLNIRGGASFVPGEPSTQDGNGHGTHVAGTIAALNNSIGVLGVAPSAELYAVKVLGASGSGAISSIAQGLEWAGNNGMHVANLSLGSPSPSATLEQAVNSATSRGVLVVAASGNSGADSISYPARYANAMAVGATDQNNNRADFSQYGAGLDIVAPGVNVQSTYPGSTYASLNGTSMATPHVAGAAVLVKQKNPSWSNVQIRDHLKNTATSLGSTNLYGSGLVNAEAATR

SEQ ID NO: 58482 - protein, 269 aa, Unidentified
AQSVPWGISRVQAPAAHNRGLAGSGVKVAVLDTGISTHPDLNIRGGASFVPGEPSTQDGNGHGTHVAGTIAALNNSIGVLGVAPSAELYAVKVLGASGNGAISSIAGGLEWAGNNGMHVANLSLGSPSPSATLEQAVNSATSRGVLVVAASGNSGAGSISYPARYANAMAVGATDQNNNRASFSQYGAGLDIVAPGVNVQSTYPGSTYASLNGTSMATPHVAGAAVLVKQKNPSWSNVRIRNHLKNTATSLGSTNLYGSGLVNAEAATR

SEQ ID NO: 58483 - protein, 269 aa, Unidentified
AQSVPWGISRVQAPAAHNRGLTGSGVKVAVLDTGISTHPDLNIRGGASFVPGEPSTQDGNGHGTHVAGTIAALDNSIGVLGVAPSAELYAVKVLGASGGGAISSIAQGLEWAGNNGMHVANLSLGSPSPSATLEQAVNSATSRGVLVVAASGNSGAGSISYPARYANAMAVGATDQNNNRASFSQYGAGLDIVAPGVNVQSTYPGSTYASLNGTSMATPHVAGAAVLVKQKNPSWRNVRIRNHLKNTATSLGSTNLYGSGLVNAEAATR

SEQ ID NO: 58484 - protein, 269 aa, Unidentified
AQSVPWGISRVQAPAAHNRGLTGSGVKVAVLDTGISTHPDLNIRGGASFVPGEPSTQDGNGHGTHVAGTIAALNDSIGVLGVAPSAELYAVKVLGASGGGAISSIAQGLEWAGNNGMHVANLSLGSPSPSATLEQAVNSATSRGVLVLAASGNSGAGSISYPARYANAMAVGATDQNNNRASFSQYGAGLDIVAPGVNVQSTYPGSTYASLNGTSMATPHVAGAAVLVKQKNPSWSNVRIRNHLKNTATSLGSTNLYGSGLVNAEAATR

SEQ ID NO: 58485 - protein, 269 aa, Unidentified
AQSVPWGISRVQAPAAHRRGLTGRGVKVAVLDTGISTHPDLNIRGGASFVPGEPSTQDGNGHGTHVAGTIAALDNSIGVLGVAPSAELYAVKVLGASGAGSVSSIAQGLEWAGNNGMHVANLSLGSPSPSATLEQAVNSATSRGVLVVAASGNSGAGSISYPARYANAMAVGATDQNNNRASFSQYGAGLDIVAPGVNVQSTYPGSAYFSLNGTSMATPHVAGAAALVKQKNPSWSNVQIRNRLKNTATSLGSTNLYGSGLVNAEAATR

SEQ ID NO: 58486 - protein, 269 aa, Unidentified
AQSVPWGISRVQAPAAHNRRLTGSGVKVAVLDTGISTHPDLNIRGGASFVPGEPSTQDGEGHGTHVAGTIAALNNDIGVLGVAPSAELYAVKVLGASGSGSVSSIAQGLEWAGNNDMHVANLSLGSPSPSATLEQAVNSATSRGVLVVAASGNSGADSISYPARYANAMAVGATDQNNNRASFSQYGAGLDIVAPGVNVQSTYPGSTYASLNGTSMATPHVAGAAALVKQKNPSWSNVQIRDRLKNTATSLGSTNLYGSGLVNAEAATR

SEQ ID NO: 58487 - protein, 269 aa, Unidentified
AQSVPWGISRVQAPAAHNRGLTGSGVKVAVLDTGISTHPDLNIRGGASFVPGEPSTQDGNGHGTHVAGTIAALDNSIGVLGVAPSAELYAVKVLGASGAGAISSIAQGLEWAGNNGMHVANLSLGSPSPSATLEQAVNSATSRGVLVVAASGNSGAGSISYPARYANAMAVGATDQNNNRADFSQYGAGLDIVAPGVNVQSTYPGSTYASLNGTSMATPHVAGAAVLVKQKNPSWSNVRIRNHLKNTATSLGSTNLYGSGLVNAEAATR

SEQ ID NO: 58488 - protein, 269 aa, Unidentified
AQSVPWGISRVQAPAAHNRGLTGGGVKVAVLDTGISTHPDLNIRGGASFVPGEPSTQDGNGHGTHVAGTIAALNNNIGVLGVAPSAELYAVKVLSASGGGSVSSIAQGLEWAGNNGMHVANLSLGAPSPSATLEQAVNSATSRGVLVVAASGNSGAGSISYPARYANAMAVGATDQNNNRADFSQYGAGLDIVAPGVNVQSTYPGSTYASQNGTSMATPHVAGAAALVKQKNPSWSNVQIRNHLKNTATSLGSTNLYGSGLVNAEAATR

SEQ ID NO: 58489 - protein, 269 aa, Unidentified
AQSVPWGISRVQAPAAHNRRLTGRGVKVAVLDTGISTHPDLNIRGGASFVPGEPSTQDGNGHGTHVAGTIAALNNGIGVLGVAPSAELYAVKVLGASGSGSVSSIAQGLEWAGNNSMHVANLSLGSESPSATLEQAVNSATSRGVLVVAASGNSGAGSISYPARYANAMAVGATDQNNNRASFSQYGAGLDIVAPGVNVQSTYPGSTYASLNGTSMATPHVAGAAALVKQKNPSWSNVVIREHLKNTATSLGSTNLYGSGLVNAEAATR

SEQ ID NO: 58490 - protein, 269 aa, Unidentified
AQSVPWGVSRVQAPAAHNRGLTGSGVKVAVLDTGISTHEDLNIRGGASFVPGEPSTQDGNGHGTHVAGTIAALDNGIGVLGVAPSAELYAVKVLGASGSGSVSSIAQGLEWAGNNRMHVANLSLGSPSPSATLEQAVNSATSRGVLVVAASGNSGAGSISYPARYANAMAVGATDQNNNRASFSQYGAGLDIVAPGVNVYSTYPGSTYASKNGTSMATPHVAGAAALVKQKNPSWSNVQIRNHLKNTATSLGSTNLYGSGLVNAEAATR

SEQ ID NO: 58491 - protein, 269 aa, Unidentified
AQSVPWGISRVQAPAAHNRRLTGGGVKVAVLDTGISTHPDLRIRGGASFVPGEPSTQDGNGHGTHVAGTIAALNNSIGVLGVAPSAELYAVKVLGASGGGSVSSIAQGLEWAGLNGMHVANLSLGAPSPSATLEQAVNSATSRGVLVVAASGNSGAGSISYPARYANAMAVGATDQNNNRASFSQYGAGLDIVAPGVNVQSTYPGSTYASQNGTSMATPHVAGAAALVKQKNPSWSNVQIRNHLKNTATSLGSTNLYGSGLVNAEAATR

SEQ ID NO: 58492 - protein, 269 aa, Unidentified
AQVVPWGISRVQAPAAHNRGLTGSGVKVAVLDTGISTHPDLNIRGGASFVPGEPSTQDGNGHGTHVSGTIAALNNNIGVLGVAPSAELYAVKVLGASGSGSVSSIAQGLEWAGNNGMHVANLSLGSPSPSATLEQAVNSATSRGVLVVAASGNSGAGSIQYPARYANAMAVGATDQNNQRASFSQYGAGLDIVAPGVNVQSTYPGSTYASLSGTSMATPHVAGAAALVKQKNPSWSNVQIRNHLKNTATSLGPTNLYGSGLVNAEAATR

SEQ ID NO: 58493 - protein, 269 aa, Unidentified
AQSVPWGISRVQAPAAHNRGLTGSGVKVAVLDTGISTHPDLNIRGGASFVPGEPSTQDGNGHGTHVAGTIAALDNNIGVLGVAPRAELYAVKVLGASGSGSVSSIAQGLEWAGNNRMHVANLSLGLQAPSATLEQAVNSATSRGVLVVAASGNSGAGSISYPARYANAMAVGATDQNNNRASFSQYGAGLDIVAPGVNVQSTYPGSTYASLNGTSQATPHVAGAAALVKQKNPSWSNVQIRNHLKNTATSLGSTNLYGSGLVNAEAATR

SEQ ID NO: 58494 - protein, 269 aa, Unidentified
AQSVPWGISRVQAPAAHNRGLTGRGVKVAVLDTGISTHPDLRITGGASFVPGEPSTQDGNGHGTHVAGTIAALNNSIGVLGVAPSAELYAVKVLGASGAGSVSSIAQGLEWAGLNGMHVANLSLGSPSPSATLEQAVNSATSRGVLVVAASGNSGAGSISYPARYANAMAVGATDQNNNRASFSQYGAGLDIVAPGVNVQSTYPQSAYASLNGTSMATPHVAGAAALVKQKNPSWSNVQIRNHLKNTATSLGSTNLYGSGLVNAEAATR

SEQ ID NO: 58495 - protein, 269 aa, Unidentified
AQSVPWGISRVQAPAAHNRGLTGRGVKVAVLDTGISTHPDLNIRGGASFVPGEPSTQDGNGHGTHVAGTIAALNNDIGVLGVAPSAELYAVKVLGASGSGSVSSIAQGLEWAGNNDMHVANLSLGSPSPSATLEQAVNSATSRGVLVVAASGNSGAGSISYPARYANAMAVGATDQNNNRADFSQYGAGLDIVAPGVNVQSTYPGSTYASLNGTSMATPHVAGAAALVKQKNPSWSNVRIRDRLKNTATSLGSTNLYGSGLVNAEAATR

SEQ ID NO: 58496 - protein, 269 aa, Unidentified
AQSVPWGISRVQAPAAHNRGLTGSGVKVAVLDTGISTHPDLNIRGGASFVPGEPSTQDGNGHGTHVAGTIAALDNSIGVLGVAPRAELYAVKVLGASGSGSVSSIAQGLEWAGNNRMHVANLSLGLQAPSATLEQAVNSATSRGVLVVAASGNSGAGSISYPARYANAMAVGATDQNNNRASFSQYGAGLDIVAPGVNVQSTYPGSTYASKNGTSMATPHVAGAAALVKQKNPSWSNVQIRNHLKNTATSLGSTNLYGSGLVNAEAATR

SEQ ID NO: 58497 - protein, 269 aa, Unidentified
AQSVPWGISRVQAPAAHNRKLLGFGVKVAVLDTGISTHPDLNIRGGASFVPGEPSTQDGNGHGTHVAGTIAALNNNIGVLGVAPSAELYAVKVLGASGSGSVSSIAQGLEWAGNNGMHVANLSLGSPSPSATLEQAVNSATSRGVLVVAASGNSGAGSIDYPARYANAMAVGATDQNNNRASFSQYGAGLDIVAPGVNVQSTYPGSAYASENGTSMATPHVAGAAALVKQKNPSWSNVQIRNHLKNTATSLGSTNLYGSGLVNAEAATR

SEQ ID NO: 58498 - protein, 269 aa, Unidentified
AQSVPWGISRVQAPAAHNRRLTGSGVKVAVLDTGISTHPDLNIRGGASFVPGEPSTQDGEGHGTHVAGTIAALNNDIGVLGVAPSAELYAVKVLGASGSGSVSSIAQGLEWAGNNDMHVANLSLGSPSPSATLEQAVNSATSRGVLVVAASGNSGADSISYPARYANAMAVGATDQNNNRADFSQYGAGLDIVAPGVNVQSTYPGSTYASLNGTSMATPHVAGAAALVKQKNPSWSNVQIRNRLKNTATSLGSTNLYGSGLVNAEAATR

SEQ ID NO: 58499 - protein, 269 aa, Unidentified
AQSVPWGISRVQAPAAHNRGLTGSGVKVAVLDTGISTHPDLNIRGGASFVPGEPSTQDGEGHGTHVAGTIAALNNSIGVLGVAPSAELYAVKVLGASGAGAISSIAQGLEWAGNNGMHVANLSLGSPSPSATLEQAVNSATSRGVLVVAASGNSGAGSISYPARYANAMAVGATDQNNNRADFSQYGAGLDIVAPGVNVQSTYPGSTYASLNGTSMATPHVAGAAVLVKQKNPSWSNVRIRNHLKNTATSLGSTNLYGSGLVNAEAATR

SEQ ID NO: 58500 - protein, 269 aa, Unidentified
AQSVPWGISRVQAPAAHNRGLTGRGVKVAVLDTGISTHPDLNIRGGASFVPGEPSTQDGNGHGTHVAGTIAALDNNIGVLGVAPRAELYAVKVLGASGSGSVSSIAQGLEWAGNNRMHVANLSLGSPSPSATLEQAVNSATSRGVLVVAASGNSGAGSISYPARYANAMAVGATDQNNNRASFSQYGAGLDIVAPGVNVQSTWPGSAYASLNGTSQATPHVAGAAALVKQKNPSWSNVQIRNHLKNTATSLGSTNLYGSGLVNAEAATR

SEQ ID NO: 58501 - protein, 269 aa, Unidentified
AQSVPWGISRVQAPAAHNRGLTGSGVKVAVLDTGISTHPDLNIRGGASFVPGEPSTQDGNGHGTHAAGTIAALDNSIGVLGVAPSAELYAVKVLGASGSGAISSIAQGLEWAGNNGMHVANLSLGSPSPSATLEQAVNSATSRGVLVVAASGNSGADSISYPARYANAMAVGATDQNNNRASFSQYGAGLDIVAPGVNVQSTYPGSTYASLNGTSMATPHVAGAAALVKHKNPSWSNVQIRNQLKNTATSLGSTNLYGSGLVNAEAATR

SEQ ID NO: 58502 - protein, 269 aa, Unidentified
AQSVPWGISRVQAPAAHNRKLTGFGVKVAVLDTGISTHPDLNIRGGASFVPGEPSTQDGNGHGTHVAGTIAALNNNIGVLGVAPSAELYAVKVLGASGSGSVSSIAQGLEWAGNNRMHVANLSLGSPSPSATLEQAVNSATSRGVLVVAASGNSGAGSIDYPARYANAMAVGATDQNNNRASFSQYGAGLDIVAPGVNVQSTYPGSAYASENGTSMATPHVAGAAALVKQKNPSWSNVQIRNHLKNTATSLGSTNLYGSGLVNAEAATR

SEQ ID NO: 58503 - protein, 269 aa, Unidentified
AQSVPWGISRVQAPAAHNRGLAGSGVKVAVLDTGISTHPDLNIRGGASFVPGEPSTQDGNGHGTHVAGTIAALDNSIGVLGVAPSAELYAVKVLGASGGGAISSIAQGLEWAGNNGMHVANLSLGSPSPSATLEQAVNSATSRGVLVVAASGNSGAGSISYPARYANAMAVGATDQNNNRASFSQYGAGLDIVAPGVNVQSTYPGSTYASLNGTSMATPHVAGAAVLVKQKNPSWSNVRIRNHLKNTATSLGSTNLYGSGLVNAEAATR

SEQ ID NO: 58504 - protein, 269 aa, Unidentified
AQSVPWGISRVQAPAAHNRGLTAFGVKVAVLDTGISTHPDLWIRGGASFVPGEPSTQDGNGHGTHVAGTIAALNNSIGVLGVAPSAELYAVKVLGASGSGSVSSIAQGLEWAGLNRMHVANLSLGSPSPSATLEQAVNSATSRGVLVVAASGNSGAGSISYPARYANAMAVGATDQNNNRADFSQYGAGLDIVAPGVNVQSTYPGSTYASLNGTSMATPHVAGAAALVKQKNGSWSNVQIRNHLKNTATSLGSTNLYGSGLVNAEAATR

SEQ ID NO: 58505 - protein, 269 aa, Unidentified
AQSVPWGISRVQAPAAHRRGLWGRGVKVAVLDTGISTHPDLNIRGGASFVPGEPSTQDGNGHGTHVAGTIAALDNSIGVLGVAPSAELYAVKVLGASGAGSVSSIAQGLEWAGNNGMHVANLSLGSPSPSATLEQAVNSATSRGVLVVAASGNSGAGSISYPARYANAMAVGATDQDNNRASFSQYGAGLDIVAPGVNVQSTYPGSTYASLNGTSMATPHVAGAAALVKQKNPSWSNVQIRNRLKNTATSLGSTNLYGSGLVNAEAATR

SEQ ID NO: 58506 - protein, 269 aa, Unidentified
AQSVPWGISRVQAPAAHRRGLWGRGVKVAVLDTGISTHPDLNIRGGASFVPGEPSTQDGNGHGTHVAGTIAALDNSIGVLGVAPSAELYAVKVLGASGSGSVSSIAQGLEWAGNNGMHVANLSLGSPSPSATLEQAVNSATSRGVLVVAASGNSGAGSISYPARYANAMAVGATDQDNNRASFSQYGAGLDLVAPGVNVQSTYPGSTYASLNGTSMATPHVAGAAALVKQKNPSWSNVQIRNRLKNTATSLGSTNLYGSGLVNAEAATR

SEQ ID NO: 58507 - protein, 269 aa, Unidentified
AQSVPWGISRVQAPAAHNRGLTGSGVKVAVLDTGISTHPDLNIRGGASFVPGEPSTQDGNGHGTHVAGTIAALNNSIGVLGVAPSAELYAVKVLGASGGGAISSIAQGLEWAGNNGMHVANLSLGSPSPSATLEQAVNSATSRGVLVLAASGNSGAGSISYPARYANAMAVGATDQNNNRASFSQYGAGLDIVAPGVNVQSTYPGSTYASLNGTSMATPHVAGAAVLVKQKNPSWSNVRIRNHLKNTATSLGSTNLYGSGLVRAEAATR

SEQ ID NO: 58508 - protein, 269 aa, Unidentified
AQSVPWGISRVQAPAAHNRRLTGSGVKVAVLDTGISTHPDLNIRGGASFVPGEPSTQDGEGHGTHVAGTIAALNNDIGVLGVAPSAELYAVKVLGASGSGSVSSIAQGLEWAGNNSMHVANLSLGSPSPSATLEQAVNSATSRGVLVVAASGNSGADSISYPARYANAMAVGATDQNNNRADFSQYGAGLDIVAPGVNVQSTYPGSTYASLNGTSMATPHVAGAAALVKQKNPSWSNVQIRDHLKNTATSLGSTNLYGSGLVNAEAATR

SEQ ID NO: 58509 - protein, 269 aa, Unidentified
AQSVPWGISRVQAPAAHNRGLTGSGVKVAVLDTGISTHPDLNIRGGASFVPGEPSTQDGNGHGTHVAGTIAALNNSIGVLGVAPSAELYAVKVLGASGGGAISSIAQGLEWAGNNGMHVANLSLGSPSPSATLEQAVNSATSRGVLVLAASGNSGAGSISYPARYANAMAVGATDQNNNRASFSQYGAGLDIVAPGVNVQSTYPGSTYASLNGTSMATPHVAGAAVLVKQKNPSWSNVRIRNRLKNTATSLGSTNLYGSGLVNAEAATR

SEQ ID NO: 58510 - protein, 269 aa, Bacillus lentus
AQSVPWGIRRVQAPAAHNLGLTGSGVKVAVLDTGISTHPDLRIRGGASFVPGEPSTQDGDGHGTHVAGTIAALDNSIGVLGVAPSAELYAVKVLGASGSGSVSSIAQGLEWAGNNGMHVANLSLGSPSPSATLEQAVNSATSRGVLVVAASGNSGAGSISYPARYANAMAVGATDQNNNRASFSQYGAGLDIVAPGVNVQSTYPGSTYASLNGTSMATPHVAGAAALVKQKNPSWSNVRIRNHLKNTATSLGDTNLYGSGLVNAEAATR

SEQ ID NO: 58511 - protein, 269 aa, Unidentified
AQSVPWGISRVQAPAAHNRRLTGRGVKVAVLDTGISTHPDLNIRGGASFVPGEPSTQDGNGHGTHVAGTIAALNNDIGVLGVAPSAELYAVKVLGASGSGSVSSIAQGLEWAGNNDMHVANLSLGSESPSATLEQAVNSATSRGVLVVAASGNSGADSISYPARYANAMAVGATDQNNNRASFSQYGAGLDIVAPGVNVQSTYPGSTYASLNGTSMATPHVAGAAALVKQKNPSWSNVQIRDHLKNTATSLGSTNLYGSGLVNAEAATR

SEQ ID NO: 58512 - protein, 269 aa, Unidentified
AQSVPWGISRVQAPAAHNRGLTGRGVKVAVLDTGISTHPDLNIRGGASFVPGEPSTQDGNGHGTHVAGTIAALNNGIGVLGVAPSAELYAVKVLGASGSGSVSSIAQGLEWAGNNDMHVANLSLGSESPSATLEQAVNSATSRGVLVVAASGNSGADSISYPARYANAMAVGATDQNNNRADFSQYGAGLDIVAPGVNVQSTYPGSTYASLNGTSMATPHVAGAAALVKQKNPSWSNVQIRNRLKNTATSLGSTNLYGSGLVNAEAATR

SEQ ID NO: 58513 - protein, 269 aa, Unidentified
AQSVPWGISRVQAPAAHNRGLTGSGVKVAVLDTGISTHPDLNIRGGASFVPGEPSTQDGNGHGTHVAGTIAALNNSIGVLGVAPSAELYAVKVLGASGSGSISSIAQGLEWAGNNGMHVANLSLGSPSPSATLEQAVNSATSRGVLVVAASGNSGEGSISYPARYANAMAVGATDQNNNRADFSQYGAGLDIVAPGVNVQSTYPGSTYASLNGTSMATPHVAGAAVLVKQKNPSWSNVRIRDRLKNTATSLGSTNLYGSGLVNAEAATR

SEQ ID NO: 58514 - protein, 269 aa, Unidentified
AQSVPWGISRVQAPAAHNRGLAGGGVKVAVLDTGISTHPDLNIRGGASFVPGEPSTQDGNGHGTHVAGTIAALNNSIGVLGVAPSAELYAVKVLGASGQGAISSIAQGLEWAGNNGMHVANLSLGSPSPSATLEQAVNSATSRGVLVVAASGNSGAGSISYPARYANAMAVGATDQNNNRASFSQYGAGLDIVAPGVNVQSTYPGSTYASLNGTSMATPHVAGAAVLVKQKNPSWSNVRIRNHLKNTATSLGSTNLYGSGLVNAEAATR

SEQ ID NO: 58515 - protein, 269 aa, Unidentified
AQSVPWGISRVQAPAAHNRRLTGRGVKVAVLDTGISTHPDLNIRGGASFVPGEPSTQDGEGHGTHVAGTIAALNNGIGVLGVAPSAELYAVKVLGASGSGSVSSIAQGLEWAGNNSMHVANLSLGSPSPSATLEQAVNSATSRGVLVVAASGNSGADSISYPARYANAMAVGATDQNNNRASFSQYGAGLDIVAPGVNVQSTYPGSTYASLNGTSMATPHVAGAAALVKQKNPSWSNVQIRDHLKNTATSLGSTNLYGSGLVNAEAATR

SEQ ID NO: 58516 - protein, 269 aa, Unidentified
AQSVPWGISRVQAPAAHNRKLLGFGVKVAVLDTGISTHPDLNIRGGASFVPGEPSTQDGNGHGTHVAGTIAALNNNIGVLGVAPSAELYAVKVLGASGSGSVSSIAQGLEWAGNNRMHVANLSLGSPSPSATLEQAVNSATSRGVLVVAASGNSGAGSIDYPARYANAMAVGATDQNNNRASFSQYGAGLDIVAPGVNVQSTYPGSTYASENGTSMATPHVAGAAALVKQKNPSWSNVQIRNHLKNTATSLGSTNLYGSGLVNAEAATR

SEQ ID NO: 58517 - protein, 269 aa, Unidentified
AQSVPWGISRVQAPAAHNRGLTGRGVKVAVLDTGISTHPDLNIRGGASFVPGEPSTQDGEGHGTHVAGTIAALNNGIGVLGVAPSAELYAVKVLGASGSGSVSSIAQGLEWAGNNSMHVANLSLGSESPSATLEQAVNSATSRGVLVVAASGNSGAGSISYPARYANAMAVGATDQNNNRADFSQYGAGLDIVAPGVNVQSTYPGSTYASLNGTSMATPHVAGAAALVKQKNPSWSNVRIRNHLKNTATSLGSTNLYGSGLVNAEAATR

SEQ ID NO: 58518 - protein, 269 aa, Unidentified
AQSVPWGISRVQAPAAHNRKLTGSGVKVAVLDTGISTHPDLNIRGGASFVPGEPSTQDGEGHGTHVAGTIAALNNSIGVLGVAPSAELYAVKVLGASGNGSVSSIANGLEWAGLNGMHVANLSLGAPSPSATLEQAVNSATSRGVLVVAASGNSGAGSISYPARYANAMAVGATDQNNNRADFSQYGAGLDIVAPGVNVQSTYPGSTYASLNGTSMATPHVAGAAALVKQKNPSWSNVQIRNHLKNTATSLGSTNLYGSGLVNAEAATR

SEQ ID NO: 58519 - protein, 269 aa, Unidentified
AQSVPWGISRVQAPAAHNRGLAGSGVKVAVLDTGISTHPDLNIRGGASFVPGEPSTQDGNGHGTHVAGTIAALNNSIGVLGVAPSAELYAVKVLGASGQGAISSIAQGLEWAGNNGMHVANLSLGSSSPSATLEQAVNSATSRGVLVVAASGNSGAGSISYPARYANAMAVGATDQNNNRASFSQYGAGLDIVAPGVNVQSTYPGSTYASLNGTSMATPHVAGAAVLVKQKNPSWSNVRIRNHLKNTATSLGSTNLYGSGLVNAEAATR

SEQ ID NO: 58520 - protein, 269 aa, Unidentified
AQSVPWGISRVQAPAAHNRRLTGRGVKVAVLDTGISTHPDLNIRGGASFVPGEPSTQDGNGHGTHVAGTIAALNNSIGVLGVAPSAELYAVKVLAASGAGSVSSIAQGLEWAGLNGMHVANLSLGAPSPSATLEQAVNSATSRGVLVVAASGNSGAGSISYPARYANAMAVGATDQNNNRASFSQYGAGLDIVAPGVNVQSTYPGSTYASQNGTSMATPHVAGAAALVKQKNPSWSNVQIRNHLKNTATSLGSTNLYGSGLVNAEAATR

SEQ ID NO: 58521 - protein, 269 aa, Unidentified
AQSVPWGISRVQAPAAHNRRLTGRGVKVAVLDTGISTHPDLRITGGASFVPGEPSTQDGNGHGTHVAGTIAALNNSIGVLGVAPSAELYAVKVLGASGAGSVSSIARGLEWAGNNGMHVANLSLGSPSPSATLEQAVNSATSRGVLVVAASGNSGAGSISYPARYANAMAVGATDQNNNRASFSQYGAGLDIVAPGVNVQSTYPGSAYASLNGTSMATPHVAGAAALVKQKNPSWSNVQIRNHLKNTATSLGSTNLYGSGLVNAEAATR

SEQ ID NO: 58522 - protein, 269 aa, Unidentified
AQSVPWGISRVQAPAAHNRRLTGRGVKVAVLDTGISTHPDLNIRGGASFVPGEPSTQDGNGHGTHVAGTIAALNNSIGVLGVAPSAELYAVKVLSESGAGSVSSIAQGLEWAGLNGMHVANLSLGAPSPSATLEQAVNSATSRGVLVVAASGNSGAGSISYPARYANAMAVGATDQNNNRASFSQYGAGLDIVAPGVNVQSTYPGSTYASLNGTSMATPHVAGAAALVKQKNPSWSNVQIRNHLKNTATSLGSTNLYGSGLVNAEAATR

SEQ ID NO: 58523 - protein, 269 aa, Unidentified
AQSVPWGISRVQAPAAHNRGLAGSGVKVAVLDTGISTHPDLNIRGGASFVPGEPSTQDGNGHGTHVAGTIAALNNSIGVLGVAPSAELYAVKVLGASGGGAISSIAQGLEWAGNNGMHVANLSLGAPSPSATLEQAVNSATSRGVLVVAASGNSGAGSISYPARYANAMAVGATDQNNNRASFSQYGAGLDIVAPGVNVQSTYPGSTYASLNGTSMATPHVAGAAVLVKQKNPSWSNVRIRNHLKNTATSLGSTNLYGSGLVNAEAATR

SEQ ID NO: 58524 - protein, 269 aa, Unidentified
AQSVPWGISRVQAPAAHNRRLTGSGVKVAVLDTGISTHPDLNIRGGASFVPGEPSTQDGNGHGTHVAGTIAALNNSIGVLGVAPSAELYAVKVLGASGGGAISSIAQGLEWAGNNGMHVANLSLGSPSPSATLEQAVNSATSRGVLVVAASGNSGAGSISYPARYANAMAVGATDQNNNRASFSQYGAGLDIVAPGVNVQSTYPGSTYFSLNGTSMATPHVAGAAVLVKQKNPSWSNVRIRNHLKNTATSLGSTNLYGSGLVNAEAATR

SEQ ID NO: 58525 - protein, 269 aa, Unidentified
AQSVPWGISRVQAPAAHRRGLWGRGVKVAVLDTGISTHPDLNIRGGASFVPGEPSTQDGNGHGTHVAGTIAALDNSIGVLGVAPSAELYAVKVLGASGSGSVSSIAQGLEWAGNNGMHVANLSLGSPSPSATLEQAVNSATSRGVLVVAASGNSGAGSISYPARYANAMAVGATDQNNNRASFSQYGAGLDLVAPGVNVQSTYPGSAYASLNGTSMATPHVAGAAALVKQKNPSWSNVQIRNRLKNTATSLGSTNLYGSGLVNAEAATR

SEQ ID NO: 58526 - protein, 269 aa, Unidentified
AQSVPWGISRVQAPAAHRRGLTGRGVKVAVLDTGISTHPDLNIRGGASFVPGEPSTQDGNGHGTHVAGTIAALDNSIGVLGVAPSAELYAVKVLGASGSGSVSSIAQGLEWAGANGMHVANLSLGSPSPSATLEQAVNSATSRGVLVVAASGNSGAGSISYPARYANAMAVGATDQNNNRASFSQYGAGLDLVAPGVNVQSTYPGSTYFSLNGTSMATPHVAGAAALVKQKNPSWSNVQIRNRLKNTATSLGSTNLYGSGLVNAEAATR

SEQ ID NO: 58527 - protein, 269 aa, Unidentified
AQSVPWGISRVQAPAAHNRGLTGGGVKVAVLDTGISTHPDLNIRGGASFVPGEPSTQDGNGHGTHVAGTIAALNNNIGVLGVAPSAELYAVKVLGASGNGSVSSIAGGLEWAGNNGMHVANLSLGSPSPSATLEQAVNSATSRGVLVVAASGNSGAGSISYPARYANAMAVGATDQNNNRASFSQYGAGLDIVAPGVNVQSTYPGSTYASQNGTSMATPHVAGAAALVKQKNPSWSVVQIRAHLKNTATSLGSTNLYGSGLVNAEAATR

SEQ ID NO: 58528 - protein, 269 aa, Unidentified
AQSVPWGISRVQAPAAHNRRLTGRGVKVAVLDTGISTHPDLNIRGGASFVPGEPSTQDGEGHGTHVAGTIAALNNDIGVLGVAPSAELYAVKVLGASGSGSVSSIAQGLEWAGNNSMHVANLSLGSESPSATLEQAVNSATSRGVLVVAASGNSGADSISYPARYANAMAVGATDQNNNRASFSQYGAGLDIVAPGVNVQSTYPGSTYASLNGTSMATPHVAGAAALVKQKNPSWSNVQIRNHLKNTATSLGSTNLYGSGLVNAEAATR

SEQ ID NO: 58529 - protein, 269 aa, Unidentified
AQSVPWGISRVRAPAAHNRGLTGSGVKVAVLDTGISTHPDLNIRGGASFVPGEPPTQDGNGHGTHVAGTIAALDNSIGVLGVAPSAELYAVKVLGASGSGATSSIAQGLEWAGNNGMHVANLSLGSPTPSATLEQAVNSATSRGVLVVAASGNSGAGSISYPARYANAMAVGATDQNNNRASFSQYGAGLDIVAPGVNVQSTYPGSTYASLNGTSSATPHVAGAAALVKQKNPSWSNVRIRNHLQNTATSLGSTNLYGSGLVNAEAATR

SEQ ID NO: 58530 - protein, 269 aa, Unidentified
AQSVPWGISRVQAPAAHNRRLTGSGVKVAVLDTGISTHPDLNIRGGASFVPGEPSTQDGNGHGTHVAGTIAALNNSIGVLGVAPSAELYAVKVLGASGAGAISSIAQGLEWAGNNGMHVANLSLGSPSPSATLEQAVNSATSRGVLVVAASGNSGAGSISYPARYANAMAVGATDQNNNRASFSQYGAGLDIVAPGVNVQSTYPGSAYASLNGTSMATPHVAGAAVLVKQKNPSWSNVRIRNHLKNTATSLGSTNLYGSGLVNAEAATR

SEQ ID NO: 58531 - protein, 269 aa, Unidentified
AQSVPWGISRVQAPAAHNRGLTGRGVKVAVLDTGISTHPDLNIRGGASFVPGEPSTQDGNGHGTHVAGTIAALNNSIGVLGVAPSAELYAVKVLGASGSGSVSSIAQGLEWAGNNGMHVANLSLGSESPSATLEQAVNSATSRGVLVVAASGNSGADSISYPARYANAMAVGATDQNNNRADFSQYGAGLDIVAPGVNVQSTYPGSTYASLNGTSMATPHVAGAAALVKQKNPSWSNVRIRDRLKNTATSLGSTNLYGSGLVNAEAATR

SEQ ID NO: 58532 - protein, 269 aa, Unidentified
AQSVPWGISRVQAPAAHNRKLLGFGVKVAVLDTGISTHPDLNIRGGASFVPGEPSTQDGNGHGTHVAGTIAALNNNIGVLGVAPSAELYAVKVLGASGSGSVSSIAQGLEWAGNNGMHVANLSLGDPSPSATLEQAVNSATSRGVLVVAASGNSGAGSIDYPARYANAMAVGATDQNNNRASFSQYGAGLDIVAPGVNVQSTYPGSAYASLNGTSMATPHVAGAAALVKQKNPSWSNVQIRNHLKNTATSLGSTNLYGSGLVNAEAATR

SEQ ID NO: 58533 - protein, 269 aa, Unidentified
AQSVPWGISRVQAPAAHNRRLTGRGVKVAVLDTGISTHPDLNIRGGASFVPGEPSTQDGNGHGTHVAGTIAALNNGIGVLGVAPSAELYAVKVLGASGSGSVSSIAQGLEWAGNNDMHVANLSLGSPSPSATLEQAVNSATSRGVLVVAASGNSGADSISYPARYANAMAVGATDQNNNRADFSQYGAGLDIVAPGVNVQSTYPGSTYASLNGTSMATPHVAGAAALVKQKNPSWSNVQIRNRLKNTATSLGSTNLYGSGLVNAEAATR

SEQ ID NO: 58534 - protein, 269 aa, Unidentified
AQSVPWGISRVQAPAAHNRRLTGSGVKVAVLDTGISTHPDLRIRGGASFVPGEPSTQDGNGHGTHVAGTIAALNNSIGVLGVAPSAELYAVKVLSASGQGSVSSIAGGLEWAGLNGMHVANLSLGAPSPSATLEQAVNSATSRGVLVVAASGNSGAGSISYPARYANAMAVGATDQNNNRASFSQYGAGLDIVAPGVNVQSTYPGSTYASLNGTSMATPHVAGAAALVKQKNPSWSNVQIRNHLKNTATSLGSTNLYGSGLVNAEAATR

SEQ ID NO: 58535 - protein, 269 aa, Unidentified
AQSVPWGISRVQAPAAHNRRLTGRGVKVAVLDTGISTHPDLNIRGGASFVPGEPSTQDGNGHGTHVAGTIAALNNNIGVLGVAPSAELYAVKVLSASGQGSVSSIAQGLEWAGNNGMHVANLSLGAPSPSATLEQAVNSATSRGVLVVAASGNSGAGSISYPARYANAMAVGATDQNNNRASFSQYGAGLDIVAPGVNVQSTYPGSTYASQNGTSMATPHVAGAAALVKQKNPSWSNVQIRNHLKNTATSLGSTNLYGSGLVNAEAATR

SEQ ID NO: 58536 - protein, 269 aa, Lederbergia lentus
AQSVPWGISRVQAPAAHNRGLTGSGVQVAVLDTGISTHPDLNIRGGASFVPGEPSTQDGNDHGTHVAGTIAALNNSIGVLGVAPSAELYAVKVLGADGEGAISSIAQGLEWAGNNGMHVANLSLGSPSPSATLEQAVNSATSRGVLVVAASGNSGASSISYPARYANAMAVGATDQNNNRASFSQYGAGLDIVAPGVNVQSTYPGSTYASLNGTSMATPHVAGAAALVKQKNPSWSNVQIRNHLKNTATSLGSTNLYGSGLVNAEAATR

SEQ ID NO: 58537 - protein, 269 aa, Synthetic construct
AQSVPWGISRVQAPAAHNRGLTGSGVRVAVLDTGISTHPDLNIRGGASFVPGEPSTQDGNGHGTHVAGTIAALDNSIGVLGVAPSAELYAVKVLGASGSGSYSSIASGLEWAGNNGMHVASLSLGSPSPSATLEQAVNSATSRGVLVVAASGNSGAGSISYPARYANAMAVGATDQNNNRASFSQYGAGLDIVAPGVNVQSTYPGSTYASLSGTSMATPHVAGAAALVKQKNPSWSNVQIRNHLKNTATSLGSTNLYGSGLVNAEAAAR

SEQ ID NO: 58538 - protein, 269 aa, Unidentified
AQSVPWGISRVQAPAAHNRGLTGRGVKVAVLDTGISTHPDLNIRGGASFVPGEPSTQDGNGHGTHVAGTIAALNNDIGVLGVAPSAELYAVKVLGASGSGSVSSIAQGLEWAGNNSMHVANLSIGSESPSATLEQAVNSATSRGVLVVAASGNSGAGSISYPARYANAMAVGATDQNNNRASFSQYGAGLDIVAPGVNVQSTYPGSTYASLNGTSMATPHVAGAAALVKQKNPSWSNVQIRDRLKNTATSLGSTNLYGSGLVNAEAATR

SEQ ID NO: 58539 - protein, 269 aa, Unidentified
AQSVPWGISRVQAPAAHNRGLTGRGVKVAVLDTGISTHPDLNIRGGASFVPGEPSTQDGNGHGTHVAGTIAALNNGIGVLGVAPSAELYAVKVLGASGSGSVSSIAQGLEWAGNNDMHVANLSLGSESPSATLEQAVNSATSRGVLVVAASGNSGAGSISYPARYANAMAVGATDQNNNRASFSQYGAGLDIVAPGVNVQSTYPGSTYASLNGTSMATPHVAGAAALVKQKNPSWSNVRIRDRLKNTATSLGSTNLYGSGLVNAEAATR

SEQ ID NO: 58540 - protein, 269 aa, Unidentified
AQSVPWGISRVQAPAAHNRGLAGRGVKVAVLDSGISTHPDLNIRGGASFVPGEPSTQDGEGHGTHVAGTIAALNNSIGVLGVAPSAELYAVKVLGASGSGSVSSIAQGLEWAGLNGMHVANLSLGIPSPSATLEQAVNSATSRGVLVVAASGNSGAGSISYPARYANAMAVGATDQNNNRADFSQYGAGLDIVAPGVNVQSTYPGSTYASLNGTSMATPHVAGAAALVKQKNPSWSNVQIRNHLKNTATSLGSTNLYGSGLVNAEAATR

SEQ ID NO: 58541 - protein, 269 aa, Unidentified
AQSVPWGISRVQAPAAHNRRLTGRGVKVAVLDTGISTHPDLNIRGGASFVPGEPSTQDGEGHGTHVAGTIAALNNGIGVLGVAPSAELYAVKVLGASGSGSVSSIAQGLEWAGNNSMHVANLSLGSPSPSATLEQAVNSATSRGVLVVAASGNSGAGSISYPARYANAMAVGATDQNNNRADFSQYGAGLDIVAPGVNVQSTYPGSTYASLNGTSMATPHVAGAAALVKQKNPSWSNVQIRNRLKNTATSLGSTNLYGSGLVNAEAATR

SEQ ID NO: 58542 - protein, 269 aa, Unidentified
AQSVPWGISRVQAPAAHNRGLTGGGVKVAVLDTGISTHPDLNIRGGASFVPGEPSTQDGNGHGTHVAGTIAALNNNIGVLGVAPSAELYAVKVLSASGQGSVSSIANGLEWAGNNGMHVANLSLGAPSPSATLEQAVNSATSRGVLVVAASGNSGAGSISYPARYANAMAVGATDQNNNRADFSQYGAGLDIVAPGVNVQSTYPGSTYASLNGTSMATPHVAGAAALVKQKNPSWSNVQIRNHLKNTATSLGSTNLYGSGLVNAEAATR

SEQ ID NO: 58543 - protein, 269 aa, Unidentified
AQSVPWGISRVQAPAAHNRRLWGRGVKVAVLDTGISTHPDLNITGGASFVPGEPSTQDGNGHGTHVAGTIAALNNSIGVLGVAPSAELYAVKVLGASGAGSVSSIAQGLEWAGLNGMHVANLSLGSPSPSATLEQAVNSATSRGVLVVAASGNSGAGSISYPARYANAMAVGATDQNNNRASFSQYGAGLDIVAPGVNVQSTYIGSTYASLNGTSMATPHVAGAAALVKQKNPSWSNVQIRNHLKNTATSLGSTNLYGSGLVNAEAATR

SEQ ID NO: 58544 - protein, 269 aa, Unidentified
AQSVPWGISRVQAPAAHNRRLTGSGVKVAVLDTGISTHPDLNIRGGASFVPGEPSTQDGNGHGTHVAGTIAALNNGIGVLGVAPSAELYAVKVLGASGSGSVSSIAQGLEWAGNNDMHVANLSLGSPSPSATLEQAVNSATSRGVLVVAASGNSGADSISYPARYANAMAVGATDQNNNRASFSQYGAGLDIVAPGVNVQSTYPGSTYASLNGTSMATPHVAGAAALVKQKNPSWSNVRIRDRLKNTATSLGSTNLYGSGLVNAEAATR

SEQ ID NO: 58545 - protein, 269 aa, Unidentified
AQSVPWGISRVQAPAAHNRGLTGSGVKVAVLDTGISTHPDLNIRGGASFVPGEPSTQDGNGHGTHVAGTIAALDNSIGVLGVAPSAELYAVKVLGASGSGAISSIAQGLEWAGNNGMHVANLSLGSPSPSATLEQAVNSATSRGVLVVAASGNSGAGSISYPARYANAMAVGATDQNNNRASFSQYGAGLDIVAPGVNVQSTYPGSTYASLNGTSMATPHVAGAAVLVKHKNPSWSNVRIRNHLKNTATSVGSTNLYGSGLVNAEAATR

SEQ ID NO: 58546 - protein, 269 aa, Unidentified
AQSVPWGISRVQAPAAHNRGLTGRGVKVAVLDTGISTHPDLNIRGGASFVPGEPSTQDGEGHGTHVAGTIAALNNGIGVLGVAPSAELYAVKVLGASGSGSVSSIAQGLEWAGNNSMHVANLSLGSESPSATLEQAVNSATSRGVLVVAASGNSGAGSISYPARYANAMAVGATDQNNNRADFSQYGAGLDIVAPGVNVQSTYPGSTYASLNGTSMATPHVAGAAALVKQKNPSWSNVQIRNRLKNTATSLGSTNLYGSGLVNAEAATR

SEQ ID NO: 58547 - protein, 269 aa, Unidentified
AQSVPWGISRVQAPAAHNRGLAGRGVKVAVLDSGISTHPDLNIRGGASFVPGEPSTQDGEGHGTHVAGTIAALNNSIGVLGVAPSAELYAVKVLGASGSGSVSSIAQGLEWAGLNGMHVANLSLGSPSPSATLEQAVNSATSRGVLVVAASGNSGAGSIDYPARYANAMAVGATDQNNNRADFSQYGAGLDIVAPGVNVQSTYPGSTYASLNGTSMATPHVAGAAALVKQKNPSWSNVQIRNHLKNTATSLGSTNLYGSGLVNAEAATR

SEQ ID NO: 58548 - protein, 269 aa, Bacillus lentus
AQSVPWGIRRVQAPTAHNRGLTGSGVKVAVLDTGISTHPDLNIRGGASFVPGEPSTQDGNGHGTHAAGTIAALNNSIGVLGVAPSAELYAVKVLGASGSGSVSSIAQGLEWAGNNGMNVANLSLGSPSSSATLEHAVNSATSRGVLVVAASGNSGAGSISYPARYANAMAVGATDQNNNRASFSQYGAGLDIVAPGVNVQSTYPGSTYASLNGTSMATPHVAGAAALVKQKNPSWSNVMIRNHLKNTATSLGSTNLYGSGLVNAEAATR

SEQ ID NO: 58549 - protein, 269 aa, Unidentified
AQSVPWGISRVQAPAAHNRGLTGRGVKVAVLDTGISTHPDLNIRGGASFVPGEPSTQDGNGHGTHVAGTIAALNNDIGVLGVAPSAELYAVKVLGASGSGSVSSIAQGLEWAGNNSMHVANLSLGSPSPSATLEQAVNSATSRGVLVVAASGNSGADSISYPARYANAMAVGATDQNNNRADFSQYGAGLDIVAPGVNVQSTYPGSTYASLNGTSMATPHVAGAAALVKQKNPSWSNVQIRDRLKNTATSLGSTNLYGSGLVNAEAATR

SEQ ID NO: 58550 - protein, 269 aa, Unidentified
AQSVPWGISRVQAPAAHNRRLTGGGVKVAVLDTGISTHPDLRIRGGASFVPGEPSTQDGNGHGTHVAGTIAALNNSIGVLGVAPSAELYAVKVLGASGNGSVSSIAQGLEWAGLNGMHVANLSLGAPSPSATLEQAVNSATSRGVLVVAASGNSGAGSISYPARYANAMAVGATDQNNNRASFSQYGAGLDIVAPGVNVQSTYPGSTYASQNGTSMATPHVAGAAALVKQKNPSWSNVQIRNHLKNTATSLGSTNLYGSGLVNAEAATR

SEQ ID NO: 58551 - protein, 269 aa, Unidentified
AQSVPWGISRVQAPAAHNRGLTGSGVKVAVLDTGISTHPDLNIRGGASFVPGEPSTQDGNGHGTHVAGTIAALDNSIGVLGVAPSAELYAVKVLGASGSGAISSIAQGLEWAGNNGMHVANLSLGSPSPSATLEQAVNSATSRGVLVVAASGNSGAGSISYPARYANAMAVGATDQNNNRASFSQYGAGLDIVAPGVNVQSTYPGSTYASLNGTSMATPHVAGAAVLVKHKNPSWPNVRIRNHLKNTATSLGSTNLYGSGLVNAEAATR

SEQ ID NO: 58552 - protein, 269 aa, Unidentified
AQSVPWGISRVQAPAAHNRRLTGSGVKVAVLDTGISTHPDLDIRGGASFVPGEPSTQDGNGHGTHVAGTIAALDNSIGVLGVAPSAELYAVKVLGASGGGSISSIAQGLEWAGNNGMHVANLSLGSPSPSATLEQAVNSATSRGVLVVAASGNSGAGSISYPARYANAMAVGATDQNNNRASFSQYGAGLDIVAPGVNVQSTYPGSTYASLNGTSMATPHVAGAAVLVKQKNPSWSNVRIRNHLKNTATSLGSTNLYGSGLVNAEAATR

SEQ ID NO: 58553 - protein, 269 aa, Unidentified
AQSVPWGISRVQAPAAHNRGLTGRGVKVAVLDTGISTHPDLNIRGGASFVPGEPSTQDGNGHGTHVAGTIAALNNDIGVLGVAPSAELYAVKVLGASGSGSVSSIAQGLEWAGNNDMHVANLSLGSPSPSATLEQAVNSATSRGVLVVAASGNSGADSISYPARYANAMAVGATDQNNNRADFSQYGAGLDIVAPGVNVQSTYPGSTYASLNGTSMATPHVAGAAALVKQKNPSWSNVRIRNRLKNTATSLGSTNLYGSGLVNAEAATR

SEQ ID NO: 58554 - protein, 269 aa, Unidentified
AQSVPWGISRVQAPAAHRRGLTGRGVKVAVLDTGISTHPDLNIRGGASFVPGEPSTQDGNGHGTHVAGTIAALDNSIGVLGVAPSAELYAVKVLGASGAGSVSSIAQGLEWAGNNGMHVANLSLGSPSPSATLEQAVNSATSRGVLVVAASGNSGAGSISYPARYANAMAVGATDQNNNRASFSQYGAGLDIVAPGVNVQSTYPQSTYFSLNGTSMATPHVAGAAALVKQKNPSWSNVQIRNRLKNTATSLGSTNLYGSGLVNAEAATR

SEQ ID NO: 58555 - protein, 269 aa, Unidentified
AQSVPWGISRVQAPAAHNRRLWGRGVKVAVLDTGISTHPDLRITGGASFVPGEPSTQDGNGHGTHVAGTIAALNNSIGVLGVAPSAELYAVKVLGASGAGSVSSIAQGLEWAGNNGMHVANLSLGSPSPSATLEQAVNSATSRGVLVVAASGNSGAGSISYPARYANAMAVGATDQNNNRASFSQYGAGLDIVAPGVNVQSTYPGSAYASLNGTSMATPHVAGAAALVKQKNPSWSNVQIRNHLKNTATSLGSTNLYGSGLVNAEAATR

SEQ ID NO: 58556 - protein, 269 aa, Bacillus Lentus
AQSVPWGIRRVQAPTAHNRGLTGSGVKVAVLDTGISTHPDLNIRGGASFVPGEPSTQDGNGHGTHAAGTIAALNNSIGVLGVAPSAELYAVKVLGASGSGSVSSIAQGLEWAGNNGMHVANLSLGSPSPSATLEQAVNSATSRGVLVVAASGNSGAGSISYPARYANAMAVGATDQNNNRASFSQYGPGLDIVAPGVNVQSTYPGSTYASLNGTSMATPHVAGAAALVKQKNPSWSNVRIRNHLKNTATSLGSTDYYGSGLVNAEAATR

SEQ ID NO: 58557 - protein, 269 aa, Unidentified
AQSVPWGISRVQAPAAHNRKLLGSGVKVAVLDTGISTHPDLNIRGGASFVPGEPSTQDGNGHGTHVAGTIAALNNDIGVLGVAPSAELYAVKVLGASGSGSVSSIAQGLEWAGNNDMHVANLSLGSESPSATLEQAVNSATSRGVLVVAASGNSGAGSISYPARYANAMAVGATDQNNNRASFSQYGAGLDIVAPGVNVQSTYPGSTYASLNGTSMATPHVAGAAALVKQKNPSWSNVQIRDRLKNTATSLGSTNLYGSGLVNAEAATR

SEQ ID NO: 58558 - protein, 269 aa, Unidentified
AQSVPWGISRVQAPAAHNRKLLGFGVKVAVLDTGISTHPDLNIRGGASFVPGEPSTQDGNGHGTHVAGTIAALNNNIGVLGVAPSAELYAVKVLGASGSGSVSSIAQGLEWAGNNRMHVANLSLGDPSPSATLEQAVNSATSRGVLVVAASGNSGAGSISYPARYANAMAVGATDQNNNRASFSQYGAGLDIVAPGVNVQSTYPGSTYASENGTSMATPHVAGAAALVKQKNPSWSNVQIRNHLKNTATSLGSTNLYGSGLVNAEAATR

SEQ ID NO: 58559 - protein, 269 aa, Unidentified
AQSVPWGISRVQAPAAHNRKLTGSGVKVAVLDTGISTHPDLNIRGGASFVPGEPSTQDGEGHGTHVAGTIAALNNSIGVLGVAPSAELYAVKVLAASGQGSVSSIANGLEWAGLNGMHVANLSLGSPSPSATLEQAVNSATSRGVLVVAASGNSGAGSISYPARYANAMAVGATDQNNNRASFSQYGAGLDIVAPGVNVQSTYPGSTYASQNGTSMATPHVAGAAALVKQKNPSWSNVQIRNHLKNTATSLGSTNLYGSGLVNAEAATR

SEQ ID NO: 58560 - protein, 269 aa, Unidentified
AQSVPWGISRVQAPAAHNRRLTGRGVKVAVLDTGISTHPDLNIRGGASFVPGEPSTQDGEGHGTHVAGTIAALNNDIGVLGVAPSAELYAVKVLGASGSGSVSSIAQGLEWAGNNSMHVANLSLGSESPSATLEQAVNSATSRGVLVVAASGNSGAGSISYPARYANAMAVGATDQNNNRASFSQYGAGLDIVAPGVNVQSTYPGSTYASLNGTSMATPHVAGAAALVKQKNPSWSNVQIRDHLKNTATSLGSTNLYGSGLVNAEAATR

SEQ ID NO: 58561 - protein, 269 aa, Bacillus lentus
AQSVPWGIRRVQAPAAHNLGLTGSGVKVAVLDTGISTHPDLRIRGGASFVPGEPSTQDGDGHGTHVAGTIAALNNSIGVLGVAPSAELYAVKVLGASGSGSVSSIAQGLEWAGNNGMHVANLSLGSPSPSATLEQAVNSATSRGVLVVAASGNSGAGSISYPARYANAMAVGATDQNNNRASFSQYGAGLDIVAPGVNVQSTYPGSTYASLNGTSMATPHVAGAAALVKQKNPSWSNVRIRNHLKNTATSLGDTNLYGSGLVNAEAATQ

SEQ ID NO: 58562 - protein, 269 aa, Unidentified
AQSVPWGISRVQAPAAHNRGLTGRGVKVAVLDTGISTHPDLNIRGGASFVPGEPSTQDGNGHGTHVAGTIAALNNGIGVLGVAPSAELYAVKVLGASGSGSVSSIAQGLEWAGNNDMHVANLSLGSPSPSATLEQAVNSATSRGVLVVAASGNSGADSISYPARYANAMAVGATDQNNNRADFSQYGAGLDIVAPGVNVQSTYPGSTYASLNGTSMATPHVAGAAALVKQKNPSWSNVRIRNRLKNTATSLGSTNLYGSGLVNAEAATR

SEQ ID NO: 58563 - protein, 269 aa, Unidentified
AQSVPWGISRVQAPAAHNRGLTGRGVKVAVLDTGISTHPDLNIRGGASFVPGEPSTQDGNGHGTHVAGTIAALNNDIGVLGVAPSAELYAVKVLGASGSGSVSSIAQGLEWAGNNDMHVANLSLGSESPSATLEQAVNSATSRGVLVVAASGNSGADSISYPARYANAMAVGATDQNNNRASFSQYGAGLDIVAPGVNVQSTYPGSTYASLNGTSMATPHVAGAAALVKQKNPSWSNVRIRDHLKNTATSLGSTNLYGSGLVNAEAATR

SEQ ID NO: 58564 - protein, 269 aa, Unidentified
AQSVPWGISRVQAPAAHNRGLTGSGVKVAVLDTGISTHPDLNIRGGASFVPGEPSTQDGNGHGTHAAGTIAALDNSIGVLGVAPSAELYAVKVLGASGSGAISSIAQGLEWAGNNGMHVANLSLGSPSPSATLEQAVNSATSRGVLVVAASGNSGADSISYPARYANAMAVGATDQNNNRASFSQYGAGLDIVAPGVNVQSTYPGSTYASLNGTSMATPHVAGAAALVKHKNPSWSNVQIRNHLKNTATSLGSTNLYGSGLVNAVAATR

SEQ ID NO: 58565 - protein, 269 aa, Unidentified
AQSVPWGISRVQAPAAHNRGLTGRGVKVAVLDTGISTHPDLNIRGGASFVPGEPSTQDGNGHGTHVAGTIAALNNDIGVLGVAPSAELYAVKVLGASGSGSVSSIAQGLEWAGNNSMHVANLSLGSESPSATLEQAVNSATSRGVLVVAASGNSGADSISYPARYANAMAVGATDQNNNRASFSQYGAGLDIVAPGVNVQSTYPGSTYASLNGTSMATPHVAGAAALVKQKNPSWSNVRIRNRLKNTATSLGSTNLYGSGLVNAEAATR

SEQ ID NO: 58566 - protein, 269 aa, Unidentified
AQSVPWGISRVQAPAAHNRGLAGRGVKVAVLDSGISTHPDLNIRGGASFVPGEPSTQDGNGHGTHVAGTIAALNNSIGVLGVAPSAELYAVKVLGASGSGSVSSIAQGLEWAGLNRMHVANLSLGSPSPSATLEQAVNSATSRGVLVVAASGNSGEGSISYPARYANAMAVGATDQNNNRADFSQYGAGLDIVAPGVNVQSTYPGSTYASLNGTSMATPHVAGAAALVKQKNPSWSNVQIRNHLKNTATSLGSTNLYGSGLVNAEAATR

SEQ ID NO: 58567 - protein, 269 aa, Unidentified
AQSVPWGISRVQAPAAHNRRLTGRGVKVAVLDTGISTHPDLNIRGGASFVPGEPSTQDGNGHGTHVAGTIAALNNDIGVLGVAPSAELYAVKVLGASGSGSVSSIAQGLEWAGNNDMHVANLSLGSESPSATLEQAVNSATSRGVLVVAASGNSGAGSISYPARYANAMAVGATDQNNNRADFSQYGAGLDIVAPGVNVQSTYPGSTYASLNGTSMATPHVAGAAALVKQKNPSWSNVQIRNRLKNTATSLGSTNLYGSGLVNAEAATR

SEQ ID NO: 58568 - protein, 269 aa, Unidentified
AQSVPWGISRVQAPAAHNRRLTGSGVKVAVLDTGISTHPDLRIRGGASFVPGEPSTQDGNGHGTHVAGTIAALDNNIGVLGVAPRAELYAVKVLGASGSGSVSSIAQGLEWAGNNRMHVANLSLGSPSPSATLEQAVNSATSRGVLVVAASGNSGAGSISYPARYANAMAVGATDQNNNRASFSQYGAGLDIVAPGVNVQSTWPGSTYASLNGTSQATPHVAGAAALVKQKNPSWSNVQIRNHLKNTATSLGSTNLYGSGLVNAEAATR

SEQ ID NO: 58569 - protein, 269 aa, Unidentified
AQSVPWGISRVQAPAAHNRRLTGSGVKVAVLDTGISTHPDLNIRGGASFVPGEPSTQDGNGHGTHVAGTIAALNNGIGVLGVAPSAELYAVKVLGASGSGSVSSIAQGLEWAGNNSMHVANLSLGSESPSATLEQAVNSATSRGVLVVAASGNSGAGSISYPARYANAMAVGATDQNNNRADFSQYGAGLDIVAPGVNVQSTYPGSTYASLNGTSMATPHVAGAAALVKQKNPSWSNVRIRDHLKNTATSLGSTNLYGSGLVNAEAATR

SEQ ID NO: 58570 - protein, 269 aa, Unidentified
AQSVPWGISRVQAPAAHNRRLWGSGVKVAVLDTGISTHPDLRIRGGASFAPGEPSTQDGNGHGTHVAGTIAALNNSIGVLGVAPSAELYAVKVLGASGAGSVSSIAQGLEWAGNNGMHVANLSLGSPSPSATLEQAVNSATSRGVLVVAASGNSGAGSISYPARYANAMAVGATDQNNNRASFSQYGAGLDIVAPGVNVQSTYIQSTYASLNGTSMATPHVAGAAALVKQKNPSWSNVQIRNHLKNTATSLGSTNLYGSGLVNAEAATR

SEQ ID NO: 58571 - protein, 269 aa, Unidentified
AQSVPWGISRVQAPAAHNRKLTGSGVKVAVLDTGISTHPDLWIRGGASFVPGEPSTQDGEGHGTHVAGTIAALNNSIGVLGVAPSAELYAVKVLGASGSGSVSSIAQGLEWAGLNGMHVANLSLGSPSPSATLEQAVNSATSRGVLVVAASGNSGAGSISYPARYANAMAVGATDQNNNRADFSQYGAGLDIVAPGVNVQSTYPGSAYASLNGTSMATPHVAGAAALVKQKNGSWSNVQIRNHLKNTATSLGSTNLYGSGLVNAEAATR

SEQ ID NO: 58572 - protein, 269 aa, Unidentified
AQSVPWGISRVQAPAAHNRGLTGSGVKVAVLDTGISTHPDLNIRGGVSFVPGEPSTQDGNGHGTHVAGTIAALNNSIGVLGVAPSAELYAVKVLGASGSGAISSIAQGLEWAGNNGMHVANLSLGSPSPSATLEQAVNSATSRGVLVVAASGNSGADSISYPARYANAMAVGATDQNNNRASFSQYGAGLDIVAPGVNVQSTYPGSTYASLNGTSMATPHVAGVAALVKHKNPSWSNVRIRNHLKNTATSLGSTNLYGSGLVNAEAATR

SEQ ID NO: 58573 - protein, 269 aa, Unidentified
AQSVPWGISRVQAPAAHNRRLTGRGVKVAVLDTGISTHPDLNIRGGASFVPGEPSTQDGEGHGTHVAGTIAALNNGIGVLGVAPSAELYAVKVLGASGSGSVSSIAQGLEWAGNNDMHVANLSLGSPSPSATLEQAVNSATSRGVLVVAASGNSGAGSISYPARYANAMAVGATDQNNNRADFSQYGAGLDIVAPGVNVQSTYPGSTYASLNGTSMATPHVAGAAALVKQKNPSWSNVRIRNHLKNTATSLGSTNLYGSGLVNAEAATR

SEQ ID NO: 58574 - protein, 269 aa, Unidentified
AQSVPWGISRVQAPAAHNRKLLGSGVKVAVLDTGISTHPDLNIRGGASFVPGEPSTQDGNGHGTHVAGTIAALNNGIGVLGVAPSAELYAVKVLGASGSGSVSSIAQGLEWAGNNSMHVANLSLGSPSPSATLEQAVNSATSRGVLVVAASGNSGADSISYPARYANAMAVGATDQNNNRADFSQYGAGLDIVAPGVNVQSTYPGSTYASLNGTSMATPHVAGAAALVKQKNPSWSNVQIRNRLKNTATSLGSTNLYGSGLVNAEAATR

SEQ ID NO: 58575 - protein, 269 aa, Unidentified
AQSVPWGISRVQAPAAHNRGLTGSGVKVAVLDTGISTHPDLNIRGGASFVPGEPSTQDGNGHGTHVAGTIAALNNNIGVLGVAPSAELYAVKVLSASGNGSVSSIANGLEWAGNNGMHVANLSLGAPSPSATLEQAVNSATSRGVLVVAASGNSGAGSISYPARYANAMAVGATDQNNNRADFSQYGAGLDIVAPGVNVQSTYPGSTYASQNGTSMATPHVAGAAALVKQKNPSWSNVQIRNHLKNTATSLGSTNLYGSGLVNAEAATR

SEQ ID NO: 58576 - protein, 269 aa, Unidentified
AQSRPWGISRVQAPAAHNRGLTGSGVKVAVLDTGISTHPDLRIRGGASFVPGEPSTQDGNGHGTHVAGTIAALNNSIGVLGVAPSAELYAVKVLGASGGGAISSIAQGLEWAGNNGMHVANLSLGSPSPSATLEQAVNSATSRGVLVVAASGNSGAGSISYPARYANAMAVGATDQNNNRASFSQYGAGLDIVAPGVNVQSTYPGSTYASLNGTSMATPHVAGAAVLVKQKNPSWSNVRIRNHLKNTATSLGSTNLYGSGLVNAEAATR

SEQ ID NO: 58577 - protein, 269 aa, Unidentified
AQSVPWGISRVQAPAAHNRRLTGRGVKVAVLDTGISTHPDLNIRGGASFVPGEPSTQDGNGHGTHVAGTIAALNNNIGVLGVAPSAELYAVKVLSASGAGSVSSIANGLEWAGLNGMHVANLSLGSPSPSATLEQAVNSATSRGVLVVAASGNSGAGSISYPARYANAMAVGATDQNNNRASFSQYGAGLDIVAPGVNVQSTYPGSTYASLNGTSMATPHVAGAAALVKQKNPSWSNVQIRNHLKNTATSLGSTNLYGSGLVNAEAATR

SEQ ID NO: 58578 - protein, 269 aa, Unidentified
AQSVPWGISRVQAPAAHNRRLTGSGVKVAVLDTGISTHPDLNIRGGASFVPGEPSTQDGNGHGTHVAGTIAALNNSIGVLGVAPSAELYAVKVLGASGSGSVSSIAQGLEWAGNNRMHVANLSLGSPSPSATLEQAVNSATSRGVLVVAASGNSGADSISYPARYANAMAVGATDQNNNRADFSQYGAGLDIVAPGVNVQSTYPGSTYASLNGTSMATPHVAGAAALVKQKNPSWSNVRIRDRLKNTATSLGSTNLYGSGLVNAEAATR

SEQ ID NO: 58579 - protein, 269 aa, Unidentified
AQSVPWGISRVQAPAAHNRGLTGFGVKVAVLDTGISTHPDLNIRGGASFVPGEPSTQDGNGHGTHVAGTIAALNNSIGVLGVAPSAELYAVKVLGASGGGAISSIAQGLEWAGLNGMHVANLSLGSPSPSATLEQAVNSATSRGVLVVAASGNSGAGSISYPARYANAMAVGATDQNNNRASFSQYGAGLDIVAPGVNVQSTAPGSTYASLNGTSMATPHVAGAAVLVKQKNPSWSNVQIRNHLKNTATSLGSTNLYGSGLVNAEAATR

SEQ ID NO: 58580 - protein, 269 aa, Synthetic construct
AQSVPWGISRVQAPAAHNRGLTGSGVKVAVLDTGISTHPDLNIRGGASFVPGEPSTQDGNGHGTHVAGTIAALNNSIGVLGVAPSAELYAVKVLGASGSGSVSSIAQGLEWAGNNGMHVANLSLGSPSPSATLEQAVNSATSRGVLVVAASGNSGAGSISYPARYANAMAVGATDQNNNRASFSQYGAGLDIVASGVSMQSTYPGESYASLNNQSMATPHVAGAAALVKQKNPSWSNVQIRNHLKNTATSLGSTNLYGSGLVNAEAATR

SEQ ID NO: 58581 - protein, 269 aa, Unidentified
AQSVPWGISRVQAPAAHNRGLTGSGVKVAVLDTGISTHPDLNIRGGASFVPGEPSTQDGEGHGTHVAGTIAALNNDIGVLGVAPSAELYAVKVLGASGSGSVSSIAQGLEWAGNNSMHVANLSLGSESPSATLEQAVNSATSRGVLVVAASGNSGADSISYPARYANAMAVGATDQNNNRADFSQYGAGLDIVAPGVNVQSTYPGSTYASLNGTSMATPHVAGAAALVKQKNPSWSNVRIRNHLKNTATSLGSTNLYGSGLVNAEAATR

SEQ ID NO: 58582 - protein, 269 aa, Unidentified
AQSVPWGISRVQAPAAHNRRLTGRGVKVAVLDTGISTHPDLNIRGGASFVPGEPSTQDGNGHGTHVAGTIAALNNDIGVLGVAPSAELYAVKVLGASGSGSVSSIAQGLEWAGNNSMHVANLSLGSPSPSATLEQAVNSATSRGVLVVAASGNSGADSISYPARYANAMAVGATDQNNNRADFSQYGAGLDIVAPGVNVQSTYPGSTYASLNGTSMATPHVAGAAALVKQKNPSWSNVQIRDHLKNTATSLGSTNLYGSGLVNAEAATR

SEQ ID NO: 58583 - protein, 269 aa, Unidentified
AQSVPWGISRVQAPAAHNRGLTGRGVKVAVLDTGISTHPDLNIRGGASFVPGEPSTQDGEGHGTHVAGTIAALNNGIGVLGVAPSAELYAVKVLGASGSGSVSSIAQGLEWAGNNDMHVANLSLGSESPSATLEQAVNSATSRGVLVVAASGNSGADSISYPARYANAMAVGATDQNNNRADFSQYGAGLDIVAPGVNVQSTYPGSTYASLNGTSMATPHVAGAAALVKQKNPSWSNVQIRNHLKNTATSLGSTNLYGSGLVNAEAATR

SEQ ID NO: 58584 - protein, 269 aa, Unidentified
AQSVPWGISRVQAPAAHRRGLTGRGVKVAVLDTGISTHPDLNIRGGASFVPGEPSTQDGNGHGTHVAGTIAALDNSIGVLGVAPSAELYAVKVLGASGSGSVSSIAQGLEWAGANGMHVANLSLGSPSPSATLEQAVNSATSRGVLVVAASGNSGAGSISYPARYANAMAVGATDQNNNRASFSQYGAGLDIVAPGVNVQSTYPGSAYFSLNGTSMATPHVAGAAALVKQKNPSWSNVQIRNRLKNTATSLGSTNLYGSGLVNAEAATR

SEQ ID NO: 58585 - protein, 269 aa, Unidentified
AQSVPWGISRVQAPAAHNRGLTGSGVKVAVLDTGISTHPDLNIRGGASFVPGEPSTQDGNGHGTHVAGTIAALNNSIGVLGVAPSAELYAVKVLGASGSGAISSIAQGLEWAGNNGMHVANLSLGSPSPSATLEQAVNSATSRGVLVVAASGNSGAESISYPARYANAMAVGATDQNNNRASFSQYGAGLDIVAPGVNVQSTYPGSTYASLNGTSMATPHVAGAAVLVKQKNPSWSNVRIRDRLKNTATSLGSTNLYGSGLVNAEAATR

SEQ ID NO: 58586 - protein, 269 aa, Unidentified
AQSVPWGISRVQAPAAHRRGLTGRGVKVAVLDTGISTHPDLNIRGGASFVPGEPSTQDGNGHGTHVAGTIAALDNSIGVLGVAPSAELYAVKVLGASGAGSVSSIAQGLEWAGANGMHVANLSLGSPSPSATLEQAVNSATSRGVLVVAASGNSGAGSISYPARYANAMAVGATDQNNNRASFSQYGAGLDIVAPGVNVQSTYPGSAYASLNGTSMATPHVAGAAALVKQKNPSWSNVQIRNRLKNTATSLGSTNLYGSGLVNAEAATR

SEQ ID NO: 58587 - protein, 269 aa, Bacillus Lentus
AQVVPWGIRRVQAPAAHNRGLTGSGVKVAVLDTGISTHPDLDIRGGASFVPGEPSTQDGNGHGTHAAGTIAALNNSIGVLGVAPSAELYAVKVLGASGSGSVSSIAQGLEWAGNNGMHVANLSLGSPSPSATLEQAVNSATSRGVLVVAASGNSGAGSISYPARYANAMAVGATDQNNNRASFSQYGPGLDIVAPGVNVQSTYPGSTYASLNGTSMATPHVAGAAALVKQKNPSWSNVRIRNHLKNTATSLGSTDLYGSGLVNAEAATR

SEQ ID NO: 58588 - protein, 269 aa, Unidentified
AQSVPWGISRVQAPAAHRRGLTGRGVKVAVLDTGISTHPDLNIRGGASFVPGEPSTQDGNGHGTHVAGTIAALDNSIGVLGVAPSAELYAVKVLGASGGGSISSIAQGLEWAGNNGMHVANLSLGSPSPSATLEQAVNSATSRGVLVVAASGNSGAGSISYPARYANAMAVGATDQNNNRASFSQYGAGLDIVAPGVNVQSTYPGSTYASLNGTSMATPHVAGAAVLVKQKNPSWSNVQIRNRLKNTATSLGSTNLYGSGLVNAEAATR

SEQ ID NO: 58589 - protein, 269 aa, Unidentified
AQSVPWGISRVQAPAAHNRGLTGRGVKVAVLDTGISTHPDLNIRGGASFVPGEPSTQDGEGHGTHVAGTIAALNNDIGVLGVAPSAELYAVKVLGASGSGSVSSIAQGLEWAGNNDMHVANLSLGSESPSATLEQAVNSATSRGVLVVAASGNSGADSISYPARYANAMAVGATDQNNNRASFSQYGAGLDIVAPGVNVQSTYPGSTYASLNGTSMATPHVAGAAALVKQKNPSWSNVRIRNHLKNTATSLGSTNLYGSGLVNAEAATR

SEQ ID NO: 58590 - protein, 269 aa, Unidentified
AQSVPWGISRVQAPAAHNRGLTGRGVKVAVLDTGISTHPDLNIRGGASFVPGEPSTQDGNGHGTHVAGTIAALNNDIGVLGVAPSAELYAVKVLGASGSGSVSSIAQGLEWAGNNDMHVANLSLGSESPSATLEQAVNSATSRGVLVVAASGNSGAGSISYPARYANAMAVGATDQNNNRADFSQYGAGLDIVAPGVNVQSTYPGSTYASLNGTSMATPHVAGAAALVKQKNPSWSNVRIRDHLKNTATSLGSTNLYGSGLVNAEAATR

SEQ ID NO: 58591 - protein, 269 aa, Unidentified
AQSVPWGISRVQAPAAHNRGLTGSGVKVAVLDTGISTHPDLNIRGGASFVPGEPSTQDGNGHGTHVAGTIAALDNSIGVLGVAPSAELYAVKVLGADGRGAISSIAQGLEWAGNNGMHVANLSLGSPSPSATLEQAVNSATSRGVLVVAASGNSGASSISYPARYANAMAVGATDQNNNRASFSQYGAGLDIVAPGVNVLSTYPGSTYASLNGTSMATPHVAGAAALVKQKNPSWSNVQIRNHLKNTATSLGSTNLYGSGLVNAEAATR

SEQ ID NO: 58592 - protein, 269 aa, Unidentified
AQSVPWGISRVQAPAAHNRRLTGRGVKVAVLDTGISTHPDLRIRGGASFVPGEPSTQDGNGHGTHVAGTIAALNNSIGVLGVAPSAELYAVKVLGASGAGSVSSIAQGLEWAGNNGMHVANLSLGSPSPSATLEQAVNSATSRGVLVVAASGNSGAGSISYPARYANAMAVGATDQNNNRASFSQYGAGLDIVAPGVNVQSTYIQSAYASLNGTSMATPHVAGAAALVKQKNPSWSNVQIRNHLKNTATSLGSTNLYGSGLVNAEAATR

SEQ ID NO: 58593 - protein, 269 aa, Unidentified
AQSVPWGISRVQAPAAHNRGLTGGGVKVAVLDTGISTHPDLNIRGGASFVPGEPSTQDGNGHGTHVAGTIAALDNNIGVLGVAPSAELYAVKVLGASGNGSVSSIAQGLEWAGNNGMHVANLSLGAPSPSATLEQAVNSATSRGVLVVAASGNSGAGSISYPARYANAMAVGATDQNNNRASFSQYGAGLDIVAPGVNVQSTYPGSTYASQSGTSMATPHVAGAAALVKQKNPSWSNVQIRNHLKNTATSLGSTNLYGSGLVNAEAATR

SEQ ID NO: 58594 - protein, 269 aa, Unidentified
AQSVPWGISRVQAPAAHNRRLTGRGVKVAVLDTGISTHPDLNIRGGASFVPGEPSTQDGNGHGTHVAGTIAALNNSIGVLGVAPSAELYAVKVLGASGGGSVSSIAGGLEWAGLNGMHVANLSLGAPSPSATLEQAVNSATSRGVLVVAASGNSGAGSISYPARYANAMAVGATDQNNNRASFSQYGAGLDIVAPGVNVQSTYPGSTYASQNGTSMATPHVAGAAALVKQKNPSWSNVQIRNHLKNTATSLGSTNLYGSGLVNAEAATR

SEQ ID NO: 58595 - protein, 269 aa, Unidentified
AQSVPWGISRVQAPAAHNRRLWGRGVKVAVLDTGISTHPDLNIRGGASFVPGEPSTQDGNGHGTHVAGTIAALNNSIGVLGVAPSAELYAVKVLGASGAGSVSSIAQGLEWAGLNGMHVANLSLGSPSPSATLEQAVNSATSRGVLVVAASGNSGAGSISYPARYANAMAVGATDQNNNRASFSQYGAGLDIVAPGVNVQSTYPQSAYASLNGTSMATPHVAGAAALVKQKNPSWSNVQIRNHLKNTATSLGSTNLYGSGLVNAEAATR

SEQ ID NO: 58596 - protein, 269 aa, Unidentified
AQSVPWGISRVQAPAAHRRGLTGPGVKVAVLDTGISTHPDLNIRGGASFVPGEPSTQDGNGHGTHVAGTIAALNNSIGVLGVAPDAELYAVKVLGASGSGSVSSIAQGLEWAGNNGMHVANLSLGSPSPSATLEQAVNSATSRGVLVVAASGNSGAGSINYPARYANAMAVGATDQNNNRASFSQYGAGLDIVAPGVNVLSTWPGSTYASLNGTSQATPHVAGAAALVKQKNPSWSNVQIRNRLKNTATSLGSTNLYGSGLVNAEAATR

SEQ ID NO: 58597 - protein, 269 aa, Unidentified
AQSVPWGISRVQAPAAHNRKLLGSGVKVAVLDTGISTHPDLNIRGGASFVPGEPSTQDGNGHGTHVAGTIAALNNSIGVLGVAPSAELYAVKVLGASGSGSVSSIAQGLEWAGNNRMHVANLSLGDPSPSATLEQAVNSATSRGVLVVAASGNSGAGSIDYPARYANAMAVGATDQNNNRASFSQYGAGLDIVAPGVNVQSTYPGSAYASENGTSMATPHVAGAAALVKQKNPSWSNVQIRNHLKNTATSLGSTNLYGSGLVNAEAATR

SEQ ID NO: 58598 - protein, 269 aa, Unidentified
AQSVPWGISRVQAPAAHRRGLWGRGVKVAVLDTGISTHPDLNIRGGASFVPGEPSTQDGNGHGTHVAGTIAALDNSIGVLGVAPSAELYAVKVLGASGAGSVSSIAQGLEWAGANGMHVANLSLGSPSPSATLEQAVNSATSRGVLVVAASGNSGAGSISYPARYANAMAVGATDQNNNRASFSQYGAGLDIVAPGVNVQSTYPGSTYASLNGTSMATPHVAGAAALVKQKNPSWSNVQIRNRLKNTATSLGSTNLYGSGLVNAEAATR

SEQ ID NO: 58599 - protein, 269 aa, Unidentified
AQSVPWGISRVQAPAAHNRGLTGRGVKVAVLDTGISTHPDLNIRGGASFVPGEPSTQDGEGHGTHVAGTIAALNNGIGVLGVAPSAELYAVKVLGASGSGSVSSIAQGLEWAGNNDMHVANLSLGSESPSATLEQAVNSATSRGVLVVAASGNSGADSISYPARYANAMAVGATDQNNNRASFSQYGAGLDIVAPGVNVQSTYPGSTYASLNGTSMATPHVAGAAALVKQKNPSWSNVRIRNHLKNTATSLGSTNLYGSGLVNAEAATR

SEQ ID NO: 58600 - protein, 269 aa, Unidentified
AQSVPWGISRVQAPAAHNRGLTGSGVKVAVLDTGISTHPDLNIRGGASFVPGEPSTQDGNGHGTHVAGTIAALNNSIGVLGVAPSAELYAVKVLGADGRGAISSIAQGLEWAGNNGMHVANLSLGSPSPSATLEQAVNSATSRGVLVVAASGNSGASSISYPARYANAMAVGATDQNNNRASFSQYGLGLDIVAPGVNVQSTYPGSTYASLNGTSMATPHVAGAAALVKQKNPSWSNRQIRNHLKNTATSLGSTNLYGSGLVNAEAATR

SEQ ID NO: 58601 - protein, 269 aa, Unidentified
AQSVPWGISRVQAPAAHNRKLTGSGVKVAVLDTGISTHPDLNIRGGASFVPGEPSTQDGEGHGTHVAGTIAALNNSIGVLGVAPSAELYAVKVLGASGQGSVSSIAGGLEWAGLNGMHVANLSLGSPSPSATLEQAVNSATSRGVLVVAASGNSGAGSISYPARYANAMAVGATDQNNNRADFSQYGAGLDIVAPGVNVQSTYPGSTYASQNGTSMATPHVAGAAALVKQKNPSWSNVQIRNHLKNTATSLGSTNLYGSGLVNAEAATR

SEQ ID NO: 58602 - protein, 269 aa, Unidentified
AQSVPWGISRVQAPAAHNRGLRGGGVKVAVLDTGISTHPDLNIRGGASFVPGEPSTQDGNGHGTHVAGTIAALNNSIGVLGVAPSAELYAVKVLGASGNGAISSIAQGLEWAGNNGMHVANLSLGSPSPSATLEQAVNSATSRGVLVVAASGNSGAGSISYPARYANAMAVGATDQNNNRASFSQYGAGLDIVAPGVNVQSTYPGSTYASLNGTSMATPHVAGAAVLVKQKNPSWSNVRIRNHLKNTATSLGSTNLYGSGLVNAEAATR

SEQ ID NO: 58603 - protein, 269 aa, Unidentified
AQSVSWGISRVQAPAAHNRGLTGSGVKVAVLDTGISTHPDLNIRGGASFVPGEPSTQDGNGHGTHVAGTIAALNNSIGVLGVAPSAELYAVKVLGASGGGAISSIAQGLEWAGNNGMHVANLSLGSPSPSATLEQAVNSATSRGVLVVAASGNSGAGSISYPARYANAMAVGATDQNNNRASFSQYGAGLDIVAPGVNVQSTYPGSTYASLNGTSMATPHVAGAAVLVKQKNPSWSNVRIRNRLKNTATSLGSTNLYGSGLVNAEAATR

SEQ ID NO: 58604 - protein, 269 aa, Unidentified
AQSVPWGISRVQAPAAHNRGLAGSGVKVAVLDTGISTHPDLNIRGGASFVPGEPSTQDGNGHGTHVAGTIAALNNSIGVLGVAPSAELYAVKVLGASGGGAISSIAQGLEWAGNNGMHVANLSLGSSSPSATLEQAVNSATSRGVLVVAASGNSGAGSISYPARYANAMAVGATDQNNNRASFSQYGAGLDIVAPGVNVQSTYPGSTYASLNGTSMATPHVAGAAVLVKQKNPSWSNVRIRNHLKNTATSLGSTNLYGSGLVNAEAATR

SEQ ID NO: 58605 - protein, 269 aa, Bacillus lentus
AQAVPWGIRRVQAPAAHNLGLTGSGVKVAVLDTGISTHPDLNIRGGASFVPGEPSTQDGDGHGTHVAGTIAALNNSIGVLGVAPSAELYAVKVLGASGSGSVSSIAQGLEWAGNNGMHVANLSLGSPSPSATLEQAVNSATSRGVLVVAASGNSGAGSISYPARYANAMAVGATDQNNNRASFSQYGPGLDIVAPGVNVQSTYPGSTYASLNGTSMATPHVAGAAALVKQKNPSWSNVRIRNHLKNTATSLGDTNLYGSGLVNAEAATR

SEQ ID NO: 58606 - protein, 269 aa, Unidentified
AQSVPWGISRVQAPAAHNRRLTGSGVKVAVLDTGISTHPDLNIRGGASFVPGEPSTQDGEGHGTHVAGTIAALNNGIGVLGVAPSAELYAVKVLGASGSGSVSSIAQGLEWAGNNDMHVANLSLGSESPSATLEQAVNSATSRGVLVVAASGNSGAGSISYPARYANAMAVGATDQNNNRADFSQYGAGLDIVAPGVNVQSTYPGSTYASLNGTSMATPHVAGAAALVKQKNPSWSNVQIRNRLKNTATSLGSTNLYGSGLVNAEAATR

SEQ ID NO: 58607 - protein, 269 aa, Unidentified
AQSVPWGISRVQAPAAHNRGLTGRGVKVAVLDTGISTHPDLRITGGASFVPGEPSTQDGNGHGTHVAGTIAALNNSIGVLGVAPSAELYAVKVLGASGAGSVSSIAQGLEWAGANGMHVANLSLGSPSPSATLEQAVNSATSRGVLVVAASGNSGAGSISYPARYANAMAVGATDQNNNRASFSQYGAGLDIVAPGVNVQSTYPGSAYASLNGTSMATPHVAGAAALVKQKNPSWSNVQIRNHLKNTATSLGSTNLYGSGLVRAEAATR

SEQ ID NO: 58608 - protein, 269 aa, Unidentified
AQSVPWGISRVQAPAAHNRGLTGSGVKVAVLDTGISTHPDLNIRGGASFVPGEPSTQDGEGHGTHVAGTIAALNNGIGVLGVAPSAELYAVKVLGASGSGSVSSIAQGLEWAGNNSMHVANLSLGSESPSATLEQAVNSATSRGVLVVAASGNSGAGSISYPARYANAMAVGATDQNNNRADFSQYGAGLDIVAPGVNVQSTYPGSTYASLNGTSMATPHVAGAAALVKQKNPSWSNVRIRNRLKNTATSLGSTNLYGSGLVNAEAATR

SEQ ID NO: 58609 - protein, 269 aa, Unidentified
AQSVPWGISRVQAPAAHNRGLAGSGVKVAVLDTGISTHPDLNIRGGASFVPGEPSTQDGNGHGTHVAGTIAALNNSIGVLGVAPSAELYAVKVLGASGGGAISSIAQGLEWAGNNGMHVANLSLGSPSPSATLEQAVNSATSRGVLVVAASGNSGAGSISYPARYANAMAVGATDQNNNRASFSQYGAGLDIVAPGVNVQSTYPGSTYASLNGTSMATPHVAGAAVLVKQKNPSWSNVRIRNHLKNTATSLGSTNLYGSGLVNVEAATR

SEQ ID NO: 58610 - protein, 269 aa, Unidentified
AQSVPWGISRVQAPAAHRRGLTGSGVKVAVLDTGISTHPDLNIRGGASFVPGEPSTQDGNGHGTHVAGTIAALNNSIGVLGVAPDAELYAVKVLGASGGGAISSIAQGLEWAGNNGMHVANLSLGSPSPSATLEQAVNSATSRGVLVVAASGNSGAGSISYPARYANAMAVGATDQNNNRASFSQYGAGLDIVAPGVNVQSTYPGSTYASLNGTSMATPHVAGAAVLVKQKNPSWSNVRIRNHLKNTATSLGSTNLYGSGLVNAEAATR

SEQ ID NO: 58611 - protein, 269 aa, Unidentified
AQSVPWGISRVQAPAAHNRGLRGSGVKVAVLDTGISTHPDLNIRGGASFVPGEPSTQDGNGHGTHVAGTIAALNNSIGVLGVAPSAELYAVKVLGASGNGAISSIAQGLEWAGNNGMHVANLSLGSPSPSATLEQAVNSATSRGVLVVAASGNSGAGSISYPARYANAMAVGATDQNNNRASFSQYGAGLDIVAPGVNVQSTYPGSTYASLNGTSMATPHVAGAAMLVKQKNPSRSNVWIRNHLKNTATSLGSTNLYGSGLVNAEAATR

SEQ ID NO: 58612 - protein, 269 aa, Unidentified
AQSVPWGISRVQAPAAHNRGLRGSGVKVAVLDTGISTHPDLNIRGGASFVPGEPSTQDGNGHGTHVAGTIAALNNSIGVLGVAPSAELYAVKVLGASGGGAISSIAQGLEWAGNNGMHVANLSLGAPSPSATLEQAVNSATSRGVLVVAASGNSGAGSISYPARYANAMAVGATDQNNNRASFSQYGAGLDIVAPGVNVQSTYPGSTYASLNGTSMATPHVAGAAVLVKQKNPSWSNVRIRNHLKNTATSLGSTNLYGSGLVNAEAATR

SEQ ID NO: 58613 - protein, 269 aa, Unidentified
AQSVPWGISRVQAPAAHNRGLTGSGVKVAVLDTGISTHPDLNIRGGASFVPGEPSTQDGNGHGTHVAGTIAALNNSIGVLGVAPSAELYAVKVLGASGAGGVSSIAQGLEWAGNNGMHVANLSLGSPSPSATLEQAVNSATSRGVLVVAASGNSGAESISYPARYANAMAVGATDQNNNRASFSQYGAGLDIVAPGVNVQSTYPGSTYASLNGTSMATPHVAGAAVLVKQKNPSWSNVRIRDRLKNTATSLGSTNLYGSGLVNAEAATR

SEQ ID NO: 58614 - protein, 269 aa, Unidentified
AQSVPWGISRVQAPAAHNRGLTGRGVKVAVLDTGISTHPDLNIRGGASFVPGEPSTQDGEGHGTHVAGTIAALNNDIGVLGVAPSAELYAVKVLGASGSGSVSSIAQGLEWAGNNDMHVANLSLGSPSPSATLEQAVNSATSRGVLVVAASGNSGADSISYPARYANAMAVGATDQNNNRADFSQYGAGLDIVAPGVNVQSTYPGSTYASLNGTSMATPHVAGAAALVKQKNPSWSNVQIRNRLKNTATSLGSTNLYGSGLVNAEAATR

SEQ ID NO: 58615 - protein, 269 aa, Unidentified
AQSVPWGISRVQAPAAHNRRLTGRGVKVAVLDTGISTHPDLNIRGGASFVPGEPSTQDGNGHGTHVAGTIAALNNDIGVLGVAPSAELYAVKVLGASGSGSVSSIAQGLEWAGNNSMHVANLSLGSPSPSATLEQAVNSATSRGVLVVAASGNSGAGSISYPARYANAMAVGATDQNNNRADFSQYGAGLDIVAPGVNVQSTYPGSTYASLNGTSMATPHVAGAAALVKQKNPSWSNVQIRDRLKNTATSLGSTNLYGSGLVNAEAATR

SEQ ID NO: 58616 - protein, 269 aa, Unidentified
AQSVPWGISRVQAPAAHNRGLAGRGVKVAVLDTGISTHPDLNIRGGASFVPGEPSTQDGEGHGTHVAGTIAALNNSIGVLGVAPSAELYAVKVLGASGSGSVSSIAQGLEWAGLNRMHVANLSLGIPSPSATLEQAVNSATSRGVLVVAASGNSGEGSISYPARYANAMAVGATDQNNNRASFSQYGAGLDIVAPGVNVQSTYPGSTYASLNGTSMATPHVAGAAALVKQKNPSWSNVQIRNHLKNTATSLGSTNLYGSGLVNAEAATR

SEQ ID NO: 58617 - protein, 269 aa, Unidentified
AQSVPWGISRVQAPAAHNRKLLGFGVKVAVLDTGISTHPDLNIRGGASFVPGEPSTQDGNGHGTHVAGTIAALNNNIGVLGVAPSAELYAVKVLGASGSGSVSSIAQGLEWAGNNRMHVANLSLGDPSPSATLEQAVNSATSRGVLVVAASGNSGAGSIDYPARYANAMAVGATDQNNNRASFSQYGAGLDIVAPGVNVQSTYPGSTYASLNGTSMATPHVAGAAALVKQKNPSWSNVQIRNHLKNTATSLGSTNLYGSGLVNAEAATR

SEQ ID NO: 58618 - protein, 269 aa, Unidentified
AQSVPWGISRVQAPAAHRRGLTGRGVKVAVLDTGISTHPDLNIRGGASFVPGEPSTQDGNGHGTHVAGTIAALDNSIGVLGVAPSAELYAVKVLGASGSGSVSSIAQGLEWAGNNGMHVANLSLGSPSPSATLEQAVNSATSRGVLVVAASGNSGAGSISYPARYANAMAVGATDQDNNRASFSQYGAGLDLVAPGVNVQSTYPQSTYASLNGTSMATPHVAGAAALVKQKNPSWSNVQIRNRLKNTATSLGSTNLYGSGLVNAEAATR

SEQ ID NO: 58619 - protein, 269 aa, Unidentified
AQSVPWGISRVQAPAAHNRGLTGSGVKVAVLDTGISTHPDLNIRGGASFVPGEPSTQDGNGHGTHVAGTIAALNNGIGVLGVAPSAELYAVKVLGASGSGSVSSIAQGLEWAGNNDMHVANLSLGSESPSATLEQAVNSATSRGVLVVAASGNSGADSISYPARYANAMAVGATDQNNNRADFSQYGAGLDIVAPGVNVQSTYPGSTYASLNGTSMATPHVAGAAALVKQKNPSWSNVQIRNRLKNMATSLGSTNLYGSGLVNAEAATR

SEQ ID NO: 58620 - protein, 269 aa, Unidentified
AQSVPWGISRVQAPAAHRRRLTGRGVKVAVLDTGISTHPDLNIRGGASFVPGEPSTQDGNGHGTHVAGTIAALDNSIGVLGVAPSAELYAVKVLGASGSGSVSSIAQGLEWAGNNGMHVANLSLGSPSPSATLEQAVNSATSRGVLVVAASGNSGAGSISYPARYANAMAVGATDQNNNRASFSQYGAGLDIVAPGVNVQSTYPQSTYFSLNGTSMATPHVAGAAALVKQKNPSWSNVQIRNRLKNTATSLGSTNLYGSGLVNAEAATR

SEQ ID NO: 58621 - protein, 269 aa, Unidentified
AQSVPWGISRVQAPAAHNRRLTGSGVKVAVLDTGISTHPDLNIRGGASFVPGEPSTQDGEGHGTHVAGTIAALNNDIGVLGVAPSAELYAVKVLGASGSGSVSSIAQGLEWAGNNDMHVANLSLGSESPSATLEQAVNSATSRGVLVVAASGNSGAGSISYPARYANAMAVGATDQNNNRADFSQYGAGLDIVAPGVNVQSTYPGSTYASLNGTSMATPHVAGAAALVKQKNPSWSNVQIRNRLKNTATSLGSTNLYGSGLVNAEAATR

SEQ ID NO: 58622 - protein, 269 aa, Unidentified
AQSVPWGISRVQAPAAHNRKLLGSGVKVAVLDTGISTHPDLNIRGGASFVPGEPSTQDGNGHGTHVAGTIAALNNGIGVLGVAPSAELYAVKVLGASGSGSVSSIAQGLEWAGNNDMHVANLSLGSPSPSATLEQAVNSATSRGVLVVAASGNSGADSISYPARYANAMAVGATDQNNNRASFSQYGAGLDIVAPGVNVQSTYPGSTYASLNGTSMATPHVAGAAALVKQKNPSWSNVQIRDRLKNTATSLGSTNLYGSGLVNAEAATR

SEQ ID NO: 58623 - protein, 269 aa, Unidentified
AQSVPWGISRVQAPAAHNRGLTGRGVKVAVLDTGISTHPDLNIRGGASFVPGEPSTQDGNGHGTHVAGTIAALNNGIGVLGVAPSAELYAVKVLGASGSGSVSSIAQGLEWAGNNDMHVANLSLGSESPSATLEQAVNSATSRGVLVVAASGNSGADSISYPARYANAMAVGATDQNNNRADFSQYGAGLDIVAPGVNVQSTYPGSTYASLNGTSMATPHVAGAAALVKQKNPSWSNVQIRDHLKNTATSLGSTNLYGSGLVNAEAATR

SEQ ID NO: 58624 - protein, 269 aa, Unidentified
AQSVPWGISRVQAPAAHNRRLTGSGVKVAVLDTGISTHPDLRIRGGASFVPGEPSTQDGNGHGTHVAGTIAALNNSIGVLGVAPSAELYAVKVLGASGGGSVSSIANGLEWAGLNGMHVANLSLGAPSPSATLEQAVNSATSRGVLVVAASGNSGAGSISYPARYANAMAVGATDQNNNRASFSQYGAGLDIVAPGVNVQSTYPGSTYASQNGTSMATPHVAGAAALVKQKNPSWSNVQIRNHLKNTATSLGSTNLYGSGLVNAEAATR

SEQ ID NO: 58625 - protein, 269 aa, Unidentified
AQSVPWGISRVQAPAAHNRGLTGRGVKVAVLDTGISTHPDLNIRGGASFVPGEPSTQDGEGHGTHVAGTIAALNNDIGVLGVAPSAELYAVKVLGASGSGSVSSIAQGLEWAGNNSMHVANLSLGSPSPSATLEQAVNSATSRGVLVVAASGNSGAGSISYPARYANAMAVGATDQNNNRADFSQYGAGLDIVAPGVNVQSTYPGSTYASLNGTSMATPHVAGAAALVKQKNPSWSNVQIRDRLKNTATSLGSTNLYGSGLVNAEAATR

SEQ ID NO: 58626 - protein, 269 aa, Unidentified
AQSVPWGISRVQAPAAHNRGLTGSGVKVAVLDTGISTHPDLNIRGGASFVPGEPSTQDGNGHGTHVAGTIAALDDNIGVLGVAPRAELYAVKVLGASGSGSVSSIAQGLEWAGNNRMHVANLSLGSPSPSATLEQAVNSATSRGVLVVAASGNSGAGSISYPARYANAMAVGATDQNNNRASFSQYGAGLDIVAPGVNVLSTYPGSAYASLNGTSMATPHVAGAAALVKQKNPSWSNVQIRNHLKNTATSLGSTNLYGSGLVNAEAATR

SEQ ID NO: 58627 - protein, 269 aa, Unidentified
AQSVPWGISRVQAPAAHNRGLTGSGVKVAVLDTGISTHPDLNIRGGASFVPGEPSTQDGNGHGTHVAGTIAALDNSIGVLGVAPSAELYAVKVLGADGRGAISSIAQGLEWAGNNGMHVANLSLGSPSPSATLEQAVNSATSRGVLVVAASGNSGASSISYPARYANAMAVGATDQNNNRASFSQYGAGLDIVAPGVNVQSTYPGSTYASLSGTSMATPHVAGAAALVKQKNPSWSNVQIRNHLKNTATSLGSTNLYGSGLVNAEAATR

SEQ ID NO: 58628 - protein, 269 aa, Unidentified
AQSVPWGISRVQAPAAHNRKLTGSGVKVAVLDTGISTHPDLNIRGGASFVPGEPSTQDGNGHGTHVAGTIAALNNNIGVLGVAPSAELYAVKVLGASGSGSVSSIAQGLEWAGNNRMHVANLSLGSPSPSATLEQAVNSATSRGVLVVAASGNSGAGSIDYPARYANAMAVGATDQNNNRASFSQYGAGLDIVAPGVNVQSTYPGSAYASENGTSMATPHVAGAAALVKQKNPSWSNVQIRNHLKNTATSLGSTNLYGSGLVNAEDATR

SEQ ID NO: 58629 - protein, 269 aa, Unidentified
AQSVPWGISRVQAPAAHNRRLTGSGVKVAVLDTGISTHPDLNIRGGASFVPGEPSTQDGEGHGTHVAGTIAALNNDIGVLGVAPSAELYAVKVLGASGSGSVSSIAQGLEWAGNNSMHVANLSLGSESPSATLEQAVNSATSRGVLVVAASGNSGAGSISYPARYANAMAVGATDQNNNRADFSQYGAGLDIVAPGVNVQSTYPGSTYASLNGTSMATPHVAGAAALVKQKNPSWSNVRIRNHLKNTATSLGSTNLYGSGLVNAEAATR

SEQ ID NO: 58630 - protein, 269 aa, Unidentified
AQSVPWGISRVQAPAAHNRGLTGSGVKVAVLDTGISTHPDLNIRGGASFVPGEPSTQDGNGHGTHAAGTIAALDNSIGVLGVAPSAELYAVKVLGASGSGAISSIAQGLEWAGNNGMHVANLSLGSPSPSATLEQAVNSATSRGVLVVAASGNSGADSISYPARYANAMAVGATDQNNNRASFSQYGAGLDIVAPGVNVQSTYPGSTYASLNGTSMATPHVAGAAALVKHKNPSWSNVLIRNHLKNTATSLGSTNLYGSGLVNAEAATR

SEQ ID NO: 58631 - protein, 269 aa, Unidentified
AQSVPWGISRVQAPAAHNRKLTGGGVKVAVLDTGISTHPDLNIRGGASFVPGEPSTQDGEGHGTHVAGTIAALNNNIGVLGVAPSAELYAVKVLGASGGGSVSSIAQGLEWAGLNGMHVANLSLGSPSPSATLEQAVNSATSRGVLVVAASGNSGAGSISYPARYANAMAVGATDQNNNRASFSQYGAGLDIVAPGVNVQSTYPGSTYASQNGTSMATPHVAGAAALVKQKNPSWSNVQIRNHLKNTATSLGSTNLYGSGLVNAEAATR

SEQ ID NO: 58632 - protein, 269 aa, Unidentified
AQSVPWGISRVQAPAAHNRGLTGSGVKVAVLDTGISTHPDLNIRGGASFVPGEPSTQDGNGHGTHVAGTIAALDNSIGVLGVAPSAELYAVKVLGASGGGAISSIAQGLEWAGNNGMHVANLSLGSPSPSATLEQAVNSATSRGVLVLAASGNSGAGSISYPARYANAMAVGATDQNNNRASFSQYGAGLDIVAPGVNVQSTYPGSTYASLNGTSMATPHVAGAAVLVKQKNPSWSNVRIRNHLKNTATSLGSTNLYGSGLVNAEAATR

SEQ ID NO: 58633 - protein, 269 aa, Unidentified
AQSVPWGISRVQAPAAHRRGLWGRGVKVAVLDTGISTHPDLNIRGGASFVPGEPSTQDGNGHGTHVAGTIAALDNSIGVLGVAPSAELYAVKVLGASGSGSVSSIAQGLEWAGANGMHVANLSLGSPSPSATLEQAVNSATSRGVLVVAASGNSGAGSISYPARYANAMAVGATDQNNNRASFSQYGAGLDIVAPGVNVQSTYPGSTYFSLNGTSMATPHVAGAAALVKQKNPSWSNVQIRNRLKNTATSLGSTNLYGSGLVNAEAATR

SEQ ID NO: 58634 - protein, 269 aa, Unidentified
AQSVPWGISRVQAPAAHNRKLTGGGVKVAVLDTGISTHPDLNIRGGASFVPGEPSTQDGEGHGTHVAGTIAALNNSIGVLGVAPSAELYAVKVLGASGQGSVSSIAGGLEWAGLNGMHVANLSLGSPSPSATLEQAVNSATSRGVLVVAASGNSGAGSISYPARYANAMAVGATDQNNNRADFSQYGAGLDIVAPGVNVQSTYPGSTYASLNGTSMATPHVAGAAALVKQKNPSWSNVQIRNHLKNTATSLGSTNLYGSGLVNAEAATR

SEQ ID NO: 58635 - protein, 269 aa, Unidentified
AQSVPWGISRVQAPAAHNRRLTGRGVKVAVLDTGISTHPDLNIRGGASFVPGEPSTQDGEGHGTHVAGTIAALNNGIGVLGVAPSAELYAVKVLGASGSGSVSSIAQGLEWAGNNSMHVANLSLGSESPSATLEQAVNSATSRGVLVVAASGNSGADSISYPARYANAMAVGATDQNNNRASFSQYGAGLDIVAPGVNVQSTYPGSTYASLNGTSMATPHVAGAAALVKQKNPSWSNVQIRNHLKNTATSLGSTNLYGSGLVNAEAATR

SEQ ID NO: 58636 - protein, 269 aa, Unidentified
AQSVPWGISRVQAPAAHNRGLTGSGVKVAVLDTGISTHPDLNIRGGASFVPGEPSTQDGNGHGTHVAGTIAALNNSIGVLGVAPSAELYAVKVLGADGRGAISSIAQGLEWAGNNGMHVANLSLGSPSPSATLEQAVNSATSRGVLVVAASGNSGASSISYPARYANAMAVGATDQNNNRASFSQYGAGLDIVAPGVNVQSTYPGSTYASLNGTSMATPHVAGAAALVKQKNPSWSNRQIRGHLKNTATSLGSTNLYGSGLVNAEAATR

SEQ ID NO: 58637 - protein, 269 aa, Unidentified
AQSVPWGISRVQAPAAHNRRLTGSGVKVAVLDTGISTHPDLNIRGGASFVPGEPSTQDGNGHGTHVAGTIAALNNSIGVLGVAPSAELYAVKVLGASGGGAISSIAQGLEWAGNNGMHVANLSLGSPSPSATLEQAVNSATSRGVLVVAASGNSGAGSISYPARYANAMAVGATDQNNNRASFSQYGAGLDIVAPGVNVQSTYPGSTYASLNGTSMATPHVAGAAVLVKQKNPSWSNVRIRNHLKNTATSLGSTNLYGSGLVRAEAATR

SEQ ID NO: 58638 - protein, 269 aa, Unidentified
AQSVPWGISRVQAPAAHNRGLTGSGVKVAVLDTGISTHPDLNIRGGASFVPGEPSTQDGNGHGTHVAGTIAALNNSIGVLGVAPSAELYAVKVLGADGRGAISSIAQGLEWAGNNGMHVANLSLGSPSPSATLEQAVNSATSRGVLVVAASGNSGASSISYPARYANAMAVGATDQNNNRASFSQYGLGLDIVAPGVNVQSTYPGSTYASLNGTSMATPHVAGAAALVKQKNPSWSNVQIRGHLKNTATSLGSTNLYGSGLVNAEAATR

SEQ ID NO: 58639 - protein, 269 aa, Unidentified
AQSVPWGISRVQAPAAHRRGLWGRGVKVAVLDTGISTHPDLNIRGGASFVPGEPSTQDGNGHGTHVAGTIAALDNSIGVLGVAPSAELYAVKVLGASGSGSVSSIAQGLEWAGNNGMHVANLSLGSPSPSATLEQAVNSATSRGVLVVAASGNSGAGSISYPARYANAMAVGATDQNNNRASFSQYGAGLDIVAPGVNVQSTYPGSAYFSLNGTSMATPHVAGAAALVKQKNPSWSNVQIRNRLKNTATSLGSTNLYGSGLVNAEAATR

SEQ ID NO: 58640 - protein, 269 aa, Unidentified
AQSVPWGISRVQAPAAHNRGLAGRGVKVAVLDSGISTHPDLNIRGGASFVPGEPSTQDGEGHGTHVAGTIAALNNSIGVLGVAPSAELYAVKVLGASGSGSVSSIAQGLEWAGNNRMHVANLSLGSPSPSATLEQAVNSATSRGVLVVAASGNSGEGSISYPARYANAMAVGATDQNNNRADFSQYGAGLDIVAPGVNVQSTYPGSTYASLNGTSMATPHVAGAAALVKQKNPSWSNVQIRNHLKNTATSLGSTNLYGSGLVNAEAATR

SEQ ID NO: 58641 - protein, 269 aa, Unidentified
AQSVPWGISRVQAPAAHNRRLWARGVKVAVLDTGISTHPDLNIRGGASLVPGEPSTQDGNGHGTHVAGTIAALNNSIGVLGVAPSAELYAVKVLGASGAGSVSSIAQGLEWAGNNGMHVANLSLGSPSPSATLEQAVNSATSRGVLVVAASGNSGAGSISYPARYANAMAVGATDQNNNRASFSQYGAGLDIVAPGVNVQSTYPQSTYASLNGTSMATPHVAGAAALVKQKNPSWSNVQIRNHLKNTATSLGSTNLYGSGLVNAEAATR

SEQ ID NO: 58642 - protein, 269 aa, Unidentified
AQSVPWGISRVQAPAAHNRGLTGRGVKVAVLDTGISTHPDLNIRGGASFVPGEPSTQDGNGHGTHVAGTIAALDNNIGVLGVAPDAELYAVKVLGASGSGSVSSIAQGLEWAGNNRMHVANLSLGSPSPSATLEQAVNSATSRGVLVVAASGNSGAGSISYPARYANAMAVGATDQNNNRASFSQYGAGLDIVAPGVNVQSTWPGSTYASLNGTSQATPHVAGAAALVKQKNPSWSNVQIRNRLKNTATSLGSTNLYGSGLVNAEAATR

SEQ ID NO: 58643 - protein, 269 aa, Unidentified
AQSVPWGISRVQAPAAHNRKLTGSGVKVAVLDTGISTHPDLNIRGGASFVPGEPSTQDGEGHGTHVAGTIAALNNNIGVLGVAPSAELYAVKVLGASGNGSVSSIAQGLEWAGLNGMHVANLSLGAPSPSATLEQAVNSATSRGVLVVAASGNSGAGSISYPARYANAMAVGATDQNNNRASFSQYGAGLDIVAPGVNVQSTYPGSTYASQNGTSMATPHVAGAAALVKQKNPSWSNVQIRNHLKNTATSLGSTNLYGSGLVNAEAATR

SEQ ID NO: 58644 - protein, 269 aa, Unidentified
AQSVPWGISRVQAPAAHNRRLTGSGVKVAVLDTGISTHPDLNIRGGASFVPGEPSTQDGNGHGTHVAGTIAALDNSIGVLGVAPSAELYAVKVLGASGGGAISSIAQGLEWAGNNGMHVANLSLGSPSPSATLEQAVNSATSRGVLVVAASGNSGAGSISYPARYANAMAVGATDQNNNRASFSQYGAGLDIVAPGVNVQSTYPGSTYASLNGTSMATPHVAGAAVLVKQKNPSWSNVRIRNHLKNTATSLGSTNLYGSGLVNAEAATR

SEQ ID NO: 58645 - protein, 269 aa, Unidentified
AQSVPWGISRVQAPAAHNRGLTGSGVKVAVLDTGISTHPDLNIRGGASFVPGEPSTQDGNGHGTHVAGTIAALNNSIGVLGVAPSAELYAVKVLGADGEGAISSIAQGLEWAGNNGMHVANLSLGSPSPSATLEQAVNSATSRGVLVVAASGNSGASSISYPARYANAMAVGATDQNNNRASFSQYGLGLDIVAPGVNVQSTYPGSTYASLNGTSMATPHVAGAAALVKQKNPSWSNPQIRNHLKNTATSLGSTNLYGSGLVNAEAATR

SEQ ID NO: 58646 - protein, 269 aa, Unidentified
AQSVPWGISRVQAPAAHNRGLTGRGVKVAVLDTGISTHPDLNIRGGVSFVPGEPSTQDGNGHGTHVAGTIAALNNGIGVLGVAPSAELYAVKVLGASGSGSVSSIAQGLEWAGNNDMHVANLSLGSPSPSATLEQAVNSATSRGVLVVAASGNSGADSISYPARYANAMAVGATDQNNNRADFSQYGAGLDIVAPGVNVQSTYPGSTYASLNGTSMATPHVAGAAALVKQKNPSWSNVQIRNRLKNTATSLGSTNLYGSGLVNAEAATR

SEQ ID NO: 58647 - protein, 269 aa, Unidentified
AQSVPWGISRVQAPAAHNRGLAGSGVKVAVLDTGISTHPDLNIRGGASFVPGEPSTQDGNGHGTHVAGTIAALNNSIGVLGVAPSAELYAVKVLGASGTGNLGSIAQGLEWAGNNGMHVANLSLGSPSPSATLEQAVNSATSRGVLVVAASGNSGAGSISYPARYANAMAVGATDQNNNRASFSQYGAGLDIVAPGVNVQSTYPGSTYASLNGTSMATPHVAGAAMLVKQKNPSWSNVRIRNHLKNTATSLGSTNLYGSGLVNAEAATR

SEQ ID NO: 58648 - protein, 269 aa, Unidentified
AQSVPWGISRVQAPAAHNRRLTGRGVKVAVLDTGISTHPDLNIRGGASFVPGEPSTQDGNGHGTHVAGTIAALNNNIGVLGVAPSAELYAVKVLAASGNGSVSSIAQGLEWAGNNGMHVANLSLGAPSPSATLEQAVNSATSRGVLVVAASGNSGAGSISYPARYANAMAVGATDQNNNRASFSQYGAGLDIVAPGVNVQSTYPGSTYASQNGTSMATPHVAGAAALVKQKNPSWSNVQIRNHLKNTATSLGSTNLYGSGLVNAEAATR

SEQ ID NO: 58649 - protein, 269 aa, Unidentified
AQSVPWGISRVQAPAAHNRGLTGRGVKVAVLDTGISTHPDLNIRGGASFVPGEPSTQDGNGHGTHVAGTIAALNNGIGVLGVAPSAELYAVKVLGASGSGSVSSIAQGLEWAGNNSMHVANLSLGSESPSATLEQAVNSATSRGVLVVAASGNSGAGSISYPARYANAMAVGATDQNNNRADFSQYGAGLDIVAPGVNVQSTYPGSTYASLNGTSMATPHVAGAAALVKQKNPSWSNVRIRNRLKNTATSLGSTNLYGSGLVNAEAATR

SEQ ID NO: 58650 - protein, 269 aa, Unidentified
AQSVPWGISRVQAPAAHNRGLTGRGVKVAVLDTGISTHPDLNIRGGASFVPGEPSTQDGNGHGTHVAGTIAALNNSIGVLGVAPSAELYAVKVLGASGAGAISSIAQGLEWAGNNGMHVANLSLGSPSPSATLEQAVNSATSRGVLVVAASGNSGAGSISYPARYANAMAVGATDQNNNRADFSQYGAGLDIVAPGVNVQSTYIGSTYASLNGTSSATPHVAGAAVLVKQKNPSWSNVRIRNHLKNTATSLGSTNLYGSGLVNAEAATR

SEQ ID NO: 58651 - protein, 269 aa, Unidentified
AQSVPWGISRVQAPAAHNRGLLGFGVKVAVLDTGISTHPDLNIRGGASFVPGEPSTQDGNGHGTHVAGTIAALNNSIGVLGVAPSAELYAVKVLGASGSGSVSSIAQGLEWAGNNRMHVANLSLGDPSPSATLEQAVNSATSRGVLVVAASGNSGAGSIDYPARYANAMAVGATDQNNNRASFSQYGAGLDIVAPGVNVQSTYPGSAYASENGTSMATPHVAGAAALVKQKNPSWSNVQIRNHLKNTATSLGSTNLYGSGLVNAEAATR

SEQ ID NO: 58652 - protein, 269 aa, Unidentified
AQSVPWGISRVQAPAAHNRRLTGRGVKVAVLDTGISTHPDLNIRGGASFVPGEPSTQDGNGHGTHVAGTIAALNNDIGVLGVAPSAELYAVKVLGASGSGSVSSIAQGLEWAGNNDMHVANLSLGSESPSATLEQAVNSATSRGVLVVAASGNSGAGSISYPARYANAMAVGATDQNNNRASFSQYGAGLDIVAPGVNVQSTYPGSTYASLNGTSMATPHVAGAAALVKQKNPSWSNVRIRNRLKNTATSLGSTNLYGSGLVNAEAATR

SEQ ID NO: 58653 - protein, 269 aa, Unidentified
AQSVPWGISRVQAPAAHNRRLTGRGVKVAVLDTGISTHPDLNIRGGASFVPGEPSTQDGNGHGTHVAGTIAALNNDIGVLGVAPSAELYAVKVLGASGSGSVSSIAQGLEWAGNNSMHVANLSLGSPSPSATLEQAVNSATSRGVLVVAASGNSGADSISYPARYANAMAVGATDQNNNRASFSQYGAGLDIVAPGVNVQSTYPGSTYASLNGTSMATPHVAGAAALVKQKNPSWSNVRIRDHLKNTATSLGSTNLYGSGLVNAEAATR

SEQ ID NO: 58654 - protein, 269 aa, Unidentified
AQSVPWGISRVQAPAAHNRRLTGRGVKVAVLDTGISTHPDLNIRGGASFVPGEPSTQDGNGHGTHVAGTIAALNNSIGVLGVAPSAELYAVKVLAASGQGSVSSIAQGLEWAGLNGMHVANLSLGAPSPSATLEQAVNSATSRGVLVVAASGNSGAGSISYPARYANAMAVGATDQNNNRASFSQYGAGLDIVAPGVNVQSTYPGSTYASQNGTSMATPHVAGAAALVKQKNPSWSNVQIRNHLKNTATSLGSTNLYGSGLVNAEAATR

SEQ ID NO: 58655 - protein, 269 aa, Unidentified
AQSVPWGISRVQAPAAHNRRLTGSGVKVAVLDTGISTHPDLNIRGGASFVPGEPSTQDGEGHGTHVAGTIAALNNGIGVLGVAPSAELYAVKVLGASGSGSVSSIAQGLEWAGNNSMHVANLSLGSPSPSATLEQAVNSATSRGVLVVAASGNSGAGSISYPARYANAMAVGATDQNNNRADFSQYGAGLDIVAPGVNVQSTYPGSTYASLNGTSMATPHVAGAAALVKQKNPSWSNVQIRDRLKNTATSLGSTNLYGSGLVNAEAATR

SEQ ID NO: 58656 - protein, 270 aa, Unidentified
AQSVPWGISRVQAPAAHNRGLTGSGVKVAVLDTGIDSTHPDLNIRGGASFVPGEPSTQDGNGHGTHVAGTIAALDNSIGVLGVAPSAELYAVKVLGASGSGSVSSIAQGLEWAGNNGMDVANLSLGSPSPSATLEQAVNSATSRGVLVVAASGNSGAGSISYPARYANAMAVGATDQNNNRASFSQYGAELDIVAPGVNVQSTYPGSTYASLNGTSMATPHVAGAAALVLQKNPSWSNHQIRHHLKHTATSLGSTNLYGSGLVNAEAATR

SEQ ID NO: 58657 - protein, 269 aa, Unidentified
AQSVPWGISRVQAPAAHNRKLTGSGVKVAVLDTGISTHPDLNIRGGASFVPGEPSTQDGEGHGTHVAGTIAALNNNIGVLGVAPSAELYAVKVLGASGNGSVSSIAQGLEWAGLNGMHVANLSLGAPSPSATLEQAVNSATSRGVLVVAASGNSGAGSISYPARYANAMAVGATDQNNNRADFSQYGAGLDIVAPGVNVQSTYPGSTYASLNGTSMATPHVAGAAALVKQKNPSWSNVQIRNHLKNTATSLGSTNLYGSGLVNAEAATR

SEQ ID NO: 58658 - protein, 269 aa, Unidentified
AQSVPWGISRVQAPAAHNRGLTGSGVKVAVLDTGISTHPDLRIRGGASFVPGEPSTQDGNGHGTHVAGTIAALNNRIGVLGVAPSAELYAVKVLGASGGGAISSIAQGLEWAGNNGMHVANLSLGSPSPSATLEQAVNSATSRGVLVVAASGNSGAGSISYPARYANAMAVGATDQNNNRASFSQYGAGLDIVAPGVNVQSTYPGSTYASLNGTSMATPHVAGAAVLVKQKNPSWSNVRIRNHLKNTATSLGSTNLYGSGLVNAEAATR

SEQ ID NO: 58659 - protein, 269 aa, Unidentified
AQSVPWGISRVQAPAAHNRRLTGRGVKVAVLDTGISTHPDLNIRGGASFVPGEPSTQDGNGHGTHVAGTIAALNNDIGVLGVAPSAELYAVKVLGASGSGSVSSIAQGLEWAGNNSMHVANLSLGSESPSATLEQAVNSATSRGVLVVAASGNSGAGSISYPARYANAMAVGATDQNNNRADFSQYGAGLDIVAPGVNVQSTYPGSTYASLNGTSMATPHVAGAAALVKQKNPSWSNVRIRNHLKNTATSLGSTNLYGSGLVNAEAATR

SEQ ID NO: 58660 - protein, 269 aa, Unidentified
AQSVPWGISRVQAPAAHNRGLTGSGVKVAVLDTGISTHPDLNIRGGASFVPGEPSTQDGNGHGTHVAGTIAALDNSIGVLGVAPSAELYAVKVLGASGAGAISSIAQGLEWAGNNGMHVANLSLGSPSPSATLEQAVNSATSRGVLVVAASGNSGAGSISYPARYANAMAVGATDQNNNRADFSQYGAGLDIVAPGVNVQSTYIGSTYASLNGTSSATPHVAGAAVLVKQKNPSWSNVRIRNHLKNTATSLGSTNLYGSGLVNAEAATR

SEQ ID NO: 58661 - protein, 269 aa, Unidentified
AQSVPWGISRVQAPAAHNRGLTGRGVKVAVLDTGISTHPDLNIRGGASFVPGEPSTQDGNGHGTHVAGTIAALDNSIGVLGVAPSAELYAVKVLGASGAGAISSIAQGLEWAGNNGMHVANLSLGSPSPSATLEQAVNSATSRGVLVVAASGNSGAGSISYPARYANAMAVGATDQNNNRASFSQYGAGLDIVAPGVNVQSTYPGSTYASLNGTSMATPHVAGAAVLVKQKNPSWSNVRIRNHLKNTATSLGSTNLYGSGLVNAEAATR

SEQ ID NO: 58662 - protein, 269 aa, Unidentified
AQSVPWGISRVQAPAAHNRRLTGRGVKVAVLDTGISTHPDLNIRGGASFVPGEPSTQDGNGHGTHVAGTIAALNNDIGVLGVAPSAELYAVKVLGASGSGSVSSIAQGLEWAGNNDMHVANLSLGSESPSATLEQAVNSATSRGVLVVAASGNSGADSISYPARYANAMAVGATDQNNNRADFSQYGAGLDIVAPGVNVQSTYPGSTYASLNGTSMATPHVAGAAALVKQKNPSWSNVQIRNHLKNTATSLGSTNLYGSGLVNAEAATR

SEQ ID NO: 58663 - protein, 269 aa, Unidentified
AQSVPWGISRVQAPAAHNRRLTGRGVKVAVLDTGISTHPDLNIRGGASFVPGEPSTQDGNGHGTHVAGTIAALNNDIGVLGVAPSAELYAVKVLGASGSGSVSSIAQGLEWAGNNSMHVANLSLGSPSPSATLEQAVNSATSRGVLVVAASGNSGAGSISYPARYANAMAVGATDQNNNRADFSQYGAGLDIVAPGVNVQSTYPGSTYASLNGTSMATPHVAGAAALVKQKNPSWSNVRIRDHLKNTATSLGSTNLYGSGLVNAEAATR

SEQ ID NO: 58664 - protein, 269 aa, Unidentified
AQSVPWGISRVQAPAAHNRKLTGGGVKVAVLDTGISTHPDLNIRGGASFVPGEPSTQDGEGHGTHVAGTIAALNNNIGVLGVAPSAELYAVKVLSASGQGSVSSIAQGLEWAGLNGMHVANLSLGSPSPSATLEQAVNSATSRGVLVVAASGNSGAGSISYPARYANAMAVGATDQNNNRADFSQYGAGLDIVAPGVNVQSTYPGSTYASLNGTSSATPHVAGAAALVKQKNPSWSNVQIRNHLKNTATSLGSTNLYGSGLVNAEAATR

SEQ ID NO: 58665 - protein, 269 aa, Unidentified
AQSVPWGISRVQAPAAHRRRLTGRGVKVAVLDTGISTHPDLNIRGGASFVPGEPSTQDGNGHGTHVAGTIAALDNSIGVLGVAPSAELYAVKVLGASGSGSVSSIAQGLEWAGNNGMHVANLSLGSPSPSATLEQAVNSATSRGVLVVAASGNSGAGSISYPARYANAMAVGATDQDNNRASFSQYGAGLDIVAPGVNVQSTYPGSAYASLNGTSMATPHVAGAAALVKQKNPSWSNVQIRNRLKNTATSLGSTNLYGSGLVNAEAATR

SEQ ID NO: 58666 - protein, 269 aa, Unidentified
AQSVPWGISRVQAPAAHNRGLTGRGVKVAVLDTGISTHPDLNIRGGASFVPGEPSTQDGNGHGTHVAGTIAALNNDIGVLGVAPSAELYAVKVLGASGSGSVSSIAQGLEWAGNNSMHVANLSLGSESPSATLEQAVNSATSRGVLVVAASGNSGADSISYPARYANAMAVGATDQNNNRASFSQYGAGLDIVAPGVNVQSTYPGSTYASLNGTSMATPHVAGAAALVKQKNPSWSNVQIRDRLKNTATSLGSTNLYGSGLVNAEAATR

SEQ ID NO: 58667 - protein, 269 aa, Unidentified
AQSVPWGISRVQAPAAHNRRLTGRGVKVAVLDTGISTHPDLRIRGGASFVPGEPSTQDGNGHGTHVAGTIAALNNSIGVLGVAPSAELYAVKVLGASGAGSVSSIAQGLEWAGNNGMHVANLSLGSPSPSATLEQAVNSATSRGVLVVAASGNSGAGSISYPARYANAMAVGATDQNNNRASFSQYGAGLDIVAPGVDVQSTYPQSAYASLNGTSMATPHVAGAAALVKQKNPSWSNVQIRNHLKNTATSLGSTNLYGSGLVNAEAATR

SEQ ID NO: 58668 - protein, 269 aa, Unidentified
AQSVPWGISRVQAPAAHNRGLTGSGVKVAVLDTGISTHPDLNIRGGASFVPGEPSTQDGNGHGTHVAGTIAALDNNIGVLGVAPRAELYAVKVLGASGSGSVSSIAQGLEWAGNNRMHVANLSLGLQSPSATLEQAVNSATSRGVLVVAASGNSGAGSISYPARYANAMAVGATDQNNNRASFSQYGAGLDIVAPGVNVLSTYPGSTYASLNGTSQATPHVAGAAALVKQKNPSWSNVQIRNHLKNTATSLGSTNLYGSGLVNAEAATR

SEQ ID NO: 58669 - protein, 269 aa, Unidentified
AQSVPWGISRVQAPAAHNRGLTGSGVKVAVLDTGISTHPDLNIRGGASFVPGEPSTQDGNGHGTHVAGTIAALNNSIGVLGVAPSAELYAVKVLGASGGGAISSIAQGLEWAGNNGMHVANLSLGSPSPSATLEQAVNSATSRGVLVLAASGNSGAGSISYPARYANAMAVGATDQNNNRASFSQYGAGLDIVAPGVNVQSTYPGSTYASLNGTSMATPHVAGAAVLVKQKNPSWRNVRIRNHLKNTATSLGSTNLYGSGLVNAEAATR

SEQ ID NO: 58670 - protein, 269 aa, Unidentified
AQSVPWGISRVQAPAAHNRRLTGSGVKVAVLDTGISTHPDLNIRGGASFVPGEPSTQDGNGHGTHVAGTIAALNNGIGVLGVAPSAELYAVKVLGASGSGSVSSIAQGLEWAGNNDMHVANLSLGSPSPSATLEQAVNSATSRGVLVVAASGNSGADSISYPARYANAMAVGATDQNNNRADFSQYGAGLDIVAPGVNVQSTYPGSTYASLNGTSMATPHVAGAAALVKQKNPSWSNVRIRDHLKNTATSLGSTNLYGSGLVNAEAATR

SEQ ID NO: 58671 - protein, 269 aa, Unidentified
AQSVPWGISRVQAPAAHNRGLTGSGVKVAVLDTGISTHPDLNIRGGASFVPGEPSTQDGNGHGTHVAGTIAALNNSIGVLGVAPSAELYAVKVLGADGXGAISSIAQGLEWAGNNGMHVANLSLGSPSPSATLEQAVNSATSRGVLVVAASGNXGASSISYPARYANAMAVGATDQNNNRASFSQYGAGLDIVAPGVNVQSTYPGSTYASXNGTSMATPHVAGAAALVKQKNPSWSNVQIRNHLKNTATSLGSTNLYGSGLVNAEAATR

SEQ ID NO: 58672 - protein, 269 aa, Unidentified
AQSVPWGISRVQAPAAHNRGLTGSGVKVAVLDTGISTHPDLNIRGGASFVPGEPSTQDGNGHGTHVAGTIAALNNSIGVLGVAPSAELYAVKVLGADGRGAISSIAQGLEWAGNNGMHVANLSLGSPSPSATLEQAVNSATSRGVLVVAASGNSGASSISYPARYANAMAVGATDQNNNRASFSQYGIGLDIVAPGVNVQSTYPGSTYASLNGTSMATPHVAGAAALVKQKNPSWSNVQIRNHLNNTATSLGSTNLYGSGLVNAEAATR

SEQ ID NO: 58673 - protein, 269 aa, Unidentified
AQSVPWGISRVQAPAAHRRRLTGRGVKVAVLDTGISTHPDLNIRGGASFVPGEPSTQDGNGHGTHVAGTIAALDNSIGVLGVAPSAELYAVKVLGASGSGSVSSIAQGLEWAGNNGMHVANLSLGSPSPSATLEQAVNSATSRGVLVVAASGNSGAGSISYPARYANAMAVGATDQDNNRASFSQYGAGLDIVAPGVNVQSTYPQSTYASLNGTSMATPHVAGAAALVKQKNPSWSNVQIRNRLKNTATSLGSTNLYGSGLVNAEAATR

SEQ ID NO: 58674 - protein, 269 aa, Unidentified
AQSVPWGISRVQAPAAHNRGLTGSGVKVAVLDTGISTHPDLNIRGGASFVPGEPSTQDGEGHGTHVAGTIAALNNGIGVLGVAPSAELYAVKVLGASGSGSVSSIAQGLEWAGNNDMHVANLSLGSPSPSATLEQAVNSATSRGVLVVAASGNSGADSISYPARYANAMAVGATDQNNNRADFSQYGAGLDIVAPGVNVQSTYPGSTYASLNGTSMATPHVAGAAALVKQKNPSWSNVQIRDRLKNTATSLGSTNLYGSGLVNAEAATR

SEQ ID NO: 58675 - protein, 269 aa, Unidentified
AQSVPWGISRVQAPAAHNRRLTGSGVKVAVLDTGISTHPDLNIRGGASFVPGEPSTQDGNGHGTHVAGTIAALNNSIGVLGVAPSAELYAVRVLGASGNGSVSSIAQGLEWAGLNGMHVANLSLGAPSPSATLEQAVNSATSRGVLVVAASGNSGAGSISYPARYANAMAVGATDQNNNRASFSQYGAGLDIVAPGVRVQSTYPGSTYASQNGTSMATPHVAGAAALVKQKNPSWSNVQIRNHLKNTATSLGSTNLYGSGLVNAEAATR

SEQ ID NO: 58676 - protein, 269 aa, Unidentified
AQSVPWGISRVQAPAAHNRGLTGRGVKVAVLDTGISTHPDLNIRGGASFVPGEPSTQDGNGHGTHVAGTIAALNNGIGVLGVAPSAELYAVKVLGASGSGSVSSIAQGLEWAGNNSMHVANLSLGSPSPSATLEQAVNSATSRGVLVVAASGNSGADSISYPARYANAMAVGATDQNNNRADFSQYGAGLDIVAPGVNVQSTYPGSTYASLNGTSMATPHVAGAAALVKQKNPSWSNVRIRNRLKNTATSLGSTNLYGSGLVNAEAATR

SEQ ID NO: 58677 - protein, 269 aa, Unidentified
AQSVPWGISRVQAPAAHNRGLTGSGVKVAVLDTGISTHPDLNIRGGASFVPGEPSTQDGEGHGTHVAGTIAALNNDIGVLGVAPSAELYAVKVLGASGSGSVSSIAQGLEWAGNNDMHVANLSLGSESPSATLEQAVNSATSRGVLVVAASGNSGADSISYPARYANAMAVGATDQNNNRASFSQYGAGLDIVAPGVNVQSTYPGSTYASLNGTSMATPHVAGAAALVKQKNPSWSNVRIRNRLKNTATSLGSTNLYGSGLVNAEAATR

SEQ ID NO: 58678 - protein, 269 aa, Unidentified
AQSVPWGISRVQAPAAHNRKLTGFGVKVAVLDTGISTHPDLNIRGGASFVPGEPSTQDGNGHGTHVAGTIAALNNNIGVLGVAPSAELYAVKVLGASGSGSVSSIAQGLEWAGNNRMHVANLSLGDPSPSATLEQAVNSATSRGVLVVAASGNSGAGSIDYPARYANAMAVGATDQNNNRASFSQYGAGLDIVAPGVNVQSTYPGSAYASLNGTSMATPHVAGAAALVKQKNPSWSNVQIRNHLKNTATSLGSTNLYGSGLVNAEAATR

SEQ ID NO: 58679 - protein, 269 aa, Unidentified
AQSVPWGISRVQAPAAHNRRLTGRGVKVAVLDTGISTHPDLNIRGGASFVPGEPSTQDGEGHGTHVAGTIAALNNDIGVLGVAPSAELYAVKVLGASGSGSVSSIAQGLEWAGNNDMHVANLSLGSPSPSATLEQAVNSATSRGVLVVAASGNSGAGSISYPARYANAMAVGATDQNNNRADFSQYGAGLDIVAPGVNVQSTYPGSTYASLNGTSMATPHVAGAAALVKQKNPSWSNVQIRDHLKNTATSLGSTNLYGSGLVNAEAATR

SEQ ID NO: 58680 - protein, 269 aa, Unidentified
AQSVPWGISRVQAPAAHNRGLTGSGVKVAVLDTGISTHPDLNIRGGASFVPGEPSTQDGEGHGTHVAGTIAALNNGIGVLGVAPSAELYAVKVLGASGSGSVSSIAQGLEWAGNNDMHVANLSLGSESPSATLEQAVNSATSRGVLVVAASGNSGADSISYPARYANAMAVGATDQNNNRADFSQYGAGLDIVAPGVNVQSTYPGSTYASLNGTSMATPHVAGAAALVKQKNPSWSNVQIRNRLKNTATSLGSTNLYGSGLVNAEAATR

SEQ ID NO: 58681 - protein, 269 aa, Unidentified
AQSVPWGISRVQALAAHNRRLTGRGVKVAVLDTGISTHPDLRITGGASFVPGEPSTQDGNGHGTHVAGTIAALNNSIGVLGVAPSAELYAVKVLGASGAGSVSSIAQGLEWAGNNGMHVANLSLGSPSPSATLEQAVNSATSRGVLVVAASGNSGAGSISYPARYANAMAVGATDQNNNRASFSQYGAGLDIVAPGVNVQSTYPGSTYFSLNGTSMATPHVAGAAALVKQKNPSWSNVQIRNHLKNTATSLGSTNLYGSGLVNAEAATR

SEQ ID NO: 58682 - protein, 269 aa, Unidentified
AQSVPWGISRVQAPAAHNRGLTGSGVKVAVLDTGISTHPDLRIRGGASFVPGEPSTQDGNGHGTHVAGTIAALNNSIGVLGVAPSAELYAVKVLGASGGGAISSIAQGLEWAGNNGMHVANLSLGSPSPSATLEQAVNSATSRGVLVVAASGNSGAGSISYPARYANAMAVGATDQNNNRASFSQYGAGLDIVAPGVNVQSTYPGSTYASLNGTSMATPHVAGAAVLVKQKNPSWSNVRIRNRLKNTATSLGSTNLYGSGLVNAEAATR

SEQ ID NO: 58683 - protein, 269 aa, Unidentified
AQSVPWGISRVQAPAAHRRGLTGRGVKVAVLDTGISTHPDLNIRGGASFVPGEPSTQDGNGHGTHVAGTIAALDNSIGVLGVAPSAELYAVKVLGASGAGSVSSIAQGLEWAGANGMHVANLSLGSPSPSATLEQAVNSATSRGVLVVAASGNSGAGSISYPARYANAMAVGATDQDNNRASFSQYGAGLDIVAPGVNVQSTYPGSTYASLNGTSMATPHVAGAAALVKQKNPSWSNVQIRNRLKNTATSLGSTNLYGSGLVNAEAATR

SEQ ID NO: 58684 - protein, 269 aa, Unidentified
AQSVPWGISRVQAPAAHNRRLTGRGVKVAVLDTGISTHPDLNIRGGASFVPGEPSTQDGNGHGTHVAGTIAALNNDIGVLGVAPSAELYAVKVLGASGSGSVSSIAQGLEWAGNNDMHVANLSLGSPSPSATLEQAVNSATSRGVLVVAASGNSGADSISYPARYANAMAVGATDQNNNRADFSQYGAGLDIVAPGVNVQSTYPGSTYASLNGTSMATPHVAGAAALVKQKNPSWSNVQIRDHLKNTATSLGSTNLYGSGLVNAEAATR

SEQ ID NO: 58685 - protein, 269 aa, Unidentified
AQSVPWGISRVQAPAAHNRGLTGSGVKVAVLDTGISTHPDLNIRGGASFVPGEPSTQDGNGHGTHVAGTIAALNNSIGVLGVAPSAELYAVKVLGASGGGAISSIAQGLEWAGLNVMHVANLSLGSPSPSATLEQAVNSATSRGVLVVAASGNSGAGSISYPARYANAMAVGATDQNNNRASFSQYGAGLDIVAPGVNVQSTVPGSTYASLNGTSMATPHVAGAAVLVKQKNPSWSNVQIRNHLKNTATSLGSTNLYGSGLVNAEAATR

SEQ ID NO: 58686 - protein, 269 aa, Unidentified
AQSVPWGISRVQAPAAHNRGLTGRGVKVAVLDTGISTHPDLNIRGGASFVPGEPSTQDGEGHGTHVAGTIAALNNDIGVLGVAPSAELYAVKVLGASGSGSVSSIAQGLEWAGNNSMHVANLSLGSPSPSATLEQAVNSATSRGVLVVAASGNSGAGSISYPARYANAMAVGATDQNNNRADFSQYGAGLDIVAPGVNVQSTYPGSTYASLNGTSMATPHVAGAAALVKQKNPSWSNVRIRDHLKNTATSLGSTNLYGSGLVNAEAATR

SEQ ID NO: 58687 - protein, 269 aa, Unidentified
AQSVPWGISRVQAPAAHNRGLTGSGVKVAVLDTGISTHPDLNIRGGASFVPGEPSTQDGNGHGTHVAGTIAALNNKIGVLGVAPSAELYAVKVLGADGEGAISSIAQGLEWAGNNGMHVANLSLGSPSPSATLEQAVNSATSRGVLVVAASGNSGASSISYPARYANAMAVGATDQNNNRASFSQYGAGLDIVAPGVNVQSTYPGSTYASLNGTSMATPHVAGAAALVKQKNPSWSNRQIRNHLKNTATSLGSTNLYGSGLVNAEAATR

SEQ ID NO: 58688 - protein, 269 aa, Unidentified
AQSVPWGISRVQAPAAHNRRLTGRGVKVAVLDTGISTHPDLNIRGGASFVPGEPSTQDGEGHGTHVAGTIAALNNGIGVLGVAPSAELYAVKVLGASGSGSVSSIAQGLEWAGNNDMHVANLSLGSPSPSATLEQAVNSATSRGVLVVAASGNSGADSISYPARYANAMAVGATDQNNNRASFSQYGAGLDIVAPGVNVQSTYPGSTYASLNGTSMATPHVAGAAALVKQKNPSWSNVQIRNRLKNTATSLGSTNLYGSGLVNAEAATR

SEQ ID NO: 58689 - protein, 269 aa, Unidentified
AQSVPWGISRVQAPAAHNRGLTGRGVKVAVLDTGISTHPDLNIRGGASFVPGEPSTQDGNGHGTHVAGTIAALNNGIGVLGVAPSAELYAVKVLGASGSGSVSSIAQGLEWAGNNDMHVANLSLGSESPSATLEQAVNSATSRGVLVVAASGNSGAGSISYPARYANAMAVGATDQNNNRADFSQYGAGLDIVAPGVNVQSTYPGSTYASLNGTSMATPHVAGAAALVKQKNPSWSNVRIRDHLKNTATSLGSTNLYGSGLVNAEAATR

SEQ ID NO: 58690 - protein, 269 aa, Unidentified
AQSVPWGISRVQAPAAHNRGLTGSGVKVAVLDTGISTHPDLNIRGGASFVPGEPSTQDGNGHGTHVAGTIAALNNSIGVLGVAPSAELYAVKVLGADGEGAISSIAQGLEWAGNNGMHVANLSLGSPSPSATLEQAVNSATSRGVLVVAASGNSGASSISYPARYANAMAVGATDQNNNRASFSQYGLGLDIVAPGVNVQSTYPGSTYASLNGTSMATPHVAGAAALVKQKNPSWSNVQIRGHLKNTATSLGSTNLYGSGLVNAEAATR

SEQ ID NO: 58691 - protein, 269 aa, Unidentified
AQSVPWGISRVQAPAAHRRGLTGSGVKVAVLDTGISTHPDLNIRGGASFVPGEPSTQDGNGHGTHVAGTIAALNNSIGVLGVAPSAELYAVKVLGASGGGAISSIAQGLEWAGNNGMHVANLSLGSPSPSATLEQAVNSATSRGVLVVAASGNSGAGSISYPARYANAMAVGATDQNNNRASFSQYGAGLDIVAPGVNVQSTYPGSTYASLNGTSMATPHVAGAAVLVKQKNPSWSNVRIRNRLKNTATSLGSTNLYGSGLVNAEAATR

SEQ ID NO: 58692 - protein, 269 aa, Unidentified
AQSVPWGISRVQAPAAHNRGLTGSGVKVAVLDTGISTHPDLNIRGGASFVPGEPSTQDGNGHGTHVAGTIAALNNSIGVLGVAPSAELYAVKVLGASGAGSISSIAQGLEWAGNNGMHVANLSLGSPSPSATLEQAVNSATSRGVLVVAASGNSGAESISYPARYANAMAVGATDQNNNRASFSQYGAGLDIVAPGVNVQSTYPGSTYASLNGTSMATPHVAGAAVLVKQKNPSWSNVRIRDRLKNTATSLGSTNLYGSGLVNAEAATR

SEQ ID NO: 58693 - protein, 269 aa, Unidentified
AQSVPWGISRVQAPAAHRRGLTGSGVKVAVLDTGISTHPDLNIRGGASFVPGEPSTQDGNGHGTHVAGTIAALNNSIGVLGVAPSAELYAVKVLGASGGGAISSIAQGLEWAGNNGMHVANLSLGSPSPSATLEQAVNSATSRGVLVLAASGNSGAGSISYPARYANAMAVGATDQNNNRASFSQYGAGLDIVAPGVNVQSTYPGSTYASLNGTSMATPHVAGAAVLVKQKNPSWSNVRIRNHLKNTATSLGSTNLYGSGLVNAEAATR

SEQ ID NO: 58694 - protein, 269 aa, Unidentified
AQSVPWGISRVQAPAAHNRGLTGRGVKVAVLDTGISTHPDLNIRGGASFVPGEPSTQDGEGHGTHVAGTIAALNNGIGVLGVAPSAELYAVKVLGASGSGSVSSIAQGLEWAGNNDMHVANLSLGSESPSATLEQAVNSATSRGVLVVAASGNSGAGSISYPARYANAMAVGATDQNNNRASFSQYGAGLDIVAPGVNVQSTYPGSTYASLNGTSMATPHVAGAAALVKQKNPSWSNVQIRDRLKNTATSLGSTNLYGSGLVNAEAATR

SEQ ID NO: 58695 - protein, 269 aa, Unidentified
AQSVPWGISRVQAPAAHRRGLTGRGVKVAVLDTGISTHPDLNIRGGASFVPGEPSTQDGNGHGTHVAGTIAALDNSIGVLGVAPSAELYAVKVLGASGSGSVSSIAQGLEWAGNNGMHVANLSLGSPSPSATLEQAVNSATSRGVLVVAASGNSGAGSISYPARYANAMAVGATDQDNNRASFSQYGAGLDIVAPGVNVQSTYPGSAYFSLNGTSMATPHVAGAAALVKQKNPSWSNVQIRNRLKNTATSLGSTNLYGSGLVNAEAATR

SEQ ID NO: 58696 - protein, 269 aa, Unidentified
AQSVPWGISRVQAPAAHNRGLTGSGVKVAVLDTGISTHPDLNIRGGASFVPGEPSTQDGNGHGTHVAGVIAALNNSIGVLGVAPSAELYAVKVLGADGRGAISSIAQGLEWAGNNGMHVANLSLGSPSPSATLEQAVNSATSRGVLVVAASGNSGASSISYPARYANAMAVGATDQNNNRASFSQYGAGLDIVAPGVNVQSTYPGSTYASLNGTSMATPHVAGAAALLKQKNPSWSNVQIRNHLKNTATSLGSTNLYGSGLVNAEAATR

SEQ ID NO: 58697 - protein, 269 aa, Unidentified
AQSVPWGISRVQAPAAHNRRLTGSGVKVAVLDTGISTHPDLNIRGGASFVPGEPSTQDGEGHGTHVAGTIAALNNGIGVLGVAPSAELYAVKVLGASGSGSVSSIAQGLEWAGNNDMHVANLSLGSESPSATLEQAVNSATSRGVLVVAASGNSGADSISYPARYANAMAVGATDQNNNRASFSQYGAGLDIVAPGVNVQSTYPGSTYASLNGTSMATPHVAGAAALVKQKNPSWSNVQIRNRLKNTATSLGSTNLYGSGLVNAEAATR

SEQ ID NO: 58698 - protein, 269 aa, Unidentified
AQSVPWGISRVQAPAAHNRKLTGGGVKVAVLDTGISTHPDLNIRGGASFVPGEPSTQDGEGHGTHVAGTIAALNNSIGVLGVAPSAELYAVKVLSASGGGSVSSIAQGLEWAGLNGMHVANLSLGAPSPSATLEQAVNSATSRGVLVVAASGNSGAGSISYPARYANAMAVGATDQNNNRASFSQYGAGLDIVAPGVNVQSTYPGSTYASQNGTSSATPHVAGAAALVKQKNPSWSNVQIRNHLKNTATSLGSTNLYGSGLVNAEAATR

SEQ ID NO: 58699 - protein, 269 aa, Unidentified
AQSVPWGISRVQAPAAHNRRLTGRGVKVAVLDTGISTHPDLNIRGGASFVPGEPSTQDGNGHGTHVAGTIAALNNNIGVLGVAPSAELYAVKVLSASGAGSVSSIAQGLEWAGLNGMHVANLSLGAPSPSATLEQAVNSATSRGVLVVAASGNSGAGSISYPARYANAMAVGATDQNNNRASFSQYGAGLDIVAPGVNVQSTYPGSTYASLNGTSMATPHVAGAAALVKQKNPSWSNVQIRNHLKNTATSLGSTNLYGSGLVNAEAATR

SEQ ID NO: 58700 - protein, 269 aa, Unidentified
AQSVPWGISRVQAPAAHNRGLAGRGVKVAVLDSGISTHPDLNIRGGASFVPGEPSTQDGNGHGTHVAGTIAALNNSIGVLGVAPSAELYAVKVLGASGSGSVSSIAQGLEWAGLNRMHVANLSLGSPSPSATLEQAINSATSRGVLVVAASGNSGAGSISYPARYANAMAVGATDQNNNRADFSQYGAGLDIVAPGVNVQSTYPGSTYASLNGTSMATPHVAGAAALVKQKNPSWSNVQIRNHLKNTATSLGSTNLYGSGLVNAEAATR

SEQ ID NO: 58701 - protein, 269 aa, Unidentified
AQSVPWGISRVQAPAAHNRGLTGSGVKVAVLDTGISTHPDLNIRGGASFVPGEPSTQDGNGHGTHVAGTIAALDNSIGVLGVAPRAELYAVKVLGASGSGSVSSIAQGLEWAGNNGMHVANLSLGLQAPSATLEQAVNSATSRGVLVVAASGNSGAGSISYPARYANAMAVGATDQNNNRADFSQYGAGLDIVAPGVNVQSTYPGSTYASLNGTSMATPHVAGAAALVKQKNPSWSNVQIRRHLKNTATSLGSTNLYGSGLVNAEAATR

SEQ ID NO: 58702 - protein, 269 aa, Unidentified
AQSVPWGISRVQAPAAHNRRLTGRGVKVAVLDTGISTHPDLNIRGGASFVPGEPSTQDGNGHGTHVAGTIAALNNDIGVLGVAPSAELYAVKVLGASGSGSVSSIAQGLEWAGNNSMHVANLSLGSPSPSATLEQAVNSATSRGVLVVAASGNSGADSISYPARYANAMAVGATDQNNNRADFSQYGAGLDIVAPGVNVQSTYPGSTYASLNGTSMATPHVAGAAALVKQKNPSWSNVQIRNRLKNTATSLGSTNLYGSGLVNAEAATR

SEQ ID NO: 58703 - protein, 269 aa, Unidentified
AQSVPWGISRVQAPAAHNRRLTGSGVKVAVLDTGISTHPDLNIRGGASFVPGEPSTQDGNGHGTHVAGTIAALNNDIGVLGVAPSAELYAVKVLGASGSGSVSSIAQGLEWAGNNDMHVANLSLGSESPSATLEQAVNSATSRGVLVVAASGNSGADSISYPARYANAMAVGATDQNNNRADFSQYGAGLDIVAPGVNVQSTYPGSTYASLNGTSMATPHVAGAAALVKQKNPSWSNVRIRNHLKNTATSLGSTNLYGSGLVNAEAATR

SEQ ID NO: 58704 - protein, 269 aa, Unidentified
AQSVPWGISRVQAPAAHNRRLTGRGVKVAVLDTGISTHPDLNIRGGASFVPGEPSTQDGNGHGTHVAGTIAALNNGIGVLGVAPSAELYAVKVLGASGSGSVSSIAQGLEWAGNNDMHVANLSLGSESPSATLEQAVNSATSRGVLVVAASGNSGADSISYPARYANAMAVGATDQNNNRASFSQYGAGLDIVAPGVNVQSTYPGSTYASLNGTSMATPHVAGAAALVKQKNPSWSNVQIRDHLKNTATSLGSTNLYGSGLVNAEAATR

SEQ ID NO: 58705 - protein, 269 aa, Unidentified
AQSVPWGISRVQAPAAHRRGLTGSGVKVAVLDTGISTHPDLNIRGGASFVPGEPSTQDGNGHGTHVAGTIAALDNNIGVLGVAPRAELYAVKVLGASGSGSVSSIAQGLEWAGNNGMHVANLSLGSPSPSATLEQAVNSATSRGVLVVAASGNSGAGSISYPARYANAMAVGATDQNNNRASFSQYGAGLDIVAPGVNVLSTYPGSTYASLSGTSQATPHVAGAAALVKQKNPSWSNVQIRNRLKNTATSLGSTNLYGSGLVNAEAATR

SEQ ID NO: 58706 - protein, 269 aa, Unidentified
AQVVPWGISRVQAPAAHNRGLTGSGVKVAVLDTGISTHPDLNIRGGASFVPGEPSTQDGNGHGTHVAGTIAALDNSIGVLGVAPSAELYAVKVLGASGSGSVSSIAQGLEWAGNNRMHVANLSLGSPSPSATLEQAVNSATSRGVLVVAASGNSGAGQISYPARYANAMAVGATDQNNNRASFSQYGAGLDIVAPGVNVQSTYPPSTYVSLNGTSMATPHVAGAAALVKQKNPSWSNVQIRNHLKNTATSLGSTNQYGSGLVNAEAATR

SEQ ID NO: 58707 - protein, 269 aa, Unidentified
AQSVPWGISRVQAPAAHNRGLAGSGVKVAVLDTGISTHPDLNIRGGASFVPGEPSTQDGNGHGTHVAGTIAALNNSIGVLGVAPSAELYAVKVLSASGQGAISSIAQGLEWAGNNGMHVANLSLGSPSPSATLEQAVNSATSRGVLVVAASGNSGAGSISYPARYANAMAVGATDQNNNRASFSQYGAGLDIVAPGVNVQSTYPGSTYASLNGTSMATPHVAGAAVLVKQKNPSWSNVRIRNHLKNTATSLGSTNLYGSGLVNAEAATR

SEQ ID NO: 58708 - protein, 269 aa, Unidentified
AQSVPWGISRVQAPAAHNRGLTGFGVKVAVLDTGISTHPDLNIRGGASFVPGEPSTQDGNGHGTHVAGTIAALNNSIGVLGVAPSAELYAVKVLGASGGGAISSIAQGLEWAGANGMHVANLSLGSPSPSATLEQAVNSATSRGVLVVAASGNSGAGSISYPARYANAMAVGATDQNNNRASFSQYGAGLDIVAPGVNVQSTVPGSTYASLNGTSMATPHVAGAAVLVKQKNPSWSNVQIRNHLKNTATSLGSTNLYGSGLVNAEAATR

SEQ ID NO: 58709 - protein, 269 aa, Unidentified
AQSVPWGISRVQAPAAHNRGLTGSGVKVAVLDTGISTHPDLNIRGGASFVPGEPSTQDGEGHGTHVAGTIAALNNDIGVLGVAPSAELYAVKVLGASGSGSVSSIAQGLEWAGNNSMHVANLSLGSPSPSATLEQAVNSATSRGVLVVAASGNSGADSISYPARYANAMAVGATDQNNNRASFSQYGAGLDIVAPGVNVQSTYPGSTYASLNGTSMATPHVAGAAALVKQKNPSWSNVRIRDRLKNTATSLGSTNLYGSGLVNAEAATR

SEQ ID NO: 58710 - protein, 269 aa, Unidentified
AQSVPWGISRVQAPAAHNRGLAGRGVKVAVLDSGISTHPDLNIRGGASFVPGEPSTQDGNGHGTHVAGTIAALNNSIGVLGVAPSAELYAVKVLGASGSGSVSSIAQGLEWAGLNRMHVANLSLGIPSPSATLEQAVNSATSRGVLVVAASGNSGAGSISYPARYANAMAVGATDQNNNRADFSQYGAGLDIVAPGVNVQSTYPGSTYASLNGTSMATPHVAGAAALVKQKNPSWSNVQIRNHLKNTATSLGSTNLYGSGLVNAEAATR

SEQ ID NO: 58711 - protein, 269 aa, Unidentified
AQSVPWGISRVQAPAAHNRGLWGRGVKVAVLDTGISTHPDLNITGGASFVPGEPSTQDGNGHGTHVAGTIAALNNSIGVLGVAPSAELYAVKVLGASGAGSVSSIAQGLEWAGLNGMHVANLSLGSPSPSATLEQAVNSATSRGVLVVAASGNSGAGSISYPARYANAMAVGATDQNNNRASFSQYGAGLDIVAPGVNVQSTYIGSAYASLNGTSMATPHVAGAAALVKQKNPSWSNVQIRNHLKNTATSLGSTNLYGSGLVNAEAATR

SEQ ID NO: 58712 - protein, 269 aa, Unidentified
AQSVPWGISRVQAPAAHRRGLTGSGVKVAVLDTGISTHPDLNIRGGASFVPGEPSTQDGNGHGTHVAGTIAALNNSIGVLGVAPRAELYAVKVLGASGSGSVSSIAQGLEWAGNNRMHVANLSLGSPSPSATLEQAVNSATSRGVLVVAASGNSGAGSINYPARYANAMAVGATDQNNNRASFSQYGAGLDIVAPGVDVLSTWPGSTYASLNGTSMATPHVAGAAALVKQKNPSWSNVQIRNHLKNTATSLGSTNLYGSGLVNAEAATR

SEQ ID NO: 58713 - protein, 269 aa, Unidentified
AQSVPWGISRVQAPAAHNRRLTGRGVKVAVLDTGISTHPDLNIRGGASFVPGEPSTQDGNGHGTHVAGTIAALNNGIGVLGVAPSAELYAVKVLGASGSGSVSSIAQGLEWAGNNDMHVANLSLGSPSPSATLEQAVNSATSRGVLVVAASGNSGAGSISYPARYANAMAVGATDQNNNRADFSQYGAGLDIVAPGVNVQSTYPGSTYASLNGTSMATPHVAGAAALVKQKNPSWSNVRIRNRLKNTATSLGSTNLYGSGLVNAEAATR

SEQ ID NO: 58714 - protein, 269 aa, Unidentified
AQSVPWGISRVQAPAAHNRRLTGRGVKVAVLDTGISTHPDLNIRGGASFVPGEPSTQDGNGHGTHVAGTIAALNNDIGVLGVAPSAELYAVKVLGASGSGSVSSIAQGLEWAGNNDMHVANLSLGSPSPSATLEQAVNSATSRGVLVVAASGNSGADSISYPARYANAMAVGATDQNNNRASFSQYGAGLDIVAPGVNVQSTYPGSTYASLNGTSMATPHVAGAAALVKQKNPSWSNVQIRDRLKNTATSLGSTNLYGSGLVNAEAATR

SEQ ID NO: 58715 - protein, 269 aa, Unidentified
AQSVPWGISRVQAPAAHNRGLAGSGVKVAVLDTGISTHPDLNIRGGASFVPGEPSTQDGNGHGTHVAGTIAALNNSIGVLGVAPSAELYAVKVLGAGGTGGISSIAQGLEWAGNNGMHVANLSLGSPSPSATLEQAVNSATSRGVLVVAASGNSGAGSISYPARYANAMAVGATDQNNNRASFSQYGAGLDIVAPGVNVQSTYPGSTYASLNGTSMATPHVAGAAVLVKQKNPSWSNVSIRNHLKNTATSLGSTNLYGSGLVNAEAATR

SEQ ID NO: 58716 - protein, 269 aa, Unidentified
AQSVPWGISRVQAPAAHNRGLTGSGVKVAVLDTGISTHPDLDIRGGASFVPGEPSTQDGNGHGTHVAGTIAALNNSIGVLGVAPSAELYAVKVLGASGGGAISSIAQGLEWAGNNGMHVANLSLGSPSPSATLEQAVNSATSRGVLVVAASGNSGAGSISYPARYANAMAVGATDQNNNRASFSQYGAGLDIVAPGVNVQSTYPGSTYASLNGTSMATPHVAGAAVLVKQKNPSWRNVQIRNHLKNTATSLGSTNLYGSGLVRAEAATR

SEQ ID NO: 58717 - protein, 269 aa, Unidentified
AQSVPWGISRVQAPAAHNRGLTGSGVKVAVLDTGISTHPDLNIRGGASFVPGEPSTQDGEGHGTHVAGTIAALNNGIGVLGVAPSAELYAVKVLGASGSGSVSSIAQGLEWAGNNSMHVANLSLGSESPSATLEQAVNSATSRGVLVVAASGNSGADSISYPARYANAMAVGATDQNNNRASFSQYGAGLDIVAPGVNVQSTYPGSTYASLNGTSMATPHVAGAAALVKQKNPSWSNVRIRNRLKNTATSLGSTNLYGSGLVNAEAATR

SEQ ID NO: 58718 - protein, 269 aa, Unidentified
AQSVPWGISRVQAPAAHNRGLTGRGVKVAVLDTGISTHPDLNIRGGASFVPGEPSTQDGEGHGTHVAGTIAALNNGIGVLGVAPSAELYAVKVLGASGSGSVSSIAQGLEWAGNNDMHVANLSLGSESPSATLEQAVNSATSRGVLVVAASGNSGAGSISYPARYANAMAVGATDQNNNRASFSQYGAGLDIVAPGVNVQSTYPGSTYASLNGTSMATPHVAGAAALVKQKNPSWSNVRIRNRLKNTATSLGSTNLYGSGLVNAEAATR

SEQ ID NO: 58719 - protein, 269 aa, Unidentified
AQSVPWGISRVQAPAAHNRGLTGSGVKVAVLDTGISTHEDLNIRGGASFVPGEPSTQDGNGHGTHVAGTIAALDNSIGVLGVAPRAELYAVKVLGASGSGSVSSIAQGLEWAGNNRMHVANLSLGLQAPSATLEQAVNSATSRGVLVVAASGNSGAGSISYPARYANAMAVGATDQNNNRASFSQYGAGLDIVAPGVNVQSTYPGSTYASLNGTSMATPHVAGAAALVKQKNPSWSNVQIRNHLKNTATSLGSTNLYGSGLVNAEAATR

SEQ ID NO: 58720 - protein, 269 aa, Unidentified
AQSVPWGISRVQAPAAHRRGLTGRGVKVAVLDTGISTHPDINIRGGASFVPGEPSTQDGNGHGTHVAGTIAALNNSIGVLGVAPSAELYAVKVLGASGSGSVSSIAQGLEWAGNNRMHVANLSLGSPSPSATLEQAVNSATSRGVLVVAASGNSGAGSISYPARYANAMAVGATDQNNNRASFSQYGAGLDIVAPGVNVQSTWPGSAYASLNGTSQATPHVAGAAALVKQKNPSWSNVQIRNRLKNTATSLGSTNLYGSGLVNAEAATR

SEQ ID NO: 58721 - protein, 269 aa, Unidentified
AQSVPWGISRVQAPAAHNRKLTGGGVKVAVLDTGISTHPDLNIRGGASFVPGEPSTQDGEGHGTHVAGTIAALNNSIGVLGVAPSAELYAVKVLGASGQGSVSSIANGLEWAGLNGMHVANLSLGAPSPSATLEQAVNSATSRGVLVVAASGNSGAGSISYPARYANAMAVGATDQNNNRASFSQYGAGLDIVAPGVNVQSTYPGSTYASLNGTSMATPHVAGAAALVKQKNPSWSNVQIRNHLKNTATSLGSTNLYGSGLVNAEAATR

SEQ ID NO: 58722 - protein, 269 aa, Unidentified
AQSVPWGISRVQAPAAHNRGLAGRGVKVAVLDSGISTHPDLNIRGGASFVPGEPSTQDGNGHGTHVAGTIAALNNSIGVLGVAPSAELYAVKVLGASGSGSVSSIAQGLEWAGNNRMHVANLSLGSPSPSATLEQAVNSATSRGVLVVAASGNSGEGSIDYPARYANAMAVGATDQNNNRASFSQYGAGLDIVAPGVNVQSTYPGSTYASLNGTSMATPHVAGAAALVKQKNPSWSNVQIRNHLKNTATSLGSTNLYGSGLVNAEAVTR

SEQ ID NO: 58723 - protein, 269 aa, Unidentified
AQSVPWGISRVQAPAAHNRGLTGSGVKVAVLDTGISTHPDLNIRGGASFVPGEPSTQDGEGHGTHVAGTIAALDNSIGVLGVAPSAELYAVKVLGASGAGAISSIAQGLEWAGNNGMHVANLSLGSPSPSATLEQAVNSATSRGVLVVAASGNSGAGSISYPARYANAMAVGATDQNNNRASFSQYGAGLDIVAPGVNVQSTYPGSTYASLNGTSMATPHVAGAAVLVKQKNPSWSNVRIRNHLKNTATSLGSTNLYGSGLVNAEAATR

SEQ ID NO: 58724 - protein, 269 aa, Unidentified
AQSVPWGISRVQAPAAHNRGLTGSGVKVAVLDTGISTHPDLNIRGGASFVPGEPSTQDGNGHGTHVAGTIAALDNNIGVLGVAPRAELYAVKVLGASGSGSVSSIAQGLEWAGNNRMHVANLSLGLQAPSATLEQAVNSATSRGVLVVAASGNSGAGSISYPARYANAMAVGATDQNNNRASFSQYGAGLDIVAPGVNVLSTYPGSTYASLNGTSSATPHVAGAAALVKQKNPSWSNVQIRNHLKNTATSLGSTNLYGSGLVNAEAATR

SEQ ID NO: 58725 - protein, 269 aa, Unidentified
AQSVPWGISRVQAPAAHNRKLLGFGVKVAVLDTGISTHPDLNIRGGASFVPGEPSTQDGNGHGTHVAGTIAALNNSIGVLGVAPSAELYAVKVLGASGSGSVSSIAQGLEWAGNNRMHVANLSLGSPSPSATLEQAVNSATSRGVLVVAASGNSGAGSIDYPARYANAMAVGATDQNNNRASFSQYGAGLDIVAPGVNVQSTYPGSAYASENGTSMATPHVAGAAALVKQKNPSWSNVQIRNHLKNTATSLGSTNLYGSGLVNAEAATR

SEQ ID NO: 58726 - protein, 269 aa, Unidentified
AQSVPWGISRVQAPAAHNRGLTGRGVKVAVLDTGISTHPDLNIRGGASFVPGEPSTQDGNGHGTHVAGTIAALNNDIGVLGVAPSAELYAVKVLGASGSGSVSSIAQGLEWAGNNDMHVANLSLGSPSPSATLEQAVNSATSRGVLVVAASGNSGADSISYPARYANAMAVGATDQNNNRADFSQYGAGLDIVAPGVNVQSTYPGSTYASLNGTSMATPHVAGAAALVKQKNPSWSNVRIRDHLKNTATSLGSTNLYGSGLVNAEAATR

SEQ ID NO: 58727 - protein, 269 aa, Unidentified
AQSVPWGISRVQAPAAHNRGLQGSGVKVAVLDTGISTHPDLNIRGGASFVPGEPSTQDGNGHGTHVAGTIAALNNSIGVLGVAPSAELYAVKVLGAGGAGNISSIAQGLEWAGNNGMHVANLSLGSPSPSATLEQAVNSATSRGVLVVAASGNSGAGSISYPARYANAMAVGATDQNNNRASFSQYGAGLDIVAPGVNVQSTYPGSTYASLNGTSMATPHVAGAAVLVKQKNPSWSNVRIRNHLKNTATSLGSTNLYGSGLVNAEAATR

SEQ ID NO: 58728 - protein, 269 aa, Unidentified
AQSVPWGISRVQAPAAHNRRLTGSGVKVAVLDTGISTHPDLNIRGGASFVPGEPSTQDGNGHGTHVAGTIAALNNDIGVLGVAPSAELYAVKVLGASGSGSVSSIAQGLEWAGNNDMHVANLSLGSPSPSATLEQAVNSATSRGVLVVAASGNSGADSISYPARYANAMAVGATDQNNNRADFSQYGAGLDIVAPGVNVQSTYPGSTYASLNGTSMATPHVAGAAALVKQKNPSWSNVQIRDRLKNTATSLGSTNLYGSGLVNAEAATR

SEQ ID NO: 58729 - protein, 269 aa, Unidentified
AQSVPWGISRVQAPAAHNRGLTGSGVKVAVLDTGISTHPDLNIRGGASFVPGEPSTQDGEGHGTHVAGTIAALNNRIGVLGVAPSAELYAVKVLGASGSGSVSSIAQGLEWAGNNRMHVANLSLGSPSPSATLEQAVNSATSRGVLVVAASGNSGADSISYPARYANAMAVGATDQNNNRADFSQYGAGLDIVAPGVNVQSTYLGSTYASLNGTSMATPHVAGAAALVKQKNPSWSNVQIRDHLKNTATSLGSTNLYGSGLVNAEAATR

SEQ ID NO: 58730 - protein, 269 aa, Unidentified
AQSVPWGISRVQAPAAHNRRLTGRGVKVAVLDTGISTHPDLNIRGGASFVPGEPSTQDGEGHGTHVAGTIAALNNDIGVLGVAPSAELYAVKVLGASGSGSVSSIAQGLEWAGNNSMHVANLSLGSPSPSATLEQAVNSATSRGVLVVAASGNSGADSISYPARYANAMAVGATDQNNNRASFSQYGAGLDIVAPGVNVQSTYPGSTYASLNGTSMATPHVAGAAALVKQKNPSWSNVQIRDHLKNTATSLGSTNLYGSGLVNAEAATR

SEQ ID NO: 58731 - protein, 269 aa, Unidentified
AQSVPWGISRVQAPAAHNRRLTGSGVKVAVLDTGISTHPDLNIRGGASFVPGEPSTQDGNGHGTHVAGTIAALNNGIGVLGVAPSAELYAVKVLGASGSGSVSSIAQGLEWAGNNSMHVANLSLGSESPSATLEQAVNSATSRGVLVVAASGNSGADSISYPARYANAMAVGATDQNNNRADFSQYGAGLDIVAPGVNVQSTYPGSTYASLNGTSMATPHVAGAAALVKQKNPSWSNVQIRNRLKNTATSLGSTNLYGSGLVNAEAATR

SEQ ID NO: 58732 - protein, 269 aa, Unidentified
AQSVPWGISRVQAPAAHNRGLTGRGVKVAVLDTGISTHPDLNIRGGASFVPGEPSTQDGEGHGTHVAGTIAALNNGIGVLGVAPSAELYAVKVLGASGSGSVSSIAQGLEWAGNNDMHVANLSLGSPSPSATLEQAVNSATSRGVLVVAASGNSGAGSISYPARYANAMAVGATDQNNNRASFSQYGAGLDIVAPGVNVQSTYPGSTYASLNGTSMATPHVAGAAALVKQKNPSWSNVRIRDRLKNTATSLGSTNLYGSGLVNAEAATR

SEQ ID NO: 58733 - protein, 269 aa, Unidentified
AQSVPWGISRVQAPAAHNRRLTGRGVKVAVLDTGISTHPDLNIRGGASFVPGEPSTQDGNGHGTHVAGTIAALNNDIGVLGVAPSAELYAVKVLGASGSGSVSSIAQGLEWAGNNDMHVANLSLGSESPSATLEQAVNSATSRGVLVVAASGNSGAGSISYPARYANAMAVGATDQNNNRASFSQYGAGLDIVAPGVNVQSTYPGSTYASLNGTSMATPHVAGAAALVKQKNPSWSNVQIRDRLKNTATSLGSTNLYGSGLVNAEAATR

SEQ ID NO: 58734 - protein, 269 aa, Unidentified
AQSVPWGISRVQAPAAHNRGLQGSGVKVAVLDTGISTHPDLNIRGGASFVPGEPSTQDGNGHGTHVAGTIAALNNSIGVLGVAPSAELYAVKVLGASGGGAISSIAQGLEWAGNNGMHVANLSLGSPSPSATLEQAVNSATSRGVLVVAASGNSGAGSISYPARYANAMAVGATDQNNNRASFSQYGAGLDIVAPGVNVQSTYPGSTYASLNGTSMATPHVAGAAVLVKQKNPSWSNVRIRNHLKNTATSLGSTNLYGSGLVNAEVATR

SEQ ID NO: 58735 - protein, 269 aa, Unidentified
AQSVPWGISRVQAPAAHNRRLTGRGVKVAVLDTGISTHPDLNIRGGASFVPGEPSTQDGNGHGTHVAGTIAALNNNIGVLGVAPSAELYAVKVLAASGQGSVSSIANGLEWAGNNGMHVANLSLGAPSPSATLEQAVNSATSRGVLVVAASGNSGAGSISYPARYANAMAVGATDQNNNRASFSQYGAGLDIVAPGVNVQSTYPGSTYASLNGTSMATPHVAGAAALVKQKNPSWSNVQIRNHLKNTATSLGSTNLYGSGLVNAEAATR

SEQ ID NO: 58736 - protein, 269 aa, Unidentified
AQVVPWGISRVQAPAAHNRGLTGSGVKVAVLDTGISTHPDLNIRGGASFVPGEPSTQDGNGHGTHVSGTIAALNNNIGVLGVAPSAELYAVKVLGASGSGSVSSIAQGLEWAGNNGMHVANISLGSPSPSATLEQAVNSATSRGVLVVAASGNSGAGSISYPARYANAMAVGATDQNNQRASFSQYGAGLDIVAPGVNVQSTYPGSTYASLSGTSMATPHVAGAAALVKQKNPSWSNVQIRNHLKNTATSLGPTNLYGSGLVNAEAATR

SEQ ID NO: 58737 - protein, 269 aa, Unidentified
AQSVPWGISRVQAPAAHNRGLTGSGVKVAVLDTGISTHPDLNIRGGASFVPGEPSTQDGNGHGTHVAGTIAALNNSIGVLGVAPSAELYAVKVLGADGRGAISSIAQGLEWAGNNGMHVANLSLGSPSPSATLEQAVNSATSRGVLVVAASGNSGASSISYPARYANAMAVGATDQNNNRASFSQYGAGLDIVAPGVNVLSTWPGSTYASLNGTSMATPHVAGAAALVKQKNPSWSNVQIRNHLKNTATSLGSTNLYGSGLVNAEAATR

SEQ ID NO: 58738 - protein, 269 aa, Unidentified
AQSVPWGISRVQAPAAHNRGLAGRGVKVAVLDTGISTHPDLNIRGGASFVPGEPSTQDGEGHGTHVAGTIAALNNSIGVLGVAPSAELYAVKVLGASGSGSVSSIAQGLEWAGLNGMHVANLSLGIPSPSATLEQAVNSATSRGVLVVAASGNSGAGSIDYPARYANAMAVGATDQNNNRADFSQYGAGLDIVAPGVNVQSTYPGSTYASLNGTSMATPHVAGAAALVKQKNPSWSNVQIRNHLKNTATSLGSTNLYGSGLVNAEAATR

SEQ ID NO: 58739 - protein, 269 aa, Unidentified
AQSVPWGISRVQAPAAHRRGLTGRGVKVAVLDTGISTHPDLNIRGGASFVPGEPSTQDGNGHGTHVAGTIAALDNSIGVLGVAPSAELYAVKVLGASGSGSVSSIAQGLEWAGNNGMHVANLSLGSPSPSATLEQAVNSATSRGVLVVAASGNSGAGSISYPARYANAMAVGATDQDNNRASFSQYGAGLDIVAPGVNVQSTYPQSTYFSLNGTSMATPHVAGAAALVKQKNPSWSNVQIRNRLKNTATSLGSTNLYGSGLVNAEAATR

SEQ ID NO: 58740 - protein, 269 aa, Unidentified
AQSVPWGISRVQAPAAHNRRLTGRGVKVAVLDTGISTHPDLNIRGGASFVPGEPSTQDGNGHGTHVAGTIAALNNNIGVLGVAPSAELYAVKVLSASGQGSVSSIAQGLEWAGLNGMHVANLSLGAPSPSATLEQAVNSATSRGVLVVAASGNSGAGSISYPARYANAMAVGATDQNNNRASFSQYGAGLDIVAPGVNVQSTYPGSTYASLNGTSMATPHVAGAAALVKQKNPSWSNVQIRNHLKNTATSLGSTNLYGSGLVNAEAATR

SEQ ID NO: 58741 - protein, 269 aa, Unidentified
AQSVPWGISRVQAPAAHNRGLTGSGVKVAVLDTGISTHPDVNIRGGASFVPGEPSTQDGNGHGTHAAGTIAALDNSIGVLGVAPSAELYAVKVLGASGSGAISSIAQGLEWAGNNGMHVANLSLGSPSPSATLEQAVNSATSRGVLVVAASGNSGADSISYPARYANAMAVGATDQNNNRASFSQYGAGLDIVAPGVNVQSTYPGSTYASLNGTSMATPHVAGAAALVKHKNPSWSNVQIRNHLKNTATSLGSTNLYGSGLVNAEAATR

SEQ ID NO: 58742 - protein, 269 aa, Unidentified
AQSVPWGISRVQAPAAHNRGLWGRGVKVAVLDTGISTHPDLNITGGASFVPGEPSTQDGNGHGTHVAGTIAALNNSIGVLGVAPSAELYAVKVLGASGAGSVSSIAQGLEWAGLNGMHVANLSLGSPSPSATLEQAVNSATSRGVLVVAASGNSGAGSISYPARYANAMAVGATDQNNNRASFSQYGAGLDIVAPGVNVQSTYIQSTYASLNGTSMATPHVAGAAALVKQKNPSWSNVQIRNHLKNTATSLGSTNLYGSGLVNAEAATR

SEQ ID NO: 58743 - protein, 269 aa, Unidentified
AQSVPWGISRVQAPAAHNRRLTGSGVKVAVLDTGISTHPDLRITGGASFVPGEPSTQDGNGHGTHVAGTIAALNNSIGVLGVAPSAELYAVKVLGASGAGSVSSIAQGLEWAGNNGMHVANLSLGSPSPSATLEQAVNSATSRGVLVVAASGNSGAGSISYPARYANAMAVGATDQNNNRASFSQYGAGLDIVAPGVNVQSTYIQSAYASLNGTSMATPHVAGAAALVKQKNPSWSNVQIRNHLKNTATSLGSTNLYGSGLVNAEAATR

SEQ ID NO: 58744 - protein, 269 aa, Unidentified
AQSVPWGISRVQAPAAHNRGLAGGGVKVAVLDTGISTHPDLNIRGGASFVPGEPSTQDGNGHGTHVAGTIAALNNSIGVLGVAPSAELYAVKVLGASGGGAISSIAQGLEWAGNNGMHVANLSLGSPSPSATLEQAVNSATSRGVLVVAASGNSGAGSISYPARYANAMAVGATDQNNNRASFSQYGAGLDIVAPGVNVQSTYPGSTYASLNGTSMATPHVAGAAVLVKQKNPSWSNVRIRNHLKNTATSLGSTNLYGSGLVNAEAATR

SEQ ID NO: 58745 - protein, 269 aa, Unidentified
AQSVPWGISRVQAPAAHNRRLWGSGVKVAVLDTGISTHPDLRITGGASFVPGEPSTQDGNGHGTHVAGTIAALNNSIGVLGVAPSAELYAVKVLGASGAGSVSSIAQGLEWAGLNGMHVANLSLGSPSPSATLEQAVNSATSRGVLVVAASGNSGAGSISYPARYANAMAVGATDQNNNRASFSQYGAGLDIVAPGVNVQSTYIGSTYASLNGTSMATPHVAGAAALVKQKNPSWSNVQIRNHLKNTATSLGSTNLYGSGLVNAEAATR

SEQ ID NO: 58746 - protein, 269 aa, Unidentified
AQSVPWGISRVQAPAAHNRGLTGSGVKVAVLDTGISTHPDLNIRGGASFVPGEPSTQDGNGHGTHVAGTIAALDNSIGVLGVAPSAELYAVKVLGASGSGAISSIAQGLEWAGNNGMHVANLSLGSPSPSATLEQAVNSATSRGVLVVAASGNSGAGSISYPARYANAMAVGATDQNNNRASFSQYGAGLDIVAPGVNVQSTYPGPTYASLNGTSMATPHVAGAAALVKLKNPSWSSVQIRNHLKNTATSLGSTNLYGSGLVNAVAATR

SEQ ID NO: 58747 - protein, 269 aa, Unidentified
AQSVPWGISRVQAPAAHNRGLTGSGVKVAVLDTGISTHPDLNIRGGASFVPGEPSTQDGNGHGTHVAGTIAALNNGIGVLGVAPSAELYAVKVLGASGSGSVSSIAQGLEWAGNNSMHVANLSLGSESPSATLEQAVNSATSRGVLVVAASGNSGADSISYPARYANAMAVGATDQNNNRADFSQYGAGLDIVAPGVNVQSTYPGSTYASLNGTSMATPHVAGAAALVKQKNPSWSNVRIRNRLKNTATSLGSTNLYGSGLVNAEAATR

SEQ ID NO: 58748 - protein, 269 aa, Unidentified
AQSVPWGISRVQAPAAHNRRLTGSGVKVAVLDTGISTHPDLRIRGGASFVPGEPSTQDGNGHGTHVAGTIAALNNSIGVLGVAPSAELYAVKVLAASGGGSVSSIANGLEWAGLNGMHVANLSLGAPSPSATLEQAVNSATSRGVLVVAASGNSGAGSISYPARYANAMAVGATDQNNNRASFSQYGAGLDIVAPGVNVQSTYPGSTYASLNGTSMATPHVAGAAALVKQKNPSWSNVQIRNHLKNTATSLGSTNLYGSGLVNAEAATR

SEQ ID NO: 58749 - protein, 269 aa, Unidentified
AQSVPWGISRVQAPAAHNRKLLGFGVKVAVLDTGISTHPDLNIRGGASFVPGEPSTQDGNGHGTHVAGTIAALNNSIGVLGVAPSAELYAVKVLGASGSGSVSSIAQGLEWAGNNRMHVANLSLGDPSPSATLEQAVNSATSRGVLVVAASGNSGAGSIDYPARYANAMAVGATDQNNNRASFSQYGAGLDIVAPGVNVQSTYPGSAYASLNGTSMATPHVAGAAALVKQKNPSWSNVQIRNHLKNTATSLGSTNLYGSGLVNAEAATR

SEQ ID NO: 58750 - protein, 269 aa, Unidentified
AQSVPWGISRVQAPAAHNRGLTGSGVKVAVLDTGISTHPDLNIRGGASFVPGEPSTQDGNGHGTHVAGTIAALNNDIGVLGVAPSAELYAVKVLGASGSGSVSSIAQGLEWAGNNSMHVANLSLGSESPSATLEQAVNSATSRGVLVVAASGNSGADSISYPARYANAMAVGATDQNNNRADFSQYGAGLDIVAPGVNVQSTYPGSTYASLNGTSMATPHVAGAAALVKQKNPSWSNVRIRNRLKNTATSLGSTNLYGSGLVNAEAATR

SEQ ID NO: 58751 - protein, 269 aa, Unidentified
AQSVPWGISRVQAPAAHNRRLTGRGVKVAVLDTGISTHPDLRITGGASFVPGEPSTQDGNGHGTHVAGTIAALNNSIGVLGVAPSAELYAVKVLGASGAGSVSSIAQGLEWAGNNGMHVANLSLGSPSPSATLEQAVNSATSRGVLVVAASGNSGAGSISYPARYANAMAVGATDQNNNRASFSQYGAGLDIVAPGVNVQSTYPQSAYASLNGTSMATPHVAGAAALVKQKNPSWSNVQIRNHLKNTATSLGSTNLYGSGLVNAEAATR

SEQ ID NO: 58752 - protein, 269 aa, Unidentified
AQSVPWGISRVQAPAAHNRGLTGSGVKVAVLDTGISTHPDLNIRGGASFVPGEPSTQDGNGHGTHVAGTIAALNNRIGVLGVAPSAELYAVKVLGASGGGAISSIAQGLEWAGNNGMHVANLSLGSPSPSATLEQAVNSATSRGVLVVAASGNSGAGSISYPARYANAMAVGATDQNNNRASFSQYGAGLDIVAPGVNVQSTYPGSTYASENGTSMATPHVAGAAVLVKQKNPSWSNVRIRNHLKNTATSLGSTNLYGSGLVNAEAATR

SEQ ID NO: 58753 - protein, 269 aa, Unidentified
AQSVPWGISRVQAPAAHNRGLTGRGVKVAVLDTGISTHPDLNIRGGASFVPGEPSTQDGNGHGTHVAGTIAALNNDIGVLGVAPSAELYAVKVLGASGSGSVSSIAQGLEWAGNNSMHVANLSLGSPSPSATLEQAVNSATSRGVLVVAASGNSGADSISYPARYANAMAVGATDQNNNRADFSQYGAGLDIVAPGVNVQSTYPGSTYASLNGTSMATPHVAGAAALVKQKNPSWSNVRIRDHLKNTATSLGSTNLYGSGLVNAEAATR

SEQ ID NO: 58754 - protein, 269 aa, Unidentified
AQSVPWGISRVQAPAAHRRRLWGRGVKVAVLDTGISTHPDLNIRGGASFVPGEPSTQDGNGHGTHVAGTIAALDNSIGVLGVAPSAELYAVKVLGASGSGSVSSIAQGLEWAGANGMHVANLSLGSPSPSATLEQAVNSATSRGVLVVAASGNSGAGSISYPARYANAMAVGATDQNNNRASFSQYGAGLDIVAPGVNVQSTYPGSTYASLNGTSMATPHVAGAAALVKQKNPSWSNVQIRNRLKNTATSLGSTNLYGSGLVNAEAATR

SEQ ID NO: 58755 - protein, 269 aa, Unidentified
AQSVPWGISRVQAPAAHRRGLTGSGVKVAVLDTGISTHPDLNIRGGASFVPGEPSTQDGNGHGTHVAGTIAALNNNIGVLGVAPSAELYAVKVLGASGSGSVSSIAQGLEWAGNNRMHVANLSLGSPSPSATLEQAVNSATSRGVLVVAASGNSGAGSISYPARYANAMAVGATDQNNNRASFSQYGAGLDIVAPGVNVQSTWPGSAYASLNGTSQATPHVAGAAALVKQKNPSWSNVQIRNRLKNTATSLGSTNLYGSGLVNPEAATR

SEQ ID NO: 58756 - protein, 269 aa, Unidentified
AQSVPWGISRVQAPAAHNRGLTGSGVKVAVLDTGISTHPDLNIRGGASFVPGEPSTQDGNGHGTHAAGTIAALDNSIGVLGVAPSAELYAVKVLGASGSGAISSIAQGLEWAGNNGMHVANLSLGSPSPSATLEQAVNSATSRGVLVVAASGNSGADSISYPARYANAMAVGATDQNNNRASFSQYGAGLDIVAPGVNVQSTYPGSTYASLNGTSMATPHVAGAAALVKHKNPSWSIVQIRNHLKNTATSLGSTNLYGSGLVNAEAATR

SEQ ID NO: 58757 - protein, 269 aa, Unidentified
AQSVPWGISRVQAPAAHNRGLTGRGVKVAVLDTGISTHPDLNIRGGASFVPGEPSTQDGNGHGTHVAGTIAALNNNIGVLGVAPRAELYAVKVLGASGSGSVSSIAQGLEWAGNNGMHVANLSLGSPSPSATLEQAVNSATSRGVLVVAASGNSGAGSIDYPARYANAMAVGATDQNNNRASFSQYGAGLDIVAPGVNVLSTWPGSTYASLNGTSMATPHVAGAAALVKQKNPSWSNVQIRNRLKNTATSLGSTNLYGSGLVNAEAATR

SEQ ID NO: 58758 - protein, 269 aa, Unidentified
AQIVPWGISRVQAPAAHNRGLTGSGVKVAVLDTGISTHPDLYIRGGASFVPGEPSTQDGNGHGTHVAGTIAALNNSIGVDGVAPSAELYAVKVLGASGSGSVSSIAQGLEWAGNNGMHVANLSLSSPSPSATLEQAVNSATSRGVLVVAASGNSGAGSISYPARYANAMAVGATDQNNNRASFSQYGAGLDIVAPGVNVQSTYPGSTYAYKNGTSMATPHVAGAAALVKQKNPSWSNVQIRNHLKNTATPLGSTNLYGSGLVNAEAATR

SEQ ID NO: 58759 - protein, 269 aa, Unidentified
AQVVPWGISRVQAPAAHNRGLTGSGVKVAVLDTGISTHPDLNIRGGASFVPGEPSTQDGNGHGTHVAGTIAALNNNIGVLGVAPSAELYAVKVLGASGSGSVSSIAQGLEWAGNNGMHVANISLGSPSPSATLEQAVNSATSRGVLVVAASGNSGAGSIQYPARYANAMAVGATDQNNQRASFSQYGAGLDIVAPGVNVQSTYPGSTYASLSGTSMATPHVAGAAALVKQKNPSWSNVQIRNHLKNTATSLGPTNLYGSGLVNAEAATR

SEQ ID NO: 58760 - protein, 269 aa, Unidentified
AQSVPWGISRVQAPAAHNRGLTGRGVKVAVLDTGISTHPDLNIRGGASFVPGEPSTQDGNGHGTHVAGTIAALNNSIGVLGVAPSAELYAVKVLGASGSGSVSSIAQGLEWAGLNRMHVANLSLGIPSPSATLEQAVNSATSRGVLVVAASGNSGEGSISYPARYANAMAVGATDQNNNRADFSQYGAGLDIIAPGVNVQSTYPGSTYASLNGTSMATPHVAGAAALVKQKNPSWSNVQIRNHLKNTATSLGSTNLYGSGLVNAEAATR

SEQ ID NO: 58761 - protein, 269 aa, Unidentified
AQSVPWGISRVQAPAAHNRGLTGSGVKVAVLDTGISTHPDLNIRGGASFVPGEPSTQDGNGHGTHVAGTIAALDNSIGVLGVAPRAELYAVKVLGASGSGSVSSIAQGLEWAGNNRMHVANLSLGLQAPSATLEQAVNSATSRGVLVVAASGNSGAGSISYPARYANAMAVGATDQNNNRASFSQYGAGLDIVAPGVNVLSTYPGSTYASLNGTSMATPHVAGAAALVKQKNPSWSNVQIRNHLKNTATSLGSTNLYGSGLVNAEAATR

SEQ ID NO: 58762 - protein, 269 aa, Unidentified
AQSVPWGISRVQAPAAHRRGLTGRGVKVAVLDTGISTHPDLNIRGGASFVPGEPSTQDGNGHGTHVAGTIAALDNNIGVLGVAPSAELYAVKVLGASGSGSVSSIAQGLEWAGNNGMHVANLSLGLQAPSATLEQAVNSATSRGVLVVAASGNSGAGSISYPARYANAMAVGATDQNNNRASFSQYGAGLDIVAPGVNVQSTYPGSTYASLNGTSMATPHVAGAAALVKQKNPSWSNVQIRNHLKNTATSLGSTNLYGSGLVNAEAATR

SEQ ID NO: 58763 - protein, 269 aa, Unidentified
AQVVPWGISRVQAPAAHNRGLTGSGVKVAVLDTGISTHPDLNIRGGASFVPGEPSTQDGNGHGTHVAGTIAALNNNIGVLGVAPSAELYAVKVLGASGSGSVSSIAQGLEWAGNNGMHVANLSLGSPSPSATLEQAVNSATSRGVLVVAASGNSGAGSIQYPARYANAMAVGATDQNNQRASFSQYGAGLDIVAPGVNVQSTYIGSTYASLSGTSMATPHVAGAAALVKQKNPSWSNVQIRNHLKNTATSLGPTNLYGSGLVNAEAATR

SEQ ID NO: 58764 - protein, 269 aa, Unidentified
AQSVPWGISRVQAPAAHNRGLTGSGVKVAVLDTGISTHPDLNIRGGASFVPGEPSTQDGNGHGTHVAGTIAALDNSIGVLGVAPSAELYAVKVLGADGRGAISSIAQGLEWAGNNGMHVANLSLGSPSPSATLEQAVNSATSRGVLVVAASGNSGASSISYPARYANAMAVGATDQNNNRASFSQYGAGLDIVAPGVNVQSTWPGSTYASLNGTSMATPHVAGAAALVKQKNPSWSNVQIRNHLKNTATSLGSTNLYGSGLVNAEAATR

SEQ ID NO: 58765 - protein, 269 aa, Unidentified
AQSVPWGISRVQAPAAHRRGLTGRGVKVAVLDTGISTHPDLNIRGGASFVPGEPSTQDGNGHGTHVAGTIAALNNNIGVLGVAPSAELYAVKVLGASGSGSVSSIAQGLEWAGNNGMHVANLSLGSPSPSATLEQAVNSATSRGVLVVAASGNSGAGSISYPARYANAMAVGATDQNNNRASFSQYGAGLDIVAPGVNVLSTWPGSAYASLNGTSQATPHVAGAAALVKQKNPSWSNVQIRNRLKNTATSLGSTNLYGSGLVNAEAATR

SEQ ID NO: 58766 - protein, 269 aa, Unidentified
AQSVPWGVSRVQAPAAHNRGLTGSGVKVAVLDTGISTHEDLNIRGGASFVPGEPSTQDGNGHGTHVAGTIAALDNSIGVLGVAPSAELYAVKVLGASGSGSVSSIAQGLEWAGNNRMHVANLSLGSPSPSATLEQAVNSATSRGVLVVAASGNSGAGSISYPARYANAMAVGATDQNNNRASFSQYGAGLDIVAPGVNVQSTYIGSTYKSLNGTSMATPHVAGAAALVKQKNPSWSNVQIRNHLKNTATSLGSTILYGSGLVNAEAATR

SEQ ID NO: 58767 - protein, 269 aa, Unidentified
AQSVPWGISRVQAPAAHNRGLAGSGVKVAVLDTGISTHPDLNIRGGASFVPGEPSTQDGNGHGTHVAGTIAALNNSIGVLGVAPSAELYAVKVLGASGGGNLSSIAQGLEWAGNNGMHVANLSLGSPSPSATLEQAVNSATSRGVLVVAASGNSGAGSISYPARYANAMAVGATDQNNNRASFSQYGAGLDIVAPGVNVQSTYPSSTYASLNGTSMATPHVAGAATLVKQKNPSWSNVRIRNHLKNTATSLGSTNLYGSGLVNAEAATR

SEQ ID NO: 58768 - protein, 269 aa, Unidentified
AQSVPWGISRVQAPAAHNRGLTGSGVKVAVLDTGISTHPDLNITGGASFVPGEPSTQDGNGHGTHVAGTIAALNNSIGVLGVAPSAELYAVKVLGASGAGSVSSVARGLEWAGNNGMHVANLSLGSPSPSATLEQAVNSATSRGVLVVAASGNSGAGSISYPARYANAMAVGATDQNNNRASFSQYGAGLDIVAPGVNVQSTYIQSAYASLNGTSMATPHVAGAAALVKQKNPSWSNVQIRNHLKNTATSLGSTNLYGSGLVNAEAATR

SEQ ID NO: 58769 - protein, 269 aa, Unidentified
AQSVPWGISRVQAPAAHNRGLTGRGVKVAVLDTGISTHPDLNIRGGASFVPGEPSTQDGNGHGTHVAGTIAALNNGIGVLGVAPSAELYAVKVLGASGSGSVSSIAQGLEWAGNNDMHVANLSLGSPSPSATLEQAVNSATSRGVLVVAASGNSGADSISYPARYANAMAVGATDQNNNRASFSQYGAGLDIVAPGVNVQSTYPGSTYASLNGTSMATPHVAGAAALVKQKNPSWSNVRIRDRLKNTATSLGSTNLYGSGLVNAEAATR

SEQ ID NO: 58770 - protein, 269 aa, Unidentified
AQVVPWGISRVQAPAAHNRGLTGSGVKVAVLDTGISTHEDLNIRGGASFVPGEPSTQDGNGHGTHVAGTIAALDNSIGVLGVAPSAELYAVKVLGASGSGSVSSIAQGLEWAGNNRMHVANLSLGSPSPSATLEQAVNSATSRGVLVVAASGNSGAGSISYPARYANAMAVGATDQNNNRASFSQYGAGLDIVAPGVNVQSTYPPSTYASKNGTSMATPHVAGAAALVKQKNPSWSNVQIRNHLKNTATSLGSTILYGSGLVNAEAATR

SEQ ID NO: 58771 - protein, 269 aa, Unidentified
AQSVPWGISRVQAPAAHNRGLAGRGVKVAVLDTGISTHPDLNIRGGASFVPGEPSTQDGEGHGTHVAGTIAALNNSIGVLGVAPSAELYAVKVLGASGSGSVSSIAQGLEWAGLNRMHVANLSLGIPSPSATLEQAVNSATSRGVLVVAASGNSGAGSISYPARYANAMAVGATDQNNNRADFSQYGAGLDIVAPGVNVQSTYPGSTYASLNGTSMATPHVAGAAALVKQKNPSWSNVQIRNHLKNTATSLGSTNLYGSGLVNAEAATR

SEQ ID NO: 58772 - protein, 269 aa, Unidentified
AQSVPWGISRVQAPAAHNRGLTGRGVKVAVLDTGISTHPDLNIRGGASFVPGEPSTQDGNGHGTHVAGTIAALDNNIGVLGVAPSAELYAVKVLGASGSGSVSSIAQGLEWAGNNRMHVANLSLGLQAPSATLEQAVNSATSRGVLVVAASGNSGAGSISYPARYANAMAVGATDQNNNRASFSQYGAGLDIVAPGVNVQSTYPGSTYASLNGTSMATPHVAGAAALVKQKNPSWSNVQIRNHLKNTATSLGSTNLYGSGLVNAEAATR

SEQ ID NO: 58773 - protein, 269 aa, Unidentified
AQSVPWGISRVQAPAAHNRRLTGRGVKVAVLDTGISTHPDLNIRGGASFVPGEPSTQDGNGHGTHVAGTIAALNNDIGVLGVAPSAELYAVKVLGASGSGSVSSIAQGLEWAGNNSMHVANLSLGSESPSATLEQAVNSATSRGVLVVAASGNSGAGSISYPARYANAMAVGATDQNNNRASFSQYGAGLDIVAPGVNVQSTYPGSTYASLNGTSMATPHVAGAAALVKQKNPSWSNVRIRDHLKNTATSLGSTNLYGSGLVNAEAATR

SEQ ID NO: 58774 - protein, 269 aa, Bacillus lentus
AQTVPWGIRRVQAPAAHNLGLTGSGVKVAVLDTGISTHPDLRIRGGASFVPGEPSTQDGDGHGTHVAGTIAALDNSIGVLGVAPSAELYAVKVLGASGSGSVSSIAQGLEWAGNNGMHVANLSLGSPSPSATLEQAVNSATSRGVLVVAASGNSGAGSISYPARYANAMAVGATDQNNNRASFSQYGPGLDIVAPGVNVQSTYPGSTYASLNGTSMATPHVAGAAALVKQKNPSWSNVQIRNHLKNTATSLGSTNLYGSGLVNAEAATR

SEQ ID NO: 58775 - protein, 269 aa, Unidentified
AQSVPWGISRVQAPAAHRRRLTGRGVKVAVLDTGISTHPDLNIRGGASFVPGEPSTQDGNGHGTHVAGTIAALDNSIGVLGVAPSAELYAVKVLGASGSGSVSSIAQGLEWAGNNGMHVANLSLGSPSPSATLEQAVNSATSRGVLVVAASGNSGAGSISYPARYANAMAVGATDQDNNRASFSQYGAGLDIVAPGVNVQSTYPGSTYFSLNGTSMATPHVAGAAALVKQKNPSWSNVQIRNRLKNTATSLGSTNLYGSGLVNAEAATR

SEQ ID NO: 58776 - protein, 269 aa, Unidentified
AQSVPWGISRVQAPAAHNRKLTGSGVKVAVLDTGISTHPDLNIRGGASFVPGEPSTQDGEGHGTHVAGTIAALNNNIGVLGVAPSAELYAVKVLSASGQGSVSSIAQGLEWAGLNGMHVANLSLGAPSPSATLEQAVNSATSRGVLVVAASGNSGAGSISYPARYANAMAVGATDQNNNRASFSQYGAGLDIVAPGVNVQSTYPGSTYASLNGTSMATPHVAGAAALVKQKNPSWSNVQIRNHLKNTATSLGSTNLYGSGLVNAEAATR

SEQ ID NO: 58777 - protein, 269 aa, Unidentified
AQSVPWGISRVQAPAAHRRRLTGRGVKVAVLDTGISTHPDLNIRGGASFVPGEPSTQDGNGHGTHVAGTIAALDNSIGVLGVAPSAELYAVKVLGASGSGSVSSIAQGLEWAGANGMHVANLSLGSPSPSATLEQAVNSATSRGVLVVAASGNSGAGSISYPARYANAMAVGATDQNNNRASFSQYGAGLDLVAPGVNVQSTYPGSTYASLNGTSMATPHVAGAAALVKQKNPSWSNVQIRNRLKNTATSLGSTNLYGSGLVNAEAATR

SEQ ID NO: 58778 - protein, 269 aa, Unidentified
AQSVPWGISRVQAPAAHNRGLAGSGVKVAVLDTGISTHPDLNIRGGASFVPGEPSTQDGNGHGTHVAGTIAALNNSIGVLGVAPSAELYAVKVLAASGQGAISSIAQGLEWAGNNGMHVANLSLGSPSPSATLEQAVNSATSRGVLVVAASGNSGAGSISYPARYANAMAVGATDQNNNRASFSQYGAGLDIVAPGVNVQSTYPGSTYASLNGTSMATPHVAGAAVLVKQKNPSWSNVRIRNHLKNTATSLGSTNLYGSGLVNAEAATR

SEQ ID NO: 58779 - protein, 269 aa, Unidentified
AQSVPWGISRVQAPAAHNRGLAGSGVKVAVLDTGISTHPDLNIRGGASFVPGEPSTQDGNGHGTHVAGTIAALNNSIGVLGVAPSAELYAVKVLGASGGGAISSIAQGLEWAGNNGMHVANLSLGSPSPSATLEQAVNSATSRGVLVVAASGNSGAGSISYPARYANAMAVGATDQNNNRASFSQYGAGLDIVAPGVNVQSTYPGSTYASQNGTSMATPHVAGAAVLVKQKNPSWSNVRIRNHLKNTATSLGSTNLYGSGLVNAEAATR

SEQ ID NO: 58780 - protein, 269 aa, Unidentified
AQSVPWGISRVQAPAAHNRGLTGSGVKVAVLDTGISTHPDLNIRGGASFVPGEPSTQDGNGHGTHVAGTIAALDNNIGVLGVAPRAELYAVKVLGASGSGSVSSIAQGLEWAGNNRMHVANLSLTSQSPSATLEQAVNSATSRGVLVVAASGNSGAGSISYPARYANAMAVGATDQNNNRASFSQYGAGLDIVAPGVNVLSTYPGSTYASLNGTSMATPHVAGAAALVKQKNPSWSNVQIRNHLKNTATSLGSTNLYGSGLVNAEAATR

SEQ ID NO: 58781 - protein, 269 aa, Unidentified
AQSVPWGISRVQAPAAHRRGLTGRGVKVAVLDTGISTHPDLNIRGGASFVPGEPSTQDGNGHGTHVAGTIAALDNSIGVLGVAPSAELYAVKVLGASGAGSVSSIAQGLEWAGNNGMHVANLSLGSPSPSATLEQAVNSATSRGVLVVAASGNSGAGSISYPARYANAMAVGATDQDNNRASFSQYGAGLDLVAPGVNVQSTYPGSTYASLNGTSMATPHVAGAAALVKQKNPSWSNVQIRNRLKNTATSLGSTNLYGSGLVNAEAATR

SEQ ID NO: 58782 - protein, 269 aa, Unidentified
AQSVPWGISRVQAPAAHNRGLTGSGVKVAVLDTGISTHPDLNIRGGASFVPGEPSTQDGNGHGTHVAGTIAALNNSIGVLGVAPSAELYAVKVLGADGRGAISSIAQGLEWAGNNGMHVANLSLGSPSPSATLEQAVNSATSRGVLVVAASGNSGASSISYPARYANAMAVGATDQNNNRASFSQYGLGLDIVAPGVNVQSTYPGSTYASLNGTSMATPHVAGAAALVKQKNPSWSNPQIRNHLKNTATSLGSTNLYGSGLVNAEAATR

SEQ ID NO: 58783 - protein, 269 aa, Unidentified
AQSVPWGISRVQAPAAHNRKLLGFGVKVAVLDTGISTHPDLNIRGGASFVPGEPSTQDGNGHGTHVAGTIAALNNNIGVLGVAPSAELYAVKVLGASGSGSVSSIAQGLEWAGNNGMHVANLSLGSPSPSATLEQAVNSATSRGVLVVAASGNSGAGSIDYPARYANAMAVGATEQNNNRASFSQYGAGLDIVAPGVNVQSTYPGSTYASENGTSMATPHVAGAAALVKQKNPSWSNVQIRNHLKNTATSLGSTNLYGSGLVNAEAATR

SEQ ID NO: 58784 - protein, 269 aa, Unidentified
AQVVPWGISRVQAPAAHNRGLTGSGVKVAVLDTGISTHPDLNIRGGASFVPGEPSTQDGNGHGTHVAGTIAALDNNIGVLGVAPDAELYAVKVLGASGSGSVSSIAQGLEWAGNNRMHVANLSLGSPSPSATLEQAVNSATSRGVLVVAASGNSGAGSISYPARYANAMAVGATDQNNNRASFSQYGAGLDIVAPGVNVQSTWPGSTYASLNGTSMATPHVAGAAALVKQKNPSWSNVQIRNRLKNTATSLGSTNLYGSGLVNAEAATR

SEQ ID NO: 58785 - protein, 269 aa, Unidentified
AQSVPWGISRVQAPAAHRRGLTGSGVKVAVLDTGISTHPDLNIRGGASFVPGEPSTQDGNGHGTHVAGTIAALNNRIGVLGVAPSAELYAVKVLGASGGGAISSIAQGLEWAGNNGMHVANLSLGSPSPSATLEQAVNSATSRGVLVVAASGNSGAGSISYPARYANAMAVGATDQNNNRASFSQYGAGLDIVAPGVNVQSTYPGSTYASLNGTSMATPHVAGAAVLVKQKNPSWSNVRIRNHLKNTATSLGSTNLYGSGLVNAEAATR

SEQ ID NO: 58786 - protein, 269 aa, Unidentified
AQSVPWGISRVQAPAAHNRRLTGSGVKVAVLDTGISTHPDLNIRGGASFVPGEPSTQDGEGHGTHVAGTIAALNNGIGVLGVAPSAELYAVKVLGASGSGSVSSIAQGLEWAGNNSMHVANLSLGSESPSATLEQAVNSATSRGVLVVAASGNSGADSISYPARYANAMAVGATDQNNNRASFSQYGAGLDIVAPGVNVQSTYPGSTYASLNGTSMATPHVAGAAALVKQKNPSWSNVRIRNHLKNTATSLGSTNLYGSGLVNAEAATR

SEQ ID NO: 58787 - protein, 269 aa, Unidentified
AQSVPWGISRVQAPAAHNRRLTGGGVKVAVLDTGISTHPDLRIRGGASFVPGEPSTQDGNGHGTHVAGTIAALNNNIGVLGVAPSAELYAVKVLGASGGGSVSSIANGLEWAGLNGMHVANLSLGSPSPSATLEQAVNSATSRGVLVVAASGNSGAGSISYPARYANAMAVGATDQNNNRASFSQYGAGLDIVAPGVNVQSTYPGSTYASQNGTSSATPHVAGAAALVKQKNPSWSNVQIRNHLKNTATSLGSTNLYGSGLVNAEAATR

SEQ ID NO: 58788 - protein, 269 aa, Unidentified
AQSVPWGISRVQAPAAHNRGLTGSGVKVAVLDTGISTHPDLNIRGGASFVPGEPSTQDGNGHGTHAAGTIAALDNSIGVLGVAPSAELYAVKVLGASGSGAISSIAQGLEWAGNNGMHVANLSLGSPSPSATLEQAVNSATSRGVLVVAASGNSGADSISYPARYANAMAVGATDQNNNRASFSQYGAGLDIVAPGVNVQSTYPGSTYASLNGTSMATPHVAGAAALVKHKNPSWSNVQIRNYLKNTATSLGSTNLYGSGLVNAEAATR

SEQ ID NO: 58789 - protein, 269 aa, Unidentified
AQSVPWGISRVQAPAAHRRGLTGRGVKVAVLDTGISTHPDLNIRGGASFVPGEPSTQDGNGHGTHVAGTIAALDNSIGVLGVAPSAELYAVKVLGASGAGSVSSIAQGLEWAGNNGMHVANLSLGSPSPSATLEQAVNSATSRGVLVVAASGNSGAGSISYPARYANAMAVGATDQNNNRASFSQYGAGLDLVAPGVNVQSTYPQSTYASLNGTSMATPHVAGAAALVKQKNPSWSNVQIRNRLKNTATSLGSTNLYGSGLVNAEAATR

SEQ ID NO: 58790 - protein, 269 aa, Unidentified
AQSVPWGISRVQAPAAHRRRLTGRGVKVAVLDTGISTHPDLNIRGGASFVPGEPSTQDGNGHGTHVAGTIAALDNSIGVLGVAPSAELYAVKVLGASGSGSVSSIAQGLEWAGNNGMHVANLSLGSPSPSATLEQAVNSATSRGVLVVAASGNSGAGSISYPARYANAMAVGATDQNNNRASFSQYGAGLDLVAPGVNVQSTYPGSAYASLNGTSMATPHVAGAAALVKQKNPSWSNVQIRNRLKNTATSLGSTNLYGSGLVNAEAATR

SEQ ID NO: 58791 - protein, 269 aa, Unidentified
AQSVPWGISRVQAPAAHNRKLTGSGVKVAVLDTGISTHPDLNIRGGASFVPGEPSTQDGEGHGTHVAGTIAALNNSIGVLGVAPSAELYAVKVLSASGGGSVSSIAGGLEWAGLNGMHVANLSLGAPSPSATLEQAVNSATSRGVLVVAASGNSGAGSISYPARYANAMAVGATDQNNNRASFSQYGAGLDIVAPGVNVQSTYPGSTYASLNGTSMATPHVAGAAALVKQKNPSWSNVQIRNHLKNTATSLGSTNLYGSGLVNAEAATR

SEQ ID NO: 58792 - protein, 269 aa, Unidentified
AQSVPWGISRVQAPAAHNRGLTGSGVKVAVLDTGISTHPDLNIRGGASFVPGEPSTQDGEGHGTHVAGTIAALNNGIGVLGVAPSAELYAVKVLGASGSGSVSSIAQGLEWAGNNSMHVANLSLGSESPSATLEQAVNSATSRGVLVVAASGNSGADSISYPARYANAMAVGATDQNNNRASFSQYGAGLDIVAPGVNVQSTYPGSTYASLNGTSMATPHVAGAAALVKQKNPSWSNVRIRDHLKNTATSLGSTNLYGSGLVNAEAATR

SEQ ID NO: 58793 - protein, 269 aa, Unidentified
AQSVPWGISRVQAPAAHNRGLTGSGVKVAVLDTGISTHPDLDIRGGASFVPGEPSTQDGNGHGTHVAGTIAALDNSIGVLGVAPSAELYAVKVLGASGGGAISSIAQGLEWAGNNGMHVANLSLGSPSPSATLEQAVNSATSRGVLVVAASGNSGAGSISYPARYANAMAVGATDQNNNRASFSQYGAGLDIVAPGVNVQSTYPGSTYASLNGTSMATPHVAGAAVLVKQKNPSWSNVRIRNHLKNTATSLGSTNLYGSGLVNAEAATR

SEQ ID NO: 58794 - protein, 269 aa, Unidentified
AQSVPWGISRVQAPAAHNRRLTGRGVKVAVLDTGISTHPDLNIRGGASFVPGEPSTQDGNGHGTHVAGTIAALNNDIGVLGVAPSAELYAVKVLGASGSGSVSSIAQGLEWAGNNSMHVANLSLGSPSPSATLEQAVNSATSRGVLVVAASGNSGADSISYPARYANAMAVGATDQNNNRASFSQYGAGLDIVAPGVNVQSTYPGSTYASLNGTSMATPHVAGAAALVKQKNPSWSNVQIRDRLKNTATSLGSTNLYGSGLVNAEAATR

SEQ ID NO: 58795 - protein, 269 aa, Unidentified
AQSVPWGISRVQAPAAHNRRLTGSGVKVAVLDTGISTHPDLNIRGGASFVPGEPSTQDGEGHGTHVAGTIAALNNGIGVLGVAPSAELYAVKVLGASGSGSVSSIAQGLEWAGNNSMHVANLSLGSESPSATLEQAVNSATSRGVLVVAASGNSGAGSISYPARYANAMAVGATDQNNNRASFSQYGAGLDIVAPGVNVQSTYPGSTYASLNGTSMATPHVAGAAALVKQKNPSWSNVQIRDRLKNTATSLGSTNLYGSGLVNAEAATR

SEQ ID NO: 58796 - protein, 269 aa, Unidentified
AQSVPWGISRVQAPAAHNRKLLGSGVKVAVLDTGISTHPDLNIRGGASFVPGEPSTQDGNGHGTHVAGTIAALNNNIGVLGVAPSAELYAVKVLGASGSGSVSSIAQGLEWAGNNRMHVANLSLGSPSPSATLEQAVNSATSRGVLVVAASGNSGAGSIDYPARYANAMAVGATDQNNNRASFSQYGAGLDIVAPGVNVQSTYPGSAYASENGTSMATPHVAGAAALVKQKNPSWSNVQIRNHLKNTATSLGSTNLYGSGLVNAEAATR

SEQ ID NO: 58797 - protein, 269 aa, Unidentified
AQSVPWGISRVQAPAAHNRGLRGSGVKVAVLDTGISTHPDLNIRGGASFVPGEPSTQDGNGHGTHVAGTIAALNNSIGVLGVAPSAELYAVKVLGASGTGNIGSIAQGLEWAGNNGMHVANLSLGSPSPSATLEQAVNSATSRGVLVVAASGNSGAGSISYPARYANAMAVGATDQNNNRASFSQYGAGLDIVAPGVNVQSTYPGSTYASLNGTSMATPHVAGAAVLVKQKNPSWSNVRIRNHLKNTATSLGSTNLYGSGLVNAEAATR

SEQ ID NO: 58798 - protein, 269 aa, Unidentified
AQSVPWGISRVQAPAAHNRRLTGSGVKVAVLDTGISTHPDLNIRGGASFVPGEPSTQDGNGHGTHVAGTIAALNNGIGVLGVAPSAELYAVKVLGASGSGSVSSIAQGLEWAGNNDMHVANLSLGSESPSATLEQAVNSATSRGVLVVAASGNSGAGSISYPARYANAMAVGATDQNNNRASFSQYGAGLDIVAPGVNVQSTYPGSTYASLNGTSMATPHVAGAAALVKQKNPSWSNVRIRDRLKNTATSLGSTNLYGSGLVNAEAATR

SEQ ID NO: 58799 - protein, 269 aa, Unidentified
AQSVPWGISRVQAPAAHNRRLTGRGVKVAVLDTGISTHPDLRIRGGASFVPGEPSTQDGNGHGTHVAGTIAALNNSIGVLGVAPSAELYAVKVLGASGAGSVSSIAQGLEWAGLNGMHVANLSLGSPSPSATLEQAVNSATSRGVLVVAASGNSGAGSISYPARYANAMAVGATDQNNNRASFSQYGAGLDIVAPGVNVQSTYPQSAYASLNGTSMATPHVAGAAALVKQKNPSWSNVQIRNHLKNTATSLGSTNLYGSGLVNAEAATR

SEQ ID NO: 58800 - protein, 269 aa, Unidentified
AQSVPWGISRVQAPAAHNRGLTGSGVKVAVLDTGISTHPDLNIRGGASFVPGEPSTQDGNGHGTHVAGTIAALNNSIGVLGVAPSAELYAVKVLGADGEGAISSIAQGLEWAGNNGMHVANLSLGSPSPSATLEQAVNSATSRGVLVVAASGNSGASSISYPARYANAMAVGATDQNNNRASFSQYGAGLDIVAPGVNVQSTYPGSTYASLNGTSMATPHVAGAAALVKQKNPSWSNRQIRGHLKNTATSLGSTNLYGSGLVNAEAATR

SEQ ID NO: 58801 - protein, 269 aa, Unidentified
AQSVPWGISRVQAPAAHNRRLTGSGVKVAVLDTGISTHPDLNIRGGASFVPGEPSTQDGEGHGTHVAGTIAALNNDIGVLGVAPSAELYAVKVLGASGSGSVSSIAQGLEWAGNNDMHVANLSLGSESPSATLEQAVNSATSRGVLVVAASGNSGADSISYPARYANAMAVGATDQNNNRASFSQYGAGLDIVAPGVNVQSTYPGSTYASLNGTSMATPHVAGAAALVKQKNPSWSNVRIRNHLKNTATSLGSTNLYGSGLVNAEAATR

SEQ ID NO: 58802 - protein, 269 aa, Unidentified
AQSVPWGISRVQAPAAHNRGLTGSGVKVAVLDTGISTHPDLNIRGGASFVPGEPSTQDGNGHGTHVAGTIAALDNSIGVLGVAPRAELYAVKVLGASGSGSVSSIAQGLEWAGNNGMHVANLSLGLQAPSATLEQAVNSATSRGVLVVAASGNSGAGSISYPARYANAMAVGATDQNNNRASFSQYGAGLDIVAPGVNVLSTWPGSTYASLNGTSMATPHVAGAAALVKQKNPSWSNVQIRNHLKNTATSLGSTNLYGSGLVNAEAATR

SEQ ID NO: 58803 - protein, 269 aa, Unidentified
AQSVPWGISRVQAPAAHNRGLTGRGVKVAVLDTGISTHPDLNIRGGASFVPGEPSTQDGNGHGTHVAGTIAALDNSIGVLGVAPSAELYAVKVLGASGAGAISSIAQGLEWAGNNGMHVANLSLGSPSPSATLEQAVNSATSRGVLVVAASGNSGAGSISYPARYANAMAVGATDQNNNRADFSQYGAGLDIVAPGVNVQSTYPGSTYASLNGTSSATPHVAGAAVLVKQKNPSWSNVRIRNHLKNTATSLGSTNLYGSGLVNAEAATR

SEQ ID NO: 58804 - protein, 269 aa, Unidentified
AQSVPWGISRVQAPAAHNRKLTGSGVKVAVLDTGISTHPDLNIRGGASFVPGEPSTQDGEGHGTHVAGTIAALNNNIGVLGVAPSAELYAVKVLSASGQGSVSSIANGLEWAGLNGMHVANLSLGSPSPSATLEQAVNSATSRGVLVVAASGNSGAGSISYPARYANAMAVGATDQNNNRASFSQYGAGLDIVAPGVNVQSTYPGSTYASQNGTSSATPHVAGAAALVKQKNPSWSNVQIRNHLKNTATSLGSTNLYGSGLVNAEAATR

SEQ ID NO: 58805 - protein, 269 aa, Unidentified
AQSVPWGISRVQAPAAHNRGLAGRGVKVAVLDTGISTHPDLNIRGGASFVPGEPSTQDGNGHGTHVAGTIAALNNSIGVLGVAPSAELYAVKVLGASGSGSVSSIAQGLEWAGLNRMHVANLSLGIPSPSATLEQAVNSATSRGVLVVAASGNSGEGSIDYPARYANAMAVGATDQNNNRASFSQYGAGLDIVAPGVNVQSTYPGSTYASLNGTSMATPHVAGAAALVKQKNPSWSNVQIRNHLKNTATSLGSTNLYGSGLVNAEAATR

SEQ ID NO: 58806 - protein, 269 aa, Unidentified
AQSVPWGISRVQAPAAHNRGLAGSGVKVAVLDTGISTHPDLNIRGGASFVPGEPSTQDGNGHGTHVAGTIAALNNSIGVLGVAPSAELYAVKVLGASGGGAISSIAQGLEWAGNNGMHVANLSLGSPSPSATLEQAVNSATSRGVLVVAASGNSGAGSISYPARYANAMAVGATDQNNNRASFSQYGAGLDIVAPGVNVQSTYPGSTYASLNGTSMATPHVAGAAVLVKQKYPSWSNVRIRNHLKNTATSLGSTNLYGSGLVNAEAATR

SEQ ID NO: 58807 - protein, 269 aa, Unidentified
AQSVPWGISRVQAPAAHRRGLTGRGVKVAVLDTGISTHPDLNIRGGASFVPGEPSTQDGNGHGTHVAGTIAALDNSIGVLGVAPSAELYAVKVLGASGSGSVSSIAQGLEWAGANGMHVANLSLGSPSPSATLEQAVNSATSRGVLVVAASGNSGAGSISYPARYANAMAVGATDQNNNRASFSQYGAGLDIVAPGVNVQSTYPQSAYASLNGTSMATPHVAGAAALVKQKNPSWSNVQIRNRLKNTATSLGSTNLYGSGLVNAEAATR

SEQ ID NO: 58808 - protein, 269 aa, Unidentified
AQSVPWGISRVQAPAAHNRGLAGRGVKVAVLDSGISTHPDLNIRGGASFVPGEPSTQDGNGHGTHVAGTIAALNNSIGVLGVAPSAELYAVKVLGASGSGSVSSIAQGLEWAGLNRMHVANLSLGSPSPSATLEQAVNSATSRGVLVVAASGNSGAGSIDYPARYANAMAVGATDQNNNRADFSQYGAGLDIVAPGVNVQSTYPGSTYASLNGTSMATPHVAGAAALVKQKNPSWSNVQIRNHLKNTATSLGSTNLYGSGLVNAEAATR

SEQ ID NO: 58809 - protein, 269 aa, Unidentified
AQSVPWGISRVQAPAAHNRRLTGRGVKVAVLDTGISTHPDLNIRGGASFVPGEPSTQDGNGHGTHVAGTIAALNNGIGVLGVAPSAELYAVKVLGASGSGSVSSIAQGLEWAGNNSMHVANLSLGSPSPSATLEQAVNSATSRGVLVVAASGNSGADSISYPARYANAMAVGATDQNNNRASFSQYGAGLDIVAPGVNVQSTYPGSTYASLNGTSMATPHVAGAAALVKQKNPSWSNVDIRNRLKNTATSLGSTNLYGSGLVNAEAATR

SEQ ID NO: 58810 - protein, 269 aa, Unidentified
AQSVPWGISRVQAPAAHNRGLTGSGVKVAVLDTGISTHPDLNIRGGASFVPGEPSTQDGNGHGTHVAGTIAALNNSIGVLGVAPSAELYAVKVLGADGRGAISSIAQGLEWAGNNGMHVANLSLGSPSPSATLEQAVNSATSRGVLVVAASGNSGASSISYPARYANAMAVGATDQNNNRASFSQYGPGLDIMAPGVNVQSTYPGSTYASLNGTSMATPHVAGAAALVKQKNPSWSNVQIRNHLKNTATSLGSTNLYGSGLVNAEAATR

SEQ ID NO: 58811 - protein, 269 aa, Unidentified
AQSVPWGISRVQAPAAHNRGLWGRGVKVAVLDTGISTHPDLRITGGASFVPGEPSTQDGNGHGTHVAGTIAALNNSIGVLGVAPSAELYAVKVLGASGAGSVSSIAQGLEWAGLNGMHVANLSLGSPSPSATLEQAVNSATSRGVLVVAASGNSGAGSISYPARYANAMAVGATDQNNNRASFSQYGAGLDIVAPGVNVQSTYIGSTYASLNGTSMATPHVAGAAALVKQKNPSWSNVQIRNHLKNTATSLGSTNLYGSGLVNAEAATR

SEQ ID NO: 58812 - protein, 269 aa, Unidentified
AQSVPWGISRVQAPAAHRRRLTGRGVKVAVLDTGISTHPDLNIRGGASFVPGEPSTQDGNGHGTHVAGTIAALDNSIGVLGVAPSAELYAVKVLGASGSGSVSSIAQGLEWAGNNGMHVANLSLGSPSPSATLEQAVNSATSRGVLVVAASGNSGAGSISYPARYANAMAVGATDQNNNRASFSQYGAGLDIVAPGVNVQSTYPQSAYASLNGTSMATPHVAGAAALVKQKNPSWSNVQIRNRLKNTATSLGSTNLYGSGLVNAEAATR

SEQ ID NO: 58813 - protein, 269 aa, Unidentified
AQSVPWGISRVQAPAAHNRGLAGSGVKVAVLDTGISTHPDLNIRGGASFVPGEPSTQDGNGHGTHVAGTIAALNNSIGVLGVAPSAELYAVKVLGASGNGAISSIAQGLEWAGNNGMHVANLSLGSPSPSATLEQAVNSATSRGVLVVAASGNSGAGSISYPARYANAMAVGATDQNNNRASFSQYGAGLDIVAPGVNVQSTYPGSTYASQNGTSMATPHVAGAAVLVKQKNPSWSNVRIRNHLKNTATSLGSTNLYGSGLVNAEAATR

SEQ ID NO: 58814 - protein, 269 aa, Bacillus lentus
AQSVPWGIRRVQAPTAHNRGLTGSGVKVAVLDTGISTHPDLNIRGGASFVPGEPSTQDGNGHGTHAAGTIAALNNSIGVLGVAPSAELYAVKVLGAGGSGSVSSIAQGLEWAGNNGMHVANLSLGSPSPSATLEQAVNSATSRGVLVVAASGNSGAGSISYPARYANAMAVGATDQNNNRASFSQYGAGLDIVAPGVNVQSTYPGSTYASLNGTSMATPHVVGAAALVKQKNPSWSNVRIRNHLKDTATSLGSTNLYGSGLVNAEAATR

SEQ ID NO: 58815 - protein, 269 aa, Unidentified
AQSVPWGISRVQAPAAHNRGLTGRGVKVAVLDTGISTHPDLNIRGGASFVPGEPSTQDGEGHGTHVAGTIAALNNDIGVLGVAPSAELYAVKVLGASGSGSVSSIAQGLEWAGNNSMHVANLSLGSESPSATLEQAVNSATSRGVLVVAASGNSGAGSISYPARYANAMAVGATDQNNNRADFSQYGAGLDIVAPGVNVQSTYPGSTYASLNGTSMATPHVAGAAALVKQKNPSWSNVQIRDHLKNTATSLGSTNLYGSGLVNAEAATR

SEQ ID NO: 58816 - protein, 269 aa, Unidentified
AQSVPWGISRVQAPAAHNRRLWGRGVKVAVLDTGISTHPDLNITGGASFVPGEPSTQDGNGHGTHVAGTIAALNNSIGVLGVAPSAELYAVKVLGASGAGSVSSIAQGLEWAGNNGMHVANLSLGSPSPSATLEQAVNSATSRGVLVVAASGNSGAGSISYPARYANAMAVGATDQNNNRASFSQYGAGLDIVAPGVNVQSTYIGSAYASLNGTSMATPHVAGAAALVKQKNPSWSNVQIRNHLKNTATSLGSTNLYGSGLVNAEAATR

SEQ ID NO: 58817 - protein, 269 aa, Unidentified
AQSVPWGISRVQAPAAHRRGLTGRGVKVAVLDTGISTHPDLNIRGGASFVPGEPSTQDGNGHGTHVAGTIAALDNSIGVLGVAPSAELYAVKVLGASGSGSVSSIAQGLEWAGANGMHVANLSLGSPSPSATLEQAVNSATSRGVLVVAASGNSGAGSISYPARYANAMAVGATDQNNNRASFSQYGAGLDIVAPGVNVQSTYPQSTYFSLNGTSMATPHVAGAAALVKQKNPSWSNVQIRNRLKNTATSLGSTNLYGSGLVNAEAATR

SEQ ID NO: 58818 - protein, 269 aa, Unidentified
AQSVPWGISRVQAPAAHNRGLTGSGVKVAVLDTGISTHPDLNIRGGASFVPGEPSTQDGEGHGTHVAGTIAALNNGIGVLGVAPSAELYAVKVLGASGSGSVSSIAQGLEWAGNNDMHVANLSLGSPSPSATLEQAVNSATSRGVLVVAASGNSGADSISYPARYANAMAVGATDQNNNRADFSQYGAGLDIVAPGVNVQSTYPGSTYASLNGTSMATPHVAGAAALVKQKNPSWSNVRIRNRLKNTATSLGSTNLYGSGLVNAEAATR

SEQ ID NO: 58819 - protein, 269 aa, Unidentified
AQSVPWGISRVQAPAAHRRGLWGRGVKVAVLDTGISTHPDLNIRGGASFVPGEPSTQDGNGHGTHVAGTIAALDNSIGVLGVAPSAELYAVKVLGASGSGSVSSIAQGLEWAGNNGMHVANLSLGSPSPSATLEQAVNSATSRGVLVVAASGNSGAGSISYPARYANAMAVGATDQNNNRASFSQYGAGLDLVAPGVNVQSTYPQSTYASLNGTSMATPHVAGAAALVKQKNPSWSNVQIRNRLKNTATSLGSTNLYGSGLVNAEAATR

SEQ ID NO: 58820 - protein, 269 aa, Unidentified
AQSVPWGISRVQAPAAHNRGLTGRGVKVAVLDTGISTHPDLRITGGASFVPGEPSTQDGNGHGTHVAGTIAALNNSIGVLGVAPSAELYAVKVLGASGAGSVSSIAQGLEWAGLNGMHVANLSLGSPSPSATLEQAVNSATSRGVLVVAASGNSGAGSISYPARYANAMAVGATDQNNNRASFSQYGAGLDIVAPGVNVQSTYIQSTYASLNGTSMATPHVAGAAALVKQKNPSWSNVQIRNHLKNTATSLGSTNLYGSGLVNAEAATR

SEQ ID NO: 58821 - protein, 269 aa, Unidentified
AQSVPWGISRVQAPAAHNRGLAGSGVKVAVLDTGISTHPDLNIRGGASFVPGEPSTQDGNGHGTHVAGTIAALNNSIGVLGVAPSAELYAVKVLAASGNGAISSIAQGLEWAGNNGMHVANLSLGSPSPSATLEQAVNSATSRGVLVVAASGNSGAGSISYPARYANAMAVGATDQNNNRASFSQYGAGLDIVAPGVNVQSTYPGSTYASLNGTSMATPHVAGAAVLVKQKNPSWSNVRIRNHLKNTATSLGSTNLYGSGLVNAEAATR

SEQ ID NO: 58822 - protein, 269 aa, Unidentified
AQSVPWGISRVQAPAAHNRRLTGRGVKVAVLDTGISTHPDLNIRGGASFVPGEPSTQDGNGHGTHVAGTIAALNNNIGVLGVAPSAELYAVKVLGASGNGSVSSIAGGLEWAGNNGMHVANLSLGAPSPSATLEQAVNSATSRGVLVVAASGNSGAGSISYPARYANAMAVGATDQNNNRASFSQYGAGLDIVAPGVNVQSTYPGSTYASQNGTSMATPHVAGAAALVKQKNPSWSNVQIRNHLKNTATSLGSTNLYGSGLVNAEAATR

SEQ ID NO: 58823 - protein, 269 aa, Unidentified
AQSVPWGISRVQAPAAHNRGLRGFGVKVAVLDTGISTHPDLNIRGGASFVPGEPSTQDGNGHGTHVAGTIAALNNSIGVLGVAPSAELYAVKVLGASGGGAISSIAQGLEWAGNNGMHVANLSLGSPSPSATLEQAVNSATSRGVLVVAASGNSGAGSISYPARYANAMAVGATDQNNNRASFSQYGAGLDIVAPGVNVQSTYPGSTYASLNGTSMATPHVAGAAVLVKQKNPSWSNVRIRNHLKNTATSLGSTNLYGSGLVNAEAATR

SEQ ID NO: 58824 - protein, 269 aa, Unidentified
AQVVPWGISRVQAPAAHNRGLTGSGVKVAVLDTGISTHEDLNIRGGASFVPGEPSTQDGNGHGTHVAGTIAALDNGIGVLGVAPSAELYAVKVLGASGSGSVSSIAQGLEWAGNNRMHVANLSLGSPSPSATLEQAVNSATSRGVLVVAASGNSGAGSISYPARYANAMAVGATDQNNNRASFSQYGAGLDIVAPGVNVYSTYPGSTYASKNGTSMATPHVAGAAALVKQKNPSWSNVQIRNHLKNTATSLGSTNLYGSGLVNAEAATR

SEQ ID NO: 58825 - protein, 269 aa, Unidentified
AQSVPWGISRVQAPAAHNRGLTGSGVKVAVLDTGISTHPDLNIRGGASFVPGEPSTQDGEGHGTHVAGTIAALNNGIGVLGVAPSAELYAVKVLGASGSGSVSSIAQGLEWAGNNDMHVANLSLGSPSPSATLEQAVNSATSRGVLVVAASGNSGADSISYPARYANAMAVGATDQNNNRADFSQYGAGLDIVAPGVNVQSTYPGSTYASLNGTSMATPHVAGAAALVKQKNPSWSNVRIRDHLKNTATSLGSTNLYGSGLVNAEAATR

SEQ ID NO: 58826 - protein, 269 aa, Unidentified
AQSVPWGISRVQAPAAHNRRLTGSGVKVAVLDTGISTHPDLNIRGGASFVPGEPSTQDGEGHGTHVAGTIAALNNGIGVLGVAPSAELYAVKVLGASGSGSVSSIAQGLEWAGNNDMHVANLSLGSPSPSATLEQAVNSATSRGVLVVAASGNSGAGSISYPARYANAMAVGATDQNNNRADFSQYGAGLDIVAPGVNVQSTYPGSTYASLNGTSMATPHVAGAAALVKQKNPSWSNVRIRNRLKNTATSLGSTNLYGSGLVNAEAATR

SEQ ID NO: 58827 - protein, 269 aa, Unidentified
AQSVPWGISRVQAPAAHNRRLTGRGVKVAVLDTGISTHPDLNIRGGASFVPGEPSTQDGNGHGTHVAGTIAALNNGIGVLGVAPSAELYAVKVLGASGSGSVSSIAQGLEWAGNNDMHVANLSLGSESPSATLEQAVNSATSRGVLVVAASGNSGAGSISYPARYANAMAVGATDQNNNRASFSQYGAGLDIVAPGVNVQSTYPGSTYASLNGTSMATPHVAGAAALVKQKNPSWSNVQIRDRLKNTATSLGSTNLYGSGLVNAEAATR

SEQ ID NO: 58828 - protein, 269 aa, Unidentified
AQSVPWGISRVQAPAAHNRRLTGRGVKVAVLDTGISTHPDLNIRGGASFVPGEPSTQDGNGHGTHVAGTIAALNNSIGVLGVAPSAELYAVKVLGASGSGSVSSIAQGLEWAGNNRMHVANLSLGSESPSATLEQAVNSATSRGVLVVAASGNSGADSISYPARYANAMAVGATDQNNNRASFSQYGAGLDIVAPGVNVQSTYPGSTYASLNGTSMATPHVAGAAALVKQKNPSWSNVQIRDRLKNTATSLGSTNLYGSGLVNAEAATR

SEQ ID NO: 58829 - protein, 269 aa, Unidentified
AQSVPWGISRVQAPAAHRRGLTGRGVKVAVLDTGISTHPDLNIRGGASFVPGEPSTQDGNGHGTHVAGTIAALDNSIGVLGVAPSAELYAVKVLGASGSGSVSSIAQGLEWAGNNGMHVANLSLGSPSPSATLEQAVNSATSRGVLVVAASGNSGAGSISYPARYANAMAVGATDQNNNRASFSQYGAGLDIVAPGVNVQSTYPQSAYFSLNGTSMATPHVAGAAALVKQKNPSWSNVQIRNRLKNTATSLGSTNLYGSGLVNAEAATR

SEQ ID NO: 58830 - protein, 269 aa, Unidentified
AQSVPWGISRVQAPAAHNRGLTGRGVKVAVLDTGISTHPDLNIRGGASFVPGEPSTQDGNGHGTHVAGTIAALNNSIGVLGVAPSAELYAVKVLGASGSGSVSSIAQGLEWAGNNRMHVANLSLGSESPSATLEQAVNSATSRGVLVVAASGNSGADSISYPARYANAMAVGATDQNNNRADFSQYGAGLDIVAPGVNVQSTYPGSTYASLNGTSMATPHVAGAAALVKQKNPSWSNVRIRDHLKNTATSLGSTNLYGSGLVNAEAATR

SEQ ID NO: 58831 - protein, 269 aa, Bacillus lentus
AQTVPWGIRRVQAPAAHNLGLTGSGVKVAVLDTGISTHPDLNIRGGASFVPGEPSTQDGDGHGTHVAGTIAALNNSIGVLGVAPSAELYAVKVLGASGSGSVSSIAQGLEWAGNNGMHVANLSLGSPSPSATLEQAVNSATSRGVLVVAASGNSGAGSISYPARYANAMAVGATDQNNNRASFSQYGPGLDIVAPGVNVQSTYPGSTYASLNGTSMATPHVAGAAALVKQKNPSWSNVRIRNHLKNTATSLGDTNLYGSGLVNAEAATR

SEQ ID NO: 58832 - protein, 269 aa, Unidentified
AQSVPWGISRVQAPAAHNRGLTGSGVKVAVLDTGISTHPDLNIRGGASFVPGEPSTQDGNGHGTHVAGTIAALNNSIGVLGVAPSAELYAVKVLGADGEGAISSIAQGLEWAGNNGMHVANLSLGSPSPSATLEQAVNSATSRGVLVVAASGNSGASSISYPARYANAMAVGATDQNNNRASFSQYGAGLDIVAPGVNVQSTYPGSTYASLNGTSMATPHVAGAAALVKQKNPSWSNRQIRNHLWNTATSLGSTNLYGSGLVNAEAATR

SEQ ID NO: 58833 - protein, 269 aa, Unidentified
AQSVPWGISRVQAPAAHRRGLWGRGVKVAVLDTGISTHPDLNIRGGASFVPGEPSTQDGNGHGTHVAGTIAALDNSIGVLGVAPSAELYAVKVLGASGSGSVSSIAQGLEWAGNNGMHVANLSLGSPSPSATLEQAVNSATSRGVLVVAASGNSGAGSISYPARYANAMAVGATDQNNNRASFSQYGAGLDIVAPGVNVQSTYPQSTYFSLNGTSMATPHVAGAAALVKQKNPSWSNVQIRNRLKNTATSLGSTNLYGSGLVNAEAATR

SEQ ID NO: 58834 - protein, 269 aa, Unidentified
AQSVPWGISRVQAPAAHNRKLTGGGVKVAVLDTGISTHPDLNIRGGASFVPGEPSTQDGEGHGTHVAGTIAALNNSNGVLGVAPSAELYAVKVLAASGQGSVSSIANGLEWAGLNGMHVANLSLGSPSPSATLEQAVNSATSRGVLVVAASGNSGAGSISYPARYANAMAVGATDQNNNRASFSQYGAGLDIVAPGVNVQSTYPGSTYASLNGTSSATPHVAGAAALVKQKNPSWSNVQIRNHLKNTATSLGSTNLYGSGLVNAEAATR

SEQ ID NO: 58835 - protein, 269 aa, Unidentified
AQSVPWGISRVQAPAAHNRGLTGRGVKVAVLDTGISTHPDLNIRGGASFVPGEPSTQDGEGHGTHVAGTIAALNNGIGVLGVAPSAELYAVKVLGASGSGSVSSIAQGLEWAGNNSMHVANLSLGSPSPSATLEQAVNSATSRGVLVVAASGNSGADSISYPARYANAMAVGATDQNNNRASFSQYGAGLDIVAPGVNVQSTYPGSTYASLNGTSMATPHVAGAAALVKQKNPSWSNVRIRDHLKNTATSLGSTNLYGSGLVNAEAATR

SEQ ID NO: 58836 - protein, 269 aa, Unidentified
AQSVPWGISRVQAPAAHNRGLRGSGVKVAVLDTGISTHPDLNIRGGASFVPGEPSTQDGNGHGTHVAGTIAALNNSIGVLGVAPSAELYAVKVLGASGGGAISSIAQGLEWAGNNGMHVANLSLGSPSPSATLEQAVNSATSRGVLVVAASGNSGAGSISYPARYANAMAVGATDQNNNRASFSQYGAGLDIVAPGVNVQSTYPGSTYASLNGTSMATPHVAGAAVLVKQKNPSWSNVRIRNHLKNTATSLGSTNLYGSGLVNAHAATR

SEQ ID NO: 58837 - protein, 269 aa, Unidentified
AQSVPWGISRVQAPAAHNRKLLGFGVKVAVLDTGISTHPDLNIRGGASFVPGEPSTQDGNGHGTHVAGTIAALNNSIGVLGVAPSAELYAVKVLGASGSGSVSSIAQGLEWAGNNRMHVANLSLGDPSPSATLEQAVNSATSRGVLVVAASGNSGAGSISYPARYANAMAVGATDQNNNRASFSQYGAGLDIVAPGVNVQSTYPGSAYASENGTSMATPHVAGAAALVKQKNPSWSNVQIRNHLKNTATSLGSTNLYGSGLVNAEAATR

SEQ ID NO: 58838 - protein, 269 aa, Unidentified
AQSVPWGISRVQAPAAHNRGLAGSGVKVAVLDSGISTHPDLNIRGGASFVPGEPSTQDGNGHGTHVAGTIAALNNSIGVLGVAPSAELYAVKVLGASGSGSVSSIAQGLEWAGLNRMHVANLSLGIPSPSATLEQAVNSATSRGVLVVAASGNSGEGSISYPARYANAMAVGATDQNNNRADFSQYGAGLDIVAPGVNVQSTYPGSTYASLNGTSMATPHVAGAAALVKQKNPSWSNVQIRNHLKNTATSLGSTNLYGSGLVNAEAATR

SEQ ID NO: 58839 - protein, 269 aa, Unidentified
AQSVPWGISRVQAPAAHNRGLTGSGVKVAVLDTGISTHPDLNIRGGASFVPGEPSTQDGEGHGTHVAGTIAALNNSIGVLGVAPSAELYAVKVLGASGAGAISSIAQGLEWAGNNGMHVANLSLGSPSPSATLEQAVNSATSRGVLVVAASGNSGAGSISYPARYANAMAVGATDQNNNRASFSQYGAGLDIVAPGVNVQSTYIGSTYASLNGTSMATPHVAGAAVLVKQKNPSWSNVRIRNHLKNTATSLGSTNLYGSGLVNAEAATR

SEQ ID NO: 58840 - protein, 268 aa, Unidentified
AQSVPWGISRVQAPAAHNRRLTGRGVKVAVLDTGISTHPDLNIRGGASFVPGEPSTQDGEGHGTHVAGTIAALNNIGVLGVAPSAELYAVKVLGASGSGSVSSIAQGLEWAGNNDMHVANLSLGSESPSATLEQAVNSATSRGVLVVAASGNSGAGSISYPARYANAMAVGATDQNNNRASFSQYGAGLDIVAPGVNVQSTYPGSTYASLNGTSMATPHVAGAAALVKQKNPSWSNVRIRDHLKNTATSLGSTNLYGSGLVNAEAATR

SEQ ID NO: 58841 - protein, 268 aa, Bacillus lentus
AQTVPWGIRRVQAPAAHNLGLTGSGVKVAVLDTGISTHPDLNIRGGASFVPGEPSTQDGDGHGTHVAGTIAALNNSIGVLGVAPSAELYAVKVLGASGSGSVSSIAQGLEWAGNNGMHVANLSLGSPSSATLEQAVNSATSRGVLVVAASGNSGAGSISYPARYANAMAVGATDQNNNRASFSQYGPGLDIVAPGVNVQSTYPGSTYASLNGTSMATPHVAGAAALVKQKNPSWSNVRIRNHLKNTATSLGDTNLYGSGLVNAEAATR

SEQ ID NO: 58842 - protein, 268 aa, Unidentified
AQSVPWGISRVQAPAAHNRRLTGRGVKVAVLDTGISTHPDLNIRGGASFVPGEPSTQDGEGHGTHVAGTIAALNNIGVLGVAPSAELYAVKVLGASGSGSVSSIAQGLEWAGNNSMHVANLSLGSESPSATLEQAVNSATSRGVLVVAASGNSGAGSISYPARYANAMAVGATDQNNNRASFSQYGAGLDIVAPGVNVQSTYPGSTYASLNGTSMATPHVAGAAALVKQKNPSWSNVRIRDHLKNTATSLGSTNLYGSGLVNAEAATR

SEQ ID NO: 58843 - protein, 268 aa, Bacillus lentus
AQSVPWGIRRVQAPAAHNLGLTGSGVKVAVLDTGISTHPDLRIRGGASFVPGEPSTQDGDGHGTHVAGTIAALDNSIGVLGVAPSAELYAVKVLGASGSGSVSSIAQGLEWAGNNGMHVANLSLGSPSSATLEQAVNSATSRGVLVVAASGNSGAGSISYPARYANAMAVGATDQNNNRASFSQYGAGLDIVAPGVNVQSTYPGSTYASLNGTSMATPHVAGAAALVKQKNPSWSNVRIRNHLKNTATSLGDTNLYGSGLVNAEAATR

SEQ ID NO: 58844 - protein, 268 aa, Bacillus lentus
AQAVPWGIRRVQAPAAHNLGLTGSGVKVAVLDTGISTHPDLNIRGGASFVPGEPSTQDGDGHGTHVAGTIAALNNSIGVLGVAPSAELYAVKVLGASGSGSVSSIAQGLEWAGNNGMHVANLSLGSPSSATLEQAVNSATSRGVLVVAASGNSGAGSISYPARYANAMAVGATDQNNNRASFSQYGPGLDIVAPGVNVQSTYPGSTYASLNGTSMATPHVAGAAALVKQKNPSWSNVRIRNHLKNTATSLGDTNLYGSGLVNAEAATR

SEQ ID NO: 58845 - protein, 268 aa, Unidentified
AQSVPWGISRVQAPAAHNRGLTGSGVKVAVLDTGISTHPDLNIRGGASFVPGEPSTQDGNGHGTHVAGTIAALNNIGVLGVAPSAELYAVKVLGASGSGSVSSIAQGLEWAGNNDMHVANLSLGSESPSATLEQAVNSATSRGVLVVAASGNSGADSISYPARYANAMAVGATDQNNNRADFSQYGAGLDIVAPGVNVQSTYPGSTYASLNGTSMATPHVAGAAALVKQKNPSWSNVRIRDRLKNTATSLGSTNLYGSGLVNAEAATR

SEQ ID NO: 58846 - protein, 268 aa, Unidentified
AQSVPWGISRVQAPAAHNRGLTGRGVKVAVLDSGISTHPDLNIRGGASFVPGEPSTQDGEGHGTHVAGTIAALNNSIGVLGVAPSAELYAVKVLGASGSGSVSSIAQGLEWAGLNRMHVANLSLGPSPSATLEQAVNSATSRGVLVVAASGNSGEGSISYPARYANAMAVGATDQNNNRADFSQYGAGLDIVAPGVNVQSTYPGSTYASLNGTSMATPHVAGAAALVKQKNPSWSNVQIRNHLKNTATSLGSTNLYGSGLVNAEAATR

SEQ ID NO: 58847 - protein, 268 aa, Bacillus lentus
AQTVPWGIRRVQAPAAHNLGLTGSGVKVAVLDTGISTHPDLRIRGGASFVPGEPSTQDGDGHGTHVAGTIAALDNSIGVLGVAPSAELYAVKVLGASGSGSVSSIAQGLEWAGNNGMHVANLSLGSPSSATLEQAVNSATSRGVLVVAASGNSGAGSISYPARYANAMAVGATDQNNNRASFSQYGPGLDIVAPGVNVQSTYPGSTYASLNGTSMATPHVAGAAALVKQKNPSWSNVQIRNHLKNTATSLGSTNLYGSGLVNAEAATR

SEQ ID NO: 58848 - protein, 268 aa, Unidentified
AQSVPWGISRVQAPAAHNRRLTGRGVKVAVLDTGISTHPDLNIRGGASFVPGEPSTQDGEGHGTHVAGTIAALNNIGVLGVAPSAELYAVKVLGASGSGSVSSIAQGLEWAGNNSMHVANLSLGSPSPSATLEQAVNSATSRGVLVVAASGNSGADSISYPARYANAMAVGATDQNNNRASFSQYGAGLDIVAPGVNVQSTYPGSTYASLNGTSMATPHVAGAAALVKQKNPSWSNVQIRDRLKNTATSLGSTNLYGSGLVNAEAATR

SEQ ID NO: 58849 - protein, 268 aa, Bacillus lentus
AQSVPWGIRRVQAPAAHNLGLTGSGVKVAVLDTGISTHPDLRIRGGASFVPGEPSTQDGDGHGTHVAGTIAALNNSIGVLGVAPSAELYAVKVLGASGSGSVSSIAQGLEWAGNNGMHVANLSLGSPSSATLEQAVNSATSRGVLVVAASGNSGAGSISYPARYANAMAVGATDQNNNRASFSQYGAGLDIVAPGVNVQSTYPGSTYASLNGTSMATPHVAGAAALVKQKNPSWSNVRIRNHLKNTATSLGDTNLYGSGLVNAEAATQ

SEQ ID NO: 58850 - protein, 268 aa, Bacillus lentus
AQTVPWGIRRVQAPAAHNLGLTGSGVKVAVLDTGISTHPDLRIRGGASFVPGEPSTQDGDGHGTHVAGTIAALNNSIGVLGVAPSAELYAVKVLGASGSGSVSSIAQGLEWAGNNGMHVANLSLGSPSSATLEQAVNSATSRGVLVVAASGNSGAGSISYPARYANAMAVGATDQNNNRASFSQYGPGLDIVAPGVNVQSTYPGSTYASLNGTSMATPHVAGAAALVKQKNPSWSNVQIRNHLKNTATSLGSTNLYGSGLVNAEAATQ

SEQ ID NO: 58851 - protein, 268 aa, Bacillus lentus
AQAVPWGIRRVQAPAAHNLGLTGSGVKVAVLDTGISTHPDLRIRGGASFVPGEPSTQDGDGHGTHVAGTIAALNNSIGVLGVAPSAELYAVKVLGASGSGSVSSIAQGLEWAGNNGMHVANLSLGSPSSATLEQAVNSATSRGVLVVAASGNSGAGSISYPARYANAMAVGATDQNNNRASFSQYGPGLDIVAPGVNVQSTYPGSTYASLNGTSMATPHVAGAAALVKQKNPSWSNVQIRNHLKNTATSLGSTNLYGSGLVNAEAATQ

SEQ ID NO: 58852 - protein, 266 aa, Unidentified
AQSVPWGISRVQAPAAHNRGLTGSGVKVAVLDTGISTHPDLNIRGGASFVVGGNPEDRQGHHVAGTIAALNNSIGVLGVAPSAELYAVKVLGASGSGSVSSIAQGLEWAGNNGMHVANLSLGSPSPSATLEQAVNSATSRGVLVVAASGNSGAGSISYPARYANAMAVGATDQNNNRASFSQYGAGLDIVAPGVNVQSTYPGSTYASLNGTSMATPHVAGAAALVKQKNPSWSNVQIRNHLKNTATSLGSTNLYGSGLVNAEAATR

SEQ ID NO: 58853 - protein, 266 aa, Unidentified
AQSVPWGISRVQAPAAHNRGLTGSGVKVAVLDTGISTHPDLNIRGGASFVVGGTPADVHGHHVAGTIAALNNSIGVLGVAPSAELYAVKVLGASGSGSVSSIAQGLEWAGNNGMHVANLSLGSPSPSATLEQAVNSATSRGVLVVAASGNSGAGSISYPARYANAMAVGATDQNNNRASFSQYGAGLDIVAPGVNVQSTYPGSTYASLNGTSMATPHVAGAAALVKQKNPSWSNVQIRNHLKNTATSLGSTNLYGSGLVNAEAATR

SEQ ID NO: 58854 - protein, 264 aa, Bacillus licheniformis
AQTVPYGIPLIKADKAHAQRFKGANVKVAVLDTGIQASHPDLNVVGGASFVAGEAYNTDGNRHGTHVACTVAALDNTTGVIRVAPSVSLYAVKVLNSSGSGSYSGIVSGIEWATTNGMDVINMSLGGASGSTAMKQAVDNAYARGVVVVAAAGNSGSSGNTNTIGYPAKYDPVIAVGAVDSNSNRASFSSVGAELEVMAPGAGVYSTYPTNTYATLNGTSMASPHVAGAAALILSKHPNLSASQVRNRLSSTATYLGSSFYYGK

SEQ ID NO: 58855 - protein, 353 aa, Synthetic construct
AEEAKEKYLIGFNEQEAVSEFVEQVEANDEVAILSEEEEVEIELLHEFETIPVLSVELSPEDVDALELDPAISYIEEDAEVTTMAQSVPWGISRVQAPAAHNRGLTGSGVKVAVLDTGISTHPDLNIRGGEIFDGLEPSTQDGNGHGTHVAGTIAALNNSIGVLGVAPSAELYAVKVLGADGEGAISSIAQGLEWAGNNGMHVANLSLGSPSPSATLEQAVNSATSRGVLVVAASGNSGASSISYPARYANAMAVGATDQNNNRASFSQYGAGLDIVAPGVNVQSTYPGSTYASLNGTSMATPHVAGAAALVKQKNPSWSNVQIRNHLKNTATSLGSTNLYGSGLVNAEAATR

SEQ ID NO: 58856 - protein, 353 aa, Synthetic construct
AEEAKEKYLIGFNEQEAVSEFVEQVEANDEVAILSEEEEVEIELLHEFETIPVLSVELSPEDVDALELDPAISYIEEDAEVTTMAQSVPWGISRVQAPAAHNRGLTGSGVKVAVLDTGISTHPDLKELGSESFVPGEPSTQDGNGHGTHVAGTIAALNNSIGVLGVAPSAELYAVKVLGADGEGAISSIAQGLEWAGNNGMHVANLSLGSPSPSATLEQAVNSATSRGVLVVAASGNSGASSISYPARYANAMAVGATDQNNNRASFSQYGAGLDIVAPGVNVQSTYPGSTYASLNGTSMATPHVAGAAALVKQKNPSWSNVQIRNHLKNTATSLGSTNLYGSGLVNAEAATR

SEQ ID NO: 58857 - protein, 255 aa, Unidentified
AAEGFVVHNSGVKVAVLDTGISTHPDLNIRGGASFVPGEPSTQDGNGHGTHVAGTIAALNNSIGVLGVAPSAELYAVKVLGASGSGSVSSIAQGLEWAGNNGMHVANLSLGSPSPSATLEQAVNSATSRGVLVVAASGNSGAGSISYPARYANAMAVGATDQNNNRASFSQYGAGLDIVAPGVNVQSTYPGSTYASLNGTSMATPHVAGAAALVKQKNPSWSNVQIRNHLKNTATSLGSTNLYGSGLVNAEAATR

SEQ ID NO: 58858 - protein, 384 aa, Bacillus lentus
MMRKKSFWLGMLTAFMLVFTMAFSDSASAARAEEAKEKYLIGFNEQEAVSEFVEQVEANDEVAILSEEEEVEIELLHEFETIPVLSVELSPEDVDALELDPAISYIEEDAEVTTMAQTIPWGISRVQAPAAHNRGLTGSGVKVAVLDTGISTHPDLNIRGGASFVPGEPSTQDGNGHGTHVAGTIAALNNSIGVLGVAPSAELYAVKVLGADGRGAISSIAQGLEWAGNNGMHVANLSLGSPSPSATLEQAVNSATSRGVLVVAASGNSGASSISYPARYANAMAVGATDQNNNRASFSQYGAGLDIVAPGVNVQSTYPGSTYASDNGTSMATPHVAGVAALVKQKNPSWSNVQIRNHLKNTATGLGNTNLYGSGLVNAEAATR

SEQ ID NO: 58859 - protein, 384 aa, Bacillus lentus
MMRKKSFWLGMLTAFMLVFTMAFSDSASAARAEEAKEKYLIGFNEQEAVSEFVEQVEANDEVAILSEEEEVEIELLHEFETIPVLSVELSPEDVDALELDPAISYIEEDAEVTTMAQTIPWGISRVQAPAAHNRGLTGSGVKVAVLDTGISTHPDLNIRGGASFVPGEPSTQDGNGHGTHVAGTIAALNNSIGVLGVAPSAELYAVKVLGADGRGAISSIAQGLEWAGNNGMHVANLSLGSPSPSATLEQAVNSATSRGVLVVAASGNSGASSISYPARYANAMAVGATDQNNNRASFSQYGAGLDIVAPGVNVQSTYPGSTYASQNGTSMATPHVAGVAALVKQKNPSWSNVQIRNHLKNTATGLGNTNLYGSGLVNAEAATR

SEQ ID NO: 58860 - protein, 384 aa, Bacillus lentus
MMRKKSFWLGMLTAFMLVFTMAFSDSASAARAEEAKEKYLIGFNEQEAVSEFVEQVEANDEVAILSEEEEVEIELLHEFETIPVLSVELSPEDVDALELDPAISYIEEDAEVTTMAQTIPWGISRVQAPAAHNRGLTGSGVKVAVLDTGISTHPDLNIRGGASFVPGEPSTQDGNGHGTHVAGTIAALNNSIGVLGVAPSAELYAVKVLGADGRGAISSIAQGLEWAGNNGMHVANLSLGSPSPSATLEQAVNSATSRGVLVVAASGNSGASSISYPARYANAMAVGATDQNNNRASFSQYGAGLDIVAPGVNVQSTYPGSTYASENGTSMATPHVAGVAALVKQKNPSWSNVQIRNHLKNTATGLGNTNLYGSGLVNAEAATR

SEQ ID NO: 58861 - protein, 384 aa, Bacillus lentus
MMRKKSFWLGMLTAFMLVFTMAFSDSASAARAEEAKEKYLIGFNEQEAVSEFVEQVEANDEVAILSEEEEVEIELLHEFETIPVLSVELSPEDVDALELDPAISYIEEDAEVTTMAQTIPWGISRVQAPAAHNRGLTGSGVKVAVLDTGISTHPDLNIRGGASFVPGEPSTQDGNGHGTHVAGTIAALNNSIGVLGVAPSAELYAVKVLGADGRGAISSIAQGLEWAGNNGMHVANLSLGSPSPSATLEQAVNSATSRGVLVVAASGNSGASSISYPARYANAMAVGATDQNNNRASFSQYGAGLDIVAPGVNVQSTYPGSTYASNNGTSMATPHVAGVAALVKQKNPSWSNVQIRNHLKNTATGLGNTNLYGSGLVNAEAATR

SEQ ID NO: 58862 - protein, 384 aa, Bacillus lentus
MMRKKSFWLGMLTAFMLVFTMAFSDSASAARAEEAKEKYLIGFNEQEAVSEFVEQVEANDEVAILSEEEEVEIELLHEFETIPVLSVELSPEDVDALELDPAISYIEEDAEVTTMAQTIPWGISRVQAPAAHNRGLTGSGVKVAVLDTGISTHPDLNVRGGASFVPGEPSTQDGNGHGTHVAGTIAALNNSIGVLGVAPSAELYAVKVLGADGRGAISSIAQGLEWAGNNGMHVANLSLGSPSPSATLEQAVNSATSRGVLVVAASGNSGASSISYPARYANAMAVGATDQNNNRASFSQYGAGLDIVAPGVNVQSTYPGSTYASLNGTSMATPHVAGVAALVKQKNPSWSNVQIRNHLKNTATGLGNTNLYGSGLVNAEAATR

SEQ ID NO: 58863 - protein, 254 aa, Unidentified
AQSISVHNSGVKVAVLDTGISTHPDLNIRGGASFVPGEPSTQDGNGHGTHVAGTIAALNNSIGVLGVAPSAELYAVKVLGASGSGSVSSIAQGLEWAGNNGMHVANLSLGSPSPSATLEQAVNSATSRGVLVVAASGNSGAGSISYPARYANAMAVGATDQNNNRASFSQYGAGLDIVAPGVNVQSTYPGSTYASLNGTSMATPHVAGAAALVKQKNPSWSNVQIRNHLKNTATSLGSTNLYGSGLVNAEAATR

SEQ ID NO: 58864 - protein, 254 aa, Unidentified
ANGIAVHNSGVKVAVLDTGISTHPDLNIRGGASFVPGEPSTQDGNGHGTHVAGTIAALNNSIGVLGVAPSAELYAVKVLGASGSGSVSSIAQGLEWAGNNGMHVANLSLGSPSPSATLEQAVNSATSRGVLVVAASGNSGAGSISYPARYANAMAVGATDQNNNRASFSQYGAGLDIVAPGVNVQSTYPGSTYASLNGTSMATPHVAGAAALVKQKNPSWSNVQIRNHLKNTATSLGSTNLYGSGLVNAEAATR

SEQ ID NO: 58865 - protein, 380 aa, Synthetic construct
MMRKKSFWLGMLTAFMLVFTMASIASAAEEAKEKYLIGFNEQEAVSEFVEQVEANDEVAILSEEEEVEIELLHEFETIPVLSVELSPEDVDALELDPAISYIEEDAEVTTMAQTIPWGISRVQAPAAHNRGLTGSGVKVAVLDTGISTHPDLNIRGGASFVPGEPSTQDGNGHGTHVAGTIAALNNSIGVLGVAPSAELYAVKVLGADGRGAISSIAQGLEWAGNNGMHVANLSLGSPSPSATLEQAVNSATSRGVLVVAASGNSGASSISYPARYANAMAVGATDQNNNRASFSQYGAGLDIVAPGVNIQSTYPGSTYASGNGTSMATPHVAGAAALVKQKNPSWSNVQIRNHLKNTATSLGSTNLYGSGLVNAEAATR

SEQ ID NO: 58866 - protein, 380 aa, Synthetic construct
MMRKKSFWLGMLTAFMLVFTMASIASAAEEAKEKYLIGFNEQEAVSEFVEQVEANDEVAILSEEEEVEIELLHEFETIPVLSVELSPEDVDALELDPAISYIEEDAEVTTMAQTIPWGISRVQAPAAHNRGLTGSGVKVAVLDTGISTHPDLNIRGGASFVPGEPSTQDGNAHGTHVAGTIAALNNSIGVLGVAPSAELYAVKVLGADGRGAISSIAQGLEWAGNNGMHVANLSLGSPSPSATLEQAVNSATSRGVLVVAASGNSGASSISYPARYANAMAVGATDQNNNRASFSQYGAGLDIVAPGVNIQSTYPGSTYASLNGTSMATPHVAGAAALVKQKNPSWSNVQIRNHLKNTATSLGSTNLYGSGLVNAEAATR

SEQ ID NO: 58867 - protein, 376 aa, Bacillus sp.
LGKIVASTALLISVAFSSSIASAAEEAKEKYLIGFNEQEAVSEFVEQVEANDEVAILSEEEEVEIELLHEFETIPVLSVELSPEDVDALELDPAISYIEEDAEVTTMAQSVPWGISRVQAPAAHNRGLTGSGVKVAVLDTGISTHPDLRIRGGASFVPGEPSTQDGNGHGTHVAGTIAALNNSIGVLGVAPSAELYAVKVLGASGSGSVSSIAQGLEWAGNNGMHVANLSLGSPSPSATLEQAVNSATSRGVLVVAASGNSGAGSISYPARYANAMAVGATDQNNNRASFSQYGAGLDIVAPGVNVQSTYPGSTYASLNGTSMATPHVAGAAALVKQKNPSWSNVQIRNHLKNTATSLGSTNLYGSGLVNAEAATR

SEQ ID NO: 58868 - protein, 376 aa, Bacillus sp.
LGKIVASTALLISVAFSSSIASAAEEAKEKYLIGFNEQEAVSEFVEQVEANDEVAILSEEEEVEIELLHEFETIPVLSVELSPEDVDALELDPAISYIEEDAEVTTMAQSVPWGISRVQAPAAHNRGLTGSGVKVAVLDTGISTHPDLNIRGGASFVPGEPSTQDGNGHGTHVAGTIAALNNSIGVLGVAPSAELYAVKVLGASGSGSVSSIAQGLEWAGNNGMHVANLSLGSPSPSATLEQAVNSATSRGVLVVAASGNSGAGSISYPARYANAMAVGATDQNNNRASFSQYGAGLDIVAPGVNVQSTYPGSTYASLNGTSMATPHVAGAAALVKQKNPSWSPVQIRNHLKNTATSLGSTNLYGSGLVNAEAATR

SEQ ID NO: 58869 - protein, 376 aa, Bacillus sp.
LGKIVASTALLISVAFSSSIASAAEEAKEKYLIGFNEQEAVSEFVEQVEANDEVAILSEEEEVEIELLHEFETIPVLSVELSPEDVDALELDPAISYIEEDAEVTTMAQSVPWGISRVQAPAAHNRGLTGSGVKVAVLDTGISTHPDLNIRGGASFVPGEPSTQDGNGHGTHVAGTIAALRNSIGVLGVAPSAELYAVKVLGASGSGSVSSIAQGLEWAGNNGMHVANLSLGSPSPSATLEQAVNSATSRGVLVVAASGNSGAGSISYPARYANAMAVGATDQNNNRASFSQYGAGLDIVAPGVNVQSTYPGSTYASLNGTSMATPHVAGAAALVKQKNPSWSNVQIRNHLKNTATSLGSTNLYGSGLVNAEAATR

SEQ ID NO: 58870 - protein, 376 aa, Bacillus sp.
LGKIVASTALLISVAFSSSIASAAEEAKEKYLIGFNEQEAVSEFVEQVEANDEVAILSEEEEVEIELLHEFETIPVLSVELSPEDVDALELDPAISYIEEDAEVTTMAQSVPWGISRVQAPAAHNRGLTGSGVKVAVLDTGISTHPDLNIRGGASFVPGEPSTQDGNGHGTHVAGTIAALNNSIGVLGVAPSAELYAVKVLGASGSGSVSSIAQGLEWAGRNGMHVANLSLGSPSPSATLEQAVNSATSRGVLVVAASGNSGAGSISYPARYANAMAVGATDQNNNRASFSQYGAGLDIVAPGVNVQSTYPGSTYASLNGTSMATPHVAGAAALVKQKNPSWSNVQIRNHLKNTATSLGSTNLYGSGLVNAEAATR

SEQ ID NO: 58871 - protein, 376 aa, Bacillus sp.
LGKIVASTALLISVAFSSSIASAAEEAKEKYLIGFNEQEAVSEFVEQVEANDEVAILSEEEEVEIELLHEFETIPVLSVELSPEDVDALELDPAISYIEEDAEVTTMAQSVPWGISRVQAPAAHNRGLTGSGVKVAVLDTGISTHPDLNIRGGASFVPGEPSTQDGNGHGTHVAGTIAALNNSIGVLGVAPSAELYAVKVLGASGSGSVSSIAQGLEWAGNRGMHVANLSLGSPSPSATLEQAVNSATSRGVLVVAASGNSGAGSISYPARYANAMAVGATDQNNNRASFSQYGAGLDIVAPGVNVQSTYPGSTYASLNGTSMATPHVAGAAALVKQKNPSWSNVQIRNHLKNTATSLGSTNLYGSGLVNAEAATR

SEQ ID NO: 58872 - protein, 376 aa, Alkalihalobacillus clausii
LGKIVASTALLISVAFSSSIASAAEEAKEKYLIGFNEQEAVSEFVEQVEANDEVAILSEEEEVEIELLHEFETIPVLSVELSPEDVDALELDPAISYIEEDYEVTTMAQSVPWGISRVQAPAAHNRGLTGSGVKVAVLDTGISTHPDLNIRGGASFVPGEPSTQDGNGHGTHVAGTIAALNNSIGVLGVAPSAELYAVKVLGASGSGSVSSIAQGLEWAGNNGMHVANLSLGSPSPSATLEQAVNSATSRGVLVVAASGNSGAGSISYPARYANAMAVGATDQNNNRASFSQYGAGLDIVAPGVNVQSTYPGSTYASLNGTSMATPHVAGAAALVKQKNPSWSNVQIRNHLKNTATSLGSTNLYGSGLVNAEAATR

SEQ ID NO: 58873 - protein, 376 aa, Unidentified
LGKIVASTALLISVAFSSSIASAAEEAKEKYLIGFNEQEAVTEFVEQVEANDEVAILSEEEEVEIELLHEFETIPVLSVELSPEDVDALELDPAISYIEEDAEVTTMAQSVPWGISRVQAPAAHNRGLTGSGVKVAVLDTGISTHPDLNIRGGASFVPGEPSTQDGNGHGTHVAGTIAALNNSIGVLGVAPSAELYAVKVLGASGSGSVSSIAQGLEWAGNNGMHVANLSLGSPSPSATLEQAVNSATSRGVLVVAASGNSGAGSISYPARYANAMAVGATDQNNNRASFSQYGAGLDIVAPGVNVQSTYPGSTYASLNGTSMATPHVAGAAALVKQKNPSWSNVQIRNHLKNTATSLGSTNLYGSGLVNAEAATR

SEQ ID NO: 58874 - protein, 376 aa, Bacillus sp.
LGKIVASTALLISVAFSSSIASAAEEAKEKYLIGFNEQEAVSEFVEQVEANDEVAILSEEEEVEIELLHEFETIPVLSVELSPEDVDALELDPAISYIEEDAEVTTMAQSVPWGISRVQAPAAHNRGLTGSGVKVAVLDTGISTHPDLNIRGGASFVPGEPSTQDGNGHGTHVAGTIAALNNSIGVLGVAPSAELYAVKVLGASGSGSVSSIAQGLEWAGNNGMHVANLSLGSPSPSATLERAVNSATSRGVLVVAASGNSGAGSISYPARYANAMAVGATDQNNNRASFSQYGAGLDIVAPGVNVQSTYPGSTYASLNGTSMATPHVAGAAALVKQKNPSWSNVQIRNHLKNTATSLGSTNLYGSGLVNAEAATR

SEQ ID NO: 58875 - protein, 376 aa, Bacillus sp.
LGKIVASTALLISVAFSSSIASAAEEAKEKYLIGFNEQEAVSEFVEQVEANDEVAILSEEEEVEIELLHEFETIPVLSVELSPEDVDALELDPAISYIEEDAEVTTMAQSVPWGISRVQAPAAHNRGLTGSGVKVAVLDTGISTHPDLNIRGGASFVPGEPSTQDGNGHGTHVAGTIAALNNSIGVLGVAPSAELYAVKVLGASGSGSVSSIAQGLEWAGNNGMHVANLSLGSPSPSATLEQAVNSATSRGVLVVAASGNSGAGSISYPARYANAMAVGATDQNNNRASFSQYGAGLDIVAPGVNVQSTYPGSTYASLNGTSMATPHVAGAAALVKQKNPSWSNVQIRNHLKNTARSLGSTNLYGSGLVNAEAATR

SEQ ID NO: 58876 - protein, 376 aa, Unidentified
LGKIVASTALLISVAFSSSIASAAEEAKEKYLIGFNEQEAVSEFVEQVEANDEVAILSEEEEVEIELLHEFETIPVLSVELSPEDVDALELDPAISYIEEDAEVTTMAQSVPWGISRVQAPAAHNRGLTGSGVKVAVLDTGISTHPDLNIRGGASFVPGEPSTQDGNGHGTHVAGTIAALNNSIGVLGVAPNAELYAVKVLGASGSGSVSSIAQGLEWAGNNGMHVANLSLGSPSPSATLEQAVNSATSRGVLVVAASGNSGAGSISYPARYANAMAVGATDQNNNRASFSQYGAGLDIVAPGVNVQSTYPGSTYASLNGTSMATPHVAGAAALVKQKNPSWSNVQIRNHLKNTATSLGSTNLYGSGLVNAEAATR

SEQ ID NO: 58877 - protein, 376 aa, Alkalihalobacillus clausii
LGKIVASTALLISVAFSSSIASAAEEAKEKYLIGFNEQEAVSEFVEQVEANDEVAILSEEEEVEIELLHEFETIPVLSVELSPEDVDALELDPAISYIEEDNEVTTMAQSVPWGISRVQAPAAHNRGLTGSGVKVAVLDTGISTHPDLNIRGGASFVPGEPSTQDGNGHGTHVAGTIAALNNSIGVLGVAPSAELYAVKVLGASGSGSVSSIAQGLEWAGNNGMHVANLSLGSPSPSATLEQAVNSATSRGVLVVAASGNSGAGSISYPARYANAMAVGATDQNNNRASFSQYGAGLDIVAPGVNVQSTYPGSTYASLNGTSMATPHVAGAAALVKQKNPSWSNVQIRNHLKNTATSLGSTNLYGSGLVNAEAATR

SEQ ID NO: 58878 - protein, 376 aa, Bacillus sp.
LGKIVASTALLISVAFSSSIASAAEEAKEKYLIGFNEQEAVSEFVEQVEANDEVAILSEEEEVEIELLHEFETIPVLSVELSPEDVDALELDPAISYIEEDAEVTTMAQSVPWGISRVRAPAAHNRGLTGSGVKVAVLDTGISTHPDLNIRGGASFVPGEPSTQDGNGHGTHVAGTIAALNNSIGVLGVAPSAELYAVKVLGASGSGSVSSIAQGLEWAGNNGMHVANLSLGSPSPSATLEQAVNSATSRGVLVVAASGNSGAGSISYPARYANAMAVGATDQNNNRASFSQYGAGLDIVAPGVNVQSTYPGSTYASLNGTSMATPHVAGAAALVKQKNPSWSNVQIRNHLKNTATSLGSTNLYGSGLVNAEAATR

SEQ ID NO: 58879 - protein, 312 aa, Saccharomyces cerevisiae
LGKIVASTALLISVAFSSSIASAAEEAKEKYLIGFNEQEAVSEFVEQVEANDEVAILSEEEEVEIELLHEFETIPVLSVELSPEDVDALELDPAISYIEEDAEVTTMAQSVPWGISRVQAPAAHNRGLTGSGVKVAVLDTGISTHPDLNIRGGASFVPGEPSTQDGNGHGTHVAGTIAALNNSIGVLGVAPSAELYAVKVLGASGSGSVSSIAQGLEWAGNNGMHVANLSLGSPSPSATLEQAVNSATSRGVLVVAASGNSGAGSISYPARYANAMAVGATDQNNNRASFSQYGAGLDIVAPGVNVQSTYPG

SEQ ID NO: 58880 - protein, 217 aa, Unidentified
AQSVPWGISRVQAPAAHNRGLTGSGVKVAVLDTGISTHPDLNIRGGASFVPGEPSTQDGNGHGTHVAGTIAALNNSIGVLGVAPSAELYAVKVLGASGSGSVSSIAQGLEWAGNNGMHVANLSLGSPSPSATLEQAVNSATSRGVLVVAASGNSGAGSISYPARYANAMAVGATDQNNNRASFSQYGAGLDIVAPGVNVQSTYPGCVTADTRLATQH

SEQ ID NO: 58881 - protein, 373 aa, Unidentified
LGKIVASTALLISVAFSSSIASAAEEAKEKYLIGFNEQEAVSEFVEANDEVAILSEEEEVEIELLHEFETIPVLSVELSPEDVDALELDPAISYIEEDAEVTTMAQSVPWGISRVQAPAAHNRGLTGSGVKVAVLDTGISTHPDLNIRGGASFVPGEPSTQDGNGHGTHVAGTIAALNNSIGVLGVAPNAELYAVKVLGASGSGSVSSIAQGLEWAGNNGMHVANLSLGSPSPSATLEQAVNSATSRGVLVVAASGNSGAGSISYPARYANAMAVGATDQNNNRASFSQYGAGLDIVAPGVNVQSTYPGSTYASLNGTSMATPHVAGAAALVKQKNPSWSNVQIRNHLKNTATSLGSTNLYGSGLVNAEAATR

SEQ ID NO: 58882 - protein, 342 aa, Unidentified
LGKIVASTALLISVAFSSSIASAAEEAKEKYLIGFNEQEAVSEFVEQVEANDEVAILSEEEEVEIELLHEFETIPVLSVELSPEDVDALELDPAISYIEEDAEVTTMAQSVPWGISRVQAPAAHNRGLTGSGVKVAVLDTGISTHPDLNIRGGASFVPGEPSTQDGNGHGTHVAGTIAALNNSIGVLGVAPSAELYAVKVLGASGSGSVSSIAQGLEWAGNNGMHVANLSLGSPSPSATLEQAVNSATSRGVLVVAASGNSGAGSISYPARYANAMAVGATDQNNNRASFSQYGAGLDIVAPGVNVQSTYPGSTYASLNGTSMATPHVAGAAALVKQKNPSW

SEQ ID NO: 58883 - protein, 217 aa, Unidentified
AQSVPWGISRVQAPAAHNRGLTGSGVKVAVLDTGISTHPDLNIRGGASFVPGEPSTQDGNGHGTHVAGTIAALNNSIGVLGVAPSAELYAVKVLGASGSGSVSSIAQGLEWAGNNGMHVANLSLGSPSPSATLEQAVNSATSRGVLVVAASGNSGAGSISYPARYANAMAVGATDQNNNRASFSQYGAGLDIVAPGVNVQSTYPGCQPYDALVSTPS

SEQ ID NO: 58884 - protein, 214 aa, Unidentified
AQSVPWGISRVQAPAAHNRGLTGSGVKVAVLDTGISTHPDLNIRGGASFVPGEPSTQDGNGHGTHVAGTIAALNNSIGVLGVAPSAELYAVKVLGASGSGSVSSIAQGLEWAGNNGMHVANLSLGSPSPSATLEQAVNSATSRGVLVVAASGNSGAGSISYPARYANAMAVGATDQNNNRASFSQYGAGLDIVAPGVNVQSTYPGCQPAGTQVA

SEQ ID NO: 58885 - protein, 274 aa, Bacillus licheniformis
AQVVPYGIPLIKADKVQAQGFKGANVKVAVLDTGIQASHPDLNVVGGASFVAGEAYNTDGNGHGTHVSGTVAALDNNTGVLGVAPSVSLYAVKVLNSSGSGSYSGIVSGIEWATTNGMDVINISLGGPSGSTAMKQAVDNAYARGAVVVAAAGNSGSSGNTNTIQYPAKYDSVIAVGAVDSNSQRASFSSVGAELEVMAPGAGVYSTYPTNTYATLSGTSMASPHVAGAAALILSKHPNLSASQVRNRLSSTATYLGSSFYYGKGLINVEAAAQ

SEQ ID NO: 58886 - protein, 274 aa, Bacillus licheniformis
AQVVPYGIPLIKADKVQAQGFKGANVKVAVLDTGIQASHPDLNVVGGASFVAGEAYNTDGNGHGTHVSGTVAALDNNTGVLGVAPSVSLYAVKVANSSGSGSYSGIVSGIEWATTNGMDVINISLGGPSGSTAMKQAVDNAYARGVVVVAAAGNSGSSGNTNTIQYPAKYDSVIAVGAVDSNSQRASFSSVGAELEVMAPGAGVYSTYPTNTYATLSGTSMASPHVAGAAALILSKHPNLSASQVRNRLSSTATYLGSSFYYGKGLINVEAAAQ

SEQ ID NO: 58887 - protein, 274 aa, Bacillus licheniformis
AQVVPYGIPLIKADKVQAQGFKGANVKVAVLDTGIQASHPDLNVVGGASFVAGEAYNTDGNGHGTHVSGTVAALDNNTGVLGVAPSVSLYAVKVLNSSGSGSYSGIVSGIEWATTNGMDVINISLGGRSGSTAMKQAVDNAYARGVVVVAAAGNSGSSGNTNTIQYPAKYDSVIAVGAVDSNSQRASFSSVGAELEVMAPGAEVYSTYPTNTYATLNGTSMASPHVAGAAALILSKHPNLSASQVRNRLSSTATYLGDSFYYGKGLINVEAAAQ

SEQ ID NO: 58888 - protein, 274 aa, Bacillus licheniformis
AQVVPYGIPLIKADKVQAQGFKGANVKVAVLDTGIQASHPDLNVVGGASFVAGEAYNTDGNGHGTHVSGTVAALDNNTGVLGVAPSVSLYAVKVLNSSGSGSYSGIVSGIEWATTNGMDVINMSLGGPSGSTAMKQAVDNAYARGVVVVAAAGNSGSSGNTNTIQYPAKYDSVIAVGAVDSNSQRASFSSVGAELEVMAPGVGVYSTYPTNTYATLSGTSMASPHVAGAAALILSKHPNLSASQVRNRLSSTATYLGPSFYYGKGLINVEAAAQ

SEQ ID NO: 58889 - protein, 274 aa, Bacillus licheniformis
AQVVPYGIPLIKADKVQAQGFKGANVKVAVLDTGIQASHPDLNVVGGASFVAGEAYNTDGNGHGTHVSGTVAALDNNTGVLGVAPSVSLYAVKVLNSSGSGSYSGIVSGIEWATTNGMDVINMSLGTPSGSTAMKQAVDNAYARGVVVVAAAGNSGSSGNTNTIEYPAKYDSVIAVGAVDSNSQRASFSSVGAELEVMAPGVGVYSTYPTNTYATLSGTSMASPHVAGAAALILSKHPNLSASQVRNRLSSTATYLGSSFYYGKGLINVEAAAQ

SEQ ID NO: 58890 - protein, 274 aa, Bacillus licheniformis
AQVVPYGIPLIKADKVQAQGFKGANVKVAVLDTGIQASHPDLNVVGGASFVAGEAYNTDGNGHGTHVSGTVAALDNNTGVLGVAPSVSLYAVKVLNSSSSGSYSGIVSGIEWATTNGMDVINISLGGPSGSTAMKQAVDNAYARGVVVVAAAGNSGSSGNTNTIQYPAKYDSVIAVGAVDSNSQRASFSSVGAELEVMAPGAGVYSTYPTNTYATLSGTSMASPHVAGAAALILSKHPNLSASQVRNRLSSTATYLGSSFYYGKGLINVEAAAQ

SEQ ID NO: 58891 - protein, 274 aa, Bacillus licheniformis
AQQVPYGIPLIKADKVQAQGFYGNNVKVAVLDTGIQASHPDLNVIGGISFVAGEAYNTDGNGHGTHVAGTVAALDNNTGVLGVAPSVSLYAVKVLNSSGSGSYSGIVSGIEWATTNGMDVINMSLGGASGSTAMKQAVDNAYARGVVVVAAAGNSGSSGNTNTIGYPAKYDSVIAVGAVDSNSNRASFSSVGAELEVMAPGAGVYSTYPTNTYATLSGTSMASPHVAGAAALIISKHPNLSASQVRNRLSSTATRLGSSFYYGKGLINVEAAAQ

SEQ ID NO: 58892 - protein, 274 aa, Bacillus licheniformis
AQTVPYGIPLIKADKVQAQGFKGANVKVAVLDTGIQASHPDLNVVGGASFVAGEAYNTDGNGHGTHVSGTVAALDNNTGVLGVAPSVSLYAVKVLNSSSSGSYSGIVSGIEWATTNGMDVINISLGGPSGSTAMKQAVDNAYARGVVVVAAAGNSGSSGNTNTIQYPAKYDSVIAVGAVDSNSQRASFSSVGAELEVMAPGAGVYSTYPPNTYATLSGTSMASPHVAGAAALILSKHPNLSASQVRNRLSSTATYLGSSFYYGKGLINVEAAAQ

SEQ ID NO: 58893 - protein, 274 aa, Bacillus licheniformis
AQTVPYGIPLIKADKVQAQGFKGANVKVAVLDTGIQASHPDLNVVGGASFVAGEAYNTDGNGHGTHVAGTVAALDNTTGVLGVAPHVSLYAVKVLNSSGSGSYSGIVSGIEWATFNGMDVINMSLGTASGSTAMKQAVDNAYVRGVVVVAAAGNSGSSGNTNTIQYPAKYDSVIAVGAVDSNSQRASFSSVGAELEVMAPGVGVYSTYPTNTYATLSGTSMASPHVAGAAALILSKHPNLSASQVRNRLSSTATYLGPSFYYGKGLINVEAAAQ

SEQ ID NO: 58894 - protein, 274 aa, Bacillus licheniformis
AQVVPYGIPLIKADKVQAQGFKGANVKVAVLDTGIQASHPDLNVVGGASFVAGEAYNTDGNGHGTHVAGTVAALDNNTGVLGVAPSVSLYAVKVLNSSGSGSYSGIVSGIEWATTNGMDVINISLGGPSGSTAMKQAVDNAYARGVVVVAGAGNSGSSGNTNTIQYPAKYDSVIAVGAVDSNSQRASFSSVGAELEVMAPGVGVYSTYPTNTYATLSGTSMASPHVAGAAALILSKHPNLSASQVRNRLSSTATYLGSSFYYGKGLINVEAAAQ

SEQ ID NO: 58895 - protein, 274 aa, Bacillus licheniformis
AQTVPYGIPLIKADKVQAQGFKGANVKVAVLDTGIQASHPDLNVVGGASFVAGEAYNTDGNGHGTHVSGTVAALDNNTGVLGVAPSVSLYAVKVLNSSGSGSYSGIVSGIEWATTNGMDVINMSLGSPSGSTAMKQAVDNAYARGVVVVAAAGNSGSSGNTNTIQYPAKYDSVIAVGAVDSNSQRASFSSVGAELEVMAPGVGVYSTYPTNTYATLSGTSMASPHVAGAAALILSKHPNLSASQVRNRLSSTATYLGDSFYYGKGLINVEAAAQ

SEQ ID NO: 58896 - protein, 274 aa, Bacillus licheniformis
AQVVPYGIPLIKADKVQAQGFKGANVKVAVLDTGIQASHPDLNVVGGASFVAGEAYNTDGNGHGTHVSGTVAALDNNTGVLGVAPSVSLYAVKVLNSSASGSYSGIVSGIEWATTNGMDVINMSLGGPSGSTAMKQAVDNAYARGVVVVAAAGNSGSSGNTNTIQYPAKYDSVIAVGAVDSNSQRASFSSVGAELEVMAPGVGVYSTYPTNTYATLSGTSMASPHVAGAAALILSKHPNLSASQVRNRLSSTATYLGSSFYYGKGLINVEAAAQ

SEQ ID NO: 58897 - protein, 274 aa, Synthetic construct
AQTVPYGIPLIKADKVQAQGFKGANVDVAVLDTGIQASHPDLNVVGGASFVAGEAYNTDGNGHGTHVAGTVAALDNTTGVLGVAPSVSLYAVKVLGASGSGTYSGIVSGLEWATTNGMKVINMSLGGPSGSTAMKQAVDNAYARGVVVVAAAGNSGSSGNTNTIGYPAKYDSVIAVGAVDSNSNRASFSSVGAELEVMAPGAGVYSTYPTSTYATLNGTSMASPHVAGAAALILSKHPNLSASQVRNRLSSTATYLGSSFYYGKGLINVEAAAR

SEQ ID NO: 58898 - protein, 274 aa, Bacillus licheniformis
AQVVPYGIPLIKADKVQAQGFKGANVKVAVLDTGIQASHPDLNVVGGASFVAGEAYNTDGNGHGTHVSGTVAALDNNTGVLGVAPSVSLYAVKVLNSSASGSYSGIVSGIEWATTNGMDVINISLGGPSGSTAMKQAVDNAYARGVVVVAAAGNSGSSGNTNTIQYPAKYDSVIAVGAVDSNSQRASFSSVGAELEVMAPGAGVYSTYPTNTYATLSGTSMASPHVAGAAALILSKHPNLSASQVRNRLSSTATYLGSSFYYGKGLINVEAAAQ

SEQ ID NO: 58899 - protein, 274 aa, Synthetic construct
AQTVPYGIPLIKADKVQAQGFKGANVKVAVLDTGIQASHPDLNVVGGASFVAGEAYNTDGNGHGTHVAGTVAALDNTTGVLGVAPSVSLYAVKVLNSSGSGSYSGIVSGIEWATTNGMDVINMSLGGASGSTAMKQAVDNAYARGVVVVAAAGNSGNSGSTNTIGYPAKYDSVIAVGAVDSNSNRASFSSVGAELEVMANGQGVYSTCPPNTNNTLNGSSMASPHVAGAAALILSKHPNLSASQVRNRLSSTATYLGSSFYYGKGLINVEAAAQ

SEQ ID NO: 58900 - protein, 274 aa, Bacillus licheniformis
AQTVPYGIPLIKADKVQAQGFKGANVKVAVLDTGAQASHPDLNVVGGASFVAGEAYNTDGNGHGTHVSGTVAALDNNTGVLGVAPSSSLYAVKVLNSSGSGSYSGIVSGIEWATTNGMDVINMSLGGPSGSTAMKQAVDNAYARGVLVVAAAGNSGSSGNTNTIQYPAKYDSVIAVGAVDSNSNRASFSSVGAELEVMAPGVGVYSTYPTNTYATLSGTSMASPHVAGAAALILSKHPNLSASQVRNRLSSTATYLGSSFYYGKGLINVEAAAQ

SEQ ID NO: 58901 - protein, 274 aa, Bacillus licheniformis
AQTVPYGIPLIKADKVQAQGFKGANVKVAVLDTGIQASHPDLNVVGGASFVAGEAYNTDGNGHGTHVSGTVAALDNNTGVLGVAPSVSLYAVKVLNSSGSGSYSGIVSGIEWATTNGMDVINISLGGPSGSTAMKQAVDNAYARGVVVVAAAGNSGSSGNTNTIQYPAKYDSVIAVGAVDSNSQRASFSSVGAELEVMAPGVGVYSTYPTNTYATLSGTSMASPHVAGAAALILSKHPNLSASQVRNRLSSTATYLGPSFYYGKGLINVEAAAQ

SEQ ID NO: 58902 - protein, 274 aa, Bacillus licheniformis
AQTVPYGIPLIKADKVQAQGFKGANVKVAVLDTGIQASHPDLNVVGGASFVAGEAYNTDGNGHGTHVSGTVAALDNNTGVLGVAPSVSLYAVKVLNSSGSGSYSGIVSGIEWATTNGMDVINMSLGGRSGSTAMKQAVDNAYARGVVVVAAAGNSGSSGNTNTIQYPAKYDSVIAVGAVDSNSQRASFSSVGAELEVMAPGVGVYSTYPTNTYATLSGTSMASPHVAGAAALILSKHPNLSASQVRNRLSSTATYLGDSFYYGHGLINVEAAAQ

SEQ ID NO: 58903 - protein, 274 aa, Bacillus licheniformis
AQVVPYGIPLIKADKVQAQGFKGANVKVAVLDTGIQASHPDLNVVGGASFVAGEAYNTDGNGHGTHVSGTVAALDNNTGVLGVAPSVSLYAVKVLNSSGSGSYSGIVSGIEWATTNGMDVINISLGGPSGSTAMKQAVDNAYARGVVVVAGAGNSGSSGNTNTIQYPAKYDSVIAVGAVDSNSQRASFSSVGAELEVMAPGAGVYSTYPTNTYATLSGTSMASPHVAGAAALILSKHPNLSASQVRNRLSSTATYLGSSFYYGKGLINVEAAAQ

SEQ ID NO: 58904 - protein, 274 aa, Bacillus licheniformis
AQVVPYGIPLIKADKVQAQGFKGANVKVAVLDTGIQASHPDLNVVGGASFVAGEAYNTDGNGHGTHVSGTVAALDNNTGVLGVAPSVSLYAVKVLNSSQSGSYSGIVSGIEWATTNGMDVINMSLGGPSGSTAMKQAVDNAYARGVVVVAAAGNSGSSGNTNTIQYPAKYDSVIAVGAVDSNSQRASFSSVGAELEVMAPGVGVYSTYPTNTYATLSGTSMASPHVAGAAALILSKHPNLSASQVRNRLSSTATYLGSSFYYGKGLINVEAAAQ

SEQ ID NO: 58905 - protein, 274 aa, Bacillus licheniformis
AQVVPYGIPLIKADKVQAQGFKGANVKVAVLDTGIQASHPDLNVVGGASFVAGEAYNTDGNGHGTHVSGTVAALDNNTGVLGVAPSVSLYAVKVFNSSGSGSYSGIVSGIEWATTNGMDVINISLGGPSGSTAMKQAVDNAYARGVVVVAAAGNSGSSGNTNTIQYPAKYDSVIAVGAVDSNSQRASFSSVGAELEVMAPGAGVYSTYPTNTYATLSGTSMASPHVAGAAALILSKHPNLSASQVRNRLSSTATYLGSSFYYGKGLINVEAAAQ

SEQ ID NO: 58906 - protein, 274 aa, Bacillus licheniformis
AQTVPYGIPLIKADKVQAQGFKGANVKVAVLDTGIQASHPDLNVVGGASFVAGEAYNTDGNGHGTHVAGTVAALDNTTGVLGVAPHVSLYAVKVLNSSGSGSYSGIVSGIEWATFNGMDVINMSLGGAHGSTAMKQAVDNAYVRGVVVVAAAGNSGSSGNTNTIQYPAKYDSVIAVGAVDSNSQRASFSSVGAELEVMAPGVGVYSTYPTNTYATLSGTSMASPHVAGAAALILSKHPNLSASQVRNRLSSTATYLGPSFYYGKGLINVEAAAQ

SEQ ID NO: 58907 - protein, 274 aa, Bacillus licheniformis
AQVVPYGIPLIKADKVQAQGFKGANVKVAVLDTGIQASHPDLNVVGGASFVAGEAYNTDGNGHGTHVSGTVAALDNNTGVLGVAPSVSLYAVKVLNSSGSGSYSGIVSGIEWATTNGMDVINISLGGPSGSTAMKQAVDNAYARGVVVVAAAGNSGSSGNTNTIQYPAKYDSVIAVGAVDSNSQRASFSSVGAELEVMAPGAGVYSTYPTNTYATLSGTSMASPHVAGAAALILSKHPNLSASQVRNRLSSTATYLGPSFYYGKGLINVEAAAQ

SEQ ID NO: 58908 - protein, 274 aa, Bacillus licheniformis
AQVVPYGIPLIKADKVQAQGFKGANVKVAVLDTGIQASHPDLNVVGGASFVAGEAYNTDGNGHGTHVSGTVAALDNNTGVLGVAPSVSLYAVKVFNSSGSGSYSGIVSGIEWATTNGMDVINMSLGGPSGSTAMKQAVDNAYARGVVVVAAAGNSGSSGNTNTIQYPAKYDSVIAVGAVDSNSQRASFSSVGAELEVMAPGVGVYSTYPTNTYATLSGTSMASPHVAGAAALILSKHPNLSASQVRNRLSSTATYLGSSFYYGKGLINVEAAAQ

SEQ ID NO: 58909 - protein, 274 aa, Bacillus licheniformis
AQTVPYGIPLIKADKVQAQGFKGANVKAAVLDTGAQASHPDLNVVGGASFVAGEAYNTDGNGHGTHVSGTVAALDNNTGVLGVAPSVSLYAVKVLNSSGSGSYSGIVSGIEWATTNGMDVINMSLGGSSGSTAMKQAVDNAYARGVVVVAAAGNSGSSGNTNTIQYPAKYDSVIAVGAVDSNSQRASFSSVGAELEVMAPGANVYSTYPPNTYATLNGTSMASPHVAGAAALILSKHPNLSASQVRNRLSSTATYLGSSFYYGKGLINVEAAAQ

SEQ ID NO: 58910 - protein, 274 aa, Bacillus licheniformis
AQVVPYGIPLIKADKVQAQGFKGANVKVAVLDTGIQASHPDLNVVGGASFVAGEAYNTDGNGHGTHVSGTVAALDNNTGVLGVAPSVSLYAVKVLNSSGSGSYSGIVSGIEWATTNGMDVINISLGGPSGSTAMKQAVDNAYARGVVVVAAAGNSGSSGNTNTIQYPAKYDSVIAVGAVDSNSQRASFSSVGAELEVMAPGAGVYSTYPPNTYATLSGTSMASPHVAGAAALILSKHPNLSASQVRNRLSSTATYLGSSFYYGKGLINVEAAAQ

SEQ ID NO: 58911 - protein, 274 aa, Bacillus licheniformis
AQVVPYGIPLIKADKVQAQGFKGANVKVAVLDTGIQASHPDLNVVGGASFVAGEAYNTDGNGHGTHVAGTVAALDNTTGVLGVAPHVSLYAVKVLNSSGSGSYSGIVSGIEWATFNGMDVINISLGGASGSTAMKQAVDNAYVRGVVVVAAAGNSGSSGNTNTIQYPAKYDSVIAVGAVDSNSNRASFSSVGAELEVMAPGVGVYSTYPTNTYATLSGTSMASPHVAGAAALILSKHPNLSASQVRNRLSSTATYLGPSFYYGKGLINVEAAAQ

SEQ ID NO: 58912 - protein, 274 aa, Bacillus licheniformis
AQVVPYGIPLIKADKVQAQGFKGANVKVAVLDTGIQASHPDLNVVGGASFVAGEAYNTDGNGHGTHVSGTVAALDNNTGVLGVAPSVSLYAVKVLNSSGSGSYSGIVSGIEWANTNGMDVINISLGGPSGSTAMKQAVDNAYARGVVVVAAAGNSGSSGNTNTIQYPAKYDSVIAVGAVDSNSQRASFSSVGAELEVMAPGAGVYSTYPTNTYATLSGTSMASPHVAGAAALILSKHPNLSASQVRNRLSSTATYLGSSFYYGKGLINVEAAAQ

SEQ ID NO: 58913 - protein, 274 aa, Bacillus licheniformis
AQTVPYGIPLIKADKVQAQGFKGANVKVAVLDTGIQASHPDLNVVGGASFVAGEAYNTDGNGHGTHVSGTVAALDNNTGVLGVAPNSSLYAVKVLNSSGSGSYSGIVSGIEWATTNGMDVINMSLGGPSGSTAMKQAVDNAYARGVVVVAAAGNGGSSGNTNTIQYPAKYDSVIAVGAVDSNSNRASFSSVGAELEVMAPGAGVYSTYPTNTYATLSGTSMASPHVAGAAALILSKHPNLSGSQVRNRLSSTATYLGSSFYYGKGLINVEAAAQ

SEQ ID NO: 58914 - protein, 274 aa, Bacillus licheniformis
AQVVPYGIPLIKADKVQAQGFKGANVKVAVLDTGIQASHPDLNVVGGASFVAGEAYNTDGNGHGTHVSGTVAALDNNTGVLGVAPSVSLYAVKVLNSSGSGSYSGIVSGIEWATTNGMDVINISLGVPSGSTAMKQAVDNAYARGVVVVAAAGNSGSSGNTNTIQYPAKYDSVIAVGAVDSNSQRASFSSVGAELEVMAPGAGVYSTYPTNTYATLSGTSMASPHVAGAAALILSKHPNLSASQVRNRLSSTATYLGSSFYYGKGLINVEAAAQ

SEQ ID NO: 58915 - protein, 274 aa, Bacillus licheniformis
AQTVPYGIPLIKADKVQAQGFKGANVKVAVLDTGIQASHPDLNVVGGASFVAGEAYNTDGNGHGTHVAGTVAALDNTTGVLGVAPHVSLYAVKVANSSGSGSYSGIVSGIEWATTNGMDVINMSLGGASGSTAMKQAVDNAYARGVVVVAAAGNSGSSGNTNTIGYPAKYDSVIAVGAVDSNSQRASFSSVGAELEVMAPGVGVYSTYPPNTYATLSGTSMASPHVAGAAALIWSKHPNLSASQVRNRLGSTATYLGPSFYYGKGLINVEAAAQ

SEQ ID NO: 58916 - protein, 274 aa, Bacillus licheniformis
AQTVPYGIPLIKADKVQAQGFKGANVKVAVLDTGIQASHPDLNVVGGASFVAGEAYNTDGNGHGTHVSGTVAALDNNTGVLGVAPSVSLYAVKVLNSSGSGSYSGIVSGIEWATTNGMDVINMSLGGPSGSTAMKNAVDNAYARGVVVVAAAGNNGSSGNTNTIQYPAKYDSVIAVGAVDSNSQRASFSSVGAELEVMAPGAGVYSTYPTNTYATLSGTSMASPHVAGAAALILSKHPNLSNSQVRNRLSSTATYLGSSFYYGKGLINVEAAAQ

SEQ ID NO: 58917 - protein, 274 aa, Bacillus licheniformis
AQVVPYGIPLIKADKVQAQGFKGANVKVAVLDTGIQASHPDLNVVGGASFVAGEAYNTDGNGHGTHVSGTVAALDNNTGVLGVAPSVSLYAVKVLNSSGSGSYSGIVSGIEWATTNGMDVINMSLGTPSGSTAMKQAVDNAYARGVVVVAGAGNSGSSGNTNTIQYPAKYDSVIAVGAVDSNSQRASFSSVGAELEVMAPGAGVYSTYPTNTYATLSGTSMASPHVAGAAALILSKHPNLSASQVRNRLSSTATYLGSSFYYGKGLINVEAAAQ

SEQ ID NO: 58918 - protein, 274 aa, Bacillus licheniformis
AQVVPYGIPLIKADKVQAQGFKGANVKVAVLDTGIQASHPDLNVVGGASFVAGEAYNTDGNGHGTHVSGTVAALDNNTGVLGVAPSVSLYAVKVLNSSGSGSYSGIVSGIEWATTNGMDVINMSLGTPSGSTAMKQAVDNAYARGVVVVAAAGNSGSSGNTNTIQYPAKYDSVIAVGAVDSNSQRASFSSVGAELEVMAPGVGVYSTYPTNTYATLSGTSMASPHVAGAAALILSKHPNLSASQVRNRLSSTATYLGSSFYYGKGLINVEAAAQ

SEQ ID NO: 58919 - protein, 274 aa, Bacillus licheniformis
AQTVPYGIPLIKADKVQAQGFKGANVKVAVLDTGIQASHPDLNVVGGASFVAGEAYNTDGNGHGTHVSGTVAALDNNTGVLGVAPSVSLYAVKVLNSSGSGSYSGIVSGIEWATTNGMDVINMSLGTPSGSTAMKQAVDNAYARGVVVVAAAGNSGSSGNTNTIQYPAKYDSVIAVGAVDSNSQRASFSSVGAELEVMAPGVGVYSTYPTNTYATLSGTSMASPHVAGAAALILSKHPNLSASQVRNRLSSTATYLGPSFYYGKGLINVEAAAQ

SEQ ID NO: 58920 - protein, 274 aa, Bacillus licheniformis
AQVVPYGIPLIKADKVQAQGFKGANVKVAVLDTGIQASHPDLNVVGGASFVAGEAYNTDGNGHGTHVSGTVAALDNNTGVLGVAPSVSLYAVKVLNSSGSGSYSGIVSGIEWATTNGMDVINISLGTPSGSTAMKQAVDNAYARGVVVVAAAGNSGSSGNTNTIQYPAKYDSVIAVGAVDSNSQRASFSSVGAELEVMAPGAGVYSTYPTNTYATLSGTSMASPHVAGAAALILSKHPNLSASQVRNRLSSTATYLGSSFYYGKGLINVEAAAQ

SEQ ID NO: 58921 - protein, 274 aa, Bacillus licheniformis
AQVVPYGIPLIKADKVQAQGFKGANVKVAVLDTGIQASHPDLNVVGGASFVAGEAYNTDGNGHGTHVSGTVAALDNNTGVLGVAPSVSLYAVKVLNSSGSGSYSGIVSGIEWATTNGMDVINMSLGSPSGSTAMKQAVDNAYARGVVVVAAAGNSGSSGNTNTIQYPAKYDSVIAVGAVDSNSQRASFSSVGAELEVMAPGAGVYSTYPTNTYATLSGTSMASPHVAGAAALILSKHPNLSASQVRNRLSSTATYLGPSFYYGKGLINVEAAAQ

SEQ ID NO: 58922 - protein, 274 aa, Bacillus licheniformis
AQVVPYGIPLIKADKVQAQGFKGANVKVAVLDTGIQASHPDLNVVGGASFVAGEAYNTDGNGHGTHVSGTVAALDNNTGVLGVAPSVSLYAVKVLNSSGSGSYSGIVSGIEWATTNGMDVINISLGGPSGSTAMKQAVDNAYARGVVVVAAAGNSGSSGNTNTIQYPAKYDSVIAVGAVDSNSQRASFSSVGAELEVMAPGAQVYSTYPTNTYATLSGTSMASPHVAGAAALILSKHPNLSASQVRNRLSSTATYLGSSFYYGKGLINVEAAAQ

SEQ ID NO: 58923 - protein, 274 aa, Bacillus licheniformis
AQTVPYGIPLIKADKVQAQGFKGANVKVAVLDTGIQASHPDLNVVGGASFVAGEAYNTDGNGHGTHVSGTVAALDNNTGVLGVAPSVSLYAVKVLNSSGSGSYSGIVSGIEWATTNGMDVINISLGSPSGSTAMKQAVDNAYARGVVVVAAAGNSGSSGNTNTIQYPAKYDSVIAVGAVDSNSQRASFSSVGAELEVMAPGVGVYSTYPTNTYATLSGTSMASPHVAGAAALILSKHPNLSASQVRNRLSSTATYLGSSFYYGKGLINVEAAAQ

SEQ ID NO: 58924 - protein, 274 aa, Bacillus licheniformis
AQVVPYGIPLIKADKVQAQGFKGANVKVAVLDTGIQASHPDLNVVGGASFVAGEAYNTDGNGHGTHVSGTVAALDNNTGVLGVAPSVSLYAVKVLNSSGSGSYSGIVSGIEWATTNGMDVINMSLGSPSGSTAMKQAVDNAYARGVVVVAAAGNSGSSGNTNTIQYPAKYDSVIAVGAVDSNSQRASFSSVGAELEVMAPGVGVYSTYPTNTYATLSGTSMASPHVAGAAALILSKHPNLSASQVRNRLSSTATYLGSSFYYGKGLINVEAAAQ

SEQ ID NO: 58925 - protein, 274 aa, Synthetic construct
AQTVPYGIPLIKAKKVQAQGFKGANVKVAVLDTGIQASHPDLNVVGGASFVAGEAYNTDGNGHGTHVAGTVAALDNTTGVLGVAPSVSLYAVKVLGASGSGTYSGIVSGLEWATTNGMKVINMSLGGPSGSTAMKQAVDNAYARGVVVVAAAGNSGSSGNTNTIGYPAKYDSVIAVGAVDSNSNRASFSSVGAELEVMAPGAGVYSTYPTSTYATLNGTSMASPHVAGAAALILSKHPNLSASQVRNRLSSTATYLGSSFYYGKGLINVEAAAR

SEQ ID NO: 58926 - protein, 274 aa, Bacillus licheniformis
AQTVPYGIPLIKADKVQAQGFKGANVKVAVLDTGIQASHPDLNVVGGASFVAGEAYNTDGNGHGTHVSGTVAALDNNTGVLGVAPSVSLYAVKVLNSSGSGSYSGIVSGIEWATTNGMDVINISLGTPSGSTAMKQAVDNAYARGVVVVAAAGNSGSSGNTNTIQYPAKYDSVIAVGAVDSNSQRASFSSVGAELEVMAPGAGVYSTYPPNTYATLSGTSMASPHVAGAAALILSKHPNLSASQVRNRLSSTATYLGSSFYYGKGLINVEAAAQ

SEQ ID NO: 58927 - protein, 274 aa, Bacillus licheniformis
AQVVPYGIPLIKADKVQAQGFKGANVKVAVLDTGIQASHPDLNVVGGASFVAGEAYNTDGNGHGTHVSGTVAALDNNTGVLGVAPSVSLYAVKVLNSSESGSYSGIVSGIEWATTNGMDVINMSLGGPSGSTAMKQAVDNAYARGVVVVAAAGNSGSSGNTNTIQYPAKYDSVIAVGAVDSNSQRASFSSVGAELEVMAPGVGVYSTYPTNTYATLSGTSMASPHVAGAAALILSKHPNLSASQVRNRLSSTATYLGSSFYYGKGLINVEAAAQ

SEQ ID NO: 58928 - protein, 274 aa, Bacillus licheniformis
AQVVPYGIPLIKADKVQAQGFKGANVKVAVLDTGIQASHPDLNVVGGASFVAGEAYNTDGNGHGTHVSGTVAALDNNTGVLGVAPSVSLYAVKVLNSSGSGSYSGIVSGIEWATTNGMDVINMSLGEPSGSTAMKQAVDNAYARGVVVVAAAGNSGSSGNTNTIQYPAKYDSVIAVGAVDSNSQRASFSSVGAELEVMAPGVGVYSTYPTNTYATLSGTSMASPHVAGAAALILSKHPNLSASQVRNRLSSTATYLGSSFYYGKGLINVEAAAQ

SEQ ID NO: 58929 - protein, 274 aa, Bacillus licheniformis
AQTVPYGIPLIKADKVQAQGFKGANVKVAVLDTGIQASHPDLNVVGGASFVAGEAYNTDGNGHGTHVSGTVAALDNNTGVLGVAPSVSLYAVKVLNSSGSGSYSGIVSGIEWATTNGMDVINMSLGSPSGSTAMKQAVDNAYARGVVVVAAAGNSGSSGNTNTIQYPAKYDSVIAVGAVDSNSQRASFSSVGAELEVMAPGVGVYSTYPTNTYATLSGTSMASPHVAGAAALILSKHPNLSASQVRNRLSSTATYLGPSFYYGKGLINVEAAAQ

SEQ ID NO: 58930 - protein, 213 aa, Unidentified
AQSVPWGISRVQAPAAHNRGLTGSGVKVAVLDTGISTHPDLNIRGGASFVPGEPSTQDGNGHGTHVAGTIAALNNSIGVLGVAPSAELYAVKVLGASGSGSVSSIAQGLEWAGNNGMHVANLSLGSPSPSATLEQAVNSATSRGVLVVAASGNSGAGSISYPARYANAMAVGATDQNNNRASFSQYGAGLDIVAPGVNVQSTYPGCLANGTQL

SEQ ID NO: 58931 - protein, 367 aa, Unidentified
LGKIVASTALLISVAFSSSIASAAEEAKEKYLIGFNEQEAVSEFVEQVEANDEVAILSEEEEVEIELLHEFETIPVLSVELSPEDVDALELDPAISYIEEDAEVTTMRVQAPAAHNRGLTGSGVKVAVLDTGISTHPDLNIRGGASFVPGEPSTQDGNGHGTHVAGTIAALNNSIGVLGVAPNAELYAVKVLGASGSGSVSSIAQGLEWAGNNGMHVANLSLGSPSPSATLEQAVNSATSRGVLVVAASGNSGAGSISYPARYANAMAVGATDQNNNRASFSQYGAGLDIVAPGVNVQSTYPGSTYASLNGTSMATPHVAGAAALVKQKNPSWSNVQIRNHLKNTATSLGSTNLYGSGLVNAEAATR

SEQ ID NO: 58932 - protein, 155 aa, Unidentified
AQSVPWGISRVQAPAAHNRGLTGSGVKVAVLDTGISTHPDLNIRGGASFVPGEPSTQDGNGHGTHVAGTIAALNNSIGVLGVAPSAELYAVKVLGASGSGSVSSIAQGLEWAGNNGMHVANLSLGSPSPSATLEQAVNSATCLAEGSLVLDAATG

SEQ ID NO: 58933 - protein, 273 aa, Bacillus licheniformis
AQTVPYGIRLIKADKVQAQQFKGANVKVAVLDTGIQASHPDLNVVGGASFVAGEAYNTDGNGMGTHVAGTVAALDNTTGVLGVAPSVSLYAVKVLNSSGSGSYSGIVSGIEWATTNGMDVINMSLGGASGSTAMKQAVDNAYAKRVVVVAVGNSGSSGNTNTIGYPAKYESVIAVGAVDSNSNRASFSSVGAELEVMAPGAGVYSTYPTSTYATLNGTSMASPHVAGAAALILSKHPNLSASQVRNRLSSTATYLGSSFYYGKGLINVEAAAR

SEQ ID NO: 58934 - protein, 273 aa, Bacillus licheniformis
AQTVPYGIPLIKADKVQAQGFKGANVKVAVLDTGIQASHPDLNVVGGASFVAGEAYNTDGNGHGTHVSGTVAALDNTTGVLGVAPHVSLYAVKVLNSSGSGSYSGIVSGIEWATFNGMDVINMSLGGASGSTAMKQAVDNAYARGVVVVAAAGNSGSSGNTNTIGYPAKYDSVIAVGAVDSNSQRASFSSVGAELEVMAPGVNVYSTYPTNTYATLNGTSMASPHVAGAAALILSKHPSLSASQVRNRLGSTATYLGPSFYYGKGLINVEAAA

SEQ ID NO: 58935 - protein, 272 aa, Bacillus licheniformis
QVVPYGIPLIKADKVQAQGFKGANVKVAVLDTGIQASHPDLNVVGGASFVAGEAYNTDGNGHGTHVAGTVAALDNTTGVLGVAPHVSLYAVKVLNSSGSGSYSGIVSGIEWATTNGMDVINMSLGGASSSTAMKQAVDNAYARGVVVVAAAGNGGSSGNTNTIQYPAKYDSVIAVGAVDSNSQRASFSSVGAELEVMAPGVNVYSTYPPNTYATLNGTSMASPHVAGAAALILSKHPNLSASQVRNRLSSTATYLGSSFYYGKGLINVEAAA

SEQ ID NO: 58936 - protein, 210 aa, Unidentified
TAGAQSVPWGISRVQAPAAHNRGLTGSGVKVAVLDTGISTHPDLNIRGGASFVPGEPSTQDGNGHGTHVAGTIAALNNSIGVLGVAPSAELYAVKVLGADGRGAISSIAQGLEWAGNNGMHVANLSLGSPSPSATLEQAVNSATSRGVLVVAASGNSGASSISYPARYANAMAVGATDQNNNRASFSQYGAGLDIVAPGVNVQSTYPGST

SEQ ID NO: 58937 - protein, 269 aa, Unidentified
AQSVPWGISRVQAPAAHNRRLTGSGVKVAVLDTGISTHPDLNIRGGASFVPGEPSTQDGEGHGTHVAGTIAALNNDIGVLGVAPSAELYAVKVLGASGSGSVSSIAQGLEWAGNNSMHVANLSLGSESPSATLEQAVNSATSRGVLVVAASGNSGADSISYPARYANAMAVGATDQNNNRASFSQYGAGLDIVAPGVNVQSTYPGSTYASLNGTSMATPHVAGAAALVKQKNPSWSNVRIRDHLKNTATSLGSTNLYGSGLVNAEAATR

SEQ ID NO: 58938 - protein, 269 aa, Unidentified
AQSVPWGISRVQAPAAHRRRLTGRGVKVAVLDTGISTHPDLNIRGGASFVPGEPSTQDGNGHGTHVAGTIAALDNSIGVLGVAPSAELYAVKVLGASGAGSVSSIAQGLEWAGANGMHVANLSLGSPSPSATLEQAVNSATSRGVLVVAASGNSGAGSISYPARYANAMAVGATDQNNNRASFSQYGAGLDIVAPGVNVQSTYPGSAYASLNGTSMATPHVAGAAALVKQKNPSWSNVQIRNRLKNTATSLGSTNLYGSGLVNAEAATR

SEQ ID NO: 58939 - protein, 269 aa, Unidentified
AQSVPWGISRVQAPAAHNRRLTGRGVKVAVLDTGISTHPDLNIRGGASFVPGEPSTQDGNGHGTHVAGTIAALNNNIGVLGVAPSAELYAVKVLAASGQGSVSSIANGLEWAGLNGMHVANLSLGSPSPSATLEQAVNSATSRGVLVVAASGNSGAGSISYPARYANAMAVGATDQNNNRASFSQYGAGLDIVAPGVNVQSTYPGSTYASQNGTSMATPHVAGAAALVKQKNPSWSNVQIRNHLKNTATSLGSTNLYGSGLVNAEAATR

SEQ ID NO: 58940 - protein, 269 aa, Unidentified
AQSVPWGISRVQAPAAHNRGLTGRGVKVAVLDTGISTHPDLNIRGGASFVPGEPSTQDGEGHGTHVAGTIAALNNSIGVLGVAPSAELYAVKVLGASGAGAISSIAQGLEWAGNNGMHVANLSLGSPSPSATLEQAVNSATSRGVLVVAASGNSGAGSISYPARYANAMAVGATDQNNNRADFSQYGAGLDIVAPGVNVQSTYPGSTYASLNGTSMATPHVAGAAVLVKQKNPSWSNVRIRNHLKNTATSLGSTNLYGSGLVNAEAATR

SEQ ID NO: 58941 - protein, 269 aa, Unidentified
AQSVPWGISRVQAPAAHNRGLTGSGVKVAVLDTGISTHPDLNIRGGASFVPGEPSTQDGNGHGTHVAGTIAALDNNIGVLGVAPDAELYAVKVLGASGSGSVSSIAQGLEWAGNNRMHVANLSLGLQAPSATLEQAVNSATSRGVLVVAASGNSGAGSISYPARYANAMAVGATDQNNNRASFSQYGAGLDIVAPGVNVYSTYPGSTYASLNGTSMATPHVAGAAALVKQKNPSWSNVQIRNHLKNTATSLGSTNLYGSGLVNAEAATR

SEQ ID NO: 58942 - protein, 269 aa, Unidentified
AQSVPWGISRVQAPAAHNRGLTGRGVKVAVLDTGISTHPDLNIRGGASFVPGEPSTQDGEGHGTHVAGTIAALNNDIGVLGVAPSAELYAVKVLGASGSGSVSSIAQGLEWAGNNSMHVANLSLGSESPSATLEQAVNSATSRGVLVVAASGNSGAGSISYPARYANAMAVGATDQNNNRADFSQYGAGLDIVAPGVNVQSTYPGSTYASLNGTSMATPHVAGAAALVKQKNPSWSNVRIRDHLKNTATSLGSTNLYGSGLVNAEAATR

SEQ ID NO: 58943 - protein, 269 aa, Unidentified
AQSVPWGISRVQAPAAHNRGLAGGGVKVAVLDTGISTHPDLNIRGGASFVPGEPSTQDGNGHGTHVAGTIAALNNSIGVLGVAPSAELYAVKVLAASGQGAISSIAQGLEWAGNNGMHVANLSLGSPSPSATLEQAVNSATSRGVLVVAASGNSGAGSISYPARYANAMAVGATDQNNNRASFSQYGAGLDIVAPGVNVQSTYPGSTYASLNGTSMATPHVAGAAVLVKQKNPSWSNVRIRNHLKNTATSLGSTNLYGSGLVNAEAATR

SEQ ID NO: 58944 - protein, 269 aa, Unidentified
AQSVPWGISRVQAPAAHNRKLLGFGVKVAVLDTGISTHPDLNIRGGASFVPGEPSTQDGNGHGTHVAGTIAALNNSIGVLGVAPSAELYAVKVLGASGSGSVSSIAQGLEWAGNNRMHVANLSLGDPSPSATLEQAVNSATSRGVLVVAASGNSGAGSIDYPARYANAMAVGATDQNNNRASFSQYGAGLDIVAPGVNVQSTYPGSAYASENGTSMATPHVAGAAALVKQKNPSWSNVQIRNHLKNTATSLGSTNLYGSGLVNAEAATR

SEQ ID NO: 58945 - protein, 269 aa, Unidentified
AQSVPWGISRVQAPAAHNRGLAGSGVKVAVLDTGISTHPDLNIRGGASFVPGEPSTQDGNGHGTHVAGTIAALNNSIGVLGVAPSAELYAVKVLGASGQGAISSIAQGLEWAGNNGMHVANLSLGAPSPSATLEQAVNSATSRGVLVVAASGNSGAGSISYPARYANAMAVGATDQNNNRASFSQYGAGLDIVAPGVNVQSTYPGSTYASQNGTSMATPHVAGAAVLVKQKNPSWSNVRIRNHLKNTATSLGSTNLYGSGLVNAEAATR

SEQ ID NO: 58946 - protein, 269 aa, Unidentified
AQSVPWGISRVQAPAAHNRGLTGSGVKVAVLDTGISTHPDLNIRGGASFVPGEPSTQDGNGHGTHVAGTIAALDNTIGVLGVAPRAELYAVKVLGASGSGSVSSIAQGLEWAGNNRMHVANLSLGLQAPSATLEQAVNSATSRGVLVVAASGNSGAGSISYPARYANAMAVGATDQNNNRASFSQYGAGLDIVAPGVNVMSTYPGSTYASLNGTSMATPHVAGAAALVKQKNPSWSNVQIRNHLKNTATSLGSTNLYGSGLVNAEAATR

SEQ ID NO: 58947 - protein, 269 aa, Unidentified
AQSVPWGISRVQAPAAHRRGLTGRGVKVAVLDTGISTHPDLNIRGGASFVPGEPSTQDGNGHGTHVAGTIAALDNSIGVLGVAPSAELYAVKVLGASGAGSVSSIAQGLEWAGNNGMHVANLSLGSPSPSATLEQAVNSATSRGVLVVAASGNSGAGSISYPARYANAMAVGATDQNNNRASFSQYGAGLDLVAPGVNVQSTYPQSAYASLNGTSMATPHVAGAAALVKQKNPSWSNVQIRNRLKNTATSLGSTNLYGSGLVNAEAATR

SEQ ID NO: 58948 - protein, 269 aa, Unidentified
AQSVPWGISRVQAPAAHNRRLTGRGVKVAVLDTGISTHPDLNIRGGASFVPGEPSTQDGEGHGTHVAGTIAALNNDIGVLGVAPSAELYAVKVLGASGSGSVSSIAQGLEWAGNNSMHVANLSLGSPSPSATLEQAVNSATSRGVLVVAASGNSGADSISYPARYANAMAVGATDQNNNRASFSQYGAGLDIVAPGVNVQSTYPGSTYASLNGTSMATPHVAGAAALVKQKNPSWSNVRIRDHLKNTATSLGSTNLYGSGLVNAEAATR

SEQ ID NO: 58949 - protein, 269 aa, Unidentified
AQSVPWGISRVQAPAAHNRRLWGSGVKVAVLDTGISTHPDLNIRGGASFVPGEPSTQDGNGHGTHVAGTIAALNNSIGVLGVAPSAELYAVKVLGASGAGAISSIAQGLEWAGNNGMHVANLSLGSPSPSATLEQAVNSATSRGVLVVAASGNSGAGSISYPARYANAMAVGATDQNNNRASFSQYGAGLDIVAPGVNVQSTYPQSTYASLNGTSMATPHVAGAAVLVKQKNPSWSNVRIRNHLKNTATSLGSTNLYGSGLVNAEAATR

SEQ ID NO: 58950 - protein, 269 aa, Unidentified
AQSVPWGISRVQAPAAHRRRLTGRGVKVAVLDTGISTHPDLNIRGGASFVPGEPSTQDGNGHGTHVAGTIAALDNSIGVLGVAPSAELYAVKVLGASGSGSVSSIAQGLEWAGNNGMHVANLSLGSPSPSATLEQAVNSATSRGVLVVAASGNSGAGSISYPARYANAMAVGATDQDNNRASFSQYGAGLDIVAPGVNVQSTYPQSAYASLNGTSMATPHVAGAAALVKQKNPSWSNVQIRNRLKNTATSLGSTNLYGSGLVNAEAATR

SEQ ID NO: 58951 - protein, 269 aa, Unidentified
AQSVPWGISRVQAPAAHNRGLTGSGVKVAVLDTGISTHPDLNIRGGASFVPGEPSTQDGNGHGTHVAGTIAALNNSIGVLGVAPSAELYAVKVLGASGGGAISSIAQGLEWAGANGMHVANLSLGNPSPSATLEQAVNSATSRGVLVVAASGNSGAGSISYPARYANAMAVGATDQNNNRASFSQYGAGLDIVAPGVNVQSTAPQSTYASLNGTSMATPHVAGAAVLVKQKNPSWSNVQIRNHLKNTATSLGSTNLYGSGLVNAEAATR

SEQ ID NO: 58952 - protein, 269 aa, Unidentified
AQSVPWGISRVQAPAAHNRGLTGRGVKVAVLDTGISTHPDLDIRGGASFVPGEPSTQDGNGHGTHVAGTIAALNNSIGVLGVAPSAELYAVKVLGASGGGAISSIAQGLEWAGNNGMHVANLSLGSPSPSATLEQAVNSATSRGVLVVAASGNSGAGSISYPARYANAMAVGATDQNNNRASFSQYGAGLDIVAPGVNVQSTYPGSTYASLNGTSMATPHVAGAAVLVKQKNPSWSNVRIRNHLKNTATSLGSTNLYGSGLVRAEAATR

SEQ ID NO: 58953 - protein, 269 aa, Unidentified
AQSVPWGISRVQAPAAHNRGLTGSGVKVAVLDTGISTHPDLNIRGGASFVPGEPSTQDGNGHGTHVAGTIAALNNSIGVLGVAPSAELYAVKVLGASGGGAISSIAQGLEWAGLNGMHVANLSLGNPSPSATLEQAVNSATSRGVLVVAASGNSGAGSISYPARYANAMAVGATDQNNNRASFSQYGAGLDIVAPGVNVQSTVPGSAYASLNGTSMATPHVAGAAVLVKQKNPSWSNVQIRNHLKNTATSLGSTNLYGSGLVNAEAATR

SEQ ID NO: 58954 - protein, 269 aa, Unidentified
AQSVPWGISRVQAPAAHNRRLTGSGVKVAVLDTGISTHPDLNIRGGASFVPGEPSTQDGEGHGTHVAGTIAALNNDIGVLGVAPSAELYAVKVLGASGSGSVSSIAQGLEWAGNNDMHVANLSLGSESPSATLEQAVNSATSRGVLVVAASGNSGADSISYPARYANAMAVGATDQNNNRASFSQYGAGLDIVAPGVNVQSTYPGSTYASLNGTSMATPHVAGAAALVKQKNPSWSNVQIRDRLKNTATSLGSTNLYGSGLVNAEAATR

SEQ ID NO: 58955 - protein, 269 aa, Unidentified
AQSVPWGISRVQAPAAHNRGLTGRGVKVAVLDTGISTHPDLNIRGGASFVPGEPSTQDGEGHGTHVAGTIAALNNGIGVLGVAPSAELYAVKVLGASGSGSVSSIAQGLEWAGNNSMHVANLSLGSESPSATLEQAVNSATSRGVLVVAASGNSGADSISYPARYANAMAVGATDQNNNRADFSQYGAGLDIVAPGVNVQSTYPGSTYASLNGTSMATPHVAGAAALVKQKNPSWSNVRIRNHLKNTATSLGSTNLYGSGLVNAEAATR

SEQ ID NO: 58956 - protein, 269 aa, Unidentified
AQSVPWGISRVQAPAAHNRRLWGSGVKVAVLDTGISTHPDLNIRGGASFVPGEPSTQDGNGHGTHVAGTIAALNNSIGVLGVAPSAELYAVKVLGASGGGAISSIAQGLEWAGNNGMHVANLSLGSPSPSATLEQAVNSATSRGVLVVAASGNSGAGSISYPARYANAMAVGATDQDNNRASFSQYGAGLDIVAPGVNVQSTYPGSTYASLNGTSMATPHVAGAAVLVKQKNPSWSNVRIRNHLKNTATSLGSTNLYGSGLVNAEAATR

SEQ ID NO: 58957 - protein, 269 aa, Unidentified
AQSVPWGISRVQAPAAHNRRLWGSGVKVAVLDTGISTHPDLNIRGGASFVPGEPSTQDGNGHGTHVAGTIAALNNRIGVLGVAPSAELYAVKVLGASGAGAISSIAQGLEWAGNNGMHVANLSLGSPSPSATLEQAVNSATSRGVLVVAASGNSGAGSISYPARYANAMAVGATDQNNNRASFSQYGAGLDIVAPGVNVQSTYPGSTYASLNGTSMATPHVAGAAVLVKQKNPSWSNVRIRNHLKNTATSLGSTNLYGSGLVNAEAATR

SEQ ID NO: 58958 - protein, 269 aa, Unidentified
AQSVPWGISRVQAPAAHNRGLTGSGVKVAVLDTGISTHPDLNIRGGASFVPGEPSTQDGNGHGTHVAGTIAALDNSIGVLGVAPRAELYAVKVLGASGSGSVSSIAQGLEWAGNNRMHVANLSLGLQAPSATLEQAVNSATSRGVLVVAASGNSGAGSISYPARYANAMAVGATDQNNNRADFSQYGAGLDIVAPGVNVQSTYPGSTYASLNGTSMATPHVAGAAALVKQKNPSWSNRQIRNHLKNTATSLGSTNLYGSGLVNAEAATR

SEQ ID NO: 58959 - protein, 269 aa, Unidentified
AQSVPWGIERVQAPAAHNRGLTGSGVKVAVLDTGISTHPDLNIRGGASFVPGEPSTQDGNGHGTHVAGTIAALDNSIGVLGVAPSAELYAVKVLGASGSGSVSSIAQGLEWAGNNGMHVANLSLGSPSPSATLEQAVNSATSRGVLVVAASGNSGAGSISYPARYANAMAVGATDQNNNRASFSQYGAGLDIVAPGVNILSTWPGSTYASLNGTSMATPHVAGAAALVKQKNPSWSNVQIRNHLKNTATSLGDTWEYGSGLVNAEAATR

SEQ ID NO: 58960 - protein, 269 aa, Unidentified
AQSVPWGISRVQAPAAHNRRLTGRGVKVAVLDTGISTHPDLNIRGGASFVPGEPSTQDGEGHGTHVAGTIAALNNGIGVLGVAPSAELYAVKVLGASGSGSVSSIAQGLEWAGNNDMHVANLSLGSESPSATLEQAVNSATSRGVLVVAASGNSGAGSISYPARYANAMAVGATDQNNNRADFSQYGAGLDIVAPGVNVQSTYPGSTYASLNGTSMATPHVAGAAALVKQKNPSWSNVQIRDHLKNTATSLGSTNLYGSGLVNAEAATR

SEQ ID NO: 58961 - protein, 269 aa, Unidentified
AQSVPWGISRVQAPAAHNRRLTGSGVKVAVLDTGISTHPDLNIRGGASFVPGEPSTQDGEGHGTHVAGTIAALNNDIGVLGVAPSAELYAVKVLGASGSGSVSSIAQGLEWAGNNSMHVANLSLGSPSPSATLEQAVNSATSRGVLVVAASGNSGADSISYPARYANAMAVGATDQNNNRADFSQYGAGLDIVAPGVNVQSTYPGSTYASLNGTSMATPHVAGAAALVRQKNPSWSNVQIRDHLKNTATSLGSTNLYGSGLVNAEAATR

SEQ ID NO: 58962 - protein, 269 aa, Unidentified
AQSVPWGISRVQAPAAHNRGLTGSGVKVAVLDTGISTHPDLRIRGGASFVPGEPSTQDGNGHGTHVAGTIAALNNSIGVLGVAPSAELYAVKVLGASGGGAISSIAQGLEWAGNNGMHVANLSLGSPSPSATLEQAVNSATSRGVLVLAASGNSGAGSISYPARYANAMAVGATDQNNNRASFSQYGAGLDIVAPGVNVQSTYPGSTYASLNGTSMATPHVAGAAVLVKQKNPSWSNVRIRNHLKNTATSLGSTNLYGSGLVRAEAATR

SEQ ID NO: 58963 - protein, 269 aa, Unidentified
AQSVPWGISRVQAPAAHRRGLTGSGVKVAVLDTGISTHPDLNIRGGASFVPGEPSTQDGNGHGTHVAGTIAALDNRIGVLGVAPSAELYAVKVLGASGGGAISSIAQGLEWAGNNGMHVANLSLGSPSPSATLEQAVNSATSRGVLVVAASGNSGAGSISYPARYANAMAVGATDQNNNRASFSQYGAGLDIVAPGVNVQSTYPGSTYASLNGTSMATPHVAGAAVLVKQKNPSWSNVRIRNHLKNTATSLGSTNLYGSGLVNAEAATR

SEQ ID NO: 58964 - protein, 269 aa, Unidentified
AQSVPWGISRVQAPAAHNRGLAGSGVKVAVLDTGISTHPDLNIRGGASFVPGEPSTQDGNGHGTHVAGTIAALNNDIGVLGVAPSAELYAVKVLGASGNGAISSIAQGLEWAGNNGMHVANLSLGAPSPSATLEQAVNSATSRGVLVVAASGNSGAGSISYPARYANAMAVGATDQNNNRASFSQYGAGLDIVAPGVNVQSTYPGSTYASLNGTSMATPHVAGAAVLVKQKNPSWSNVRIRNHLKNTATSLGSTNLYGSGLVNAEAATR

SEQ ID NO: 58965 - protein, 269 aa, Unidentified
AQSVPWGISRVQAPAAHNRGLAGSGVKVAVLDTGISTHPDLNIRGGASFVPGEPSTQDGNGHGTHVAGTIAALDNNIGVLGVAPSAELYAVKVLGASGNGAISSIAQGLEWAGNNGMHVANLSLGSPSPSATLEQAVNSATSRGVLVVAASGNSGAGSISYPARYANAMAVGATDQNNNRASFSQYGAGLDIVAPGVNVQSTYPGSTYASLNGTSMATPHVAGAAVLVKQKNPSWSNVRIRNHLKNTATSLGSTNLYGSGLVNAEAATR

SEQ ID NO: 58966 - protein, 269 aa, Unidentified
AQSVPWGISRVQAPAAHNRGLTGRGVKVAVLDTGISTHPDLNIRGGASFVPGEPSTQDGEGHGTHVAGTIAALNNGIGVLGVAPSAELYAVKVLGASGSGSVSSIAQGLEWAGNNDMHVANLSLGSESPSATLEQAVNSATSRGVLVVAASGNSGAGSISYPARYANAMAVGATDQNNNRADFSQYGAGLDIVAPGVNVQSTYPGSTYASLNGTSMATPHVAGAAALVKQKNPSWSNVRIRNRLKNTATSLGSTNLYGSGLVNAEAATR

SEQ ID NO: 58967 - protein, 269 aa, Unidentified
AQSVPWGISRVQAPAAHNRRLTGRGVKVAVLDTGISTHPDLNIRGGASFVPGEPSTQDGNGHGTHVAGTIAALNNNIGVLGVAPSAELYAVKVLAASGAGSVSSIANGLEWAGLNGMHVANLSLGSPSPSATLEQAVNSATSRGVLVVAASGNSGAGSISYPARYANAMAVGATDQNNNRASFSQYGAGLDIVAPGVNVQSTYPGSTYASQNGTSMATPHVAGAAALVKQKNPSWSNVQIRNHLKNTATSLGSTNLYGSGLVNAEAATR

SEQ ID NO: 58968 - protein, 269 aa, Unidentified
AQSVPWGISRVQAPAAHNRGLAGSGVKVAVLDTGISTHPDLNIRGGASFVPGEPSTQDGNGHGTHVAGTIAALDNSIGVLGVAPSAELYAVKVLGASGQGAISSIAQGLEWAGNNGMHVANLSLGAPSPSATLEQAVNSATSRGVLVVAASGNSGAGSISYPARYANAMAVGATDQNNNRASFSQYGAGLDIVAPGVNVQSTYPGSTYASLNGTSMATPHVAGAAVLVKQKNPSWSNVRIRNHLKNTATSLGSTNLYGSGLVNAEAATR

SEQ ID NO: 58969 - protein, 269 aa, Unidentified
AQSVPWGISRVQAPAAHNRRLTGRGVKVAVLDTGISTHPDLNIRGGASFVPGEPSTQDGNGHGTHVAGTIAALNNNIGVLGVAPSAELYAVKVLAASGNGSVSSIANGLEWAGLNGMHVANLSLGAPSPSATLEQAVNSATSRGVLVVAASGNSGAGSISYPARYANAMAVGATDQNNNRASFSQYGAGLDIVAPGVNVQSTYPGSTYASLNGTSMATPHVAGAAALVKQKNPSWSNVQIRNHLKNTATSLGSTNLYGSGLVNAEAATR

SEQ ID NO: 58970 - protein, 269 aa, Unidentified
AQSVPWGISRVQAPAAHRRGLTGRGVKVAVLDTGISTHPDLNIRGGASFVPGEPSTQDGNGHGTHVAGTIAALDNSIGVLGVAPSAELYAVKVLGASGSGSVSSIAQGLEWAGNNGMHVANLSLGSPSPSATLEQAVNSATSRGVLVVAASGNSGAGSISYPARYANAMAVGATDQNNNRASFSQYGAGLDMVAPGVNVQSTYPQSAYFSLNGTSMATPHVAGAAALVKQKNPSWSNVQIRNRLKNTATSLGSTNLYGSGLVNAEAATR

SEQ ID NO: 58971 - protein, 269 aa, Unidentified
AQSVPWGISRVQAPAAHNRGLTGSGVKVAVLDTGISTHPDLNIRGGASFVPGEPSTQDGNGHGTHAAGTIAALDNSIGVLGVAPSAELYAVKVLGASGSGAISSIAQGLEWAGNNGMHVASLSLGSPSPSATLEQAVNSATSRGVLVVAASGNSGADSISYPARYANAMAVGATDQNNNRASFSQYGAGLDIVAPGVNVQSTYPGSTYASLNGTSMATPHVAGAAALVKHKNPSWSNVQIRNYLKNTATSLGSTNLYGSGLVNAEAATR

SEQ ID NO: 58972 - protein, 269 aa, Unidentified
AQSVPWGISRVQAPAAHNRGLTGSGVKVAVLDTGISTHPDLNIRGGASFVPGEPSTQDGNGHGTHVAGTIAALNNSIGVLGVAPSAELYAVKVLGASGGGAVSSIAQGLEWAGNNGMHVANLSLGSPSPSATLEQAVNSATSRGVLVVAASGNSGADSISYPARYANAMAVGATDQNNNRASFSQYGAGLDIVAPGVNVQSTYPGSTYASLNGTSMATPHVAGAAVLVKHKNPSWSNVRIRDHLKKTATSLGSTNLYGSGLVNAEAATR

SEQ ID NO: 58973 - protein, 269 aa, Unidentified
AQSVPWGISRVQAPAAHNRGLTGSGVKVAVLDTGISTHPDLNIRGGASFVPGEPSTQDGNGHGTHVAGTIAALNNSIGVLGVAPSAELYAVKVLGASGGGSISSIAQGLEWAGNNGMHVANLSLGSPSPSATLEQAVNSATSRGVLVVAASGNSGADSISYPARYANAMAVGATDQNNNRASFSQYGAGLDIVAPGVNVQSTYPGSTYASLNGTSMATPHVAGAAVLVKHKNPSWSNVRIRDHLKKTATSLGSTNLYGSGLVNAEAATR

SEQ ID NO: 58974 - protein, 269 aa, Unidentified
AQSVPWGISRVQAPAAHNRGLTGSGVKVAVLDTGISTHPDLNIRGGASFVPGEPSTQDGNGHGTHVAGTIAALNNSIGVLGVAPSAELYAVKVLGASGGGALSSIAQGLEWAGNNGMHVANLSLGSPSPSATLEQAVNSATSRGVLVVAASGNSGADSISYPARYANAMAVGATDQNNNRASFSQYGAGLDIVAPGVNVQSTYPGSTYASLNGTSMATPHVAGAAVLVKQKNPSWSNVRIRDHLKKTATSLGSTNLYGSGLVNAEAATR

SEQ ID NO: 58975 - protein, 269 aa, Unidentified
AQSVPWGISRVQAPAAHRRGLWGRGVKVAVLDTGISTHPDLNIRGGASFVPGEPSTQDGNGHGTHVAGTIAALDNSIGVLGVAPSAELYAVKVLGASGSGSVSSIAQGLEWAGANGMHVANLSLGSPSPSATLEQAVNSATSRGVLVVAASGNSGAGSISYPARYANAMAVGATDQDNNRASFSQYGAGLDIVAPGVNVQSTYPGSAYASLNGTSMATPHVAGAAALVKQKNPSWSNVQIRNRLKNTATSLGSTNLYGSGLVNAEAATR

SEQ ID NO: 58976 - protein, 269 aa, Unidentified
AQSVPWGISRVQAPAAHNRRLWGRGVKVAVLDTGISTHPDLRITGGASFVPGEPSTQDGNGHGTHVAGTIAALNNSIGVLGVAPSAELYAVKVLGASGAGSVSSIAQGLEWAGNNGMHVANLSLGSPSPSATLEQAVNSATSRGVLVVAASGNSGAGSISYPARYANAMAVGATDQNNNRASFSQYGAGLDIVAPGVNVQSTYIQSTYASLNGTSMATPHVAGAAALVKQKNPSWSNVQIRNHLKNTATSLGSTNLYGSGLVNAEAATR

SEQ ID NO: 58977 - protein, 269 aa, Unidentified
AQSVPWGISRVQAPAAHNRGLWGRGVKVAVLDTGISTHPDLRITGGASFVPGEPSTQDGNGHGTHVAGTIAALNNSIGVLGVAPSAELYAVKVLGASGAGSVSLIAQGLEWAGNNGMHVANLSLGSPSPSATLEQAVNSATSRGVLVVAASGNSGAGSISYPARYANAMAVGATDQNNNRASFSQYGAGLDIVAPGVNVQSTYIQSTYASLNGTSMATPHVAGAAALVKQKNPSWSNVQIRNHLKNTATSLGSTNLYGSGLVNAEAATR

SEQ ID NO: 58978 - protein, 269 aa, Unidentified
AQSVPWGISRVQAPAAHNRGLTGFGVKVAVLDTGISTHPDLNIRGGASFVPGEPSTQDGNGHGTHVAGTIAALNNSIGVLGVAPSAELYAVKVLGASGGGAISSIAQGLEWAGANGMHVANLSLGNPSPSATLEQAVNSATSRGVLVVAASGNSGAGSISYPARYANAMAVGATDQNNNRASFSQYGAGLDIVAPGVNVQSTVPGSTYASLNGTSMATPHVAGAAVLVKQKNPSWSNVQIRNHLKNTATSLGSTNLYGSGLVNAEAATR

SEQ ID NO: 58979 - protein, 269 aa, Unidentified
AQSVPWGISRVQAPAAHNRRLWGSGVKVAVLDTGISTHPDLNIRGGASFVPGEPSTQDGNGHGTHVAGTIAALNNSIGVLGVAPSAELYAVKVLGASGGGAISSIAQGLEWAGNNGMHVANLSLGSPSPSATLEQAVNSATSRGVLVVAASGNSGAGSISYPARYANAMAVGATDQNNNRASFSQYGAGLDIVAPGVNVQSTYPQSTYASLNGTSMATPHVAGAAVLVKQKNPSWSNVRIRNHLKNTATSLGSTNLYGSGLVNAEAATR

SEQ ID NO: 58980 - protein, 269 aa, Unidentified
AQSVPWGISRVQAPAAHNRGLTGSGVKVAVLDTGISTHPDLNIRGGASFVPGEPSTQDGNGHGTHVAGTIAALNNSIGVLGVAPSAELYAVKVLGASGGGAISSIAQGLEWAGLNGMHVANLSLGNPSPSATLEQAVNSATSRGVLVVAASGNSGAGSISYPARYANAMAVGATDQNNNRASFSQYGAGLDIVAPGVNVQSTAPQSTYASLNGTSMATPHVAGAAVLVKQKNPSWSNVQIRNHLKNTATSLGSTNLYGSGLVNAEAATR

SEQ ID NO: 58981 - protein, 269 aa, Unidentified
AQSVPWGISRVQAPAAHNRGLTGSGVKVAVLDTGISTHPDLNIRGGASFVPGEPSTQDGNGHGTHVAGTIAALDNFIGVLGVAPRAELYAVKVLGASGSGSVSSIAQGLEWAGNNRMHVANLSLGLQAPSATLEQAVNSATSRGVLVVAASGNSGAGSISYPARYANAMAVGATDQNNNRASFSQYGAGLDIVAPGVNVRSTYPGSTYASLNGTSMATPHVAGAAALVKQKNPSWSNVQIRNHLKNTATSLGSTNLYGSGLVNAEAATR

SEQ ID NO: 58982 - protein, 269 aa, Unidentified
AQSVPWGISRVQAPAAHNRRLTGRGVKVAVLDTGISTHPDLNIRGGASFVPGEPSTQDGNGHGTHVAGTIAALNNNIGVLGVAPSAELYAVKVLSASGQGSVSSIAGGLEWAGLNGMHVANLSLGAPSPSATLEQAVNSATSRGVLVVAASGNSGAGSISYPARYANAMAVGATDQNNNRASFSQYGAGLDIVAPGVNVQSTYPGSTYASLNGTSMATPHVAGAAALVKQKNPSWSNVQIRNHLKNTATSLGSTNLYGSGLVNAEAATR

SEQ ID NO: 58983 - protein, 269 aa, Unidentified
AQSVPWGVSRVQAPAAHNRGLTGSGVKVAVLDTGISTHEDLNIRGGASFVPGEPSTQDGNGHGTHVAGTIAALDNSIGVLGVAPRAELYAVKVLGASGSGSVSSIAQGLEWAGNNRMHVANLSLGLQAPSATLEQAVNSATSRGVLVVAASGNSGAGSISYPARYANAMAVGATDQNNNRASFSQYGAGLDIVAPGVNVQSTYPGSTYASLNGTSMATPHVAGAAALVKQKNPSWSNVQIRNHLKNTATSLGSTNLYGSGLVNAEAATR

SEQ ID NO: 58984 - protein, 269 aa, Unidentified
AQSVPWGISRVQAPAAHNRGLAGSGVKVAVLDTGISTHPDLNIRGGASFVPGEPSTQDGNGHGTHVAGTIAALDNSIGVLGVAPSAELYAVKVLGASGQGAISSIAGGLEWAGNNGMHVANLSLGSPSPSATLEQAVNSATSRGVLVVAASGNSGAGSISYPARYANAMAVGATDQNNNRASFSQYGAGLDIVAPGVNVQSTYPGSTYASLNGTSMATPHVAGAAVLVKQKNPSWSNVRIRNHLKNTATSLGSTNLYGSGLVNAEAATR

SEQ ID NO: 58985 - protein, 269 aa, Unidentified
AQSVPWGISRVQAPAAHNRGLTGRGVKVAVLDTGISTHPDLNIRGGASFVPGEPSTQDGEGHGTHVAGTIAALNNGIGVLGVAPSAELYAVKVLGASGSGSVSSIAQGLEWAGNNSMHVANLSLGSPSPSATLEQAVNSATSRGVLVVAASGNSGADSISYPARYANAMAVGATDQNNNRADFSQYGAGLDIVAPGVNVQSTYPGSTYASLNGTSMATPHVAGAAALVKQKNPSWSNVRIRNRLKNTATSLGSTNLYGSGLVNAEAATR

SEQ ID NO: 58986 - protein, 269 aa, Unidentified
AQSVPWGISRVQAPAAHRRGLTGRGVKVAVLDTGISTHPDLNIRGGASFVPGEPSTQDGNGHGTHVAGTIAALDNSIGVLGVAPSAELYAVKVLGASGSGSVSSIAQGLEWAGANGMHVANLSLGSPSPSATLEQAVNSATSRGVLVVAASGNSGAGSISYPARYANAMAVGATDQNNNRASFSQYGAGLDLVAPGVNVQSTYPGSAYFSLNGTSMATPHVAGAAALVKQKNPSWSNVQIRNRLKNTATSLGSTNLYGSGLVNAEAATR

SEQ ID NO: 58987 - protein, 269 aa, Unidentified
AQSVPWGISRVQAPAAHNRRLTGRGVKVAVLDTGISTHPDLNIRGGASFVPGEPSTQDGNGHGTHVAGTIAALNNGIGVLGVAPSAELYAVKVLGASGSGSVSSIAQGLEWAGNNSMHVANLSLGSPSPSATLEQAVNSATSRGVLVVAASGNSGADSISYPARYANAMAVGATDQNNNRADFSQYGAGLDIVAPGVNVQSTYPGSTYASLNGTSMATPHVAGAAALVKQKNPSWSNVRIRDHLKNTATSLGSTNLYGSGLVNAEAATR

SEQ ID NO: 58988 - protein, 269 aa, Unidentified
AQSVPWGISRVQAPAAHNRRLTGSGVKVAVLDTGISTHPDLNIRGGASFVPGEPSTQDGEGHGTHVAGTIAALNNGIGVLGVAPSAELYAVKVLGASGSGSVSSIAQGLEWAGNNDMHVANLSLGSESPSATLEQAVNSATSRGVLVVAASGNSGADSISYPARYANAMAVGATDQNNNRADFSQYGAGLDIVAPGVNVQSTYPGSTYASLNGTSMATPHVAGAAALVKQKNPSWSNVQIRNRLKNTATSLGSTNLYGSGLVNAEAATR

SEQ ID NO: 58989 - protein, 269 aa, Unidentified
AQSVPWGISRVQAPAAHNRRLTGRGVKVAVLDTGISTHPDLNIRGGASFVPGEPSTQDGNGHGTHVAGTIAALNNNIGVLGVAPSAELYAVKVLSASGNGSVSSIANGLEWAGLNGMHVANLSLGAPSPSATLEQAVNSATSRGVLVVAASGNSGAGSISYPARYANAMAVGATDQNNNRASFSQYGAGLDIVAPGVNVQSTYPGSTYASLNGTSMATPHVAGAAALVKQKNPSWSNVQIRNHLKNTATSLGSTNLYGSGLVNAEAATR

SEQ ID NO: 58990 - protein, 269 aa, Unidentified
AQSVPWGISRVQAPAAHNRGLAGSGVKVAVLDTGISTHPDLNIRGGASFVPGEPSTQDGNGHGTHVAGTIAALDNSIGVLGVAPSAELYAVKVLGASGGGAISSIAQGLEWAGNNGMHVANLSLGSPSPSATLEQAVNSATSRGVLVVAASGNSGAGSISYPARYANAMAVGATDQNNNRASFSQYGAGLDIVAPGVNVQSTYPGSTYASLNGTSMATPHVAGAAVLVKQKNPSWSNVRIRNHLKNTATSLGSTNLYGSGLVNVEAATR

SEQ ID NO: 58991 - protein, 269 aa, Unidentified
AQSVPWGISRVQAPAAHNRRLTGSGVKVAVLDTGISTHPDLNIRGGASFVPGEPSTQDGNGHGTHVAGTIAALNNSIGVLGVAPSAELYAVKVLGASGGGAISSIAQGLEWAGNNGMHVANLSLGSPSPSATLEQAVNSATSRGVLVVAASGNSGAGSISYPARYANAMAVGATDQNNNRASFSQYGAGLDIVAPGVNVQSTYPGSAYFSLNGTSMATPHVAGAAVLVKQKNPSWSNVRIRNHLKNTATSLGSTNLYGSGLVNAEAATR

SEQ ID NO: 58992 - protein, 269 aa, Unidentified
AQSVPWGISRVQAPAAHNRGLTGSGVKVAVLDTGISTHPDLNIRGGASFVPGEPSTQDGNGHGTHVAGTIAALNNSIGVLGVAPSAELYAVKVLGASGGGALSSIAQGLEWAGNNGMHVANLSLGSPSPSATLEQAVNSATSRGVLVVAASGNSGADSISYPARYANAMAVGATDQNNNRASFSQYGAGLDIVAPGVNVQSTYPGSTYASLNGTSMATPHVAGAAALVKHKNPSWSNVRIRDHLKKTATSLGSTNLYGSGLVNAEAATR

SEQ ID NO: 58993 - protein, 275 aa, Unidentified
AQTIPWGISRVQAPAAHNRGLTGSGVKVAVLDTGIXSTHPDLNIRGGASFVPGEPXSTQDGNGHGTHVAGTIAALNNSIGVLGVAPSAELYAVKVLGADGEGAISSIAQGLEWAGNNGMHVANLSLGSPSPSATLEQAVNSATSRGVLVVAASGNSGAXSSISXXXYPARYANAMAVGATDQNNNRASFSQYGAGLDIVAPGVNIQSTYPGSTYASLNGTSMATPHVAGAAALVKQKNPSWSNVQIRNHLKNTATSLGSTNLYGSGLVNAEAATR

SEQ ID NO: 58994 - protein, 269 aa, Unidentified
AQSVPWGISRVQAPAAHNRRLTGRGVKVAVLDTGISTHPDLNIRGGASFVPGEPSTQDGEGHGTHVAGTIAALNNGIGVLGVAPSAELYAVKVLGASGSGSVSSIAQGLEWAGNNSMHVANLSLGSESPSATLEQAVNSATSRGVLVVAASGNSGAGSISYPARYANAMAVGATDQNNNRADFSQYGAGLDIVAPGVNVQSTYPGSTYASLNGTSMATPHVAGAAALVKQKNPSWSNVQIRNRLKNTATSLGSTNLYGSGLVNAEAATR

SEQ ID NO: 58995 - protein, 269 aa, Unidentified
AQSVPWGISRVQAPAAHNRRLTGRGVKVAVLDTGISTHPDLNIRGGASFVPGEPSTQDGNGHGTHVAGTIAALNNDIGVLGVAPSAELYAVKVLGASGSGSVSSIAQGLEWAGNNSMHVANLSLGSESPSATLEQAVNSATSRGVLVVAASGNSGADSISYPARYANAMAVGATDQNNNRASFSQYGAGLDIVAPGVNVQSTYPGSTYASLNGTSMATPHVAGAAALVKQKNPSWSNVRIRNRLKNTATSLGSTNLYGSGLVNAEAATR

SEQ ID NO: 58996 - protein, 269 aa, Unidentified
AQSVPWGISRVQAPAAHNRGLTGSGVKVAVLDTGISTHPDLNIRGGASFVPGEPSTQDGNGHGTHVAGTIAALNNSIGVLGVAPSAELYAVKVLGASGGGAISSIAQGLEWAGNNGMHVANLSLGSPSPSATLEQAVNSATSRGVLVVAASGNSGAGSISYPARYANAMAVGATDQNNNRADFSQYGAGLDIVAPGVNVQSTYPGSTYASLNGTSMATPHVAGAAVLVKQKRPSWSNVRIRDHLKNTATSLGSTNLYGSGLVNAEAATR

SEQ ID NO: 58997 - protein, 269 aa, Unidentified
AQSVPWGISRVQAPAAHNRGLTGRGVKVAVLDTGISTHPDLNIRGGASFVPGEPSTQDGNGHGTHVAGTIAALDNSIGVLGVAPSAELYAVKVLGASGAGAISSIAQGLEWAGNNGMHVANLSLGSPSPSATLEQAVNSATSRGVLVVAASGNSGAGSISYPARYANAMAVGATDQNNNRASFSQYGAGLDIVAPGVNVQSTYIGSTYASLNGTSMATPHVAGAAVLVKQKNPSWSNVRIRNHLKNTATSLGSTNLYGSGLVNAEAATR

SEQ ID NO: 58998 - protein, 269 aa, Unidentified
AQSVPWGISRVQAPAAHRRGLWGRGVKVAVLDTGISTHPDLNIRGGASFVPGEPSTQDGNGHGTHVAGTIAALDNSIGVLGVAPSAELYAVKVLGASGSGSVSSIAQGLEWAGANGMHVANLSLGSPSPSATLEQAVNSATSRGVLVVAASGNSGAGSISYPARYANAMAVGATDQDNNRASFSQYGAGLDIVAPGVNVQSTYPGSTYFSLNGTSMATPHVAGAAALVKQKNPSWSNVQIRNRLKNTATSLGSTNLYGSGLVNAEAATR

SEQ ID NO: 58999 - protein, 269 aa, Unidentified
AQSVPWGISRVQAPAAHNRRLTGRGVKVAVLDTGISTHPDLNIRGGASFVPGEPSTQDGEGHGTHVAGTIAALNNDIGVLGVAPSAELYAVKVLGASGSGSVSSIAQGLEWAGNNDMHVANLSLGSESPSATLEQAVNSATSRGVLVVAASGNSGAGSISYPARYANAMAVGATDQNNNRADFSQYGAGLDIVAPGVNVQSTYPGSTYASLNGTSMATPHVAGAAALVKQKNPSWSNVQIRNRLKNTATSLGSTNLYGSGLVNAEAATR

SEQ ID NO: 59000 - protein, 269 aa, Unidentified
AQSVPWGISRVQAPAAHNRRLTGRGVKVAVLDTGISTHPDLNIRGGASFVPGEPSTQDGNGHGTHVAGTIAALNNNIGVLGVAPSAELYAVKVLGAGGQGSVSSIANGLEWAGLNGMHVANLSLGSPSPSATLEQAVNSATSRGVLVVAASGNSGAGSISYPARYANAMAVGATDQNNNRASFSQYGAGLDIVAPGVNVQSTYPGSTYASQNGTSMATPHVAGAAALVKQKNPSWSNVQIRNHLKNTATSLGSTNLYGSGLVNAEAATR

SEQ ID NO: 59001 - protein, 269 aa, Unidentified
AQSVPWGISRVQAPAAHNRGLTGSGVKVAVLDTGISTHPDLNIRGGASFVPGEPSTQDGNGHGTHVAGTIAALDNRIGVLGVAPRAELYAVKVLGASGSGSVSSIAQGLEWAGNNRMHVANLSLGLQAPSATLEQAVNSATSRGVLVVAASGNSGAGSISYPARYANAMAVGATDQNNNRASFSQYGAGLDIVAPGVNVYSTYPGSTYASLNGTSMATPHVAGAAALVKQKNPSWSNVQIRNHLKNTATSLGSTNLYGSGLVNAEAATR

SEQ ID NO: 59002 - protein, 269 aa, Unidentified
AQSVPWGISRVQAPAAHNRGLAGSGVKVAVLDTGISTHPDLNIRGGASFVPGEPSTQDGNGHGTHVAGTIAALNNNIGVLGVAPSAELYAVKVLGASGQGAISSIANGLEWAGNNGMHVANLSLGSPSPSATLEQAVNSATSRGVLVVAASGNSGAGSISYPARYANAMAVGATDQNNNRASFSQYGAGLDIVAPGVNVQSTYPGSTYASLNGTSMATPHVAGAAVLVKQKNPSWSNVRIRNHLKNTATSLGSTNLYGSGLVNAEAATR

SEQ ID NO: 59003 - protein, 269 aa, Unidentified
AQVVPWGISRVQAPAAHNRGLTGSGVKVAVLDTGISTHEDLNIRGGASFVPGEPSTQDGNGHGTHVAGTIAALDNSIGVLGVAPSAELYAVKVLGASGSGSVSSIAQGLEWAGNNRMHVANLSLGSPSPSATLEQAVNSATSRGVLVVAASGNSGAGQISYPARYANAMAVGATDQNNNRASFSQYGAGLDIVAPGVNVQSTYIGSTYASLNGTSMATPHVAGAAALVKQKNPSKSNVQIRNHLKNTATSLGSTNQYGSGLVNAEAATR

SEQ ID NO: 59004 - protein, 269 aa, Unidentified
AQSVPWGISRVQAPAAHNRGLTGSGVKVAVLDTGISTHPDLNITGGASFVPGEPSTQDGNGHGTHVAGTIAALDNRIGVLGVAPSAELYAVKVLGASGGGAISSIAQGLEWAGNNGMHVANLSLGSPSPSATLEQAVNSATSRGVLVVAASGNSGAGSISYPARYANAMAVGATDQNNNRASFSQYGAGLDIVAPGVNVQSTYPGSTYASLNGTSMATPHVAGAAVLVKQKNPSWSNVRIRNHLKNTATSLGSTNLYGSGLVNAEAATR

SEQ ID NO: 59005 - protein, 269 aa, Unidentified
AQSVPWGISRVQAPAAHNRGLAGSGVKVAVLDTGISTHPDLNIRGGASFVPGEPSTQDGNGHGTHVAGTIAALNNSIGVLGVAPSAELYAVKVLGASGNGAISSIAQGLEWAGNNGMHVANLSLGAPSPSATLEQAVNSATSRGVLVVAASGNSGAGSISYPARYANAMAVGATDQNNNRASFSQYGAGLDIVAPGVNVQSTYPGSTYASQNGTSMATPHVAGAAVLVKQKNPSWSNVRIRNHLKNTATSLGSTNLYGSGLVNAEAATR

SEQ ID NO: 59006 - protein, 269 aa, Unidentified
AQSVPWGISRVQAPAAHRRGLTGSGVKVAVLDTGISTHPDLNITGGASFVPGEPSTQDGNGHGTHVAGTIAALNNRIGVLGVAPSAELYAVKVLGASGGGAISSIAQGLEWAGNNGMHVANLSLGSPSPSATLEQAVNSATSRGVLVVAASGNSGAGSISYPARYANAMAVGATDQNNNRASFSQYGAGLDIVAPGVNVQSTYPGSTYASLNGTSMATPHVAGAAVLVKQKNPSWSNVRIRNHLKNTATSLGSTNLYGSGLVNAEAATR

SEQ ID NO: 59007 - protein, 269 aa, Unidentified
AQSVPWGISRVQAPAAHNRRLWGSGVKVAVLDTGISTHPDLNITGGASLVPGEPSTQDGNGHGTHVAGTIAALNNSIGVLGVAPSAELYAVKVLGASGAGSVSSIAQGLEWAGNNGMHVANLSLGSPSPSATLEQAVNSATSRGVLVVAASGNSGAGSISYPARYANAMAVGATDQNNNRASFSQYGAGLDIVAPGVNVQSTYIQSAYASLNGTSMATPHVAGAAALVKQKNPSWSNVQIRNHLKNTATSLGSTNLYGSGLVNAEAATR

SEQ ID NO: 59008 - protein, 269 aa, Unidentified
AQSVPWGISRVQAPAAHNRGLAGFGVKVAVLDTGISTHPDLNIRGGASFVPGEPSTQDGNGHGTHVAGTIAALNNSIGVLGVAPSAELYAVKVLGASGGGAISSIAQGLEWAGANGMHVANLSLGSPSPSATLEQAVNSATSRGVLVVAASGNSGAGSISYPARYANAMAVGATDQNNNRASFSQYGAGLDIVAPGVNVQSTAPGSTYASLNGTSMATPHVAGAAVLVKQKNPSWSNVQIRNHLKNTATSLGSTNLYGSGLVNAEAATR

SEQ ID NO: 59009 - protein, 269 aa, Unidentified
AQSVPWGISRVQAPAAHNRGLTGRGVKVAVLDTGISTHPDLNIRGGASFVPGEPSTQDGNGHGTHVAGTIAALNNSIGVLGVAPSAELYAVKVLGASGAGAISSIAQGLEWAGNNGMHVANLSLGSPSPSATLEQAVNSATSRGVLVVAASGNSGAGSISYPARYANAMAVGATDQNNNRADFSQYGAGLDIVAPGVNVQSTYIGSTYASLNGTSMATPHVAGAAVLVKQKNPSWSNVRIRNHLKNTATSLGSTNLYGSGLVNAEAATR

SEQ ID NO: 59010 - protein, 269 aa, Unidentified
AQSVPWGISRVQAPAAHNRGLTGSGVKVAVLDTGISTHPDLNIRGGASFVPGEPSTQDGNGHGTHVAGTIAALNNSIGVLGVAPSAELYAVKVLGASGGGSISSIAQGLEWAGNNGMHVANLSLGSPSPSATLEQAVNSATSRGVLVVAASGNSGEGSISYPARYANAMAVGATDQNNNRADFSQYGAGLDIVAPGVNVQSTYPGSTYASLNGTSMATPHVAGAAVLVKQKNPSWSNVRIRDRLKNTATSLGSTNLYGSGLVNAEAATR

SEQ ID NO: 59011 - protein, 269 aa, Unidentified
AQSVPWGISRVQAPAAHNRRLTGSGVKVAVLDTGISTHPDLRIRGGASFVPGEPSTQDGNGHGTHVAGTIAALNNSIGVLGVAPSAELYAVKVLSASGQGSVSSIAGGLEWAGLNGMHVANLSLGAPSPSATLEQAVNSATSRGVLVVAASGNSGAGSISYPARYANAMAVGATDQNNNRASFSQYGAGLDIVAPGVNVQSTYPGSTYASQNGTSMATPHVAGAAALVKQKNPSWSNVQIRNHLKNTATSLGSTNLYGSGLVNAEAATR

SEQ ID NO: 59012 - protein, 269 aa, Unidentified
AQSVPWGISRVQAPAAHNRGLAGSGVKVAVLDTGISTHPDLNIRGGASFVPGEPSTQDGNGHGTHVAGTIAALDNSIGVLGVAPSAELYAVKVLGASGGGAISSIAQGLEWAGNNGMHVANLSLGSPSPSATLEQAVNSATSRGVLVVAASGNSGAGSISYPARYANAMAVGATDQNNNRASFSQYGAGLDIVAPGVNVQSTYPGSTYASQNGTSMATPHVAGAAVLVKQKNPSWSNVRIRNHLKNTATSLGSTNLYGSGLVNAEAATR

SEQ ID NO: 59013 - protein, 269 aa, Unidentified
AQSVPWGISRVQAPAAHNRRLTGSGVKVAVLDTGISTHPDLNIRGGASFVPGEPSTQDGNGHGTHVAGTIAALNNDIGVLGVAPSAELYAVKVLGASGSGSVSSIAQGLEWAGNNSMHVANLSLGSESPSATLEQAVNSATSRGVLVVAASGNSGADSISYPARYANAMAVGATDQNNNRASFSQYGAGLDIVAPGVNVQSTYPGSTYASLNGTSMATPHVAGAAALVKQKNPSWSNVRIRDRLKNTATSLGSTNLYGSGLVNAEAATR

SEQ ID NO: 59014 - protein, 269 aa, Unidentified
AQSVPWGISRVQAPAAHNRKLTGGGVKVAVLDTGISTHPDLNIRGGASFVPGEPSTQDGEGHGTHVAGTIAALNNSIGVLGVAPSAELYAVKVLAASGQGSVSSIANGLEWAGLNGMHVANLSLGAPSPSATLEQAVNSATSRGVLVVAASGNSGAGSISYPARYANAMAVGATDQNNNRASFSQYGAGLDIVAPGVNVQSTYPGSTYASLNGTSMATPHVAGAAALVKQKNPSWSNVQIRNHLKNTATSLGSTNLYGSGLVNAEAATR

SEQ ID NO: 59015 - protein, 269 aa, Unidentified
AQSVPWGISRVQAPAAHNRGLTGRGVKVAVLDTGISTHPDLNIRGGASFVPGEPSTQDGNGHGTHVAGTIAALNNSIGVLGVAPSAELYAVKVLGASGGGAISSIAQGLEWAGNNGMHVANLSLGSPSPSATLEQAVNSATSRGVLVVAASGNSGAGSISYPARYANAMAVGATDQNNNRASFSQYGAGLDIVAPGVNVQSTYPGSTYASLNGTSMATPHVAGAAVLVKQKNPSWSNVRIRDRLKNTATSLGSTNLYGSGLVNAEAATR

SEQ ID NO: 59016 - protein, 269 aa, Unidentified
AQSVPWGISRVQAPAAHNRGLTGSGVKVAVLDTGISTHPDLNIRGGASFVPGEPSTQDGNGHGTHVAGTIAALDNSIGVLGVAPSAELYAVKVLGADGEGAISSIAQGLEWAGNNGMHVANLSLGSPSPSATLEQAVNSATSRGVLVVAASGNSGASSIGYPARYANAMAVGATDQNNNRASFSRYGAGLDIVAPGVNVQSTYPGSTYASLNGTSMATPHVAGAAALVKQKNPSWSNVQIRNHLKNTATSLGSTNLYGSGLVNAEAATR

SEQ ID NO: 59017 - protein, 269 aa, Unidentified
AQSVPWGISRVQAPAAHNRGLTGSGVKVAVLDTGISTHPDLNIRGGASFVPGEPSTQDGEGHGTHVAGTIAALDNSIGVLGVAPSAELYAVKVLGASGAGAISSIAQGLEWAGNNGMHVANLSLGSPSPSATLEQAVNSATSRGVLVVAASGNSGAGSISYPARYANAMAVGATDQNNNRASFSQYGAGLDIVAPGVNVQSTYIGSTYASLNGTSMATPHVAGAAVLVKQKNPSWSNVRIRNHLKNTATSLGSTNLYGSGLVNAEAATR

SEQ ID NO: 59018 - protein, 269 aa, Unidentified
AQSVPWGISRVQAPAAHNRRLTGRGVKVAVLDTGISTHPDLNIRGGASFVPGEPSTQDGNGHGTHVAGTIAALNNDIGVLGVAPSAELYAVKVLGASGSGSVSSIAQGLEWAGNNSMHVANLSLGSESPSATLEQAVNSATSRGVLVVAASGNSGADSISYPARYANAMAVGATDQNNNRADFSQYGAGLDIVAPGVNVQSTYPGSTYASLNGTSMATPHVAGAAALVKQKNPSWSNVQIRNRLKNTATSLGSTNLYGSGLVNAEAATR

SEQ ID NO: 59019 - protein, 269 aa, Unidentified
AQSVPWGISRVQAPAAHNRGLTGSGVKVAVLDTGISTHPDLNIRGGASFVPGEPSTQDGNGHGTHAAGTIAALNNSIGVLGVAPSAELYAVKVLGASGSGAISSIAQGLEWAGNNGMHVANLSLGSPSPSATLEQAVNSATSRGVLVVAASGNSGADSISYPARYANAMAVGATDQNNNRASFSQYGAGLDIVAPGVNIQSTYPGSTYASLNGTSMATPHVAGAAVLVKHKNPSWSNVRIRNHLKNTATSLGSTNLYGSGLVNAEAATR

SEQ ID NO: 59020 - protein, 269 aa, Unidentified
AQSVPWGISRVQAPAAHNRGLAGSGVKVAVLDTGISTHPDLNIRGGASFVTGEPSTQDGNGHGTHVAGTIAALNNSIGVLGVAPSAELYAVKVLGASGGGAISSIAQGLEWAGNNGMHVANLSLGSPSPSATLEQAVNSATSRGVLVVAASGNSGAGSISYPARYANAMAVGATDQNNNRASFSQYGAGLDIVAPGVNVQSTYPGSTYASQNGTSMATPHVAGAAVLVKQKNPSWSNVRIRNHLKNTATSLGSTNLYGSGLVNAEAATR

SEQ ID NO: 59021 - protein, 269 aa, Unidentified
AQSVPWGISRVQAPAAHNRRLTGRGVKVAVLDTGISTHPDLNIRGGASFVPGEPSTQDGEGHGTHVAGTIAALNNGIGVLGVAPSAELYAVKVLGASGSGSVSSIAQGLEWAGNNSMHVANLSLGSESPSATLEQAVNSATSRGVLVVAASGNSGAGSISYPARYANAMAVGATDQNNNRADFSQYGAGLDIVAPGVNVQSTYPGSTYASLNGTSMATPHVAGAAALVKQKNPSWSNVQIRDHLKNTATSLGSTNLYGSGLVNAEAATR

SEQ ID NO: 59022 - protein, 269 aa, Unidentified
AQSVPWGISRVQAPAAHNRGLAGSGVKVAVLDTGISTHPDLNIRGGASFVPGEPSTQDGNGHGTHVAGTIAALNNNIGVLGVAPSAELYAVKVLGASGGGAISSIAQGLEWAGNNGMHVANLSLGSPSPSATLEQAVNSATSRGVLVVAASGNSGAGSISYPARYANAMAVGATDQNNNRASFSQYGAGLDIVAPGVNVQSTYPGSTYASLNGTSMATPHVAGTAVLVKQKNPSWSNVRIRNHLKNTATSLGSTNLYGSGLVNAEAATR

SEQ ID NO: 59023 - protein, 269 aa, Unidentified
AQSVPWGISRVQAPAAHNRGLTGSGVKVAVLDTGISTHPDLRIRGGASFVPGEPSTQDGNGHGTHVAGTIAALNNSIGVLGVAPDAELYAVKVLGASGGGAISSIAQGLEWAGNNGMHVANLSLGSPSPSATLEQAVNSATSRGVLVVAASGNSGAGSISYPARYANAMAVGATDQNNNRASFSQYGAGLDIVAPGVNVQSTYPGSTYASLNGTSMATPHVAGAAVLVKQKNPSWSNVRIRNHLKNTATSLGSTNLYGSGLVRAEAATR

SEQ ID NO: 59024 - protein, 269 aa, Unidentified
AQSVPWGISRVQAPAAHNRGLTGSGVKVAVLDTGISTHPDLNIRGGASFVPGEPSTQDGNGHGTHVAGTIAALDNNIGVLGVAPRAELYAVKVLGASGSGSVSSIAQGLEWAGNNRMHVANLSLGLQAPSATLEQAVNSATSRGVLVTAASGNSGAGSISYPARYANAMAVGATDQNNNRASFSQYGAGLDIVAPGVNVQSTYPGSTYASLNGTSMATPHVAGAAALVKQKNPSWSNVQIRNHLKNTATSLGSTNLYGSGLVNAEAATR

SEQ ID NO: 59025 - protein, 269 aa, Unidentified
AQSVPWGISRVQAPAAHRRGLWGRGVKVAVLDTGISTHPDLNIRGGASFVPGEPSTQDGNGHGTHVAGTIAALDNSIGVLGVAPSAELYAVKVLGASGAGSVSSIAQGLEWAGNNGMHVANLSLGSPSPSATLEQAVNSATSRGVLVVAASGNSGAGSISYPARYANAMAVGATDQNNNRASFSQYGAGLDLVAPGVNVQSTYPGSTYFSLNGTSMATPHVAGAAALVKQKNPSWSNVQIRNRLKNTATSLGSTNLYGSGLVNAEAATR

SEQ ID NO: 59026 - protein, 269 aa, Unidentified
AQSVPWGISRVQAPAAHNRGLTGSGVKVAVLDTGISTHPDLNIRGGASFVPGEPSTQDGNGHGTHVAGTIAALDNWIGVLGVAPRAELYAVKVLGASGSGSVSSIAQGLEWAGNNRMHVANLSLGLQAPSATLEQAVNSATSRGVLVVAASGNSGAGSISYPARYANAMAVGATDQNNNRASFSQYGAGLDIVAPGVNVYSTYPGSTYASLNGTSMATPHVAGAAALVKQKNPSWSNVQIRNHLKNTATSLGSTNLYGSGLVNAEAATR

SEQ ID NO: 59027 - protein, 269 aa, Unidentified
AQSVPWGISRVQAPAAHNRKLTGSGVKVAVLDTGISTHPDLNIRGGASFVPGEPSTQDGEGHGTHVAGTIAALNNNIGVLGVAPSAELYAVKVLSASGQGSVSSIAQGLEWAGLNGMHVANLSLGAPSPSATLEQAVNSATSRGVLVVAASGNSGAGSISYPARYANAMAVGATDQNNNRADFSQYGAGLDIVAPGVNVQSTYPGSTYASLNGTSSATPHVAGAATLVKQKNPSWSNVQIRNHLKNTATSLGSTNLYGSGLVNAEAATR

SEQ ID NO: 59028 - protein, 269 aa, Unidentified
AQSVPWGISRVQAPAAHNRGLTGSGVKVAVLDTGISTHPDLNIRGGASFVPGEPSTQDGNGHGTHVAGTIAALDNTIGVLGVAPRAELYAVKVLGASGSGSVSSIAQGLEWAGNNRMHVANLSLGLQAPSATLEQAVNSATSRGVLVVAASGNSGAGSISYPARYANAMAVGATDQNNNRASFSQYGAGLDIVAPGVNVFSTYPGSTYASLNGTSMATPHVAGAAALVKQKNPSWSNVQIRNHLKNTATSLGSTNLYGSGLVNAEAATR

SEQ ID NO: 59029 - protein, 269 aa, Bacillus lentus
AQSVPWGIRRVQAPAAHNLGLTGSGVKVAVLDTGISTHPDLRIRGGASFVPGEPSTQDGDGHGTHVAGTIAALDNSIGVLGVAPSAELYAVKVLGASGSGSVSSIAQGLEWAGNNGMHVANLSLGSPSPSATLEQAVNSATSRGVLVVAASGNSGAGSISYPARYANAMAVGATDQNNNRASFSQYGPGLDIVAPGVNVQSTYPGSTYASLNGTSMATPHVAGAAALVKQKNPSWSNVRIRNHLKNTATSLGDTNLYGSGLVNAEAATR

SEQ ID NO: 59030 - protein, 269 aa, Unidentified
AQSVPWGISRVQAPAAHNRGLAGSGVKVAVLDTGISTHPDLNIRGGASFVPGEPSTQDGNGHGTHVAGTIAALNNSIGVLGVAPSAELYAVKVLGASGNGAISSIAGGLEWAGNNGMHVANLSLGAPSPSATLEQAVNSATSRGVLVVAASGNSGAGSISYPARYANAMAVGATDQNNNRASFSQYGAGLDIVAPGVNVQSTYPGSTYASLNGTSMATPHVAGAAVLVKQKNPSWSNVRIRNHLKNTATSLGSTNLYGSGLVNAEAATR

SEQ ID NO: 59031 - protein, 269 aa, Unidentified
AQSVPWGISRVQAPAAHNRGLAGSGVKVAVLDTGISTHPDLNIRGGASFVPGEPSTQDGNGHGTHVAGTIAALNNSIGVLGVAPSAELYAVKVLAASGGGAISSIAQGLEWAGNNGMHVANLSLGSSSPSATLEQAVNSATSRGVLVVAASGNSGAGSISYPARYANAMAVGATDQNNNRASFSQYGAGLDIVAPGVNVQSTYPGSTYASLNGTSMATPHVAGAAVLVKQKNPSWSNVRIRNHLKNTATSLGSTNLYGSGLVNAEAATR

SEQ ID NO: 59032 - protein, 269 aa, Unidentified
AQSVPWGISRVQAPAAHNRGLTGSGVKVAVLDTGISTHPDLNIRGGASFVPGEPSTQDGEGHGTHVAGTIAALNNGIGVLGVAPSAELYAVKVLGASGSGSVSSIAQGLEWAGNNDMHVANLSLGSESPSATLEQAVNSATSRGVLVVAASGNSGADSISYPARYANAMAVGATDQNNNRASFSQYGAGLDIVAPGVNVQSTYPGSTYASLNGTSMATPHVAGAAALVKQKNPSWSNVRIRDRLKNTATSLGSTNLYGSGLVNAEAATR

SEQ ID NO: 59033 - protein, 269 aa, Unidentified
AQSVPWGISRVQAPAAHRRGLTGSGVKVAVLDTGISTHPDLNITGGASFVPGEPSTQDGNGHGTHVAGTIAALNNSIGVLGVAPSAELYAVKVLGASGGGAISSIAQGLEWAGNNGMHVANLSLGSPSPSATLEQAVNSATSRGVLVVAASGNSGAGSISYPARYANAMAVGATDQNNNRASFSQYGAGLDIVAPGVNVQSTYPGSTYASLNGTSMATPHVAGAAVLVKQKNPSWSNVRIRNRLKNTATSLGSTNLYGSGLVNAEAATR

SEQ ID NO: 59034 - protein, 269 aa, Unidentified
AQSVPWGISRVQAPAAHNRGLTGGGVKVAVLDTGISTHPDLNIRGGASFVPGEPSTQDGNGHGTHVAGTIAALNNNIGVLGVAPSAELYAVKVLAASGNGSVSSIAGGLEWAGNNGMHVANLSLGAPSPSATLEQAVNSATSRGVLVVAASGNSGAGSISYPARYANAMAVGATDQNNNRADFSQYGAGLDIVAPGVNVQSTYPGSTYASQNGTSMATPHVAGAAALVKQKNPSWSNVQIRNHLKNTATSLGSTNLYGSGLVNAEAATR

SEQ ID NO: 59035 - protein, 269 aa, Unidentified
AQSVPWGISRVQAPAAHNRGLTGRGVKVAVLDTGISTHPDLNIRGGASFVPGEPSTQDGEGHGTHVAGTIAALNNGIGVLGVAPSAELYAVKVLGASGSGSVSSIAQGLEWAGNNSMHVANLSLGSPSPSATLEQAVNSATSRGVLVVAASGNSGADSISYPARYANAMAVGATDQNNNRADFSQYGAGLDIVAPGVNVQSTYPGSTYASLNGTSMATPHVAGAAALVKQKNPSWSNVRIRDHLKNTATSLGSTNLYGSGLVNAEAATR

SEQ ID NO: 59036 - protein, 269 aa, Unidentified
AQSVPWGISRVQAPAAHNRGLTGFGVKVAVLDTGISTHPDLNIRGGASFVPGEPSTQDGNGHGTHVAGTIAALNNSIGVLGVAPSAELYAVKVLGASGGGAISSIAQGLEWAGLNGMHVANLSLGSPSPSATLEQAVNSATSRGVLVVAASGNSGAGSISYPARYANAMAVGATDQNNNRASFSQYGAGLDIVAPGVNVQSTAPGSAYASLNGTSMATPHVAGAAVLVKQKNPSWSNVQIRNHLKNTATSLGSTNLYGSGLVNAEAATR

SEQ ID NO: 59037 - protein, 269 aa, Unidentified
AQSVPWGISRVQAPAAHNRGLTGSGVKVAVLDTGISTHPDLDIRGGASFVPGEPSTQDGNGHGTHVAGTIAALDNSIGVLGVAPSAELYAVKVLGASGGGAISSIAQGLEWAGNNGMHVANLSLGSPSPSATLEQAVNSATSRGVLVVAASGNSGAGSISYPARYANAMAVGATDQNNNRASFSQYGAGLDIVAPGVNVQSTYPGSTYASLNGTSMATPHVAGAAVLVKQKNPSWSNVRIRNHLKNTATSLGSTNLYGSGLVRAEAATR

SEQ ID NO: 59038 - protein, 269 aa, Unidentified
AQSVPWGISRVQAPAAHRRGLWGRGVKVAVLDTGISTHPDLNIRGGASFVPGEPSTQDGNGHGTHVAGTIAALDNSIGVLGVAPSAELYAVKVLGASGSGSVSSIAQGLEWAGNNGMHVANLSLGSPSPSATLEQAVNSATSRGVLVVAASGNSGAGSISYPARYANAMAVGATDQNNNRASFSQYGAGLDLVAPGVNVQSTYPQSTYFSLNGTSMATPHVAGAAALVKQKNPSWSNVQIRNRLKNTATSLGSTNLYGSGLVNAEAATR

SEQ ID NO: 59039 - protein, 269 aa, Unidentified
AQSVPWGISRVQAPAAHNRRLTGSGVKVAVLDTGISTHPDLNIRGGASFVPGEPSTQDGNGHGTHVAGTIAALNNSIGVLGVAPSAELYAVKVLGASGGGAISSIAQGLEWAGNNGMHVANLSLGSPSPSATLEQAVNSATSRGVLVVAASGNSGAGSISYPARYANAMAVGATDQDNNRASFSQYGAGLDIVAPGVNVQSTYPQSTYASLNGTSMATPHVAGAAVLVKQKNPSWSNVRIRNHLKNTATSLGSTNLYGSGLVNAEAATR

SEQ ID NO: 59040 - protein, 269 aa, Unidentified
AQSVPWGISRVQAPAAHNRGLTGSGVKVAVLDTGISTHPDLNIRGGASFVPGEPSTQDGNGHGTHVAGTIAALDNSIGVLGVAPSAELYAVKVLGASGGGAISSIAQGLEWAGNNGMHVANLSLGSPSPSATLEQAVNSATSRGVLVVAASGNSGADSISYPARYANAMAVGATDQNNNRASFSQYGAGLDIVAPGVNVQSTYPGSTYASLNGTSMATPHVAGAAVLVKQKNPSWSNVRIRDHLKNTATSLGSTNLYGSGLVNAEAATR

SEQ ID NO: 59041 - protein, 269 aa, Unidentified
AQSVPWGISRVQAPAAHNRRLTGRGVKVAVLDTGISTHPDLNIRGGASFVPGEPSTQDGEGHGTHVAGTIAALNNDIGVLGVAPSAELYAVKVLGASGSGSVSSIAQGLEWAGNNDMHVANLSLGSESPSATLEQAVNSATSRGVLVVAASGNSGADSISYPARYANAMAVGATDQNNNRASFSQYGAGLDIVAPGVNVQSTYPGSTYASLNGTSMATPHVAGAAALVKQKNPSWSNVRIRNHLKNTATSLGSTNLYGSGLVNAEAATR

SEQ ID NO: 59042 - protein, 269 aa, Unidentified
AQSVPWGISRVQAPAAHNRRLTGSGVKVAVLDTGISTHPDLNIRGGASFVPGEPSTQDGEGHGTHVAGTIAALNNGIGVLGVAPSAELYAVKVLGASGSGSVSSIAQGLEWAGNNDMHVANLSLGSPSPSATLEQAVNSATSRGVLVVAASGNSGADSISYPARYANAMAVGATDQNNNRADFSQYGAGLDIVAPGVNVQSTYPGSTYASLNGTSMATPHVAGAAALVKQKNPSWSNVQIRNRLKNTATSLGSTNLYGSGLVNAEDATR

SEQ ID NO: 59043 - protein, 269 aa, Unidentified
AQSVPWGISRVQAPAAHNRGLTGSGVKVAVLDTGISTHPDLNIRGGASFVPGEPSTQDGNGHGTHVAGTIAALNNSIGVLGVAPSAELYAVKVLGASGGGAISSIAQGLEWAGNNGMHVANLSLGNESPSATLEQAVNSATSRGVLVVAASGNSGAGSISYPARYANAMAVGATDQNNNRASFSQYGAGLDIVAPGVNVQSTYPGSTYASLNGTSMATPHVAGAAVLVKQKNPSWSNVRIRDHLKNTATSLGSTNLYGSGLVNAEAATR

SEQ ID NO: 59044 - protein, 269 aa, Unidentified
AQSVPWGISRVQAPAAHNRGLTGSGVKVAVLDTGISTHPDLNIRGGASFVPGEPSTQDGNGHGTHVAGTIAALNNSIGVLGVAPSAELYAVKVLGASGGGAISSIAQGLEWAGNNGMHVANLSLGSPSPSATLEQAVNSATSRGVLVVAASGNSGEGSISYPARYANAMAVGATDQNNNRASFSQYGAGLDIVAPGVNVQSTYPGSTYASLNGTSMATPHVAGAAVLVKQKRPSWSNVRIRDHLKNTATSLGSTNLYGSGLVNAEAATR

SEQ ID NO: 59045 - protein, 269 aa, Unidentified
AQSVPWGISRVQAPAAHNRRLTGSGVKVAVLDTGISTHPDLNIRGGASFVPGEPSTQDGNGHGTHVAGTIAALNNDIGVLGVAPSAELYAVKVLGASGSGSVSSIAQGLEWAGNNDMHVANLSLGSESPSATLEQAVNSATSRGVLVVAASGNSGADSISYPARYANAMAVGATDQNNNRADFSQYGAGLDIVAPGVNVQSTYPGSTYASLNGTSMATPHVAGAAALVKQKNPSWSNVQIRDRLKNTATSLGSTNLYGSGLVNAEAATR

SEQ ID NO: 59046 - protein, 269 aa, Unidentified
AQSVPWGISRVQAPAAHNRGLTGSGVKVAVLDTGISTHPDLNIRGGASFVPGEPSTQDGNGHGTHVAGTIAALNNSIGVLGVAPSAELYAVKVLGASGGGAISSIAQGLEWAGLNVMHVANLSLGNPSPSATLEQAVNSATSRGVLVVAASGNSGAGSISYPARYANAMAVGATDQNNNRASFSQYGAGLDIVAPGVNVQSTVPGSTYASLNGTSMATPHVAGAAVLVKQKNPSWSNVQIRNHLKNTATSLGSTNLYGSGLVNAEAATR

SEQ ID NO: 59047 - protein, 269 aa, Unidentified
AQSVPWGISRVQAPASHNRGLAGSGVKVAVLDTGISTHPDLNIRGGASFVPGEPSTQDGNGHGTHVAGTIAALNNSIGVLGVAPSAELYAVKVLGASGGGAISSIAQGLEWAGLNGMHVANLSLGSPSPSATLEQAVNSATSRGVLVVAASGNSGAGSISYPARYANAMAVGATDQNNNRASFSQYGAGLDIVAPGVNVQSTVPGSTYASLNGTSMATPHVAGAAVLVKQKNPSWSNVQIRNHLKNTATSLGSTNLYGSGLVNAEAATR

SEQ ID NO: 59048 - protein, 269 aa, Bacillus lentus
AQAVPWGIRRVQAPAAHNLGLTGSGVKVAVLDTGISTHPDLRIRGGASFVPGEPSTQDGDGHGTHVAGTIAALNNSIGVLGVAPSAELYAVKVLGASGSGSVSSIAQGLEWAGNNGMHVANLSLGSPSPSATLEQAVNSATSRGVLVVAASGNSGAGSISYPARYANAMAVGATDQNNNRASFSQYGAGLDIVAPGVNVQSTYPGSTYASLNGTSMATPHVAGAAALVKQKNPSWSNVRIRNHLKNTATSLGDTNLYGSGLVNAEAATQ

SEQ ID NO: 59049 - protein, 269 aa, Unidentified
AQSVPWGISRVQAPAAHRRGLTGRGVKVAVLDTGISTHPDLNIRGGASFVPGEPSTQDGNGHGTHVAGTIAALDNSIGVLGVAPSAELYAVKVLGASGAGSVSSIAQGLEWAGNNGMHVANLSLGSPSPSATLEQAVNSATSRGVLVVAASGNSGAGSISYPARYANAMAVGATDQNNNRASFSQYGAGLDIVAPGVNVQSTYPQSAYFSLNGTSMATPHVAGAAALVKQKNPSWSNVQIRNRLKNTATSLGSTNLYGSGLVNAEAATR

SEQ ID NO: 59050 - protein, 269 aa, Unidentified
AQSVPWGIERVQAPAAHNRGLTGSGVKVAVLDTGISTHPDLNIRGGASFVPGEPSTQDENGHGTHVAGTIAALDNSIGVLGVAPSAELYAVKVLGASGSGSVSSIAQGLEWAGNNGMHVANLSLGSPSPSATLEHAVNHATSHGVLVVAASGNSGAGSISYPARYANAMAVGATDQNNNRASFSQYGAGLDIVAPGVNVLSTYPGSTYASLNGTSMATPHVAGAAALVKQKNPSWSNVQIRNHLKNTATSLGSTNEYGSGLVNAEAATR

SEQ ID NO: 59051 - protein, 269 aa, Unidentified
AQSVPWGISRVQAPAAHNRGLTGSGVKVAVLDTGISTHPDLNIRGGASFVPGEPSTQDGNGHGTHVAGTIAALNNSIGVLGVAPSAELYAVKVLGASGGGALSSIAQGLEWAGNNGMHVANLSLGSPSPSATLEQAVNSATSRGVLVVAASGNSGAGSISYPARYANAMAVGATDQNNNRASFSQYGAGLDIVAPGVNVQSTYPGSTYASLNGTSMATPHVAGAAVLVKHKNPSWSNVRIRDHLKKTATSLGSTNLYGSGLVNAEAATR

SEQ ID NO: 59052 - protein, 269 aa, Unidentified
AQSVPWGISRVQAPAAHNRGLTGRGVKVAVLDTGISTHPDLNIRGGASFVPGEPSTQDGEGHGTHVAGTIAALNNDIGVLGVAPSAELYAVKVLGASGSGSVSSIAQGLEWAGNNDMHVANLSLGSPSPSATLEQAVNSATSRGVLVVAASGNSGADSISYPARYANAMAVGATDQNNNRASFSQYGAGLDIVAPGVNVQSTYPGSTYASLNGTSMATPHVAGAAALVKQKNPSWSNVRIRDRLKNTATSLGSTNLYGSGLVNAEAATR

SEQ ID NO: 59053 - protein, 269 aa, Unidentified
AQSVPWGISRVQAPAAHNRRLTGSGVKVAVLDTGISTHPDLNIRGGASFVPGEPSTQDGEGHGTHVAGTIAALNNGIGVLGVAPSAELYAVKVLGASGSGSVSSIAQGLEWAGNNSMHVANLSLGSESPSATLEQAVNSATSRGVLVVAASGNSGADSISYPARYANAMAVGATDQNNNRASFSQYGAGLDIVAPGVNVQSTYPGSTYASLNGTSMATPHVAGAAALVKQKNPSWSNVRIRDHLKNTATSLGSTNLYGSGLVNAEAATR

SEQ ID NO: 59054 - protein, 269 aa, Unidentified
AQSVPWGISRVQAPAAHNRKLTGSGVKVAVLDTGISTHPDLNIRGGASFVPGEPSTQDGEGHGTHVAGTIAALNNNIGVLGVAPSAELYAVKVLGASGNGSVSSIAQGLEWAGLNGMHVANLSLGAPSPSATLEQAVNSATSRGVLVVAASGNSGAGSISYPARYANAMAVGATDQNNNRADFSQYGAGLDIVAPGVNVQSTYPGSTYASQNGTSMATPHVAGAAALVKQKNPSWSNVQIRNHLKNTATSLGSTNLYGSGLVNAEAATR

SEQ ID NO: 59055 - protein, 269 aa, Unidentified
AQSVPWGISRVQAPAAHNRGLTGSGVKVAVLDTGISTHPDLNIRGGASFVPGEPSTQDGNGHGTHVAGTIAALDNGIGVLGVAPRAELYAVKVLGASGSGSVSSIAQGLEWAGNNRMHVANLSLGLQAPSATLEQAVNSATSRGVLVVAASGNSGAGSISYPARYANAMAVGATDQNNNRASFSQYGAGLDIVAPGVNVDSTYPGSTYASLNGTSMATPHVAGAAALVKQKNPSWSNVQIRNHLKNTATSLGSTNLYGSGLVNAEAATR

SEQ ID NO: 59056 - protein, 269 aa, Unidentified
AQSVPWGISRVQAPAAHNRGLTGSGVKVAVLDTGISTHPDLDITGGASFVPGEPSTQDGNGHGTHVAGTIAALNNRIGVLGVAPSAELYAVKVLGASGGGAISSIAQGLEWAGNNGMHVANLSLGSPSPSATLEQAVNSATSRGVLVVAASGNSGAGSISYPARYANAMAVGATDQNNNRASFSQYGAGLDIVAPGVNVQSTYPGSTYASLNGTSMATPHVAGAAVLVKQKNPSWSNVRIRNHLKNTATSLGSTNLYGSGLVNAEAATR

SEQ ID NO: 59057 - protein, 269 aa, Unidentified
AQSVPWGISRVQAPAAHNRRLTGSGVKVAVLDTGISTHPDLNIRGGASFVPGEPSTQDGNGHGTHVAGTIAALNNDIGVLGVAPSAELYAVKVLGASGSGSVSSIAQGLEWAGNNSMHVANLSLGSPSPSATLEQAVNSATSRGVLVVAASGNSGADSISYPARYANAMAVGATDQNNNRADFSQYGAGLDIVAPGVNVQSTYPGSTYASLNGTSMATPHVAGAAALVKQKNPSWSNVRIRDRLKNTATSLGSTNLYGSGLVNAEAATR

SEQ ID NO: 59058 - protein, 269 aa, Unidentified
AQSVPWGISRVQAPAAHNRGLTGRGVKVAVLDTGISTHPDLNIRGGASFVPGEPSTQDGEGHGTHVAGTIAALNNGIGVLGVAPSAELYAVKVLGASGSGSVSSIAQGLEWAGNNDMHVANLSLGSESPSATLEQAVNSATSRGVLVVAASGNSGADSISYPARYANAMAVGATDQNNNRADFSQYGAGLDIVAPGVNVQSTYPGSTYASLNGTSMATPHVAGAAALVKQKNPSWSNVRIRNHLKNTATSLGSTNLYGSGLVNAEAATR

SEQ ID NO: 59059 - protein, 269 aa, Unidentified
AQSVPWGISRVQAPAAHNRKLTGSGVKVAVLDTGISTHPDLNIRGGASFVPGEPSTQDGEGHGTHVAGTIAALNNNIGVLGVAPSAELYAVKVLAASGQGSVSSIAGGLEWAGLNGMHVANLSLGSPSPSATLEQAVNSATSRGVLVVAASGNSGAGSISYPARYANAMAVGATDQNNNRADFSQYGAGLDIVAPGVNVQSTYPGSTYASLNGTSMATPHVAGAAALVKQKNPSWSNVQIRNHLKNTATSLGSTNLYGSGLVNAEAATR

SEQ ID NO: 59060 - protein, 269 aa, Unidentified
AQSVPWGISRVQAPAAHRRGLWGRGVKVAVLDTGISTHPDLNIRGGASFVPGEPSTQDGNGHGTHVAGTIAALDNSIGVLGVAPSAELYAVKVLGASGSGSVSSIAQGLEWAGANGMHVANLSLGSPSPSATLEQAVNSATSRGVLVVAASGNSGAGSISYPARYANAMAVGATDQNNNRASFSQYGAGLDIVAPGVNVQSTYPQSAYASLNGTSMATPHVAGAAALVKQKNPSWSNVQIRNRLKNTATSLGSTNLYGSGLVNAEAATR

SEQ ID NO: 59061 - protein, 269 aa, Unidentified
AQSVPWGISRVQAPAAHRRRLTGRGVKVAVLDTGISTHPDLNIRGGASFVPGEPSTQDGNGHGTHVAGTIAALDNSIGVLGVAPSAELYAVKVLGASGSGSVSSIAQGLEWAGNNGMHVANLSLGSPSPSATLEQAVNSATSRGVLVVAASGNSGAGSISYPARYANAMAVGATDQNNNRASFSQYGAGLDLVAPGVNVQSTYPGSAYFSLNGTSMATPHVAGAAALVKQKNPSWSNVQIRNRLKNTATSLGSTNLYGSGLVNAEAATR

SEQ ID NO: 59062 - protein, 269 aa, Unidentified
AQSVPWGISRVQAPAAHNRGLTGSGVKVAVLDTGISTHPDLNIRGGASFVPGEPSTQDGNGHGTHVAGTIAALNNSIGVLGVAPSAELYAVKVLGASGAGSISSIAQGLEWAGNNGMHVANLSLGSPSPSATLEQAVNSATSRGVLVVAASGNSGEGSISYPARYANAMAVGATDQNNNRADFSQYGAGLDIVAPGVNVQSTYPGSTYASLNGTSMATPHVAGAAVLVKQKNPSWSNVRIRDRLKNTATSLGSTNLYGSGLVNAEAATR

SEQ ID NO: 59063 - protein, 269 aa, Unidentified
AQSVPWGISRVQAPAAHNRGLAGSGVKVAVLDTGISTHPDLNIRGGASFVPGEPSTQDGNGHGTHVAGTIAALNNSIGVLGVAPSAELYAVKVLGASGQGAISSIAGGLEWAGNNGMHVANLSLGSPSPSATLEQAVNSATSRGVLVVAASGNSGAGSISYPARYANAMAVGATDQNNNRASFSQYGAGLDIVAPGVNVQSTYPGSTYASQNGTSMATPHVAGAAVLVKQKNPSWSNVRIRNHLKNTATSLGSTNLYGSGLVNAEAATR

SEQ ID NO: 59064 - protein, 269 aa, Unidentified
AQSVPWGISRVQAPAAHNRGLTGSGVKVAVLDTGISTHPDLNIRGGASFVPGEPSTQDGNGHGTHVAGTIAALNNSIGVLGVAPSAELYAVKVLGASGGGALSSIAQGLEWAGNNGMHVANLSLGSPSPSATLEQAVNSATSRGVLVVAASGNSGADSISYPARYANAMAVGATDQNNNRASFSQYGAGLDIVAPGVNVQSTYPGSTYASLNGTSMATPHVAGAAVLVKHKNPSWSNVRIRDHLKNTATSLGSTNLYGSGLVNAEAATR

SEQ ID NO: 59065 - protein, 269 aa, Unidentified
AQSVPWGISRVQAPAAHNRGLTGSGVKVAVLDTGISTHPDLNIRGGASFVPGEPSTQDGNGHGTHVAGTIAALNNSIGVLGVAPSAELYAVKVLGASGGGAISSIAQGLEWAGNNGMHVANLSLGSPSPSATLEQAVNSATSRGVLVVAASGNSGAGSISYPARYANAMAVGATDQNNNRADFSQYGAGLDIVAPGVNVQSTYPGSTYASLNGTSMATPHVAGAAVLVKQKNPSWSNVRIRDRLKNTATSLGSTNLYGSGLVNAEAATR

SEQ ID NO: 59066 - protein, 269 aa, Unidentified
AQSVPWGISRVRAPAAHNRGLTGSGVKVAVLDTGISTHPDLNIRGGASFVPGEPSTQDGNGHGTHVAGTIAALDNSIGVLGVAPSAELYAVKVLGASGSGATSSIAQGLEWAGNNGMHVANLSLGSPTPSATLEQAVNSATSRGVLVVAASGNSGAGSISYPASYANAMAVGATDQNNDRASFSQYGAGLDIVAPGVNVQSTYPGSTYASLNGTSSATPHVAGAAALVKQKNPSWSDVRIRNHLKNTATSLGSTNLYGSGLVNAEAATR

SEQ ID NO: 59067 - protein, 269 aa, Unidentified
AQSVPWGISRVQAPAAHNRGLTGSGVKVAVLDTGISTHPDLNIRGGASFVPGEPSTQDGNGHGTHVAGTIAALDNHIGVLGVAPRAELYAVKVLGASGSGSVSSIAQGLEWAGNNRMHVANLSLGLQAPSATLEQAVNSATSRGVLVVAASGNSGAGSISYPARYANAMAVGATDQNNNRASFSQYGAGLDIVAPGVNVDSTYPGSTYASLNGTSMATPHVAGAAALVKQKNPSWSNVQIRNHLKNTATSLGSTNLYGSGLVNAEAATR

SEQ ID NO: 59068 - protein, 269 aa, Unidentified
AQSVPWGISRVQAPAAHNRGLTGSGVKVAVLDTGISTHPDLNIRGGASFVPGEPSTQDGNGHGTHVAGTIAALDNAIGVLGVAPRAELYAVKVLGASGSGSVSSIAQGLEWAGNNRMHVANLSLGLQAPSATLEQAVNSATSRGVLVVAASGNSGAGSISYPARYANAMAVGATDQNNNRASFSQYGAGLDIVAPGVNVHSTYPGSTYASLNGTSMATPHVAGAAALVKQKNPSWSNVQIRNHLKNTATSLGSTNLYGSGLVNAEAATR

SEQ ID NO: 59069 - protein, 269 aa, Unidentified
AQSVPWGISRVQAPAAHRRGLTGRGVKVAVLDTGISTHPDLNIRGGASFVPGEPSTQDGNGHGTHVAGTIAALDNSIGVLGVAPSAELYAVKVLGASGAGSVSSIAQGLEWAGNNGMHVANLSLGSPSPSATLEQAVNSATSRGVLVVAASGNSGAGSISYPARYANAMAVGATDQDNNRASFSQYGAGLDIVAPGVNVQSTYPGSAYFSLNGTSMATPHVAGAAALVKQKNPSWSNVQIRNRLKNTATSLGSTNLYGSGLVNAEAATR

SEQ ID NO: 59070 - protein, 269 aa, Unidentified
AQSVPWGISRVQAPAAHNRGLTGSGVKVAVLDTGISTHPDLNIRGGASFVPGEPSTQDGNGHGTHVAGTIAALDNEIGVLGVAPRAELYAVKVLGASGSGSVSSIAQGLEWAGNNRMHVANLSLGLQAPSATLEQAVNSATSRGVLVVAASGNSGAGSISYPARYANAMAVGATDQNNNRASFSQYGAGLDIVAPGVNVHSTYPGSTYASLNGTSMATPHVAGAAALVKQKNPSWSNVQIRNHLKNTATSLGSTNLYGSGLVNAEAATR

SEQ ID NO: 59071 - protein, 269 aa, Unidentified
AQSVPWGISRVQAPAAHNRGLTAFGVKVAVLDTGISTHPDLNIRGGASFVPGEPSTQDGNGHGTHVAGTIAALNNSIGVLGVAPSAELYAVKVLGASGGGAISSIAQGLEWAGANGMHVANLSLGSPSPSATLEQAVNSATSRGVLVVAASGNSGAGSISYPARYANAMAVGATDQNNNRASFSQYGAGLDIVAPGVNVQSTVPGSTYASLNGTSMATPHVAGAAVLVKQKNPSWSNVQIRNHLKNTATSLGSTNLYGSGLVNAEAATR

SEQ ID NO: 59072 - protein, 269 aa, Unidentified
AQSVPWGISRVQAPAAHNRRLTGSGVKVAVLDTGISTHPDLNIRGGASFVPGEPSTQDGNGHGTHVAGTIAALNNSIGVLGVAPSAELYAVKVLGASGGGAISSIAQGLEWAGANGMHVANLSLGSPSPSATLEQAVNSATSRGVLVVAASGNSGAGSISYPARYANAMAVGATDQDNNRASFSQYGAGLDIVAPGVNVQSTYPGSTYASLNGTSMATPHVAGAAVLVKQKNPSWSNVRIRNHLKNTATSLGSTNLYGSGLVNAEAATR

SEQ ID NO: 59073 - protein, 269 aa, Unidentified
AQSVPWGISRVQAPAAHNRGLAGFGVKVAVLDTGISTHPDLNIRGGASFVPGEPSTQDGNGHGTHVAGTIAALNNSIGVLGVAPSAELYAVKVLGASGGGAISSIAQGLEWAGANGMHVANLSLGSPSPSATLEQAVNSATSRGVLVVAASGNSGAGSISYPARYANAMAVGATDQNNNRASFSQYGAGLDIVAPGVNVQSTVPGSTYASLNGTSMATPHVAGAAVLVKQKNPSWSNVQIRNHLKNTATSLGSTNLYGSGLVNAEAATR

SEQ ID NO: 59074 - protein, 269 aa, Unidentified
AQSVPWGISRVQAPAAHNRRLTGSGVKVAVLDTGISTHPDLNIRGGASFVPGEPSTQDGEGHGTHVAGTIAALNNGIGVLGVAPSAELYAVKVLGASGSGSVSSIAQGLEWAGNNDMHVANLSLGSESPSATLEQAVNSATSRGVLVVAASGNSGAGSISYPARYANAMAVGATDQNNNRADFSQYGAGLDIVAPGVNVQSTYPGSTYASLNGTSMATPHVAGAAALVKQKNPSWSNVRIRNRLKNTATSLGSTNLYGSGLVNAEAATR

SEQ ID NO: 59075 - protein, 269 aa, Unidentified
AQSVPWGISRVQAPAAHRRGLWGRGVKVAVLDTGISTHPDLNIRGGASFVPGEPSTQDGNGHGTHVAGTIAALDNSIGVLGVAPSAELYAVKVLGASGSGSVSSIAQGLEWAGNNGMHVANLSLGSPSPSATLEQAVNSATSRGVLVVAASGNSGAGSISYPARYANAMAVGATDQNNNRASFSQYGAGLDLVAPGVNVQSTYPQSAYASLNGTSMATPHVAGAAALVKQKNPSWSNVQIRNRLKNTATSLGSTNLYGSGLVNAEAATR

SEQ ID NO: 59076 - protein, 269 aa, Unidentified
AQSVPWGISRVQAPAAHNRGLTGSGVKVAVLDTGISTHPDLNIRGGASFVPGEPSTQDGNGHGTHVAGTIAALNNSIGVLGVAPSAELYAVKVLGASGGGAISSIAQGLEWAGLNVMHVANLSLGSPSPSATLEQAVNSATSRGVLVVAASGNSGAGSISYPARYANAMAVGATDQNNNRASFSQYGAGLDIVAPGVNVQSTAPQSTYASLNGTSMATPHVAGAAVLVKQKNPSWSNVQIRNHLKNTATSLGSTNLYGSGLVNAEAATR

SEQ ID NO: 59077 - protein, 269 aa, Unidentified
AQSVPWGISRVQAPAAHRRGLWGRGVKVAVLDTGISTHPDLNIRGGASFVPGEPSTQDGNGHGTHVAGTIAALDNSIGVLGVAPSAELYAVKVLGASGAGSVSSIAQGLEWAGNNGMHVANLSLGSPSPSATLEQAVNSATSRGVLVVAASGNSGAGSISYPARYANAMAVGATDQNNNRASFSQYGAGLDIVAPGVNVQSTYPQSAYASLNGTSMATPHVAGAAALVKQKNPSWSNVQIRNRLKNTATSLGSTNLYGSGLVNAEAATR

SEQ ID NO: 59078 - protein, 269 aa, Unidentified
AQSVPWGISRVQAPAAHNRRLTGSGVKVAVLDTGISTHPDLNIRGGASFVPGEPSTQDGEGHGTHVAGTIAALNNDIGVLGVAPSAELYAVKVLGASGSGSVSSIAQGLEWAGNNDMHVANLSLGSESPSATLEQAVNSATSRGVLVVAASGNSGAGSISYPARYANAMAVGATDQNNNRASFSQYGAGLDIVAPGVNVQSTYPGSTYASLNGTSMATPHVAGAAALVKQKNPSWSNVRIRDRLKNTATSLGSTNLYGSGLVNAEAATR

SEQ ID NO: 59079 - protein, 269 aa, Homo sapiens
AQSVPWGISRVQAPAAHNRGLTGSGVKVAVLDTGISTHPDLNIRGGASFVPGEPSTQDGNGHGTHVAGTIAALNNSIGVLGVAPSAELYAVKVLGASGSGAISSIAQGLEWAGNNGMHVANLSLGSPSPSATLEQAVNSATSRGVLVVAASGNSGADSISYPARYANAMAVGATDQNNNRASFSQYGAGLDIVAPGVNVQSTYPGSTYASLNGTSMATPHVAGAAVLVKHKNPSWSNVRIRDHLKKTATSLGSTNLYGSGLVNAEAATR

SEQ ID NO: 59080 - protein, 269 aa, Unidentified
AQSVPWGISRVQAPAAHNRRLTGRGVKVAVLDTGISTHPDLNIRGGASFVPGEPSTQDGNGHGTHVAGTIAALNNGIGVLGVAPSAELYAVKVLGASGSGSVSSIAQGLEWAGNNDMHVANLSLGSESPSATLEQAVNSATSRGVLVVAASGNSGAGSISYPARYANAMAVGATDQNNNRASFSQYGAGLDIVAPGVNVQSTYPGSTYASLNGTSMATPHVAGAAALVKQKNPSWSNVRIRDRLKNTATSLGSTNLYGSGLVNAEAATR

SEQ ID NO: 59081 - protein, 269 aa, Unidentified
AQSVPWGISRVQAPAAHNRGLAGSGVKVAVLDTGISTHPDLNIRGGASFVPGEPSTQDGNGHGTHVAGTIAALNNSIGVLGVAPSAELYAVKVLAASGQGAISSIAQGLEWAGNNGMHVANLSLGSSSPSATLEQAVNSATSRGVLVVAASGNSGAGSISYPARYANAMAVGATDQNNNRASFSQYGAGLDIVAPGVNVQSTYPGSTYASLNGTSMATPHVAGAAVLVKQKNPSWSNVRIRNHLKNTATSLGSTNLYGSGLVNAEAATR

SEQ ID NO: 59082 - protein, 269 aa, Unidentified
AQSVPWGISRVQAPAAHNRGLTGRGVKVAVLDTGISTHPDLNIRGGASFVPGEPSTQDGNGHGTHVAGTIAALNNSIGVLGVAPSAELYAVKVLGASGGGAISSIAQGLEWAGNNGMHVANLSLGSPSPSATLEQAVNSATSRGVIVVAASGNSGAGSISYPARYANAMAVGATDQNNNRASFSQYGAGLDIVAPGVNVQSTYPGSTYASLNGTSMATPHVAGAAVLVKQKNPSWSNVRIRDHLKNTATSLGSTNLYGSGLVNAEAATR

SEQ ID NO: 59083 - protein, 269 aa, Unidentified
AQSVPWGISRVQAPAAHNRGLTGGGVKVAVLDTGISTHPDLNIRGGASFVPGEPSTQDGNGHGTHVAGTIAALNNNIGVLGVAPSAELYAVKVLSASGQGSVSSIAGGLEWAGNNGMHVANLSLGAPSPSATLEQAVNSATSRGVLVVAASGNSGAGSISYPARYANAMAVGATDQNNNRADFSQYGAGLDIVAPGVNVQSTYPGSTYASQNGTSMATPHVAGAAALVKQKNPSWSNVQIRNHLKNTATSLGSTNLYGSGLVNAEAATR

SEQ ID NO: 59084 - protein, 269 aa, Unidentified
AQSVPWGISRVQAPAAHNRGLAGSGVKVAVLDTGISTHPDLNIRGGASFVPGEPSTQDGNGHGTHVAGTIAALDNSIGVLGVAPSAELYAVKVLGASGGGAISSIAQGLEWAGNNGMHVANLSLGSPSPSATLEQAVNSATSRGVLVVAASGNSGAGSISYPARYANAMAVGATDQNNNRASFSQYGAGLDIVAPGVNVQSTYPGSTYASLNGTSMATPHVAGAAVLVKQKYPSWSNVRIRNHLKNTATSLGSTNLYGSGLVNAEAATR

SEQ ID NO: 59085 - protein, 269 aa, Unidentified
AQSVPWGISRVQAPAAHRRRLTGSGVKVAVLDTGISTHPDLDIRGGASFVPGEPSTQDGNGHGTHVAGTIAALNNSIGVLGVAPSAELYAVKVLGASGGGAISSIAQGLEWAGNNGMHVANLSLGSPSPSATLEQAVNSATSRGVLVVAASGNSGAGSISYPARYANAMAVGATDQNNNRASFSQYGAGLDIVAPGVNVQSTYPGSTYASLNGTSMATPHVAGAAVLVKQKNPSWSNVRIRNHLKNTATSLGSTNLYGSGLVNAEAATR

SEQ ID NO: 59086 - protein, 269 aa, Unidentified
AQSVPWGISRVQAPAAHNRGLAGRGVKVAVLDTGISTHPDLNIRGGASFVPGEPSTQDGEGHGTHVAGTIAALNNSIGVLGVAPSAELYAVKVLGASGSGSVSSIAQGLEWAGLNRMHVANLSLGSPSPSATLEQAVNSATSRGVLVVAASGNSGEGSIDYPARYANAMAVGATDQNNNRADFSQYGAGLDIVAPGVNVQSTYPGSTYASLNGTSMATPHVAGAAALVKQKNPSWSNVQIRNHLKNTATSLGSTNLYGSGLVNAEAATR

SEQ ID NO: 59087 - protein, 269 aa, Unidentified
AQSVPWGISRVQAPAAHNRKLLGSGVKVAVLDTGISTHPDLNIRGGASFVPGEPSTQDGNGHGTHVAGTIAALNNDIGVLGVAPSAELYAVKVLGASGSGSVSSIAQGLEWAGNNDMHVANLSLGSESPSATLEQAVNSATSRGVLVVAASGNSGADSISYPARYANAMAVGATDQNNNRASFSQYGAGLDIVAPGVNVQSTYPGSTYASLNGTSMATPHVAGAAALVKQKNPSWSNVRIRNRLKNTATSLGSTNLYGSGLVNAEAATR

SEQ ID NO: 59088 - protein, 269 aa, Unidentified
AQSVPWGISRVQAPAAHRRGLTGRGVKVAVLDTGISTHPDLNIRGGASFVPGEPSTQDGNGHGTHVAGTIAALDNSIGVLGVAPSAELYAVKVLGASGSGSVSSIAQGLEWAGAIGMHVANLSLGSPSPSATLEQAVNSATSRGVLVVAASGNSGAGSISYPARYANAMAVGATDQDNNRASFSQYGAGLDIVAPGVNVQSTYPGSAYASLNGTSMATPHVAGAAALVKQKNPSWSNVQIRNRLKNTATSLGSTNLYGSGLVNAEAATR

SEQ ID NO: 59089 - protein, 269 aa, Unidentified
AQSVPWGISRVQAPAAHRRGLWGRGVKVAVLDTGISTHPDLNIRGGASFVPGEPSTQDGNGHGTHVAGTIAALDNSIGVLGVAPSAELYAVKVLGASGSGSVSSIAQGLEWAGANGMHVANLSLGSPSPSATLEQAVNSATSRGVLVVAASGNSGAGSISYPARYANAMAVGATDQNNNRASFSQYGAGLDIVAPGVNVQSTYPGSAYFSLNGTSMATPHVAGAAALVKQKNPSWSNVQIRNRLKNTATSLGSTNLYGSGLVNAEAATR

SEQ ID NO: 59090 - protein, 269 aa, Unidentified
AQSVPWGISRVQAPAAHNRGLTGSGVKVAVLDTGISTHPDLNIRGGASFVPGEPSTQDGNGHGTHVAGTIAALNNSIGVLGVAPSAELYAVKVLGASGGGAISSIAQGLEWAGNNGMHVANLSLGSPSPSATLEQAVNSATSRGVLVVAASGNSGADSISYPARYANAMAVGATDQNNNRASFSQYGAGLDIVAPGVNVQSTYPGSTYASLNGTSMATPHVAGAAVLVKQKNPSWSNVRIRDHLKNRATSLGSTNLYGSGLVNAEAATR

SEQ ID NO: 59091 - protein, 269 aa, Unidentified
AQSVPWGISRVQAPAAHNRRLTGRGVKVAVLDTGISTHPDLNIRGGASFVPGEPSTQDGNGHGTHVAGTIAALNNDIGVLGVAPSAELYAVKVLGASGSGSVSSIAQGLEWAGNNSMHVANLSLGSPSPSATLEQAVNSATSRGVLVVAASGNSGADSISYPARYANAMAVGATDQNNNRADFSQYGAGLDIVAPGVNVQSTYPGSTYASLNGTSMATPHVAGAAALVKQKNPSWSNVQIRDRLKNTATSLGSTNLYGSGLVNAEAATR

SEQ ID NO: 59092 - protein, 269 aa, Unidentified
AQSVPWGISRVQAPAAHNRRLTGRGVKVAVLDTGISTHPDLNIRGGASFVPGEPSTQDGNGHGTHVAGTIAALNNGIGVLGVAPSAELYAVKVLGASGSGSVSSIAQGLEWAGNNDMHVANLSLGSESPSATLEQAVNSATSRGVLVVAASGNSGAGSISYPARYANAMAVGATDQNNNRADFSQYGAGLDIVAPGVNVQSTYPGSTYASLNGTSMATPHVAGAAALVKQKNPSWSNVRIRDHLKNTATSLGSTNLYGSGLVNAEAATR

SEQ ID NO: 59093 - protein, 269 aa, Unidentified
AQSVPWGISRVQAPAAHNRGLAGRGVKVAVLDTGISTHPDLNIRGGASFVPGEPSTQDGEGHGTHVAGTIAALNNSIGVLGVAPSAELYAVKVLGASGSGSVSSIAQGLEWAGLNRMHVANLSLGIPSPSATLEQAVNSATSRGVLVVAASGNSGEGSIDYPARYANAMAVGATDQNNNRASFSQYGAGLDIVAPGVNVQSTYPGSTYASLNGTSMATPHVAGAAALVKQKNPSWSNVQIRNHLKNTATSLGSTNLYGSGLVNAEAATR

SEQ ID NO: 59094 - protein, 269 aa, Unidentified
AQSVPWGISRVQAPAAHNRGLTGRGVKVAVLDTGISTHPDLNIRGGASFVPGEPSTQDGEGHGTHVAGTIAALNNDIGVLGVAPSAELYAVKVLGASGSGSVSSIAQGLEWAGNNDMHVANLSLGSESPSATLEQAVNSATSRGVLVVAASGNSGAGSISYPARYANAMAVGATDQNNNRASFSQYGAGLDIVAPGVNVQSTYPGSTYASLNGTSMATPHVAGAAALVKQKNPSWSNVRIRDRLKNTATSLGSTNLYGSGLVNAEAATR

SEQ ID NO: 59095 - protein, 269 aa, Unidentified
AQSVPWGISRVQAPAAHNRGLTGRGVKVAVLDTGISTHPDLNIRGGASFVPGEPSTQDGNGHGTHVAGTIAALDNNIGVLGVAPRAELYAVKVLGASGSGSVSSIAQGLEWAGNNGMHVANLSLGLQAPSATLEQAVNSATSRGVLVVAASGNSGAGSISYPARYANAMAVGATDQNNNRASFSQYGAGLDIVAPGVNVLSTYPGSTYASLNGTSMATPHVAGAAALVKQKNPSWSNVQIRNHLKNTATSLGSTNLYGSGLVNAEAATR

SEQ ID NO: 59096 - protein, 269 aa, Unidentified
AQSVPWGISRVQAPAAHNRRLTGRGVKVAVLDTGISTHPDLNIRGGASFVPGEPSTQDGEGHGTHVAGTIAALNNDIGVLGVAPSAELYAVKVLGASGSGSVSSIAQGLEWAGNNSMHVANLSLGSPSPSATLEQAVNSATSRGVLVVAASGNSGAGSISYPARYANAMAVGATDQNNNRADFSQYGAGLDIVAPGVNVQSTYPGSTYASLNGTSMATPHVAGAAALVKQKNPSWSNVRIRDHLKNTATSLGSTNLYGSGLVNAEAATR

SEQ ID NO: 59097 - protein, 269 aa, Unidentified
AQSVPWGISRVQAPAAHNRGLTGSGVKVAVLDTGISTHPDLNIRGGASFVPGEPSTQDGNGHGTHVAGTIAALDNAIGVLGVAPRAELYAVKVLGASGSGSVSSIAQGLEWAGNNRMHVANLSLGLQAPSATLEQAVNSATSRGVLVVAASGNSGAGSISYPARYANAMAVGATDQNNNRASFSQYGAGLDIVAPGVNVRSTYPGSTYASLNGTSMATPHVAGAAALVKQKNPSWSNVQIRNHLKNTATSLGSTNLYGSGLVNAEAATR

SEQ ID NO: 59098 - protein, 269 aa, Unidentified
AQSVPWGISRVQAPAAHNRGLAGRGVKVAVLDTGISTHPDLNIRGGASFVPGEPSTQDGEGHGTHVAGTIAALNNSIGVLGVAPSAELYAVKVLGASGSGSVSSIAQGLEWAGLNRMHVANLSLGIPSPSATLEQAVNSATSRGVLVVAASGNSGAGSIDYPARYANAMAVGATDQNNNRADFSQYGAGLDIVAPGVNVQSTYPGSTYASLNGTSMATPHVAGAAALVKQKNPSWSNVQIRNHLKNTATSLGSTNLYGSGLVNAEAATR

SEQ ID NO: 59099 - protein, 269 aa, Unidentified
AQSVPWGISRVQAPAAHNRGLTGSGVKVAVLDTGISTHPDLRIRGGASFVPGEPSTQDGNGHGTHVAGTIAALDNSIGVLGVAPSAELYAVKVLGASGGGAISSIAQGLEWAGNNGMHVANLSLGSPSPSATLEQAVNSATSRGVLVVAASGNSGAGSISYPARYANAMAVGATDQNNNRASFSQYGAGLDIVAPGVNVQSTYPGSTYASENGTSMATPHVAGAAVLVKQKNPSWSNVRIRNHLKNTATSLGSTNLYGSGLVNAEAATR

SEQ ID NO: 59100 - protein, 269 aa, Unidentified
AQSVPWGISRVQAPAAHNRGLTGSGVKVAVLDTGISTHPDLNIRGGASFVPGEPSTQDGNGHGTHVAGTIAALDNVIGVLGVAPRAELYAVKVLGASGSGSVSSIAQGLEWAGNNRMHVANLSLGLQAPSATLEQAVNSATSRGVLVVAASGNSGAGSISYPARYANAMAVGATDQNNNRASFSQYGAGLDIVAPGVNVRSTYPGSTYASLNGTSMATPHVAGAAALVKQKNPSWSNVQIRNHLKNTATSLGSTNLYGSGLVNAEAATR

SEQ ID NO: 59101 - protein, 269 aa, Unidentified
AQSVPWGISRVQAPAAHNRGLAGSGVKVAVLDTGISTHPDLNIRGGASFVPGEPSTQDGNGHGTHVAGTIAALNNSIGVLGVAPSAELYAVKVLGASGQGAISSIAGGLEWAGNNGMHVANLSLGAPSPSATLEQAVNSATSRGVLVVAASGNSGAGSISYPARYANAMAVGATDQNNNRASFSQYGAGLDIVAPGVNVQSTYPGSTYASLNGTSMATPHVAGAAVLVKQKNPSWSNVRIRNHLKNTATSLGSTNLYGSGLVNAEAATR

SEQ ID NO: 59102 - protein, 269 aa, Unidentified
AQSVPWGISRVQAPAAHNRKLTGSGVKVAVLDTGISTHPDLNIRGGASFVPGEPSTQDGEGHGTHVAGTIAALNNSIGVLGVAPSAELYAVKVLSASGNGSVSSIANGLEWAGLNGMHVANLSLGSPSPSATLEQAVNSATSRGVLVVAASGNSGAGSISYPARYANAMAVGATDQNNNRADFSQYGAGLDIVAPGVNVQSTYPGSTYASQNGTSMATPHVAGAAALVKQKNPSWSNVQIRNHLKNTATSLGSTNLYGSGLVNAEAATR

SEQ ID NO: 59103 - protein, 269 aa, Unidentified
AQSVPWGISRVQAPAAHNRRLTGRGVKVAVLDTGISTHPDLNIRGGASFVPGEPSTQDGNGHGTHVAGTIAALNNDIGVLGVAPSAELYAVKVLGASGSGSVSSIAQGLEWAGNNSMHVANLSLGSESPSATLEQAVNSATSRGVLVVAASGNSGADSISYPARYANAMAVGATDQNNNRADFSQYGAGLDIVAPGVNVQSTYPGSTYASLNGTSMATPHVAGAAALVKQKNPSWSNVQIRDHLKNTATSLGSTNLYGSGLVNAEAATR

SEQ ID NO: 59104 - protein, 269 aa, Unidentified
AQTIPWGISRVQAPAAHNRGLTGSGVKVAVLDTGISTHPDLNIRGGASFVPGEPSTQDGNGHGTHVAGTIAALNNSIGVLGVAPSAELYAVKVLGADGDGAISSIAQGLEWAGNNGMHVANLSLGSPSPSATLEQAVNSATSRGVLVVAASGNSGASSISYPARYANAMAVGATDQNNNRASFSQYGAGLDIVAPGVNIQSTYPGSTYASLNGTSMATPHVAGAAALVKQKNPSWSNVQIRNHLKNTATSLGSTNLYGSGLVNAEAATR

SEQ ID NO: 59105 - protein, 269 aa, Unidentified
AQSVPWGISRVQAPAAHNRGLAGSGVKVAVLDTGISTHPDLNIRGGASFVPGEPSTQDGNGHGTHVAGTIAALNNSIGVLGVAPSAELYAVKVLGASGNGAISSIANGLEWAGNNGMHVANLSLGAPSPSATLEQAVNSATSRGVLVVAASGNSGAGSISYPARYANAMAVGATDQNNNRASFSQYGAGLDIVAPGVNVQSTYPGSTYASLNGTSMATPHVAGAAVLVKQKNPSWSNVRIRNHLKNTATSLGSTNLYGSGLVNAEAATR

SEQ ID NO: 59106 - protein, 269 aa, Unidentified
AQSVPWGISRVQAPAAHRRGLWGRGVKVAVLDTGISTHPDLNIRGGASFVPGEPSTQDGNGHGTHVAGTIAALDNSIGVLGVAPSAELYAVKVLGASGAGSVSSIAQGLEWAGANGMHVANLSLGSPSPSATLEQAVNSATSRGVLVVAASGNSGAGSISYPARYANAMAVGATDQNNNRASFSQYGAGLDIVAPGVNVQSTYPQSTYASLNGTSMATPHVAGAAALVKQKNPSWSNVQIRNRLKNTATSLGSTNLYGSGLVNAEAATR

SEQ ID NO: 59107 - protein, 269 aa, Unidentified
AQSVPWGISRVQAPAAHRRGLTGRGVKVAVLDTGISTHPDLNIRGGASFVPGEPSTQDGNGHGTHVAGTIAALDNNIGVLGVAPSAELYAVKVLGASGSGSVSSIAQGLEWAGNNRMHVANLSLGLQAPSATLEQAVNSATSRGVLVVAASGNSGAGSISYPARYANAMAVGATDQNNNRASFSQYGAGLDIVAPGVNVQSTYPGSTYASLNGTSMATPHVAGAAALVKQKNPSWSNVQIRNHLKNTATSLGSTNLYGSGLVNAEAATR

SEQ ID NO: 59108 - protein, 269 aa, Unidentified
AQSVPWGISRVQAPAAHNRGLAGSGVKVAVLDTGISTHPDLNIRGGASFVPGEPSTQDGNGHGTHVAGTIAALDNSIGVLGVAPSAELYAVKVLSASGGGAISSIAQGLEWAGNNGMHVANLSLGSPSPSATLEQAVNSATSRGVLVVAASGNSGAGSISYPARYANAMAVGATDQNNNRASFSQYGAGLDIVAPGVNVQSTYPGSTYASLNGTSMATPHVAGAAVLVKQKNPSWSNVRIRNHLKNTATSLGSTNLYGSGLVNAEAATR

SEQ ID NO: 59109 - protein, 269 aa, Unidentified
AQSVPWGISRVQAPAAHNRKLTGGGVKVAVLDTGISTHPDLNIRGGASFVPGEPSTQDGEGHGTHVAGTIAALNNNIGVLGVAPSAELYAVKVLGASGNGSVSSIAQGLEWAGLNGMHVANLSLGAPSPSATLEQAVNSATSRGVLVVAASGNSGAGSISYPARYANAMAVGATDQNNNRASFSQYGAGLDIVAPGVNVQSTYPGSTYASQNGTSMATPHVAGAAALVKQKNPSWSNVQIRNHLKNTATSLGSTNLYGSGLVNAEAATR

SEQ ID NO: 59110 - protein, 269 aa, Unidentified
AQSVPWGISRVQAPAAHRRGLWGRGVKVAVLDTGISTHPDLNIRGGASFVPGEPSTQDGNGHGTHVAGTIAALDNSIGVLGVAPSAELYAVKVLGASGSGSVSSIAQGLEWAGNNGMHVANLSLGSPSPSATLEQAVNSATSRGVLVVAASGNSGAGSISYPARYANAMAVGATDQDNNRASFSQYGAGLDIVAPGVNVQSTYPQSTYFSLNGTSMATPHVAGAAALVKQKNPSWSNVQIRNRLKNTATSLGSTNLYGSGLVNAEAATR

SEQ ID NO: 59111 - protein, 269 aa, Unidentified
AQSVPWGISRVQAPAAHRRRLWGRGVKVAVLDTGISTHPDLNIRGGASFVPGEPSTQDGNGHGTHVAGTIAALDNSIGVLGVAPSAELYAVKVLGASGSGSVSSIAQGLEWAGNNGMHVANLSLGSPSPSATLEQAVNSATSRGVLVVAASGNSGAGSISYPARYANAMAVGATDQNNNRASFSQYGAGLDLVAPGVNVQSTYPGSAYASLNGTSMATPHVAGAAALVKQKNPSWSNVQIRNRLKNTATSLGSTNLYGSGLVNAEAATR

SEQ ID NO: 59112 - protein, 269 aa, Unidentified
AQSVPWGISRVQAPAAHRRGLWGRGVKVAVLDTGISTHPDLNIRGGASFVPGEPSTQDGNGHGTHVAGTIAALDNSIGVLGVAPSAELYAVKVLGASGSGSVSSIAQGLEWAGANGMHVANLSLGSPSPSATLEQAVNSATSRGVLVVAASGNSGAGSISYPARYANAMAVGATDQNNNRASFSQYGAGLDLVAPGVNVQSTYPGSAYASLNGTSMATPHVAGAAALVKQKNPSWSNVQIRNRLKNTATSLGSTNLYGSGLVNAEAATR

SEQ ID NO: 59113 - protein, 269 aa, Unidentified
AQSVPWGISRVQAPAAHNRGLTGRGVKVAVLDTGISTHPDLNIRGGASFVPGEPSTQDGEGHGTHVAGTIAALNNDIGVLGVAPSAELYAVKVLGASGSGSVSSIAQGLEWAGNNDMHVANLSLGSESPSATLEQAVNSATSRGVLVVAASGNSGAGSISYPARYANAMAVGATDQNNNRADFSQYGAGLDIVAPGVNVQSTYPGSTYASLNGTSMATPHVAGAAALVKQKNPSWSNVRIRDHLKNTATSLGSTNLYGSGLVNAEAATR

SEQ ID NO: 59114 - protein, 269 aa, Unidentified
AQSVPWGISRVQAPAAHNRGLTGSGVKVAVLDTGISTHPDLDIRGGASFVPGEPSTQDGNGHGTHVAGTIAALDNRIGVLGVAPSAELYAVKVLGASGGGAISSIAQGLEWAGNNGMHVANLSLGSPSPSATLEQAVNSATSRGVLVVAASGNSGAGSISYPARYANAMAVGATDQNNNRASFSQYGAGLDIVAPGVNVQSTYPGSTYASLNGTSMATPHVAGAAVLVKQKNPSWSNVRIRNHLKNTATSLGSTNLYGSGLVNAEAATR

SEQ ID NO: 59115 - protein, 269 aa, Unidentified
AQSVPWGISRVQAPAAHNRGLTGSGVKVAVLDTGISTHPDLNIRGGASFVPGEPSTQDGNGHGTHVAGTIAALNNSIGVLGVAPSAELYAVKVLGASGGGAISSIARGLEWAGNNGMHVANLSLGSPSPSATLEQAVNSATSRGVLVVAASGNSGAGSISYPARYANAMAVGATDQNNNRASFSQYGAGLDIVAPGVNVQSTYPGPTYASLNGTSMATPHVAGAAVLVKQKNPSWSNVRIRNHLKNTATSLGSTNLYGSGLVNAVAATR

SEQ ID NO: 59116 - protein, 269 aa, Unidentified
AQSVPWGISRVQAPAAHNRRLTGRGVKVAVLDTGISTHPDLNIRGGASFVPGEPSTQDGNGHGTHVAGTIAALNNGIGVLGVAPSAELYAVKVLGASGSGSVSSIAQGLEWAGNNDMHVANLSLGSESPSATLEQAVNSATSRGVLVVAASGNSGADSISYPARYANAMAVGATDQNNNRASFSQYGAGLDIVAPGVNVQSTYPGSTYASLNGTSMATPHVAGAAALVKQKNPSWSNVQIRDRLKNTATSLGSTNLYGSGLVNAEAATR

SEQ ID NO: 59117 - protein, 269 aa, Unidentified
AQSVPWGISRVQAPAAHNRRLTGRGVKVAVLDTGISTHPDLNIRGGASFVPGEPSTQDGNGHGTHVAGTIAALNNGIGVLGVAPSAELYAVKVLGASGSGSVSSIAQGLEWAGNNDMHVANLSLGSPSPSATLEQAVNSATSRGVLVVAASGNSGADSISYPARYANAMAVGATDQNNNRASFSQYGAGLDIVAPGVNVQSTYPGSTYASLNGTSMATPHVAGAAALVKQKNPSWSNVRIRDRLKNTATSLGSTNLYGSGLVNAEAATR

SEQ ID NO: 59118 - protein, 269 aa, Unidentified
AQSVPWGISRVQAPAAHRRRLWGRGVKVAVLDTGISTHPDLNIRGGASFVPGEPSTQDGNGHGTHVAGTIAALDNSIGVLGVAPSAELYAVKVLGASGAGSVSSIAQGLEWAGNNGMHVANLSLGSPSPSATLEQAVNSATSRGVLVVAASGNSGAGSISYPARYANAMAVGATDQNNNRASFSQYGAGLDIVAPGVNVQSTYPGSTYFSLNGTSMATPHVAGAAALVKQKNPSWSNVQIRNRLKNTATSLGSTNLYGSGLVNAEAATR

SEQ ID NO: 59119 - protein, 269 aa, Unidentified
AQSVPWGISRVQAPAAHRRGLWGRGVKVAVLDTGISTHPDLNIRGGASFVPGEPSTQDGNGHGTHVAGTIAALDNSIGVLGVAPSAELYAVKVLGASGAGSVSSIAQGLEWAGANGMHVANLSLGSPSPSATLEQAVNSATSRGVLVVAASGNSGAGSISYPARYANAMAVGATDQNNNRASFSQYGAGLDIVAPGVNVQSTYPGSTYFSLNGTSMATPHVAGAAALVKQKNPSWSNVQIRNRLKNTATSLGSTNLYGSGLVNAEAATR

SEQ ID NO: 59120 - protein, 269 aa, Unidentified
AQSVPWGISRVQAPAAHNRGLTGSGVKVAVLDTGISTHPDLNIRGGASFVPGEPSTQDGNGHGTHVAGTIAALDNCIGVLGVAPRAELYAVKVLGASGSGSVSSIAQGLEWAGNNRMHVANLSLGLQAPSATLEQAVNSATSRGVLVVAASGNSGAGSISYPARYANAMAVGATDQNNNRASFSQYGAGLDIVAPGVNVDSTYPGSTYASLNGTSMATPHVAGAAALVKQKNPSWSNVQIRNHLKNTATSLGSTNLYGSGLVNAEAATR

SEQ ID NO: 59121 - protein, 269 aa, Unidentified
AQSVPWGISHVQAPAAHNRGLAGSGVKVAVLDTGISTHPDLNIRGGASFVPGEPSTQDGNGHGTHVAGTIAALNNSIGVLGVAPSAELYAVKVLGASGGGAISSIAQGLEWAGNNGMHVANLSLGSPSPSATLEQAVNSATSRGVLVVAASGNSGAGSISYPARYANAMAVGATDQNNNRASFSQYGAGLDIVAPGVNVQSTYPGSTYASLNGTSMATPHVAGAAVLVKQKNPSWSNVRIRNHLKNTATSLGSTNLYGSGLVNAEVATR

SEQ ID NO: 59122 - protein, 269 aa, Unidentified
AQSVPWGISRVQAPAAHRRGLWGRGVKVAVLDTGISTHPDLNIRGGASFVPGEPSTQDGNGHGTHVAGTIAALDNSIGVLGVAPSAELYAVKVLGASGAGSVSSIAQGLEWAGNNGMHVANLSLGSPSPSATLEQAVNSATSRGVLVVAASGNSGAGSISYPARYANAMAVGATDQNNNRASFSQYGAGLDIVAPGVNVQSTYPQSTYFSLNGTSMATPHVAGAAALVKQKNPSWSNVQIRNRLKNTATSLGSTNLYGSGLVNAEAATR

SEQ ID NO: 59123 - protein, 269 aa, Unidentified
AQSVPWGISRVQAPAAHNRGLTGSGVKVAVLDTGISTHPDLNIRGGASFVPGEPSTQDGNGHGTHVAGTIAALNNSIGVLGVAPSAELYAVKVLGASGGGALSSIAQGLEWAGNNGMHVANLSLGSPSPSATLEQAVNSATSRGVLVVAASGNSGAESISYPARYANAMAVGATDQNNNRASFSQYGAGLDIVAPGVNVQSTYPGSTYASLNGTSMATPHVAGAAVLVKQKNPSWSNVRIRDRLKNTATSLGSTNLYGSGLVNAEAATR

SEQ ID NO: 59124 - protein, 269 aa, Unidentified
AQSVPWGISRVQAPAAHNRRLTGSGVKVAVLDTGISTHPDLNIRGGASFVPGEPSTQDGNGHGTHVAGTIAALNNRIGVLGVAPSAELYAVKVLGASGGGAISSIAQGLEWAGNNGMHVANLSLGSPSPSATLEQAVNSATSRGVLVVAASGNSGAGSISYPARYANAMAVGATDQNNNRASFSQYGAGLDIVAPGVNVQSTYPGSTYFSLNGTSMATPHVAGAAVLVKQKNPSWSNVRIRNHLKNTATSLGSTNLYGSGLVNAEAATR

SEQ ID NO: 59125 - protein, 269 aa, Unidentified
AQVVPWGVSRVQAPAAHNRGLTGSGVKVAVLDTGISTHEDLNIRGGASFVPGEPSTQDGNGHGTHVAGTIAALDNSIGVLGVAPSAELYAVKVLGASGSGSVSSIAQGLEWAGNNRMHVANLSLGRPSPSATLEQAVNSATSRGVLVVAASGNSGAGSISYPARYANAMAVGATDQNNNRASFSQYGAGLDIVAPGVNVQSTYIGSTYASLNGTSMATPHVAGAAALVKQKNPSWSNVQIRNHLKNTATSLGSTILYGSGLVNAEAATR

SEQ ID NO: 59126 - protein, 269 aa, Unidentified
AQSVPWGISRVQAPAAHNRGLTGSGVKVAVLDTGISTHPDLNIRGGASFVPGEPSTQDGNGHGTHAAGTIAALNNSIGVLGVAPSAELYAVKVLGASGSGAISSIAQGLEWAGNNGMHVANLSLGSPSPSATLEQAVNSATSRGVLVVAASGNSGADSISYPARYANAMAVGATDQNNNRASFSQYGAGLDIVAPGVNVQSTYPGSTYASLNGTSMATPHVAGAAVLVKHKNPSWSNVRIRNHLKNTATSLGSANLYGSGLVNAEAATR

SEQ ID NO: 59127 - protein, 269 aa, Unidentified
AQSVPWGISRVQAPAAHNRGLTGSGVKVAVLDTGISTHPDLNIRGGASFVPGEPSTQDGNGHGTHVAGTIAALDNHIGVLGVAPRAELYAVKVLGASGSGSVSSIAQGLEWAGNNRMHVANLSLGLQAPSATLEQAVNSATSRGVLVVAASGNSGAGSISYPARYANAMAVGATDQNNNRASFSQYGAGLDIVAPGVNVFSTYPGSTYASLNGTSMATPHVAGAAALVKQKNPSWSNVQIRNHLKNTATSLGSTNLYGSGLVNAEAATR

SEQ ID NO: 59128 - protein, 269 aa, Unidentified
AQSVPWGISRVQAPAAHRRGLTGRGVKVAVLDTGISTHPDLNIRGGASFVPGEPSTQDGNGHGTHVAGTIAALDNSIGVLGVAPSAELYAVKVLGASGSGSVSSIAQGLEWAGANGMHVANLSLGSPSPSATLEQAVNSATSRGVLVVAASGNSGAGSISYPARYANAMAVGATDQNNNRASFSQYGAGLDLVAPGVNVQSTHPGSAYASLNGTSMATPHVAGAAALVKQKNPSWSNVQIRNRLKNTATSLGSTNLYGSGLVNAEAATR

SEQ ID NO: 59129 - protein, 269 aa, Unidentified
AQSVPWGISRVQAPAAHNRRLTGSGVKVAVLDTGISTHPDLNIRGGASFVPGEPSTQDGEGHGTHVAGTIAALNNDIGVLGVAPSAELYAVKVLGASGSGSVSSIAQGLEWAGNNDMHVANLSLGSESPSATLEQAVNSATSRGVLVVAASGNSGAGSISYPARYANAMAVGATDQNNNRADFSQYGAGLDIVAPGVNVQSTYPGSTYASLNGTSMATPHVAGAAALVKQKNPSWSNVQIRDRLKNTATSLGSTNLYGSGLVNAEAATR

SEQ ID NO: 59130 - protein, 269 aa, Unidentified
AQSVPWGISRVQAPAAHNRGLAGSGVKVAVLDTGISTHPDLNIRGGASFVPGEPSTQDGNGHGTHVAGTIAALNNNIGVLGVAPSAELYAVKVLGASGNGAISSIANGLEWAGNNGMHVANLSLGSPSPSATLEQAVNSATSRGVLVVAASGNSGAGSISYPARYANAMAVGATDQNNNRASFSQYGAGLDIVAPGVNVQSTYPGSTYASLNGTSMATPHVAGAAVLVKQKNPSWSNVRIRNHLKNTATSLGSTNLYGSGLVNAEAATR

SEQ ID NO: 59131 - protein, 269 aa, Unidentified
AQSVPWGISRVQAPAAHNRGLTGSGVKVAVLDTGISTHPDLNIRGGASFVPGEPSTQDGNGHGTHVAGTIAALDNEIGVLGVAPRAELYAVKVLGASGSGSVSSIAQGLEWAGNNRMHVANLSLGLQAPSATLEQAVNSATSRGVLVVAASGNSGAGSISYPARYANAMAVGATDQNNNRASFSQYGAGLDIVAPGVNVDSTYPGSTYASLNGTSMATPHVAGAAALVKQKNPSWSNVQIRNHLKNTATSLGSTNLYGSGLVNAEAATR

SEQ ID NO: 59132 - protein, 269 aa, Unidentified
AQSVPWGISRVQAPAAHNRGLTGSGVKVAVLDTGISTHPDLNIRGGASFVPGEPSTQDGNGHGTHAAGTIAALNNSIGVLGVAPSAELYAVKVLGASGSGAISSIAQGLEWAGNNGMHVANLSLGSPSPSATLEQAVNSATSRGVLVVAASGNSGADSISYPARYANAMAVGATDQNNNRASFSQYGAGLDIVAPGVNVQSTYPGSTYASLNGTSMATPHVAGAAVLVKHKNPSWSNVRIRNHLKNTATSVGSTNLYGSGLVNAEAATR

SEQ ID NO: 59133 - protein, 269 aa, Bacillus Lentus
AQSVPWGIRRVQAPTAHNRGLTGSGVKVAVLDTGISTHPDLNIRGGASFVPGEPSTQDGNGHGTHAAGTIAALNNSIGVLGVAPSAELYAVKVLGADGSGSVSSIAQGLEWAGNNGMNVANLSLGSPSTSATLEQAVNSATSRGVLVVAASGNSGAGSISYPARYANAMAVGATDQNNNRASFSQYGPGLDIVAPGVNVESTYPGSTYASLNGTSMATPHVAGAAALVKQKNPSWSNVQIRNHLKNTATSLGSTNLYGSGLVNAEAATR

SEQ ID NO: 59134 - protein, 269 aa, Unidentified
AQSVPWGISRVQAPAAHNRGLTGSGVKVAVLDTGISTHPDLRIRGGASFVPGEPSTQDGNGHGTHVAGTIAALNNRIGVLGVAPSAELYAVKVLGASGGGAISSIAQGLEWAGNNGMHVANLSLGSPSPSATLEQAVNSATSRGVLVVAASGNSGAGSISYPARYANAMAVGATDQNNNRASFSQYGAGLDIVAPGVNVQSTYPGSTYASENGTSMATPHVAGAAVLVKQKNPSWSNVRIRNHLKNTATSLGSTNLYGSGLVNAEAATR

SEQ ID NO: 59135 - protein, 269 aa, Unidentified
AQSVPWGISRVQAPAAHNRGLAGFGVKVAVLDTGISTHPDLNIRGGASFVPGEPSTQDGNGHGTHVAGTIAALNNSIGVLGVAPSAELYAVKVLGASGGGAISSIAQGLEWAGLNGMHVANLSLGSPSPSATLEQAVNSATSRGVLVVAASGNSGAGSISYPARYANAMAVGATDQNNNRASFSQYGAGLDIVAPGVNVQSTAPGSTYASLNGTSMATPHVAGAAVLVKQKNPSWSNVQIRNHLKNTATSLGSTNLYGSGLVNAEAATR

SEQ ID NO: 59136 - protein, 269 aa, Unidentified
AQSVPWGISRVQAPAAHNRGLTGSGVKVAVLDTGISTHPDLNIRGGASFVPGEPSTQDGNGHGTHVAGTIAALNNSIGVLGVAPSAELYAVKVLGASGGGALSSIAQGLEWAGNNGMHVANLSLGSPSPSATLEQAVNSATSRGVLVVAASGNSGADSISYPARYANAMAVGATDQNNNRASFSQYGAGLDIVAPGVNVQSTYPGSTYASLNGTSMATPHVAGAAVLVKHKNPSWSNVQIRDHLKKTATSLGSTNLYGSGLVNAEAATR

SEQ ID NO: 59137 - protein, 269 aa, Unidentified
AQSVPWGISRVQAPAAHNRRLTGRGVKVAVLDTGISTHPDLNIRGGASFVPGEPSTQDGNGHGTHVAGTIAALNNDIGVLGVAPSAELYAVKVLGASGSGSVSSIAQGLEWAGNNDMHVANLSLGSESPSATLEQAVNSATSRGVLVVAASGNSGADSISYPARYANAMAVGATDQNNNRADFSQYGAGLDIVAPGVNVQSTYPGSTYASLNGTSMATPHVAGAAALVKQKNPSWSNVQIRDHLKNTATSLGSTNLYGSGLVNAEAATR

SEQ ID NO: 59138 - protein, 269 aa, Unidentified
AQSVPWGISRVQAPAAHNRGLTGSGVKVAVLDTGISTHPDLNIRGGASFVPGEPSTQDGNGHGTHVAGTIAALNNSIGVLGVAPSAELYAVKVLGASGGGAISSIAQGLEWAGLNGMHVANLSLGNPSPSATLEQAVNSATSRGVLVVAASGNSGAGSISYPARYANAMAVGATDQNNNRASFSQYGAGLDIVAPGVNVQSTVPQSTYASLNGTSMATPHVAGAAVLVKQKNPSWSNVQIRNHLKNTATSLGSTNLYGSGLVNAEAATR

SEQ ID NO: 59139 - protein, 269 aa, Unidentified
AQSVPWGISRVQAPAAHNRGLTGSGVKVAVLDTGISTHPDLNIRGGASFVPGEPSTQDGNGHGTHAAGTIAALNNSIGVLGVAPSAELYAVKVLGASGSGAISSIAQGLEWAGNNGMHVANLSLGSPSPSATLEQAVNSATSRGVLVVAASGNSGADSISYPARYANAMAVGATDQNNNRASFSQYGAGLDIVAPGVNVQSTYPGSTYASLNGTSMATPHVAGAAVLVKHKNPSWSNVRIRNHLKKTATSLGSTNLYGSGLVNAEAATR

SEQ ID NO: 59140 - protein, 269 aa, Unidentified
AQSVPWGISRVQAPAAHNRGLTGSGVKVAVLDTGISTHPDLNIRGGASFVPGEPSTQDGNGHGTHVAGTIAALDNNIGVLGVAPRAELYAVKVLGASGGGAISSIAQGLEWAGNNRMHVANLSLGSPSPSATLEQAVNSATSRGVLVVAASGNSGAGSISYPARYANAMAVGATDQNNNRASFSQYGAGLDIVAPGVNVLSTYPGSTYASLNGTSMATPHVAGAAALVKQKNPSWSNVQIRNHLKNTATSLGSTNLYGSGLVNAEAATR

SEQ ID NO: 59141 - protein, 269 aa, Unidentified
AQSVPWGISRVQAPAAHNRGLAGSGVKVAVLDTGISTHPDLNIRGGASFVPGEPSTQDGNGHGTHVAGTIAALNNSIGVLGVAPSAELYAVKVLGASGNGAISSIAQGLEWAGNNGMHVANLSIGSSSPSATLEQAVNSATSRGVLVVAASGNSGAGSISYPARYANAMAVGATDQNNNRASFSQYGAGLDIVAPGVNVQSTYPGSTYASLNGTSMATPHVAGAAVLVKQKNPSWSNVRIRNHLKNTATSLGSTNLYGSGLVNAEAATR

SEQ ID NO: 59142 - protein, 269 aa, Unidentified
AQSVPWGISRVQAPAAHNRGLTGSGVKVAVLDTGISTHPDLNIRGGASFVPGEPSTQDGNGHGTHAAGTIAALNNSIGVLGVAPSAELYAVKVLGTSGSGAISSIAQGLEWAGNNGMHVANLSLGSPSPSATLEQAVNSATSRGVLVVAASGNSGADSISYPARYANAMAVGATDQNNNRASFSQYGAGLDIVAPGVNVQSTYPGSTYASLNGTSMATPHVAGAAVLVKHKNPSWSNVRIRNHLKNTATSLGSTNLYGSGLVNAEAATR

SEQ ID NO: 59143 - protein, 269 aa, Unidentified
AQSVPWGISRVQAPAAHNRGLRGSGVKVAVLDTGISTHPDLNIRGGASFVPGEPSTQDGNGHGTHVAGTIAALNNSIGVLGVAPSAELYAVKVLSASGQGAISSIAGGLEWAGNNGMHVANLSLGSPSPSATLEQAVNSATSRGVLVVAASGNSGAGSISYPARYANAMAVGATDQNNNRASFSQYGAGLDIVAPGVNVQSTYPGSTYASLNGTSMATPHVAGAAVLVKQKNPSWSNVRIRNHLKNTATSLGSTNLYGSGLVNAEAATR

SEQ ID NO: 59144 - protein, 269 aa, Unidentified
AQSVPWGISRVQAPAAHNRRLTGSGVKVAVLDTGISTHPDLNIRGGASFVPGEPSTQDGNGHGTHVAGTIAALNNRIGVLGVAPSAELYAVKVLGASGGGAISSIAQGLEWAGNNGMHVANLSLGSPSPSATLEQAVNSATSRGVLVVAASGNSGAGSISYPARYANAMAVGAADQNNNRASFSQYGAGLDIVAPGVNVQSTYPGSTYASLNGTSMATPHVAGAAVLVKQKNPSWSNVRIRNHLKNTATSLGSTNLYGSGLVNAEAATR

SEQ ID NO: 59145 - protein, 269 aa, Unidentified
AQSVPWGISRVQAPAAHRRRLTGRGVKVAVLDTGISTHPDLNIRGGASFVPGEPSTQDGNGHGTHVAGTIAALDNSIGVLGVAPSAELYAVKVLGASGSGSVSSIAQGLEWAGNNGMHVANLSLGSPSPSATLEQAVNSATSRGVLVVAASGNSGAGSISYPARYANAMAVGATDQNNNRASFSQYGAGLDIVAPGVNVQSTYPQSAYFSLNGTSMATPHVAGAAALVKQKNPSWSNVQIRNRLKNTATSLGSTNLYGSGLVNAEAATR

SEQ ID NO: 59146 - protein, 269 aa, Unidentified
AQSVPWGISRVQAPAAHNRGLAGGGVKVAVLDTGISTHPDLNIRGGASFVPGEPSTQDGNGHGTHVAGTIAALDNSIGVLGVAPSAELYAVKVLGASGNGAISSIAQGLEWAGNNGMHVANLSLGSPSPSATLEQAVNSATSRGVLVVAASGNSGAGSISYPARYANAMAVGATDQNNNRASFSQYGAGLDIVAPGVNVQSTYPGSTYASLNGTSMATPHVAGAAVLVKQKNPSWSNVRIRNHLKNTATSLGSTNLYGSGLVNAEAATR

SEQ ID NO: 59147 - protein, 269 aa, Unidentified
AQSVPWGISRVQAPASHNRGLTGSGVKVAVLDTGISTHPDLNIRGGASFVPGEPSTQDGNGHGTHVAGTIAALNNSIGVLGVAPSAELYAVKVLGASGGGAISSIAQGLEWAGLNGMHVANLSLGNPSPSATLEQAVNSATSRGVLVVAASGNSGAGSISYPARYANAMAVGATDQNNNRASFSQYGAGLDIVAPGVNVQSTVPGSTYASLNGTSMATPHVAGAAVLVKQKNPSWSNVQIRNHLKNTATSLGSTNLYGSGLVNAEAATR

SEQ ID NO: 59148 - protein, 269 aa, Unidentified
AQSVPWGISRVQAPAAHNRGLTGSGVKVAVLDTGISTHPDLNIRGGASFVPGEPSTQDGEGHGTHVAGTIAALNNSIGVLGVAPSAELYAVKVLGASGAGAISSIAQGLEWAGNNGMHVANLSLGSPSPSATLEQAVNSATSRGVLVVAASGNSGAGSISYPARYANAMAVGATDQNNNRADFSQYGAGLDIVAPGVNVQSTYIGSTYASLNGTSMATPHVAGAAVLVKQKNPSWSNVRIRNHLKNTATSLGSTNLYGSGLVNAEAATR

SEQ ID NO: 59149 - protein, 269 aa, Unidentified
AQSVPWGISRVQAPAAHNRGLAGSGVKVAVLDTGISTHPDLNIRGGASFVPGEPSTQDGNGHGTHVAGTIAALNNNIGVLGVAPSAELYAVKVLGASGQGAISSIAQGLEWAGNNGMHVANLSLGSPSPSATLEQAVNSATSRGVLVVAASGNSGAGSISYPARYANAMAVGATDQNNNRASFSQYGAGLDIVAPGVNVQSTYPGSTYASQNGTSMATPHVAGAAVLVKQKNPSWSNVRIRNHLKNTATSLGSTNLYGSGLVNAEAATR

SEQ ID NO: 59150 - protein, 269 aa, Unidentified
AQSVPWGISRVQAPAAHNRGLWGRGVKVAVLDTGISTHPDLRITGGASFVPGEPSTQDGNGHGTHVAGTIAALNNSIGVLGVAPSAELYAVKVLGASGAGSVSSIAQGLEWAGNNGMHVANLSLGSPSPSATLEQAVNSATSRGVLVVAASGNSGAGSISYPARYANAMAVGATDQNNNRASFSQYGAGLDIVAPGVNVQSTYIQSAYASLNGTSMATPHVAGAAALVKQKNPSWSNVQIRNHLKNTATSLGSTNLYGSGLVNAEAATR

SEQ ID NO: 59151 - protein, 269 aa, Unidentified
AQSVPWGISRVQAPAAHNRRLTGSGVKVAVLDTGISTHPDLNIRGGASFVPGEPSTQDGEGHGTHVAGTIAALNNDIGVLGVAPSAELYAVKVLGASGSGSVSSIAQGLEWAGNNSMHVANLSLGSPSPSATLEQAVNSATSRGVLVVAASGNSGADSISYPARYANAMAVGATDQNNNRASFSQYGAGLDIVAPGVNVQSTYPGSTYASLNGTSMATPHVAGAAALVKQKNPSWSNVRIRDRLKNTATSLGSTNLYGSGLVNAEAATR

SEQ ID NO: 59152 - protein, 269 aa, Unidentified
AQSVPWGISRVQAPAAHNRGLTGRGVKVAVLDTGISTHPDLDIRGGASFVPGEPSTQDGNGHGTHVAGTIAALNNSIGVLGVAPSAELYAVKVLGASGGGAISSIAQGLEWAGNNGMHVANLSLGSPSPSATLEQAVNSATSRGVLVVAASGNSGAGSISYPARYANAMAVGATDQNNNRASFSQYGAGLDIVAPGVNVQSTYPGSTYASLNGTSMATPHVAGAAVLVKQKNPSWSNVRIRNRLKNTATSLGSTNLYGSGLVNAEAATR

SEQ ID NO: 59153 - protein, 269 aa, Unidentified
AQSVPWGISRVQAPAAHNRGLRGSGVKVAVLDTGISTHPDLNIRGGASFVPGEPSTQDGNGHGTHVAGTIAALNNSIGVLGVAPSAELYAVKVLGASGGGAISSIAQGLEWAGNNGMHVANLSLGSPSPSATLEQAVNSATSRGVLVVAASGNSGAGSISYPARYANAMAVGATDQNNNRASFSQYGAGLDIVAPGVNVQSTYPGSTYASLNGTSMATPHVAGAAVLVKQKNGSWSNVRIRNHLKNTATSLGSTNLYGSGLVNAIAATR

SEQ ID NO: 59154 - protein, 269 aa, Unidentified
AQSVPWGISRVQAPAAHNRRLTGRGVKVAVLDTGISTHPDLNIRGGASFVPGEPSTQDGNGHGTHVAGTIAALNNDIGVLGVAPSAELYAVKVLGASGSGSVSSIAQGLEWAGNNSMHVANLSLGSPSPSATLEQAVNSATSRGVLVVAASGNSGADSISYPARYANAMAVGATDQNNNRASFSQYGAGLDIVAPGVNVQSTYPGSTYASLNGTSMATPHVAGAAALVKQKNPSWSNLRIRDHLKNTATSLGSTNLYGSGLVNAEAATR

SEQ ID NO: 59155 - protein, 269 aa, Unidentified
AQSVPWGISRVQAPAAHNRRLTGGGVKVAVLDTGISTHPDLRIRGGASFVPGEPSTQDGNGHGTHVAGTIAALNNSIGVLGVAPSAELYAVKVLAASGNGSVSSIANGLEWAGLNGMHVANLSLGSPSPSATLEQAVNSATSRGVLVVAASGNSGAGSISYPARYANAMAVGATDQNNNRASFSQYGAGLDIVAPGVNVQSTYPGSTYASQNGTSMATPHVAGAAALVKQKNPSWSNVQIRNHLKNTATSLGSTNLYGSGLVNAEAATR

SEQ ID NO: 59156 - protein, 269 aa, Unidentified
AQSVPWGISRVQAPAAHNRGLRGSGVKVAVLDTGISTHPDLNIRGGASFVPGEPSTQDGNGHGTHVAGTIAALNNSIGVLGVAPSAELYAVKVLAASGNGAISSIAQGLEWAGLNGMHVANLSLGSPSPSATLEQAVNSATSRGVLVVAASGNSGAGSISYPARYANAMAVGATDQNNNRASFSQYGAGLDIVAPGVNVQSTYPGSTYASLNGTSMATPHVAGAAVLVKQKNPSWSNVRIRNHLKNTATSLGSTNLYGSGLVNAEAATR

SEQ ID NO: 59157 - protein, 269 aa, Unidentified
AQSVPWGISRVQAPASHNRGLAGSGVKVAVLDTGISTHPDLNIRGGASFVPGEPSTQDGNGHGTHVAGTIAALNNSIGVLGVAPSAELYAVKVLGASGGGAISSIAQGLEWAGANGMHVANLSLGSPSPSATLEQAVNSATSRGVLVVAASGNSGAGSISYPARYANAMAVGATDQNNNRASFSQYGAGLDIVAPGVNVQSTVPGSTYASLNGTSMATPHVAGAAVLVKQKNPSWSNVQIRNHLKNTATSLGSTNLYGSGLVNAEAATR

SEQ ID NO: 59158 - protein, 269 aa, Unidentified
AQSVPWGISRVQAPAAHNRKLTGSGVKVAVLDTGISTHPDLNIRGGASFVPGEPSTQDGEGHGTHVAGTIAALNNNIGVLGVAPSAELYAVKVLSASGGGSVSSIANGLEWAGLNGMHVANLSLGSPSPSATLEQAVNSATSRGVLVVAASGNSGAGSISYPARYANAMAVGATDQNNNRASFSQYGAGLDIVAPGVNVQSTYPGSTYASQNGTSMATPHVAGAAALVKQKNPSWSNVQIRNHLKNTATSLGSTNLYGSGLVNAEAATR

SEQ ID NO: 59159 - protein, 269 aa, Unidentified
AQSVPWGISRVQAPAAHNRKLTGSGVKVAVLDTGISTHPDLNIRGGASFVPGEPSTQDGEGHGTHVAGTIAALNNNIGVLGVAPSAELYAVKVLAASGNGSVSSIANGLEWAGLNGMHVANLSLGSPSPSATLEQAVNSATSRGVLVVAASGNSGAGSISYPARYANAMAVGATDQNNNRASFSQYGAGLDIVAPGVNVQSTYPGSTYASLDGTSMATPHVAGAAALVKQKNPSWSNVQIRNHLKNTATSLGSTNLYGSGLVNAEAATR

SEQ ID NO: 59160 - protein, 269 aa, Unidentified
AQSVPWGISRVQAPAAHNRKLTGGGVKVAVLDTGISTHPDLNIRGGASFVPGEPSTQDGEGHGTHVAGTIAALNNSIGVLGVAPSAELYAVKVLSASGNGSVSSIANGLEWAGLNGMHVANLSLGAPSPSATLEQAVNSATSRGVLVVAASGNSGAGSISYPARYANAMAVGATDQNNNRASFSQYGAGLDIVAPGVNVQSTYPGSTYASLNGTSMATPHVAGAAALVKQKNPSWSNVQIRNHLKNTATSLGSTNLYGSGLVNAEAATR

SEQ ID NO: 59161 - protein, 269 aa, Unidentified
AQTIPWGISRVQAPAAHNRGLTGSGVKVAVLDTGISTHPDLNIRGGASFVPGEPSTQDGNGHGTHVAGTIAALNNSIGVLGVAPSAELYAVKVLGADGEGAISSIAQGLEWAGNNGMHVANLSLGSPSPSATLEQAVNSATSRGVLVVAASGNSGASSISYPARYANAMAVGATDQNNNRASFSQYGAGLDIVAPGVNIQSTYPGSTYASLNGTSMATPHVAGAAALVKQKNPSWSNVQIRNHLKNTATSLGSTNLYGSGLVNAEAATR

SEQ ID NO: 59162 - protein, 269 aa, Unidentified
AQSVPWGISRVQAPAAHRRGLTGRGVKVAVLDTGISTHPDLDIRGGASFVPGEPSTQDGNGHGTHVAGTIAALNNSIGVLGVAPSAELYAVKVLGASGGGAISSIAQGLEWAGNNGMHVANLSLGSPSPSATLEQAVNSATSRGVLVVAASGNSGAGSISYPARYANAMAVGATDQNNNRASFSQYGAGLDIVAPGVNVQSTYPGSTYASLNGTSMATPHVAGAAVLVKQKNPSWSNVRIRNHLKNTATSLGSTNLYGSGLVNAEAATR

SEQ ID NO: 59163 - protein, 269 aa, Unidentified
AQSVPWGISRVQAPAAHNRRLTGSGVKVAVLDTGISTHPDLNIRGGASFVPGEPSTQDGEGHGTHVAGTIAALNNGIGVLGVAPSAELYAVKVLGASGSGSVSSIAQGLEWAGNNSMHVANLSLGSPSPSATLEQAVNSATSRGVLVVAASGNSGADSISYPARYANAMAVGATDQNNNRADFSQYGAGLDIVAPGVNVQSTYPGSTYASLNGTSMATPHVAGAAALVKQKNPSWSNVQIRDRLKNTATSLGSTNLYGSGLVNAEAATR

SEQ ID NO: 59164 - protein, 269 aa, Unidentified
AQSVPWGISRVQAPAAHNRGLTGSGVKVAVLDTGISTHPDLDIRGGASFVPGEPSTQDGNGHGTHVAGTIAALDNSIGVLGVAPSAELYAVKVLGASGGGAISSIAQGLEWAGNNGMHVANLSLGSPSPSATLEQAVNSATSRGVLVVAASGNSGAGSISYPARYANAMAVGATDQNNNRASFSQYGAGLDIVAPGVNVQSTYPGSTYASLNGTSMATPHVAGAAVLVKQKNPSWSNVRIRNRLKNTATSLGSTNLYGSGLVNAEAATR

SEQ ID NO: 59165 - protein, 269 aa, Unidentified
AQSVPWGISRVQAPAAHNRGLRGFGVKVAVLDTGISTHPDLNIRGGASFVPGEPSTQDGNGHGTHVAGTIAALNNSIGVLGVAPSAELYAVKVLGASGGGAISSIAQGLEWAGNNGMHVANLSLGSPSPSATLEQAVNSATSRGVLVVAASGNSGAGSISYPARYANAMAVGATDQNNNRASFSQYGAGLDIVAPGVNVQSTYPGSTYASLNGTSMATPHVAGAAVLVKQKNPSWSNVRIRNHLKNTATSLGSMNLYGSGLVNAEAATR

SEQ ID NO: 59166 - protein, 269 aa, Unidentified
AQSVPWGISRVQAPAAHNRGLAGSGVKVAVLDTGISTHPDLNIRGGASFVPGEPSTQDGNGHGTHVAGTIAALDNSIGVLGVAPSAELYAVKVLGASGNGAISSIAQGLEWAGNNGMHVANLSLGSPSPSATLEQAVNSATSRGVLVVAASGNSGAGSISYPARYANAMAVGATDQNNNRASFSQYGAGLDIVAPGVNVQSTYPGSTYASQNGTSMATPHVAGAAVLVKQKNPSWSNVRIRNHLKNTATSLGSTNLYGSGLVNAEAATR

SEQ ID NO: 59167 - protein, 269 aa, Unidentified
AQSVPWGISRVQAPAAHNRKLTGSGVKVAVLDTGISTHPDLNIRGGASFVPGEPSTQDGEGHGTHVAGTIAALNNNIGVLGVAPSAELYAVKVLGAGGSGSVSSIAQGLEWAGLNGMHVANLSLGQPSPSATLEQAVNSATSRGVLVVAASGNSGAGSISYPARYANAMAVGATDQNNNRASFSQYGAGLDIVAPGVNVQSTYPGSAYASNNGTSMATPHVAGAAALVKQKNPSWSNVQIRNHLKNTATSLGSTNLYGSGLVNAEAATR

SEQ ID NO: 59168 - protein, 269 aa, Unidentified
AQSVPWGISRVQAPAAHNRRLTGRGVKVAVLDTGISTHPDLNIRGGASFVPGEPSTQDGEGHGTHVAGTIAALNNGIGVLGVAPSAELYAVKVLGASGSGSVSSIAQGLEWAGNNSMHVANLSLGSESPSATLEQAVNSATSRGVLVVAASGNSGADSISYPARYANAMAVGATDQNNNRASFSQYGAGLDIVAPGVNVQSTYPGSTYASLNGTSMATPHVAGAAALVKQKNPSWSNVQIRNRLKNTATSLGSTNLYGSGLVNAEAATR

SEQ ID NO: 59169 - protein, 269 aa, Unidentified
AQSVPWGISRVQAPAAHNRRLTGRGVKVAVLDTGISTHPDLNIRGGASFVPGEPSTQDGNGHGTHVAGTIAALNNDIGVLGVAPSAELYAVKVLGASGSGSVSSIAQGLEWAGNNSMHVANLSLGSESPSATLEQAVNSATSRGVLVVAASGNSGAGSISYPARYANAMAVGATDQNNNRASFSQYGAGLDIVAPGVNVQSTYPGSTYASLNGTSMATPHVAGAAALVKQKNPSWSNVRIRDRLKNTATSLGSTNLYGSGLVNAEAATR

SEQ ID NO: 59170 - protein, 269 aa, Unidentified
AQSVPWGISRVQAPAAHNRGLRGSGVKVAVLDTGISTHPDLNIRGGASFVPGEPSTQDGNGHGTHVAGTIAALNNSIGVLGVAPSAELYAVKVLSASGGGAISSIAQGLEWAGNNGMHVANLSLGAPSPSATLEQAVNSATSRGVLVVAASGNSGAGSISYPARYANAMAVGATDQNNNRASFSQYGAGLDIVAPGVNVQSTYPGSTYASLNGTSMATPHVAGAAVLVKQKNPSWSNVRIRNHLKNTATSLGSTNLYGSGLVNAEAATR

SEQ ID NO: 59171 - protein, 269 aa, Unidentified
AQSVPWGISRVQAPAAHNRGLTGSGVKVAVLDTGISTHPDLNIRGGASFVPGEPSTQDGNGHGTHVAGTIAALNNSIGVLGVAPSAELYAVKVLGASGGGAISSIAQGLEWAGNNGMHVANLSLGSPSPSATLEQAVNSATSRGVLVVAASGNSGAESISYPARYANAMAVGATDQNNNRASFSQYGAGLDIVAPGVNVQSTYPGSTYASLNGTSMATPHVAGAAVLVKQKNPSWSNVRIRDHLKNTATSLGSTNLYGSGLVNAFAATR

SEQ ID NO: 59172 - protein, 269 aa, Unidentified
AQSVPWGISRVQAPAAHNRRLTGSGVKVAVLDTGISTHPDLNIRGGASFVPGEPSTQDGNGHGTHVAGTIAALNNGIGVLGVAPSAELYAVKVLGASGSGSVSSIAQGLEWAGNNDMHVANLSLGSESPSATLEQAVNSATSRGVLVVAASGNSGADSISYPARYANAMAVGATDQNNNRADFSQYGAGLDIVAPGVNVQSTYPGSTYASLNGTSMATPHVAGAAALVKQKNPSWSNVRIRDHLKNTATSLGSTNLYGSGLVNAEAATR

SEQ ID NO: 59173 - protein, 269 aa, Unidentified
AQSVPWGISRVQAPAAHNRKLTGSGVKVAVLDTGISTHPDLNIRGGASFVPGEPSTQDGEGHGTHVAGTIAALNNSIGVLGVAPSAELYAVKVLSASGNGSVSSIAGGLEWAGLNGMHVANLSLGAPSPSATLEQAVNSATSRGVLVVAASGNSGAGSISYPARYANAMAVGATDQNNNRADFSQYGAGLDIVAPGVNVQSTYPGSTYASLNGTSMATPHVAGAAALVKQKNPSWSNVQIRNHLKNTATSLGSTNLYGSGLVNAEAATR

SEQ ID NO: 59174 - protein, 269 aa, Unidentified
AQSVPWGISRVQAPAAHNRRLTGRGVKVAVLDTGISTHPDLNIRGGASFVPGEPSTQDGEGHGTHVAGTIAALNNDIGVLGVAPSAELYAVKVLGASGSGSVSSIAQGLEWAGNNSMHVANLSLGSESPSATLEQAVNSATSRGVLVVAASGNSGAGSISYPARYANAMAVGATDQNNNRADFSQYGAGLDIVAPGVNVQSTYPGSTYASLNGTSMATPHVAGAAALVKQKNPSWSNVRIRNHLKNTATSLGSTNLYGSGLVNAEAATR

SEQ ID NO: 59175 - protein, 269 aa, Unidentified
AQSVPWGISRVQAPAAHNRGLRGSGVKVAVLDTGISTHPDLNIRGGASFVPGEPSTQDGNGHGTHVAGTIAALNNSIGVLGVAPSAELYAVKVLSASGGGAISSIAQGLEWAGNNGMHVANLSLGSPSPSATLEQAVNSATSRGVLVVAASGNSGAGSISYPARYANAMAVGATDQNNNRASFSQYGAGLDIVAPGVNVQSTYPGSTYASQNGTSMATPHVAGAAVLVKQKNPSWSNVRIRNHLKNTATSLGSTNLYGSGLVNAEAATR

SEQ ID NO: 59176 - protein, 269 aa, Unidentified
AQSVPWGISRVQAPAAHNRGLTGSGVKVAVLDTGISTHPDLNIRGGASFVPGEPSTQDGNGHGTHAAGTIAALDNSIGVLGVAPSAELYAVKVLGASGSGAISSIAQGLEWAGNNGMHVANLSLGSPSPSATLEQAVNSATSRGVLVVAASGNSGADSISYPARYANAMAVGATDQNNNRASFSQYGAGLDIVAPGVNVQSTSPGSTYASLNGTSMATPHVAGAAALVKHKNPSWSNVQIRNHLKNKATSLGSTNLYGSGLVNAEAATR

SEQ ID NO: 59177 - protein, 269 aa, Unidentified
AQSVPWGISRVQAPAAHNRRLTGRGVKVAVLDTGISTHPDLNIRGGASFVPGEPSTQDGNGHGTHVAGTIAALNNSIGVLGVAPSAELYAVKVLGASGAGNISSIAQGLEWAGNNSMHVANLSLGSESPSATLEQAVNSATSRGVLVVAASGNSGAGSISYPARYANAMAVGATDQNNNRASFSQYGAGLDIVAPGVNVQSTYPGSTYASLNGTSMATPHVAGAAALVKQKNPSWSNVRIRNHLKNTATSLGSTNLYGSGLVNAEAATR

SEQ ID NO: 59178 - protein, 269 aa, Unidentified
AQSVPWGISRVQAPAAHNRGLAGRGVKVAVLDSGISTHPDLNIRGGASFVPGEPSTQDGNGHGTHVAGTIAALNNSIGVIGVAPSAELYAVKVLGASGSGSVSSIAQGLEWAGNNRMHVANLSLGIPSPSATLEQAVNSATSRGVLVVAASGNSGEGSISYPARYANAMAVGATDQNNNRADFSQYGAGLDIVAPGVNVQSTYPGSTYASLNGTSMATPHVAGAAALVKQKNPSWSNVQIRNHLKNTATSLGSTNLYGSGLVNAEAATR

SEQ ID NO: 59179 - protein, 269 aa, Unidentified
AQSVPWGISRVQAPAAHNRGLAGSGVKVAVLDTGISTHPDLNIRGGASFVPGEPSTQDGNGHGTHVAGTIAALNNSIGVLGVAPSAELYAVKVLGASGGGAISSIAQGLEWAGNNGMHVANLSLGSSSPSATLEQAVNSATSRGVLVVAASGNSGAGSISYPARYANAMAVGATDQNNNRASFSQYGAGLDIVAPGVNVQSTYPGSTYASQNGTSMATPHVAGAAVLVKQKNPSWSNVRIRNHLKNTATSLGSTNLYGSGLVNAEAATR

SEQ ID NO: 59180 - protein, 269 aa, Unidentified
AQSVPWGISRVQAPAAHNRGLTGRGVKVAVLDTGISTHPDLNIRGGASFVPGEPSTQDGEGHGTHVAGTIAALNNGIGVLGVAPSAELYAVKVLGASGSGSVSSIAQGLEWAGNNDMHVANLSLGSESPSATLEQAVNSATSRGVLVVAASGNSGADSISYPARYANAMAVGATDQNNNRASFSQYGAGLDIVAPGVNVQSTYPGSTYASLNGTSMATPHVAGAAALVKQKNPSWSNVRIRNRLKNTATSLGSTNLYGSGLVNAEAATR

SEQ ID NO: 59181 - protein, 269 aa, Unidentified
AQSVPWGISRVQAPAAHNRGLTGSGVKVAVLDTGISTHPDLNIRGGASFVPGEPSTQDGNGHGTHAAGTIAALNNSIGVLGVAPSAELYAVKVLGASGSGAISSIAQGLEWAGNNGMHVANLSLGSPSPSATLEQAVNSATSRGVLVVAASGNSGADSISYPARYANAMAVGATDQNNNRASFSQYGAGLDIVAPGENVQSTYPGSTYASLNGTSMATPHVAGAAVLVKHKNPSWSNVRIRNHLKNTATSLGSTNLYGSGLVNAEAATR

SEQ ID NO: 59182 - protein, 269 aa, Unidentified
AQSVPWGISRVQAPAAHRRGLTGRGVKVAVLDTGISTHPDLNIRGGASFVPGEPSTQDGNGHGTHVAGTIAALDNSIGVLGVAPSAELYAVKVLGASGSGSVSSIAQGLEWAGANGMHVANLSLGSPSPSATLEQAVNSATSRGVLVVAASGNSGAGSISYPARYANAMAVGATDQDNNRASFSQYGAGLDIVAPGVNVQSTYPQSTYFSLNGTSMATPHVAGAAALVKQKNPSWSNVQIRNRLKNTATSLGSTNLYGSGLVNAEAATR

SEQ ID NO: 59183 - protein, 269 aa, Unidentified
AQSVPWGISRVQAPAAHNRGLTGSGVKVAVLDTGISTHPDLNIRGGASFVPGEPSTQDGNGHGTHVAGTIAALNNSIGVLGVAPSAELYAVKVLGADGRGAISTIAQGLEWAGNNGMHVANLSLGSPSPSATLEQAVNYATSRGVLVVAASGNSGASSISYPARYANAMAVGATDQNNNRASFSQYGAGLDIVAPGVNVQSTYPGSTYASLNGTSMATPHVAGVAALVKQKNPSWSNVQIRNHLKNTATSLGSTNLYGSGLVNAEAATR

SEQ ID NO: 59184 - protein, 269 aa, Unidentified
AQSVPWGISRVQAPAAHNRGLTGSGVKVAVLDTGISTHPDLNIRGGASFVPGEPSTQDGNGHGTHAAGTIAALNNSIGVLGVAPSAELYAVKVLGASGSGAISSIAQGLEWAGNNGMHVANLSLGSPSPSATLEQAVNSATSRGVLVVAASGNSGADSISYPARYANAMAVGATDQNNNRASFSQYGAGLDIVAPGVNVQSTYPGSTYASLNGTSMATPHVAGAAVLVKHKNPSWSNVRIRNHLKSTATSLGSTNLYGSGLVNAEAATR

SEQ ID NO: 59185 - protein, 269 aa, Unidentified
AQSVPWGISRVQAPAAHNRRLTGRGVKVAVLDTGISTHPDLNIRGGASFVPGEPSTQDGNGHGTHVAGTIAALNNGIGVLGVAPSAELYAVKVLGASGSGSVSSIAQGLEWAGNNDMHVANLSLGSESPSATLEQAVNSATSRGVLVVAASGNSGAGSISYPARYANAMAVGATDQNNNRADFSQYGAGLDIVAPGVNVQSTYPGSTYASLNGTSMATPHVAGAAALVKQKNPSWSNVQIRDRLKNTATSLGSTNLYGSGLVNAEAATR

SEQ ID NO: 59186 - protein, 269 aa, Unidentified
AQSVPWGISRVQAPAAHNRRLTGRGVKVAVLDTGISTHPDLNIRGGASFVPGEPSTQDGEGHGTHVAGTIAALNNGIGVLGVAPSAELYAVKVLGASGSGSVSSIAQGLEWAGNNDMHVANLSLGSPSPSATLEQAVNSATSRGVLVVAASGNSGADSISYPARYANAMAVGATDQNNNRADFSQYGAGLDIVAPGVNVQSTYPGSTYASLNGTSMATPHVAGAAALVKQKNPSWSNVQIRNRLKNTATSLGSTNLYGSGLVNAEAATR

SEQ ID NO: 59187 - protein, 269 aa, Unidentified
AQSVPWGISRVQAPAAHNRGLAGSGVKVAVLDSGISTHPDLNIRGGASFVPGEPSTQDGNGHGTHVAGTIAALNNSIGVLGVAPSAELYAVKVLGASGGGAISSIAQGLEWAGLNGMHVANLSLGSPSPSATLEQAVNSATSRGVLVVAASGNSGAGSISYPARYANAMAVGATDQNNNRASFSQYGAGLDIVAPGVNVQSTAPGSTYASLNGTSMATPHVAGAAVLVKQKNPSWSNVQIRNHLKNTATSLGSTNLYGSGLVNAEAATR

SEQ ID NO: 59188 - protein, 269 aa, Unidentified
AQSVPWGISRVQAPAAHNRKLLGSGVKVAVLDTGISTHPDLNIRGGASFVPGEPSTQDGEGHGTHVAGTIAALNNDIGVLGVAPSAELYAVKVLGASGSGSVSSIAQGLEWAGNNDMHVANLSLGSESPSATLEQAVNSATSRGVLVVAASGNSGAGSISYPARYANAMAVGATDQNNNRASFSQYGAGLDIVAPGVNVQSTYPGSTYASLNGTSMATPHVAGAAALVKQKNPSWSNVRIRDHLKNTATSLGSTNLYGSGLVNAEAATR

SEQ ID NO: 59189 - protein, 269 aa, Unidentified
AQSVPWGISRVQAPAAHNRKLTGGGVKVAVLDTGISTHPDLNIRGGASFVPGEPSTQDGEGHGTHVAGTIAALNNSIGVLGVAPSAELYAVKVLAASGQGSVSSIAGGLEWAGLNGMHVANLSLGAPSPSATLEQAVNSATSRGVLVVAASGNSGAGSISYPARYANAMAVGATDQNNNRASFSQYGAGLDIVAPGVNVQSTYPGSTYASLNGTSMATPHVAGAAALVKQKNPSWSNVQIRNHLKNTATSLGSTNLYGSGLVNAEAATR

SEQ ID NO: 59190 - protein, 269 aa, Unidentified
AQSVPWGISRVQAPAAHNRGLTGSGVKVAVLDTGISTHPDLNIRGGASFVPGEPSTQDGNGHGTHVAGTIAALDNEIGVLGVAPRAELYAVKVLGASGSGSVSSIAQGLEWAGNNRMHVANLSLGLQAPSATLEQAVNSATSRGVLVVAASGNSGAGSISYPARYANAMAVGATDQNNNRASFSQYGAGLDIVAPGVNVYSTYPGSTYASLNGTSMATPHVAGAAALVKQKNPSWSNVQIRNHLKNTATSLGSTNLYGSGLVNAEAATR

SEQ ID NO: 59191 - protein, 269 aa, Unidentified
AQSVPWGISRVQAPAAHNRRLTGSGVKVAVLDTGISTHPDLNIRGGASFVPGEPSTQDGEGHGTHVAGTIAALNNGIGVLGVAPSAELYAVKVLGASGSGSVSSIAQGLEWAGNNSMHVANLSLGSPSPSATLEQAVNSATSRGVLVVAASGNSGADSISYPARYANAMAVGATDQNNNRADFSQYGAGLDIVAPGVNVQSTYPGSTYASLNGTSMATPHVAGAAALVKQKNPSWSNVRIRDHLKNTATSLGSTNLYGSGLVNAEAATR

SEQ ID NO: 59192 - protein, 269 aa, Unidentified
AQSVPWGISRVQAPAAHNRGLTGRGVKVAVLDTGISTHPDLNIRGGASFVPGEPSTQDGNGHGTHVAGTIAALNNDIGVLGVAPSAELYAVKVLGASGSGSVSSIAQGLEWAGNNSMHVANLSLGSESPSATLEQAVNSATSRGVLVVAASGNSGADSISYPARYANAMAVGATDQNNNRADFSQYGAGLDIVAPGVNVQSTYPGSTYASLNGTSMATPHVAGAAALVKQKNPSWSNVRIRDHLKNTATSLGSTNLYGSGLVNAEAATR

SEQ ID NO: 59193 - protein, 269 aa, Unidentified
AQSVPWGISRVQAPAAHNRRLTGRGVKVAVLDTGISTHPDLNIRGGASFVPGEPSTQDGEGHGTHVAGTIAALNNDIGVLGVAPSAELYAVKVLGASGSGSVSSIAQGLEWAGNNDMHVANLSLGSESPSATLEQAVNSATSRGVLVVAASGNSGADSISYPARYANAMAVGATDQNNNRASFSQYGAGLDIVAPGVNVQSTYPGSTYASLNGTSMATPHVAGAAALVKQKNPSWSNVQIRNRLKNTATSLGSTNLYGSGLVNAEAATR

SEQ ID NO: 59194 - protein, 269 aa, Unidentified
AQSVPWGISRVQAPAAHRRGLTGSGVKVAVLDTGISTHPDLDITGGASFVPGEPSTQDGNGHGTHVAGTIAALNNSIGVLGVAPSAELYAVKVLGASGGGAISSIAQGLEWAGNNGMHVANLSLGSPSPSATLEQAVNSATSRGVLVVAASGNSGAGSISYPARYANAMAVGATDQNNNRASFSQYGAGLDIVAPGVNVQSTYPGSTYASLNGTSMATPHVAGAAVLVKQKNPSWSNVRIRNHLKNTATSLGSTNLYGSGLVNAEAATR

SEQ ID NO: 59195 - protein, 269 aa, Unidentified
AQSVPWGISRVQAPAAHNRGLAGSGVKVAVLDTGISTHPDLNIRGGASFVPGEPSTQDGNGHGTHVAGTIAALDNSIGVLGVAPSAELYAVKVLSASGNGAISSIAQGLEWAGNNGMHVANLSLGSPSPSATLEQAVNSATSRGVLVVAASGNSGAGSISYPARYANAMAVGATDQNNNRASFSQYGAGLDIVAPGVNVQSTYPGSTYASLNGTSMATPHVAGAAVLVKQKNPSWSNVRIRNHLKNTATSLGSTNLYGSGLVNAEAATR

SEQ ID NO: 59196 - protein, 269 aa, Unidentified
AQSVPWGISRVQAPAAHRRRLWGRGVKVAVLDTGISTHPDLNIRGGASFVPGEPSTQDGNGHGTHVAGTIAALDNSIGVLGVAPSAELYAVKVLGASGSGSVSSIAQGLEWAGANGMHVANLSLGSPSPSATLEQAVNSATSRGVLVVAASGNSGAGSISYPARYANAMAVGATDQNNNRASFSQYGAGLDLVAPGVNVQSTYPGSTYASLNGTSMATPHVAGAAALVKQKNPSWSNVQIRNRLKNTATSLGSTNLYGSGLVNAEAATR

SEQ ID NO: 59197 - protein, 269 aa, Unidentified
AQSVPWGISRVQAPAAHNRRLWGSGVKVAVLDTGISTHPDLNIRGGASFVPGEPSTQDGNGHGTHVAGTIAALNNSIGVLGVAPSAELYAVKVLGASGAGAISSIAQGLEWAGNNGMHVANLSLGSPSPSATLEQAVNSATSRGVLVVAASGNSGAGSISYPARYANAMAVGATDQNNNRASFSQYGAGLDIVAPGVNVQSTYPGSTYFSLNGTSMATPHVAGAAVLVKQKNPSWSNVRIRNHLKNTATSLGSTNLYGSGLVNAEAATR

SEQ ID NO: 59198 - protein, 269 aa, Unidentified
AQSVPWGISRVQAPAAHNRGLTGSGVKVAVLDTGISTHPDLNIRGGASFVPGEPSTQDGNGHGTHVAGTIAALNNSIGVLGVAPSAELYAVKVLGASGGGAISSIAQGLEWAGANGMHVANLSLGSPSPSATLEQAVNSATSRGVLVVAASGNSGAGSISYPARYANAMAVGATDQNNNRASFSQYGAGLDIVAPGVNVQSTYPGSAYASLNGTSMATPHVAGAAVLVKQKNPSWSNVRIRNHLKNTATSLGSTNLYGSGLVRAEAATR

SEQ ID NO: 59199 - protein, 269 aa, Unidentified
AQSVPWGISRVQAPAAHNRRLTGSGVKVAVLDTGISTHPDLNITGGASFVPGEPSTQDGNGHGTHVAGTIAALDNSIGVLGVAPSAELYAVKVLGASGGGAISSIAQGLEWAGNNGMHVANLSLGSPSPSATLEQAVNSATSRGVLVVAASGNSGAGSISYPARYANAMAVGATDQNNNRASFSQYGAGLDIVAPGVNVQSTYPGSTYASLNGTSMATPHVAGAAVLVKQKNPSWSNVRIRNHLKNTATSLGSTNLYGSGLVNAEAATR

SEQ ID NO: 59200 - protein, 269 aa, Unidentified
AQSVPWGISRVQAPAAHNRKLLGFGVKVAVLDTGISTHPDLNIRGGASFVPGEPSTQDGNGHGTHVAGTIAALNNNIGVLGVAPSAELYAVKVLGASGSGSVSSIAQGLEWAGNNRMHVANLSLGDPSPSATLEQAVNSATSRGVLVVAASGNSGAGSIDYPARYANAMAVGATDQNNNRASFSQYGAGLDIVAPGVNVQSTYPGSAYASLNGTSMATPHVAGAAALVKQKNPSWSNVQIRNHLKNTATSLGSTNLYGSGLVNAEAATR

SEQ ID NO: 59201 - protein, 269 aa, Unidentified
AQSVPWGISRVQAPAAHNRGLAGGGVKVAVLDTGISTHPDLNIRGGASFVPGEPSTQDGNGHGTHVAGTIAALNNSIGVLGVAPSAELYAVKVLSASGQGAISSIAQGLEWAGNNGMHVANLSLGSPSPSATLEQAVNSATSRGVLVVAASGNSGAGSISYPARYANAMAVGATDQNNNRASFSQYGAGLDIVAPGVNVQSTYPGSTYASLNGTSMATPHVAGAAVLVKQKNPSWSNVRIRNHLKNTATSLGSTNLYGSGLVNAEAATR

SEQ ID NO: 59202 - protein, 269 aa, Unidentified
AQSVPWGISRVQAPAAHRRGLWGRGVKVAVLDTGISTHPDLNIRGGASFVPGEPSTQDGNGHGTHVAGTIAALDNSIGVLGVAPSAELYAVKVLGASGAGSVSSIAQGLEWAGNNGMHVANLSLGSPSPSATLEQAVNSATSRGVLVVAASGNSGAGSISYPARYANAMAVGATDQNNNRASFSQYGAGLDLVAPGVNVQSTYPQSTYASLNGTSMATPHVAGAAALVKQKNPSWSNVQIRNRLKNTATSLGSTNLYGSGLVNAEAATR

SEQ ID NO: 59203 - protein, 269 aa, Unidentified
AQSVPWGISRVQAPAAHRRGLWGRGVKVAVLDTGISTHPDLNIRGGASFVPGEPSTQDGNGHGTHVAGTIAALDNSIGVLGVAPSAELYAVKVLGASGAGSVSSIAQGLEWAGANGMHVANLSLGSPSPSATLEQAVNSATSRGVLVVAASGNSGAGSISYPARYANAMAVGATDQNNNRASFSQYGAGLDIVAPGVNVQSTYPGSTYASLNGTSMATPHVAGAAVLVKQKNPSWSNVRIRNHLKNTATSLGSTNLYGSGLVNAEAATR

SEQ ID NO: 59204 - protein, 269 aa, Unidentified
AQSVPWGISRVQAPAAHNRGLTGSGVKVAVLDTGISTHPDLNIRGGASFVPGEPSTQDGNGHGTHVAGTIAALDNHIGVLGVAPRAELYAVKVLGASGSGSVSSIAQGLEWAGNNRMHVANLSLGLQAPSATLEQAVNSATSRGVLVVAASGNSGAGSISYPARYANAMAVGATDQNNNRASFSQYGAGLDIVAPGVNVSSTYPGSTYASLNGTSMATPHVAGAAALVKQKNPSWSNVQIRNHLKNTATSLGSTNLYGSGLVNAEAATR

SEQ ID NO: 59205 - protein, 269 aa, Unidentified
AQSVPWGISRVQAPAAHNRGLTGSGVKVAVLDTGISTHPDLNIRGGASFVPGEPSTQDGNGHGTHVAGTIAALDNAIGVLGVAPRAELYAVKVLGASGSGSVSSIAQGLEWAGNNRMHVANLSLGLQAPSATLEQAVNSATSRGVLVVAASGNSGAGSISYPARYANAMAVGATDQNNNRASFSQYGAGLDIVAPGVNVMSTYPGSTYASLNGTSMATPHVAGAAALVKQKNPSWSNVQIRNHLKNTATSLGSTNLYGSGLVNAEAATR

SEQ ID NO: 59206 - protein, 269 aa, Unidentified
AQSVPWGISRVQAPAAHNRRLTGSGVKVAVLDTGISTHPDLDIRGGASFVPGEPSTQDGNGHGTHVAGTIAALNNSIGVLGVAPSAELYAVKVLGASGGGAISSIAQGLEWAGNNGMHVANLSLGSPSPSATLEQAVNSATSRGVLVVAASGNSGAGSISYPARYANAMAVGATDQNNNRASFSQYGAGLDIVAPGVNVQSTYPGSTYASLNGTSMATPHVAGAAVLVKQKNPSWSNVRIRNRLKNTATSLGSTNLYGSGLVNAEAATR

SEQ ID NO: 59207 - protein, 269 aa, Unidentified
AQSVPWGISRVQAPAAHNRGLTGRGVKVAVLDTGISTHPDLNIRGGASFVPGEPSTQDGNGHGTHVAGTIAALNNSIGVLGVAPSAELYAVKVLGASGSGSVSSIAQGLEWAGNNRMHVANLSLGSESPSATLEQAVNSATSRGVLVVAASGNSGADSISYPARYANAMAVGATDQNNNRADFSQYGAGLDIVAPGVNVQSTYPGSTYASLNGTSMATPHVAGAAALVKQKNPSWSNVRIRDRLKNTATSLGSTNLYGSGLVNAEAATR

SEQ ID NO: 59208 - protein, 269 aa, Unidentified
AQSVPWGISRVQAPAAHRRGLTGRGVKVAVLDTGISTHPDLNIRGGASFVPGEPSTQDGNGHGTHVAGTIAALDNSIGVLGVAPSAELYAVKVLGASGAGSVSSIAQGLEWAGNNGMHVANLSLGSPSPSATLEQAVNSATSRGVLVVAASGNSGAGSISYPARYANAMAVGATDQDNNRASFSQYGAGLDLVAPGVNVQSTYPGSTYFSLNGTSMATPHVAGAAALVKQKNPSWSNVQIRNRLKNTATSLGSTNLYGSGLVNAEAATR

SEQ ID NO: 59209 - protein, 269 aa, Unidentified
AQSVPWGISRVQAPAAHNRGLAGSGVKVAVLDTGISTHPDLNIRGGASFVPGEPSTQDGNGHGTHVAGTIAALNNSIGVLGVAPSAELYAVKVLGASGQGAISSIAQGLEWAGNNGMHVANLSLGSSSPSATLEQAVNSATSRGVLVVAASGNSGAGSISYPARYANAMAVGATDQNNNRASFSQYGAGLDIVAPGVNVQSTYPGSTYASQNGTSMATPHVAGAAVLVKQKNPSWSNVRIRNHLKNTATSLGSTNLYGSGLVNAEAATR

SEQ ID NO: 59210 - protein, 269 aa, Unidentified
AQSVPWGISRVQAPAAHRRGLWGRGVKVAVLDTGISTHPDLNIRGGASFVPGEPSTQDGNGHGTHVAGTIAALDNSIGVLGVAPSAELYAVKVLGASGAGSVSSIAQGLEWAGNNGMHVANLSLGSPSPSATLEQAVNSATSRGVLVVAASGNSGAGSISYPARYANAMAVGATDQNNNRASFSQYGAGLDLVAPGVNVQSTYPQSTYASLNGTSMATPHVAGAAALVKQKNPSWSNVRIRNHLKNTATSLGSTNLYGSGLVNAEAATR

SEQ ID NO: 59211 - protein, 269 aa, Unidentified
AQSVPWGISRVQAPAAHNRGLAGGGVKVAVLDTGISTHPDLNIRGGASFVPGEPSTQDGNGHGTHVAGTIAALNNSIGVLGVAPSAELYAVKVLGASGNGAISSIAQGLEWAGNNGMHVANLSLGAPSPSATLEQAVNSATSRGVLVVAASGNSGAGSISYPARYANAMAVGATDQNNNRASFSQYGAGLDIVAPGVNVQSTYPGSTYASLNGTSMATPHVAGAAVLVKQKNPSWSNVRIRNHLKNTATSLGSTNLYGSGLVNAEAATR

SEQ ID NO: 59212 - protein, 269 aa, Unidentified
AQSVPWGISRVQAPAAHNRGLTGSGVKVAVLDTGISTHPDLNIRGGASFVPGEPSTQDGNGHGTHVAGTIAALDNGIGVLGVAPRAELYAVKVLGASGSGSVSSIAQGLEWAGNNRMHVANLSLGLQAPSATLEQAVNSATSRGVLVVAASGNSGAGSISYPARYANAMAVGATDQNNNRASFSQYGAGLDIVAPGVNVHSTYPGSTYASLNGTSMATPHVAGAAALVKQKNPSWSNVQIRNHLKNTATSLGSTNLYGSGLVNAEAATR

SEQ ID NO: 59213 - protein, 269 aa, Unidentified
AQSVPWGISRVQAPAAHNRKLTGSGVKVAVLDTGISTHPDLNIRGGASFVPGEPSTQDGEGHGTHVAGTIAALNNSIGVLGVAPSAELYAVKVLSASGNGSVSSIAQGLEWAGLNGMHVANLSLGAPSPSATLEQAVNSATSRGVLVVAASGNSGAGSISYPARYANAMAVGATDQNNNRADFSQYGAGLDIVAPGVNVQSTYPGSTYASQNGTSMATPHVAGAAALVKQKNPSWSNVQIRNHLKNTATSLGSTNLYGSGLVNAEAATR

SEQ ID NO: 59214 - protein, 269 aa, Unidentified
AQSVPWGISRVQAPAAHNRGLTGRGVKVAVLDTGISTHPDLNIRGGASFVPGEPSTQDGEGHGTHVAGTIAALNNGIGVLGVAPSAELYAVKVLGASGSGSVSSIAQGLEWAGNNSMHVANLSLGSESPSATLEQAVNSATSRGVLVVAASGNSGAGSISYPARYANAMAVGATDQNNNRADFSQYGAGLDIVAPGVNVQSTYPGSTYASLNGTSMATPHVAGAAALVKQKNPSWSNVRIRDHLKNTATSLGSTNLYGSGLVNAEAATR

SEQ ID NO: 59215 - protein, 269 aa, Unidentified
AQSVPWGISRVQAPAAHNRGLTGSGVKVAVLDTGISTHPDLNIRGGASFVPGEPSTQDGNGHGTHVAGTIAALNNSIGVLGVAPSAELYAVKVLGASGGGAISSIAQGLEWAGNNGMHVANLSLGSPSPSATLEQAVNSATSRGVLVVAASGNSGADSISYPARYANAMAVGATDQNNNRASFSQYGAGLDIVAPGVNVQSTYPGSTYASLNGTSMATPHVAGAAVLVKQKNPSWSNVRIRDHLKNTATSLGSTNLYGSGLVNAFAATR

SEQ ID NO: 59216 - protein, 269 aa, Unidentified
AQSVPWGISRVQAPAAHNRGLTGSGVKVAVLDTGISTHPDLNIRGGASFVPGEPSTQDGNGHGTHVAGTIAALDNNIGVLGVAPRAELYAVKVLGASGSGSVSSIAQGLEWAGNNRMHVANLSLGLQAPSATLEQAVNSATSRGVLVVAASGNSGAGSISYPARYANAMAVGATDQNNNRASFSQYGAGLDIVAPGVNVQSTWPGSTYASLNGTSMATPHVAGAAALVKQKNPSWSNVQIRNHLKNTATSLGSTNLYGSGLVNAEAATR

SEQ ID NO: 59217 - protein, 269 aa, Unidentified
AQSVPWGISRVQAPAAHRRRLTGRGVKVAVLDTGISTHPDLNIRGGASFVPGEPSTQDGNGHGTHVAGTIAALDNSIGVLGVAPSAELYAVKVLGASGSGSVSSIAQGLEWAGNNGMHVANLSLGSPSPSATLEQAVNSATSRGVLVVAASGNSGAGSISYPARYANAMAVGATDQDNNRASFSQYGAGLDLVAPGVNVQSTYPGSAYASLNGTSMATPHVAGAAALVKQKNPSWSNVQIRNRLKNTATSLGSTNLYGSGLVNAEAATR

SEQ ID NO: 59218 - protein, 269 aa, Unidentified
AQSVPWGISRVQAPAAHNRRLTGSGVKVAVLDTGISTHPDLNIRGGASFVPGEPSTQDGEGHGTHVAGTIAALNNGIGVLGVAPSAELYAVKVLGASGSGSVSSIAQGLEWAGNNDMHVANLSLGSESPSATLEQAVNSATSRGVLVVAASGNSGADSISYPARYANAMAVGATDQNNNRASFSQYGAGLDIVAPGVNVQSTYPGSTYASLNGTSMATPHVAGAAALVKQKNPSWSNVRIRNRLKNTATSLGSTNLYGSGLVNAEAATR

SEQ ID NO: 59219 - protein, 269 aa, Unidentified
AQSVPWGISRVQAPAAHNRGLAGRGVKVAVLDSGISTHPDLNIRGGASFVPGEPSTQDGNGHGTHVAGTIAALNNSIGVLGVAPSAELYAVKVLGASGSGSVSSIAQGLEWAGLNRMHVANLSLGSPSPSATLEQAVNSATSRGVLVVAASGNSGEGSIDYPARYANAMAVGATDQNNNRADFSQYGAGLDIVAPGVNVQSTYPGSTYASLNGTSMATPHVAGAAALVKQKNPSWSNVQIRNHLKNTATSLGSTNLYGSGLVNAEAATR

SEQ ID NO: 59220 - protein, 269 aa, Unidentified
AQSVPWGISRVQAPAAHNRGLTGRGVKVAVLDTGISTHPDLNIRGGASFVPGEPSTQDGEGHGTHVAGTIAALDNSIGVLGVAPSAELYAVKVLGASGAGAISSIAQGLEWAGNNGMHVANLSLGSPSPSATLEQAVNSATSRGVLVVAASGNSGAGSISYPARYANAMAVGATDQNNNRASFSQYGAGLDIVAPGVNVQSTYPGSTYASLNGTSMATPHVAGAAVLVKQKNPSWSNVRIRNHLKNTATSLGSTNLYGSGLVNAEAATR

SEQ ID NO: 59221 - protein, 269 aa, Unidentified
AQSVPWGISRVQAPAAHNRGLTGSGVKVAVLDTGISTHPDLNIRGGASFVPGEPSTQDGNGHGTHVAGTIAALDNRIGVLGVAPSAELYAVKVLGASGGGAISSIAQGLEWAGNNGMHVANLSLGSPSPSATLEQAVNSATSRGVLVVAASGNSGAGSISYPARYANAMAVGATDQNNNRASFSQYGAGLDIVAPGVNVQSTYPGSTYASLNGTSMATPHVAGAAVLVKQKNPSWSNVRIRNRLKNTATSLGSTNLYGSGLVNAEAATR

SEQ ID NO: 59222 - protein, 269 aa, Unidentified
AQSVPWGISRVQAPAAHRRGLTGSGVKVAVLDTGISTHPDLDIRGGASFVPGEPSTQDGNGHGTHVAGTIAALNNSIGVLGVAPSAELYAVKVLGASGGGAISSIAQGLEWAGNNGMHVANLSLGSPSPSATLEQAVNSATSRGVLVVAASGNSGAGSISYPARYANAMAVGATDQNNNRASFSQYGAGLDIVAPGVNVQSTYPGSTYASLNGTSMATPHVAGAAVLVKQKNPSWSNVRIRNRLKNTATSLGSTNLYGSGLVNAEAATR

SEQ ID NO: 59223 - protein, 269 aa, Unidentified
AQSVPWGISRVQAPAAHNRRLTGRGVKVAVLDTGISTHPDLNIRGGASFVPGEPSTQDGNGHGTHVAGTIAALNNNIGVLGVAPSAELYAVKVLSASGGGSVSSIANGLEWAGLNGMHVANLSLGAPSPSATLEQAVNSATSRGVLVVAASGNSGAGSISYPARYANAMAVGATDQNNNRASFSQYGAGLDIVAPGVNVQSTYPGSTYASLNGTSMATPHVAGAAALVKQKNPSWSNVQIRNHLKNTATSLGSTNLYGSGLVNAEAATR

SEQ ID NO: 59224 - protein, 269 aa, Unidentified
AQSVPWGISRVQAPAAHNRGLAGRGVKVAVLDTGISTHPDLNIRGGASFVPGEPSTQDGEGHGTHVAGTIAALNNSIGVLGVAPSAELYAVKVLGASGSGSVSSIAQGLEWAGNNRMHVANLSLGIPSPSATLEQAVNSATSRGVLVVAASGNSGEGSIDYPARYANAMAVGATDQNNNRADFSQYGAGLDIVAPGVNVQSTYPGSTYASLNGTSMATPHVAGAAALVKQKNPSWSNVQIRNHLKNTATSLGSTNLYGSGLVNAEAATR

SEQ ID NO: 59225 - protein, 269 aa, Unidentified
AQSVPWGISRVQAPAAHNRGLTGSGVKVAVLDTGISTHPDLNIRGGASFVPGEPSTQDGNGHGTHAAGTIAALNNSIGVLGVAPSAELYAVKVLGASGSGAISSIAQGLEWAGNNGMHVANLSLGSPSPSATLEQAVNSATSRGVLVVAASGNSGADSISYPARYANAMAVGATDQNNNRASFSQYGAGLDIVAPGVNVQSTYPGSTYASLNGTSMATPHVAGAAVLVKHKNPSWSNVRIRDHLKNTATSLGSTNLYGSGLVNAEAATR

SEQ ID NO: 59226 - protein, 269 aa, Unidentified
AQSVPWGISRVQAPAAHRRGLTGRGVKVAVLDTGISTHPDLNIRGGASFVPGEPSTQDGNGHGTHVAGTIAALDNSIGVLGVAPSAELYAVKVLGASGSGSVSSIAQGLEWAGANGMHVANLSLGSPSPSATLEQAVNSATSRGVLVVAASGNSGAGSISYPARYANAMAVGATDQDNNRASFSQYGAGLDLVAPGVNVQSTYPGSTYFSLNGTSMATPHVAGAAALVKQKNPSWSNVQIRNRLKNTATSLGSTNLYGSGLVNAEAATR

SEQ ID NO: 59227 - protein, 269 aa, Unidentified
AQSVPWGISRVQAPAAHNRGLTGSGVKVAVLDTGISTHPDLNIRGGASFVPGEPSTQDGNGHGTHAAGTIAALDNSIGVLGVAPSAELYAVKVLGASGSGAISSIAQGLEWAGNNGMHVANLSLGSPSPSATLEQAVNSATSRGVLVVAASGNSGADSISYPARYANAMAVGATDQNNNRASFSQYGAGLDIVAPGVDVQSTYPGSTYASLNGTSMATPHVAGAAALVKHKNPSWSNVRIRNHLKNTATSLGSTNLYGSGLVNAEAATR

SEQ ID NO: 59228 - protein, 269 aa, Unidentified
AQSVPWGISRVQAPAAHNRGLTGSGVKVAVLDTGISTHPDLNIRGGASFVPGEPSTQDGNGHGTHVAGTIAALNNSIGVLGVAPSAELYAVKVLGASGGGAISSIAQGLEWAGNNGMHVANLSLGSPSPSATLEQAVNSATSRGVLVVAASGNSGEGSISYPARYANAMAVGATDQNNNRADFSQYGAGLDIVAPGVNVQSTYPGSTYASLNGTSMATPHVAGAAVLVKQKNPSWSNVRIRDHLKNTATSLGSTNLYGSGLVNAEAATR

SEQ ID NO: 59229 - protein, 269 aa, Unidentified
AQSVPWGISRVQAPAAHNRRLTGRGVKVAVLDTGISTHPDLNIRGGASFVPGEPSTQDGNGHGTHVAGTIAALNNDIGVLGVAPSAELYAVKVLGASGSGSVSSIAQGLEWAGNNDMHVANLSLGSPSPSATLEQAVNSATSRGVLVVAASGNSGADSISYPARYANAMAVGATDQNNNRASFSQYGAGLDIVAPGVNVQSTYPGSTYASLNGTSMATPHVAGAAALVKQKNPSWSNVRIRDRLKNTATSLGSTNLYGSGLVNAEAATR

SEQ ID NO: 59230 - protein, 269 aa, Unidentified
AQSVPWGISRVQAPAAHNRRLTGSGVKVAVLDTGISTHPDLNIRGGASFVPGEPSTQDGNGHGTHVAGTIAALNNRIGVLGVAPSAELYAVKVLGASGGGAISSIAQGLEWAGANGMHVANLSLGSPSPSATLEQAVNSATSRGVLVVAASGNSGAGSISYPARYANAMAVGATDQNNNRASFSQYGAGLDIVAPGVNVQSTYPGSTYASLNGTSMATPHVAGAAVLVKQKNPSWSNVRIRNHLKNTATSLGSTNLYGSGLVNAEAATR

SEQ ID NO: 59231 - protein, 269 aa, Unidentified
AQSVPWGISRVQAPAAHNRRLTGRGVKVAVLDTGISTHPDLNIRGGASFVPGEPSTQDGEGHGTHVAGTIAALNNDIGVLGVAPSAELYAVKVLGASGSGSVSSIAQGLEWAGNNSMHVANLSLGSESPSATLEQAVNSATSRGVLVVAASGNSGAGSISYPARYANAMAVGATDQNNNRADFSQYGAGLDIVAPGVNVQSTYPGSTYASLNGTSMATPHVAGAAALVKQKNPSWSNVQIRDHLKNTATSLGSTNLYGSGLVNAEAATR

SEQ ID NO: 59232 - protein, 269 aa, Unidentified
AQSVPWGISRVQAPAAHNRGLTGSGVKVAVLDTGISTHPDLRIRGGASFVPGEPSTQDGNGHGTHVAGTIAALNNRIGVLGVAPSAELYAVKVLGASGGGAISSIAQGLEWAGNNGMHVANLSLGSPSPSATLEQAVNSATSRGVLVVAASGNSGAGSISYPARYANAMAVGATDQNNNRASFSQYGAGLDIVAPGVNVQSTYPGSTYASLNGTSMATPHVAGAAVLVKQKNPSWSNVRIRNHLKNTATSLGSTNLYGSGLVRAEAATR

SEQ ID NO: 59233 - protein, 269 aa, Unidentified
AQSVPWGISRVQAPAAHNRRLTGSGVKVAVLDTGISTHPDLNIRGGASFVPGEPSTQDGNGHGTHVAGTIAALNNDIGVLGVAPSAELYAVKVLGASGSGSVSSIAQGLEWAGNNDMHVANLSLGSESPSATLEQAVNSATSRGVLVVAASGNSGADSISYPARYANAMAVGATDQNNNRADFSQYGAGLDIVAPGVNVQSTYPGSTYASLNGTSMATPHVAGAAALVKQKNPSWSNVRIRNRLKNTATSLGSTNLYGSGLVNAEAATR

SEQ ID NO: 59234 - protein, 269 aa, Unidentified
AQSVPWGISRVQAPAAHRRGLTGRGVKVAVLDTGISTHPDLNIRGGASFVPGEPSTQDGNGHGTHVAGTIAALDNSIGVLGVAPSAELYAVKVLGASGSGSVSSIAQGLEWAGANGMHVANLSLGSPSPSATLEQAVNSATSRGVLVVAASGNSGAGSISYPARYANAMAVGATDQDNNRASFSQYGAGLDLVAPGVNVQSTYPGSAYASLNGTSMATPHVAGAAALVKQKNPSWSNVQIRNRLKNTATSLGSTNLYGSGLVNAEAATR

SEQ ID NO: 59235 - protein, 269 aa, Unidentified
AQSVPWGISRVQAPAAHNRRLTGSGVKVAVLDTGISTHPDLNIRGGASFVPGEPSTQDGNGHGTHVAGTIAALNNSIGVLGVAPSAELYAVKVLGASGGGAISSIAQGLEWAGANGMHVANLSLGSPSPSATLEQAVNSATSRGVLVVAASGNSGAGSISYPARYANAMAVGATDQNNNRASFSQYGAGLDIVAPGVNVQSTYPGSTYFSLNGTSMATPHVAGAAVLVKQKNPSWSNVRIRNHLKNTATSLGSTNLYGSGLVNAEAATR

SEQ ID NO: 59236 - protein, 269 aa, Unidentified
AQSVPWGISRVQAPAAHNRKLTGGGVKVAVLDTGISTHPDLNIRGGASFVPGEPSTQDGEGHGTHVAGTIAALNNNIGVLGVAPSAELYAVKVLAASGNGSVSSIAQGLEWAGLNGMHVANLSLGAPSPSATLEQAVNSATSRGVLVVAASGNSGAGSISYPARYANAMAVGATDQNNNRASFSQYGAGLDIVAPGVNVQSTYPGSTYASQNGTSSATPHVAGAAALVKQKNPSWSNVQIRNHLKNTATSLGSTNLYGSGLVNAEAATR

SEQ ID NO: 59237 - protein, 269 aa, Unidentified
AQSVPWGIRRVQAPTAHNRGLTGSGVKVAVLDTGISTHPDLNIRGGASFVPGEPSTQDENGHGTHAAGTIAALNNSIGVLGVAPSAELYAVKVLGASGSGSVSSIAQGLEWAGNNGMHVANLSLGSPSPSATLEQAVNSATSRGVLVVAASGNSGAGSISYPARYANAMAVGATDQNNNRASFSQYGPGLDIVAPGVNIQSTYPGSTYASLNGTSMATPHVAGAAALVKQKNPSWSNVRIRNHLKNTATSLGSTDLYGSGLVNAEAATR

SEQ ID NO: 59238 - protein, 269 aa, Unidentified
AQSVPWGISRVQAPAAHNRRLTGSGVKVAVLDTGISTHPDLNIRGGASFVPGEPSTQDGNGHGTHVAGTIAALNNSIGVLGVAPSAELYAVKVLGASGAGAISSIAQGLEWAGNNGMHVANLSLGSPSPSATLEQAVNSATSRGVLVVAASGNSGAGSISYPARYANAMAVGATDQNNNRASFSQYGAGLDIVAPGVNVQSTYPGSAYFSLNGTSMATPHVAGAAVLVKQKNPSWSNVRIRNHLKNTATSLGSTNLYGSGLVNAEAATR

SEQ ID NO: 59239 - protein, 269 aa, Unidentified
AQSVPWGISRVQAPAAHNRGLTGSGVRVAVLDTGISTHPDLRIRGGASFVPGEPSTQDGNGHGTHVAGTIAALNNSIGVLGVAPSAELYAVKVLGASGGGAISSIAQGLEWAGNNGMHVANLSLGSPSPSATLEQAVNSATSRGVLVVAASGNSGAGSISYPARYANAMAVGATDQNNNRASFSQYGAGLDIVAPGVNVQSTYPGSTYASLNGTSMATPHVAGAAVLVKQKNPSWSNVRIRNHLKNTATSLGSTNLYGSGLVRAEAATR

SEQ ID NO: 59240 - protein, 269 aa, Unidentified
AQSVPWGISRVQAPAAHNRGLTGSGVKVAVLDTGISTHPDLNIRGGASFVPGEPSTQDGNGHGTHVAGTIAALNNSIGVLGVAPSAELYAVKVLGASGGGAISSIAQGLEWAGNNGMHVANLSLGSPSPSATLEQAVNSATSRGVLVVAASGNSGAESISYPARYANAMAVGATDQNNNRASFSQYGAGLDIVAPGVNVQSTYPGSTYASLNGTSMATPHVAGAAVLVKQKNPSWSNVRIRDRLKNTATSLGSTNLYGSGLVNAEAATR

SEQ ID NO: 59241 - protein, 269 aa, Unidentified
AQSVPWGISRVQAPAAHNRGLTGSGVKVAVLDTGISTHPDLNIRGGASFVPGEPSTQDGNGHGTHVAGTIAALNNSIGVLGVAPSAELYAVKVLGASGGGAISSIAQGLEWAGNNGMHVANLSLGSPSPSATLEQAVNSATSRGVLVVAASGNSGEGSISYPARYANAMAVGATDQNNNRASFSQYGAGLDIVAPGVNVQSTYPGSTYASLNGTSMATPHVAGAAVLVKQKNPSWSNVRIRDRLKNTATSLGSTNLYGSGLVNAEAATR

SEQ ID NO: 59242 - protein, 269 aa, Unidentified
AQSVPWGISRVQAPAAHRRGLTGRGVKVAVLDTGISTHPDLNIRGGASFVPGEPSTQDGNGHGTHVAGTIAALDNSIGVLGVAPSAELYAVKVLGASGSGSVSSIAQGLEWAGANGMHVANLSLGSPSPSATLEQAVNSATSRGVLVVAASGNSGAGSISYPARYANAMAVGATDQNNNRASFSQYGAGLDLVAPGVNVQSTYPGSTYFSLNGTSMATPHVAGAAALVKQKNPSWSNVQIRNRLKNTATSLGSTNLYGSGLGNAEAATR

SEQ ID NO: 59243 - protein, 269 aa, Unidentified
AQSVPWGISRVQAPAAHNRGLTGSGVKVAVLDTGISTHPDLNIRGGASFVPGEPSTQDGEGHGTHVAGTIAALNNGIGVLGVAPSAELYAVKVLGASGSGSVSSIAQGLEWAGNNSMHVANLSLGSESPSATLEQAVNSATSRGVLVVAASGNSGAGSISYPARYANAMAVGATDQNNNRADFSQYGAGLDIVAPGVNVQSTYPGSTYASLNGTSMATPHVAGAAALVKQKNPSWSNVRIRDRLKNTATSLGSTNLYGSGLVNAEAATR

SEQ ID NO: 59244 - protein, 269 aa, Unidentified
AQSVPWGISRVQAPAAHNRRLTGRGVKVAVLDTGISTHPDLNIRGGASFVPGEPSTQDGNGHGTHVAGTIAALNNDIGVLGVAPSAELYAVKVLGASGSGSVSSIAQGLEWAGNNDMHVANLSLGSPSPSATLEQAVNSATSRGVLVVAASGNSGADSISYPARYANAMAVGATDQNNNRADFSQYGAGLDIVAPGVNVQSTYPGSTYASLNGTSMATPHVAGAAALVKQKNPSWSNVRIRNRLKNTATSLGSTNLYGSGLVNAEAATR

SEQ ID NO: 59245 - protein, 269 aa, Unidentified
AQSVPWGISRVQAPAAHRRRLWGRGVKVAVLDTGISTHPDLNIRGGASFVPGEPSTQDGNGHGTHVAGTIAALDNSIGVLGVAPSAELYAVKVLGASGAGSVSSIAQGLEWAGANGMHVANLSLGSPSPSATLEQAVNSATSRGVLVVAASGNSGAGSISYPARYANAMAVGATDQNNNRASFSQYGAGLDIVAPGVNVQSTYPGSTYASLNGTSMATPHVAGAAALVKQKNPSWSNVQIRNRLKNTATSLGSTNLYGSGLVNAEAATR

SEQ ID NO: 59246 - protein, 269 aa, Unidentified
AQSVPWGISRVQAPAAHNRGLTGRGVKVAVLDTGISTHPDLNIRGGASFVPGEPSTQDGEGHGTHVAGTIAALNNGIGVLGVAPSAELYAVKVLGASGSGSVSSIAQGLEWAGNNSMHVANLSLGSESPSATLEQAVNSATSRGVLVVAASGNSGADSISYPARYANAMAVGATDQNNNRADFSQYGAGLDIVAPGVNVQSTYPGSTYASLNGTSMATPHVAGAAALVKQKNPSWSNVQIRNRLKNTATSLGSTNLYGSGLVNAEAATR

SEQ ID NO: 59247 - protein, 269 aa, Unidentified
AQSVPWGISRVQAPAAHNRGLAGSGVKVAVLDTGISTHPDLNIRGGASFVPGEPSTQDGNGHGTHVAGTIAALDNNIGVLGVAPSAELYAVKVLGASGGGAISSIAQGLEWAGNNGMHVANLSLGSPSPSATLEQAVNSATSRGVLVVAASGNSGAGSISYPARYANAMAVGATDQNNNRASFSQYGAGLDIVAPGVNVQSTYPGSTYASLNGTSMATPHVAGAAVLVKQKNPSWSNVRIRNHLKNTATSLGSTNLYGSGLVNAEAATR

SEQ ID NO: 59248 - protein, 269 aa, Unidentified
AQSVPWGISRVQAPAAHRRGLTGRGVKVAVLDTGISTHPDLNIRGGASFVPGEPSTQDGNGHGTHVAGTIAALDNSIGVLGVAPSAELYAVKVLGASGAGSVSSIAQGLEWAGANGMHVANLSLGSPSPSATLEQAVNSATSRGVLVVAASGNSGAGSISYPARYANAMAVGATDQDNNRASFSQYGAGLDIVAPGVNVQSTYPQSTYASLNGTSMATPHVAGAAALVKQKNPSWSNVQIRNRLKNTATSLGSTNLYGSGLVNAEAATR

SEQ ID NO: 59249 - protein, 269 aa, Unidentified
AQSVPWGISRVQAPAAHNRRLTGRGVKVAVLDTGISTHPDLNIRGGASFVPGEPSTQDGNGHGTHVAGTIAALNNGIGVLGVAPSAELYAVKVLGASGSGSVSSIAQGLEWAGNNSMHVANLSLGSESPSATLEQAVNSATSRGVLVVAASGNSGADSISYPARYANAMAVGATDQNNNRADFSQYGAGLDIVAPGVNVQSTYPGSTYASLNGTSMATPHVAGAAALVKQKNPSWSNVQIRNRLKNTATSLGSTNLYGSGLVNAEAATR

SEQ ID NO: 59250 - protein, 269 aa, Unidentified
AQSVPWGISRVQAPAAHKRRLTGRGVKVAVLDTGISTHPDLNITGGASFVPGEPSTQDGNGHGTHVAGTIAALNNSIGVLGVAPSAELYAVKVLGASGAGSVSSIAQGLEWAGNNGMHVANLSLGSPSPSATLEQAVNSATSRGVLVVAASGNSGAGSISYPARYANAMAVGATDQNNNRASFSQYGAGLDIVAPGVNVQSTYIQSAYASLNGTSMATPHVAGAAALVKQKNPSWSNVQIRNHLKNTATSLGSTNLYGSGLVNAEAATR

SEQ ID NO: 59251 - protein, 269 aa, Unidentified
AQSVPWGISRVQAPAAHRRGLTGRGVKVAVLDTGISTHPDLNIRGGASFVPGEPSTQDGNGHGTHVAGTIAALDNSIGVLGVAPSAELYAVKVLGASGAGSVSSIAQGLEWAGANGMHVANLSLGSPSPSATLEQAVNSATSRGVLVVAASGNSGAGSISYPARYANAMAVGATDQNNNRASFSQYGAGLDIVAPGVNVQSTYPQSTYFSLNGTSMATPHVAGAAALVKQKNPSWSNVQIRNRLKNTATSLGSTNLYGSGLVNAEAATR

SEQ ID NO: 59252 - protein, 269 aa, Unidentified
AQSVPWGISRVQAPAAHNRGLAGSGVKVAVLDTGISTHPDLNIRGGASFVPGEPSTQDGNGHGTHVAGTIAALNNSIGVLGVAPSAELYAVKVLGASGGGAISSIAQGLEWAGNNGMHVANLSLGASSPSATLEQAVNSATSRGVLVVAASGNSGAGSISYPARYANAMAVGATDQNNNRASFSQYGAGLDIVAPGVNVQSTYPGSTYASLNGTSMATPHVAGAAVLVKQKNPSWSNVRIRNHLKNTATSLGSTNLYGSGLVNAEAATR

SEQ ID NO: 59253 - protein, 269 aa, Unidentified
AQSVPWGISRVQAPAAHNRGLTGSGVKVAVLDTGISTHPDLNIRGGASFVPGEPSTQDGNGHGTHVAGTIAALDNAIGVLGVAPRAELYAVKVLGASGSGSVSSIAQGLEWAGNNRMHVANLSLGLQAPSATLEQAVNSATSRGVLVVAASGNSGAGSISYPARYANAMAVGATDQNNNRASFSQYGAGLDIVAPGVNVDSTYPGSTYASLNGTSMATPHVAGAAALVKQKNPSWSNVQIRNHLKNTATSLGSTNLYGSGLVNAEAATR

SEQ ID NO: 59254 - protein, 269 aa, Unidentified
AQSVPWGISRVQAPASHNRGLTGFGVKVAVLDTGISTHPDLNIRGGASFVPGEPSTQDGNGHGTHVAGTIAALNNSIGVLGVAPSAELYAVKVLGASGGGAISSIAQGLEWAGANGMHVANLSLGSPSPSATLEQAVNSATSRGVLVVAASGNSGAGSISYPARYANAMAVGATDQNNNRASFSQYGAGLDIVAPGVNVQSTAPGSTYASLNGTSMATPHVAGAAVLVKQKNPSWSNVQIRNHLKNTATSLGSTNLYGSGLVNAEAATR

SEQ ID NO: 59255 - protein, 269 aa, Unidentified
AQSVPWGISRVQAPAAHRRGLWGRGVKVAVLDTGISTHPDLNIRGGASFVPGEPSTQDGNGHGTHVAGTIAALDNSIGVLGVAPSAELYAVKVLGASGAGSVSSIAQGLEWAGNNGMHVANLSLGSPSPSATLEQAVNSATSRGVLVVAASGNSGAGSISYPARYANAMAVGATDQDNNRASFSQYGAGLDIVAPGVNVQSTYPQSTYASLNGTSMATPHVAGAAALVKQKNPSWSNVQIRNRLKNTATSLGSTNLYGSGLVNAEAATR

SEQ ID NO: 59256 - protein, 269 aa, Unidentified
AQSVPWGISRVQAPAAHNRGLTGSGVKVAVLDTGISTHPDLNIRGGASFVPGEPSTQDGNGHGTHVAGTIAALDNMIGVLGVAPRAELYAVKVLGASGSGSVSSIAQGLEWAGNNRMHVANLSLGLQAPSATLEQAVNSATSRGVLVVAASGNSGAGSISYPARYANAMAVGATDQNNNRASFSQYGAGLDIVAPGVNVNSTYPGSTYASLNGTSMATPHVAGAAALVKQKNPSWSNVQIRNHLKNTATSLGSTNLYGSGLVNAEAATR

SEQ ID NO: 59257 - protein, 269 aa, Unidentified
AQSVPWGISRVQAPAAHNRGLTGSGVKVAVLDTGISTHPDLRIRGGASFVPGEPSTQDGNGHGTHVAGTIAALDNSIGVLGVAPSAELYAVKVLGASGGGAISSIAQGLEWAGNNGMHVANLSLGSPSPSATLEQAVNSATSRGVLVVAASGNSGAGSISYPARYANAMAVGATDQNNNRASFSQYGAGLDIVAPGVNVQSTYPGSTYASLNGTSMATPHVAGAAVLVKQKNPSWSNVRIRNRLKNTATSLGSTNLYGSGLVNAEAATR

SEQ ID NO: 59258 - protein, 269 aa, Unidentified
AQSVPWGISRVQAPASHNRGLTGSGVKVAVLDTGISTHPDLNIRGGASFVPGEPSTQDGNGHGTHVAGTIAALNNSIGVLGVAPSAELYAVKVLGASGGGAISSIAQGLEWAGLNGMHVANLSLGSPSPSATLEQAVNSATSRGVLVVAASGNSGAGSISYPARYANAMAVGATDQNNNRASFSQYGAGLDIVAPGVNVQSTAPQSTYASLNGTSMATPHVAGAAVLVKQKNPSWSNVQIRNHLKNTATSLGSTNLYGSGLVNAEAATR

SEQ ID NO: 59259 - protein, 269 aa, Unidentified
AQSVPWGISRVQAPAAHNRGLTGRGVKVAVLDTGISTHPDLNIRGGASFVPGEPSTQDGNGHGTHVAGTIAALDNSIGVLGVAPSAELYAVKVLGASGAGAISSIAQGLEWAGNNGMHVANLSLGSPSPSATLEQAVNSATSRGVLVVAASGNSGAGSISYPARYANAMAVGATDQNNNRADFSQYGAGLDIVAPGVNVQSTYIGSTYASLNGTSSATPHVAGAAVLVKQKNPSWSNVRIRNHLKNTATSLGSTNLYGSGLVNAEAATR

SEQ ID NO: 59260 - protein, 269 aa, Unidentified
AQSVPWGISRVQAPAAHRRRLTGSGVKVAVLDTGISTHPDLNIRGGASFVPGEPSTQDGNGHGTHVAGTIAALDNSIGVLGVAPSAELYAVKVLGASGGGAISSIAQGLEWAGNNGMHVANLSLGSPSPSATLEQAVNSATSRGVLVVAASGNSGAGSISYPARYANAMAVGATDQNNNRASFSQYGAGLDIVAPGVNVQSTYPGSTYASLNGTSMATPHVAGAAVLVKQKNPSWSNVRIRNHLKNTATSLGSTNLYGSGLVNAEAATR

SEQ ID NO: 59261 - protein, 269 aa, Unidentified
AQSVPWGISRVQAPAAHRRGLTGSGVKVAVLDTGISTHPDLRITGGASFVPGEPSTQDGNGHGTHVAGTIAALNNSIGVLGVAPSAELYAVKVLGASGGGAISSIAQGLEWAGNNGMHVANLSLGSPSPSATLEQAVNSATSRGVLVVAASGNSGAGSISYPARYANAMAVGATDQNNNRASFSQYGAGLDIVAPGVNVQSTYPGSTYASLNGTSMATPHVAGAAVLVKQKNPSWSNVRIRNHLKNTATSLGSTNLYGSGLVNAEAATR

SEQ ID NO: 59262 - protein, 269 aa, Unidentified
AQSVPWGISRVQAPAAHNRGLTGSGVKVAVLDTGISTHPDLNITGGASFVPGEPSTQDGNGHGTHVAGTIAALNNRIGVLGVAPSAELYAVKVLGASGGGAISSIAQGLEWAGNNGMHVANLSLGSPSPSATLEQAVNSATSRGVLVVAASGNSGAGSISYPARYANAMAVGATDQNNNRASFSQYGAGLDIVAPGVNVQSTYPGSTYASLNGTSMATPHVAGAAVLVKQKNPSWSNVRIRNHLKNTATSLGSTNLYGSGLVRAEAATR

SEQ ID NO: 59263 - protein, 269 aa, Unidentified
AQSVPWGISRVQAPAAHNRKLLGFGVKVAVLDTGISTHPDLNIRGGASFVPGEPSTQDGNGHGTHVAGTIAALNNNIGVLGVAPSAELYAVKVLGASGSGSVSSIAQGLEWAGNNRMHVANLSLGSPSPSATLEQAVNSATSRGVLVVAASGNSGAGSIDYPARYANAMAVGATDQNNNRASFSQYGAGLDIVAPGVNVQSTYPGSAYASENGTSMATPHVAGAAALVKQKNPSWSNVQIRNHLKNTATSLGSTNLYGSGLVNAEAATR

SEQ ID NO: 59264 - protein, 269 aa, Unidentified
AQSVPWGISRVQAPAAHRRGLTGRGVKVAVLDTGISTHPDLNIRGGASFVPGEPSTQDGNGHGTHVAGTIAALDNSIGVLGVAPSAELYAVKVLGASGAGSVSSIAQGLEWAGANGMHVANLSLGSPSPSATLEQAVNSATSRGVLVVAASGNSGAGSISYPARYANAMAVGATDQDNNRASFSQYGAGLDLVAPGVNVQSTYPGSTYASLNGTSMATPHVAGAAALVKQKNPSWSNVQIRNRLKNTATSLGSTNLYGSGLVNAEAATR

SEQ ID NO: 59265 - protein, 269 aa, Unidentified
AQSVPWGISRVQAPAAHNRGLTGSGVKVAVLDTGISTHPDLNIRGGASFVPGEPSTQDGNGHGTHVAGTIAALDNFIGVLGVAPRAELYAVKVLGASGSGSVSSIAQGLEWAGNNRMHVANLSLGLQAPSATLEQAVNSATSRGVLVVAASGNSGAGSISYPARYANAMAVGATDQNNNRASFSQYGAGLDIVAPGVNVFSTYPGSTYASLNGTSMATPHVAGAAALVKQKNPSWSNVQIRNHLKNTATSLGSTNLYGSGLVNAEAATR

SEQ ID NO: 59266 - protein, 269 aa, Unidentified
AQSVPWGISRVQAPAAHRRGLTGRGVKVAVLDTGISTHPDLNIRGGASFVPGEPSTQDGNGHGTHVAGTIAALDNSIGVLGVAPSAELYAVKVLGASGSGSVSSIAQGLEWAGANGMHVANLSLGSPSPSATLEQAVNSATSRGVLVVAASGNSGAGSISYPARYANAMAVGATDQDNNRASFSQYGAGLDIVAPGVNVQSTYPGSAYFSLNGTSMATPHVAGAAALVKQKNPSWSNVQIRNRLKNTATSLGSTNLYGSGLVNAEAATR

SEQ ID NO: 59267 - protein, 269 aa, Unidentified
AQSVPWGISRVQAPAAHRRGLTGSGVKVAVLDTGISTHPDLDIRGGASFVPGEPSTQDGNGHGTHVAGTIAALNNSIGVLGVAPSAELYAVKVLGASGGGAISSIAQGLEWAGNNGMHVANLSLGSPSPSATLEQAVNSATSRGVLVVAASGNSGAGSISYPARYANAMAVGATDQNNNRASFSQYGAGLDIVAPGVNVQSTYPGSTYASLNGTSMATPHVAGAAVLVKQKNPSWSNVRIRNHLKNTATSLGSTNLYGSGLVRAEAATR

SEQ ID NO: 59268 - protein, 269 aa, Unidentified
AQSVPWGISRVQAPAAHNRGLTGSGVKVAVLDTGISTHPDLRIRGGASFVPGEPSTQDGNGHGTHVAGTIAALDNRIGVLGVAPSAELYAVKVLGASGGGAISSIAQGLEWAGNNGMHVANLSLGSPSPSATLEQAVNSATSRGVLVVAASGNSGAGSISYPARYANAMAVGATDQNNNRASFSQYGAGLDIVAPGVNVQSTYPGSTYASLNGTSMATPHVAGAAVLVKQKNPSWSNVRIRNHLKNTATSLGSTNLYGSGLVNAEAATR

SEQ ID NO: 59269 - protein, 269 aa, Unidentified
AQSVPWGISRVQAPAAHRRGLTGRGVKVAVLDTGISTHPDLNIRGGASFVPGEPSTQDGNGHGTHVAGTIAALDNSIGVLGVAPSAELYAVKVLGASGAGSVSSIAQGLEWAGANGMHVANLSLGSPSPSATLEQAVNSATSRGVLVVAASGNSGAGSISYPARYANAMAVGATDQNNNRASFSQYGAGLDLVAPGVNVQSTYPQSTYASLNGTSMATPHVAGAAALVKQKNPSWSNVQIRNRLKNTATSLGSTNLYGSGLVNAEAATR

SEQ ID NO: 59270 - protein, 269 aa, Unidentified
AQSVPWGISRVQAPAAHNRGLTGSGVKVAVLDTGISTHPDLNIRGGASFVPGEPSTQDGNGHGTHVAGTIAALDNQIGVLGVAPRAELYAVKVLGASGSGSVSSIAQGLEWAGNNRMHVANLSLGLQAPSATLEQAVNSATSRGVLVVAASGNSGAGSISYPARYANAMAVGATDQNNNRASFSQYGAGLDIVAPGVNVFSTYPGSTYASLNGTSMATPHVAGAAALVKQKNPSWSNVQIRNHLKNTATSLGSTNLYGSGLVNAEAATR

SEQ ID NO: 59271 - protein, 269 aa, Unidentified
AQSVPWGISRVQAPAAHRRGLTGSGVKVAVLDTGISTHPDLRIRGGASFVPGEPSTQDGNGHGTHVAGTIAALNNSIGVLGVAPSAELYAVKVLGASGGGAISSIAQGLEWAGNNGMHVANLSLGSPSPSATLEQAVNSATSRGVLVVAASGNSGAGSISYPARYANAMAVGATDQNNNRASFSQYGAGLDIVAPGVNVQSTYPGSTYASLNGTSMATPHVAGAAVLVKQKNPSWSNVRIRNRLKNTATSLGSTNLYGSGLVNAEAATR

SEQ ID NO: 59272 - protein, 269 aa, Unidentified
AQSVPWGISRVQAPAAHNRKLTGSGVKVAVLDTGISTHPDLNIRGGASFVPGEPSTQDGEGHGTHVAGTIAALNNNIGVLGVAPSAELYAVKVLGASGNGSVSSIAGGLEWAGLNGMHVANLSLGSPSPSATLEQAVNSATSRGVLVVAASGNSGAGSISYPARYANAMAVGATDQNNNRADFSQYGAGLDIVAPGVNVQSTYPGSTYASQNGTSMATPHVAGAAALVKQKNPSWSNVQIRNHLKNTATSLGSTNLYGSGLVNAEAATR

SEQ ID NO: 59273 - protein, 269 aa, Unidentified
AQSVPWGISRVQAPAAHRRGLTGRGVKVAVLDTGISTHPDLNIRGGASFVPGEPSTQDGNGHGTHVAGTIAALDNSIGVLGVAPSAELYAVKVLGASGAGSVSSIAQGLEWAGNNGMHVANLSLGSPSPSATLEQAVNSATSRGVLVVAASGNSGAGSISYPARYANAMAVGATDQNNNRASFSQYGAGLAIVAPGVNVQSTYPGSAYFSLNGTSMATPHVAGAAALVKQKNPSWSNVQIRNRLKNTATSLGSTNLYGSGLVNAEAATR

SEQ ID NO: 59274 - protein, 269 aa, Unidentified
AQSVPWGISRVQAPAAHNRRLTGRGVKVAVLDTGISTHPDLNIRGGASFVPGEPSTQDGNGHGTHVAGTIAALNNDIGVLGVAPSAELYAVKVLGASGSGSVSSIAQGLEWAGNNDMHVANLSLGSESPSATLEQAVNSATSRGVLVVAASGNSGADSISYPARYANAMAVGATDQNNNRADFSQYGAGLDIVAPGVNVQSTYPGSTYASLNGTSMATPHVAGAAALVKQKNPSWSNVQIRNRLKNTATSLGSTNLYGSGLVNAEAATR

SEQ ID NO: 59275 - protein, 269 aa, Unidentified
AQSVPWGISRVQAPAAHNRGLAGSGVKVAVLDTGISTHPDLNIRGGASFVPGEPSTQDGNGHGTHVAGTIAALDNSIGVLGVAPSAELYAVKVLSASGQGAISSIAQGLEWAGNNGMHVANLSLGSPSPSATLEQAVNSATSRGVLVVAASGNSGAGSISYPARYANAMAVGATDQNNNRASFSQYGAGLDIVAPGVNVQSTYPGSTYASLNGTSMATPHVAGAAVLVKQKNPSWSNVRIRNHLKNTATSLGSTNLYGSGLVNAEAATR

SEQ ID NO: 59276 - protein, 269 aa, Unidentified
AQSVPWGISRVQAPAAHNRGLTGSGVKVAVLDTGISTHPDLNIRGGASFVPGEPSTQDGNGHGTHAAGTIAALNNSIGVLGVAPSAELYAVKVLGASGSGAISSIAQGLEWAGNNGMHVANLSLGSPSPSATLEQAVNSATSRGVLVVAASGNSGADSISYPARYANAMAVGATDQDNNRASFSQYGAGLDIVAPGVNVQSTYPGSTYASLNGTSMATPHVAGAAVLVKHKNPSWSNVRIRNHLKNTATSLGSTNLYGSGLVNAEAATR

SEQ ID NO: 59277 - protein, 269 aa, Unidentified
AQSVPWGISRVQAPAAHNRRLWGRGVKVAVLDTGISTHPDLRIRGGASFVPGEPSTQDGNGHGTHVAGTIAALNNSIGVLGVAPSAELYAVKVLGASGAGSVSSIAQGLEWAGNNGMHVANLSLGSPSPSATLEQAVNSATSRGVLVVAASGNSGAGSISYPARYANAMAVGATDQNNNRASFSQYGAGLDIVAPGVSVQSTYIQSTYASLNGTSMATPHVAGAAALVKQKNPSWSNVQIRNHLKNTATSLGSTNLYGSGLVNAEAATR

SEQ ID NO: 59278 - protein, 269 aa, Unidentified
AQSVPWGISRVQAPAAHNRGLTGSGVKVAVLDTGISTHPDLNIRGGASFVPGEPSTQDGNGHGTHVAGTIAALNNSIGVLGVAPSAELYAVKVLGASGSGAISSIAQGLEWAGNNGMHVANLSLGSPSPSATLEQAVNSATSRGVLVVAASGNSGADSISYPARYANAMAVGATDQNNNRASFSQYGAGLDIVAPGVNIQSTYIGSTYASLNGTSMATPHVAGAAVLVKHKNPSWSNVRIRNHLKNTATSLGSTNLYGSGLVNAEAATR

SEQ ID NO: 59279 - protein, 269 aa, Unidentified
AQSVPWGISRVQAPAAHNRRLTGSGVKVAVLDTGISTHPDLRITGGASFAPGEPSTQDGNGHGTHVAGTIAALNNSIGVLGVAPSAELYAVKVLGASGAGSVSSIAQGLEWAGNNGMHVANLSLGSPSPSATLEQAVNSATSRGVLVVAASGNSGAGSISYPARYANAMAVGATDQNNNRASFSQYGAGLDIVAPGVNVQSTYIQSAYASLNGTSMATPHVAGAAALVKQKNPSWSNVQIRNHLKNTATSLGSTNLYGSGLVNAEAATR

SEQ ID NO: 59280 - protein, 269 aa, Unidentified
AQSVPWGISRVQAPAAHRRGLWGRGVKVAVLDTGISTHPDLNIRGGASFVPGEPSTQDGNGHGTHVAGTIAALDNSIGVLGVAPSAELYAVKVLGASGSGSVSSIAQGLEWAGNNGMHVANLSLGSPSPSATLEQAVNSATSRGVLVVAASGNSGAGSISYPARYANAMAVGATDQNNNRASFSQYGAGLDLVAPGVNVQSTYPGSAYFSLNGTSMATPHVAGAAALVKQKNPSWSNVQIRNRLKNTATSLGSTNLYGSGLVNAEAATR

SEQ ID NO: 59281 - protein, 269 aa, Unidentified
AQSVPWGISRVQAPAAHRRRLTGRGVKVAVLDTGISTHPDLNIRGGASFVPGEPSTQDGNGHGTHVAGTIAALDNSIGVLGVAPSAELYAVKVLGASGSGSVSSIAQGLEWAGANGMHVANLSLGSPSPSATLEQAVNSATSRGVLVVAASGNSGAGSISYPARYANAMAVGATDQDNNRASFSQYGAGLDIVAPGVNVQSTYPGSAYASLNGTSMATPHVAGAAALVKQKNPSWSNVQIRNRLKNTATSLGSTNLYGSGLVNAEAATR

SEQ ID NO: 59282 - protein, 269 aa, Unidentified
AQSVPWGISRVQAPAAHNRGLTGSGVKVAVLDTGISTHPDLNIRGGASFVPGEPSTQDGNGHGTHVAGTIAALDNWIGVLGVAPRAELYAVKVLGASGSGSVSSIAQGLEWAGNNRMHVANLSLGLQAPSATLEQAVNSATSRGVLVVAASGNSGAGSISYPARYANAMAVGATDQNNNRASFSQYGAGLDIVAPGVNVPSTYPGSTYASLNGTSMATPHVAGAAALVKQKNPSWSNVQIRNHLKNTATSLGSTNLYGSGLVNAEAATR

SEQ ID NO: 59283 - protein, 269 aa, Unidentified
AQSVPWGISRVQAPAAHNRRLTGSGVKVAVLDTGISTHPDLDIRGGASFVPGEPSTQDGNGHGTHVAGTIAALNNSIGVLGVAPSAELYAVKVLGASGGGAISSIAQGLEWAGNNGMHVANLSLGSPSPSATLEQAVNSATSRGVLVVAASGNSGAGSISYPARYANAMAVGATDQNNNRASFSQYGAGLDIVAPGVNVQSTYPGSTYASLNGTSMATPHVAGAAVLVKQKNPSWSNVRIRNHLKNTARSLGSTNLYGSGLVNAEAATR

SEQ ID NO: 59284 - protein, 269 aa, Unidentified
AQSVPWGISRVQAPAAHNRGLAGSGVKVAVLDTGISTHPDLNIRGGASFVPGEPSTQDGNGHGTHVAGTIAALDNSIGVLGVAPSAELYAVKVLGASGNGAISSIAQGLEWAGNNGMHVANLSLGAPSPSATLEQAVNSATSRGVLVVAASGNSGAGSISYPARYANAMAVGATDQNNNRASFSQYGAGLDIVAPGVNVQSTYPGSTYASLNGTSMATPHVAGAAVLVKQKNPSWSNVRIRNHLKNTATSLGSTNLYGSGLVNAEAATR

SEQ ID NO: 59285 - protein, 269 aa, Unidentified
AQSVPWGISRVQAPAAHNRRLTGRGVKVAVLDTGISTHPDLNIRGGASFVPGEPSTQDGNGHGTHVAGTIAALNNDIGVLGVAPSAELYAVKVLGASGSGSVSSIAQGLEWAGNNDMHVANLSLGSPSPSATLEQAVNSATSRGVLVVAASGNSGAGSISYPARYANAMAVGATDQNNNRADFSQYGAGLDIVAPGVNVQSTYPGSTYASLNGTSMATPHVAGAAALVKQKNPSWSNVRIRDRLKNTATSLGSTNLYGSGLVNAEAATR

SEQ ID NO: 59286 - protein, 269 aa, Unidentified
AQSVPWGISRVQAPAAHNRGLTGSGVKVAVLDTGISTHPDLNIRGGASFVPGEPSTQDGNGHGTHVAGTIAALDNSIGVLGVAPSAELYAVKVLGASGAGAISSIAQGLEWAGNNGMHVANLSLGSPSPSATLEQAVNSATSRGVLVVAASGNSGAGSISYPARYANAMAVGATDQNNNRADFSQYGAGLDIVAPGVNVQSTYIGSTYASLNGTSMATPHVAGAAVLVKQKNPSWSNVRIRNHLKNTATSLGSTNLYGSGLVNAEAATR

SEQ ID NO: 59287 - protein, 269 aa, Unidentified
AQSVPWGISRVQAPAAHNRGLTGSGVKVAVLDTGISTHPDLNIRGGASFVPGEPSTQDGNGHGTHAAGTIAALDNSIGVLGVAPSAELYAVKVLGASGSGAISSIAQGLEWAGNNGMHVANLSLGSPSPSATLEQAVNSATSRGVLVVAASGNSGADSISYPARYANAMAVGATDQNNNRASFSQYGAGLDIVAPGVNVQSTYPGSTYASINGTSMATPHVAGAAALVKHKNPSWSNVQIRNHLKNTATSLGSTNLYGSGLVNAVAATR

SEQ ID NO: 59288 - protein, 269 aa, Unidentified
AQSVPWGISRVQAPAAHNRGLTGRGVKVAVLDTGISTHPDLNIRGGASFVPGEPSTQDGNGHGTHVAGTIAALNNSIGVLGVAPSAELYAVKVLGASGGGAISSIAQGLEWAGNNGMHVANLSLGSPSPSATLEQAVNSATSRGVLVVAASGNSGADSISYPARYANAMAVGATDQNNNRASFSQYGAGLDIVAPGVNVQSTYPGSTYASLNGTSMATPHVAGAAVLVKQKNPSWSNVRIRDHLKNTATSLGSTNLYGSGLVNAEAATR

SEQ ID NO: 59289 - protein, 269 aa, Unidentified
AQSVPWGISRVQAPAAHNRGLTGFGVKVAVLDSGISTHPDLNIRGGASFVPGEPSTQDGNGHGTHVAGTIAALNNSIGVLGVAPSAELYAVKVLGASGGGAISSIAQGLEWAGLNGMHVANLSLGSPSPSATLEQAVNSATSRGVLVVAASGNSGAGSISYPARYANAMAVGATDQNNNRASFSQYGAGLDIVAPGVNVQSTAPGSTYASLNGTSMATPHVAGAAVLVKQKNPSWSNVQIRNHLKNTATSLGSTNLYGSGLVNAEAATR

SEQ ID NO: 59290 - protein, 269 aa, Unidentified
AQSVPWGISRVQAPAAHRRGLWGRGVKVAVLDTGISTHPDLNIRGGASFVPGEPSTQDGNGHGTHVAGTIAALDNSIGVLGVAPSAELYAVKVLGASGSGSVSSIAQGLEWAGANGMHVANLSLGSPSPSATLEQAVNSATSRGVLVVAASGNSGAGSISYPARYANAMAVGATDQDNNRASFSQYGAGLDIVAPGVNVQSTYPQSTYASLNGTSMATPHVAGAAALVKQKNPSWSNVQIRNRLKNTATSLGSTNLYGSGLVNAEAATR

SEQ ID NO: 59291 - protein, 269 aa, Unidentified
AQSVPWGISRVQAPAAHNRGLWGRGVKVAVLDTGISTHPDLRITGGASFVPGEPSTQDGNGHGTHVAGTIAALNNSIGVLGVAPSAELYAVKVLGASGAGSVSSIAQGLEWAGLNGMHVANLSLGSPSPSATLEQAVNSATSRGVLVVAASGNSGAGSISYPARYANAMAVGATDQNNNRASFSQYGAGLDIVAPGVNVQSTYIQSTYASLNGTSMATPHVAGAAALVKQKNPSWSNVQIRNHLKNTATSLGSTNLYGSGLVNAEAATR

SEQ ID NO: 59292 - protein, 269 aa, Unidentified
AQSVPWGISRVQAPAAHNRRLWGSGVKVAVLDTGISTHPDLRITGGASFVPGEPSTQDGNGHGTHVAGTIAALNNSIGVLGVAPSAELYAVKVLGASGAGSVSSIAQGLEWAGNNGMHVANLSLGSPSPSATLEQAVNSATSRGVLVVAASGNSGAGSISYPARYANAMAVGATDQNNNRASFSQYGAGLDIVAPGVNVQSTYIQSAYASLNGTSMATPHVAGAAALVKQKNPSWSNVQIRNHLKNTATSLGSTNLYGSGLVNAEAATR

SEQ ID NO: 59293 - protein, 269 aa, Unidentified
AQSVPWGISRVQAPAAHNRGLTGSGVKVAVLDTGISTHPDLNIRGGASFVPGEPSTQDGNGHGTHAAGTIAALDNSIGVLGVAPSAELYAVKVLGASGSGAISSIAQGLEWAGNNGMHVANLSLGSPSPSATLEQAVNSATSRGVLVVAASGNSGADSISYPARYANAMAVGATDQNNNRASFSQYGAGLDIVAPGVNVQSTYPGSTYASLNGTSMATPHVAGAAVLVKHKNPSWSNVRIRNHLKNTATSLGSTNLYGSGLVNAEAATR

SEQ ID NO: 59294 - protein, 269 aa, Unidentified
AQSVPWGISRVQAPAAHNRGLTGSGVKVAVLDTGISTHPDLNIRGGASFVPGEPSTQDGNGHGTHVAGTIAALNNSIGVLGVAPSAELYAVKVLGASGGGALSSIAQGLEWAGNNGMHVANLSLGSPSPSATLEQAVNSATSRGVLVVAASGNSGADSISYPARYANAMAVGATDQNNNRASFSQYGAGLDIVAPGVNVQSTYPGSTYASLNGTSMATPHVAGAAVLVKHKNPSWSNVRIRNHLKKTATSLGSTNLYGSGLVNAEAATR

SEQ ID NO: 59295 - protein, 269 aa, Unidentified
AQSVPWGISRVQAPAAHNRRLTGRGVKVAVLDTGISTHPDLNIRGGASFVPGEPSTQDGNGHGTHVAGTIAALNNSIGVLGVAPSAELYAVKVLGASGSGSVSSIAQGLEWAGNNRMHVANLSLGSESPSATLEQAVNSATSRGVLVVAASGNSGADSISYPARYANAMAVGATDQNNNRADFSQYGAGLDIVAPGVNVQSTYPGSTYASLNGTSMATPHVAGAAALVKQKNPSWSNVQIRDRLKNTATSLGSTNLYGSGLVNAEAATR

SEQ ID NO: 59296 - protein, 269 aa, Unidentified
AQSVPWGISRVQAPAAHNRRLTGSGVKVAVLDTGISTHPDLNIRGGASFVPGEPSTQDGNGHGTHVAGTIAALNNGIGVLGVAPSAELYAVKVLGASGSGSVSSIAQGLEWAGNNSMHVANLSLGSESPSATLEQAVNSATSRGVLVVAASGNSGADSISYPARYANAMAVGATDQNNNRADFSQYGAGLDIVAPGVNVQSTYPGSTYASLNGTSMATPHVAGAAALVKQKNPSWSNVRIRDHLKNTATSLGSTNLYGSGLVNAEAATR

SEQ ID NO: 59297 - protein, 269 aa, Unidentified
AQSVPWGISRVQAPAAHNRRLTGRGVKVAVLDTGISTHPDLNIRGGASFVPGEPSTQDGNGHGTHVAGTIAALNNNIGVLGVAPSAELYAVKVLSASGAGSVSSIANGLEWAGNNGMHVANLSLGAPSPSATLEQAVNSATSRGVLVVAASGNSGAGSISYPARYANAMAVGATDQNNNRASFSQYGAGLDIVAPGVNVQSTYPGSTYASQNGTSMATPHVAGAAALVKQKNPSWSNVQIRNHLKNTATSLGSTNLYGSGLVNAEAATR

SEQ ID NO: 59298 - protein, 269 aa, Unidentified
AQSVPWGISRVQAPAAHNRRLTGRGVKVAVLDTGISTHPDLNIRGGASFVPGEPSTQDGNGHGTHVAGTIAALNNNIGVLGVAPSAELYAVKVLGASGQGSVSSIAGGLEWAGLNGMHVANLSLGAPSPSATLEQAVNSATSRGVLVVAASGNSGAGSISYPARYANAMAVGATDQNNNRASFSQYGAGLDIVAPGVNVQSTYPGSTYASQNGTSMATPHVAGAAALVKQKNPSWSNVQIRNHLKNTATSLGSTNLYGSGLVNAEAATR

SEQ ID NO: 59299 - protein, 269 aa, Unidentified
AQSVPWGISRVQAPAAHNRGLTGSGVKVAVLDTGISTHPDLNIRGGASFVPGEPSTQDGNGHGTHVAGTIAALDNPIGVLGVAPRAELYAVKVLGASGSGSVSSIAQGLEWAGNNRMHVANLSLGLQAPSATLEQAVNSATSRGVLVVAASGNSGAGSISYPARYANAMAVGATDQNNNRASFSQYGAGLDIVAPGVNVRSTYPGSTYASLNGTSMATPHVAGAAALVKQKNPSWSNVQIRNHLKNTATSLGSTNLYGSGLVNAEAATR

SEQ ID NO: 59300 - protein, 269 aa, Unidentified
AQSVPWGISRVQAPAAHNRGLTGSGVKVAVLDTGISTHPDLNIRGGASFVPGEPSTQDGNGHGTHVAGTIAALDNRIGVLGVAPSAELYAVKVLGASGGGAISSIAQGLEWAGNNGMHVANLSLGSPSPSATLEQAVNSATSRGVLVVAASGNSGAGSISYPARYANAMAVGATDQNNNRASFSQYGAGLDIVAPGVNVQSTYPGSTYASLNGTSMATPHVAGAAVLVKQKNPSWSNVRIRNHLKNTATSLGSTNLYGSGLVRAEAATR

SEQ ID NO: 59301 - protein, 269 aa, Unidentified
AQSVPWGISRVQAPAAHNRGLAGSGVKVAVLDTGISTHPDLNIRGGASFVPGEPSTQDGNGHGTHVAGTIAALNNSIGVLGVAPSAELYAVKVLGASGGGAISSIAQGLEWAGLNGMHVANLSLGSPSPSATLEQAVNSATSRGVLVVAASGNSGAGSISYPARYANAMAVGATDQNNNRASFSQYGAGLDIVAPGVNVQSTVPQSTYASLNGTSMATPHVAGAAVLVKQKNPSWSNVQIRNHLKNTATSLGSTNLYGSGLVNAEAATR

SEQ ID NO: 59302 - protein, 269 aa, Unidentified
AQSVPWGISRVQAPAAHNRKLTGGGVKVAVLDTGISTHPDLNIRGGASFVPGEPSTQDGEGHGTHVAGTIAALNNSIGVLGVAPSAELYAVKVLAASGNGSVSSIAGGLEWAGLNGMHVANLSLGAPSPSATLEQAVNSATSRGVLVVAASGNSGAGSISYPARYANAMAVGATDQNNNRASFSQYGAGLDIVAPGVNVQSTYPGSTYASLNGTSMATPHVAGAAALVKQKNPSWSNVQIRNHLKNTATSLGSTNLYGSGLVNAEAATR

SEQ ID NO: 59303 - protein, 269 aa, Unidentified
AQSVPWGISRVQAPAAHNRRLTGRGVKVAVLDTGISTHPDLNIRGGASFVPGEPSTQDGNGHGTHVAGTIAALNNNIGVLGVAPSAELYAVKVLAASGGGSVSSIANGLEWAGLNGMHVANLSLGSPSPSATLEQAVNSATSRGVLVVAASGNSGAGSISYPARYANAMAVGATDQNNNRASFSQYGAGLDIVAPGVNVQSTYPGSTYASQNGTSMATPHVAGAAALVKQKNPSWSNVQIRNHLKNTATSLGSTNLYGSGLVNAEAATR

SEQ ID NO: 59304 - protein, 269 aa, Unidentified
AQSVPWGISRVQAPAAHNRGLTGSGVKVAVLDTGISTHPDLRITGGASFVPGEPSTQDGNGHGTHVAGTIAALNNSIGVLGVAPSAELYAVKVLGASGGGAISSIAQGLEWAGNNGMHVANLSLGSPSPSATLEQAVNSATSRGVLVVAASGNSGAGSISYPARYANAMAVGATDQNNNRASFSQYGAGLDIVAPGVNVQSTYPGSTYASLNGTSMATPHVAGAAVLVKQKNPSWSNVRIRNRLKNTATSLGSTNLYGSGLVNAEAATR

SEQ ID NO: 59305 - protein, 269 aa, Unidentified
AQSVPWGISRVQAPAAHNRRLWGRGVKVAVLDTGISTHPDLRIRGGASFVPGEPSTQDGNGHGTHVAGTIAALDNSIGVLGVAPSAELYAVKVLGASGAGSVSSIAQGLEWAGNNGMHVANLSLGSPSPSATLEQAVNSATSRGVLVVAASGNSGAGSISYPARYANAMAVGATDQNNNRASFSQYGAGLDIVAPGVNVQSTYIGSAYASLNGTSMATPHVAGAAALVKQKNPSWSNVQIRNHLKNTATSLGSTNLYGSGLVNAEAATR

SEQ ID NO: 59306 - protein, 269 aa, Unidentified
AQSVPWGISRVQAPAAHNRGLTGRGVKVAVLDTGISTHPDLNIRGGASFVPGEPSTQDGNGHGTHVAGTIAALDNNIGVLGVAPDAELYAVKVLGASGSGSVSSIAQGLEWAGNNRMHVANLSLGSPSPSATLEQAVNSATSRGVLVVAASGNSGAGSISYPARYANAMAVGATDQNNNRASFSQYGAGLDIVAPGVNVQSTWPGDTYASLNGTSQATPHVAGAAALVKQKNPSWSNVQIRNRLKNTATSLGSTNLYGSGLVNAEAATR

SEQ ID NO: 59307 - protein, 269 aa, Unidentified
AQSVPWGISRVQAPAAHNRGLTGSGVKVAVLDTGISTHPDLNIRGGASFVPGEPSTQDGNGHGTHVAGTIAALDNLIGVLGVAPRAELYAVKVLGASGSGSVSSIAQGLEWAGNNRMHVANLSLGLQAPSATLEQAVNSATSRGVLVVAASGNSGAGSISYPARYANAMAVGATDQNNNRASFSQYGAGLDIVAPGVNVHSTYPGSTYASLNGTSMATPHVAGAAALVKQKNPSWSNVQIRNHLKNTATSLGSTNLYGSGLVNAEAATR

SEQ ID NO: 59308 - protein, 269 aa, Unidentified
AQSVPWGISRVQAPAAHNRGLTGSGVKVAVLDTGISTHPDLNIRGGASFVPGEPSTQDGNGHGTHVAGTIAALDNLIGVLGVAPRAELYAVKVLGASGSGSVSSIAQGLEWAGNNRMHVANLSLGLQAPSATLEQAVNSATSRGVLVVAASGNSGAGSISYPARYANAMAVGATDQNNNRASFSQYGAGLDIVAPGVNVFSTYPGSTYASLNGTSMATPHVAGAAALVKQKNPSWSNVQIRNHLKNTATSLGSTNLYGSGLVNAEAATR

SEQ ID NO: 59309 - protein, 269 aa, Unidentified
AQSVPWGISRVQAPAAHNRRLTGRGVKVAVLDTGISTHPDLNIRGGASFVPGEPSTQDGEGHGTHVAGTIAALNNDIGVLGVAPSAELYAVKVLGASGSGSVSSIAQGLEWAGNNDMHVANLSLGSESPSATLEQAVNSATSRGVLVVAASGNSGAGSISYPARYANAMAVGATDQNNNRASFSQYGAGLDIVAPGVNVQSTYPGSTYASLNGTSMATPHVAGAAALVKQKNPSWSNVRIRDHLKNTATSLGSTNLYGSGLVNAEAATR

SEQ ID NO: 59310 - protein, 269 aa, Unidentified
AQSVPWGISRVQAPAAHNRGLTGSGVKVAVLDTGISTHPDLNIRGGASFVPGEPSTQDGNGHGTHVAGTIAALDNWIGVLGVAPRAELYAVKVLGASGSGSVSSIAQGLEWAGNNRMHVANLSLGLQAPSATLEQAVNSATSRGVLVVAASGNSGAGSISYPARYANAMAVGATDQNNNRASFSQYGAGLDIVAPGVNVSSTYPGSTYASLNGTSMATPHVAGAAALVKQKNPSWSNVQIRNHLKNTATSLGSTNLYGSGLVNAEAATR

SEQ ID NO: 59311 - protein, 269 aa, Unidentified
AQSVPWGISRVQAPAAHNRGLTGSGVKVAVLDTGISTHPDLNIRGGASFVPGEPSTQDGNGHGTHVAGTIAALDNGIGVLGVAPRAELYAVKVLGASGSGSVSSIAQGLEWAGNNRMHVANLSLGLQAPSATLEQAVNSATSRGVLVVAASGNSGAGSISYPARYANAMAVGATDQNNNRASFSQYGAGLDIVAPGVNVNSTYPGSTYASLNGTSMATPHVAGAAALVKQKNPSWSNVQIRNHLKNTATSLGSTNLYGSGLVNAEAATR

SEQ ID NO: 59312 - protein, 269 aa, Unidentified
AQSVPWGISRVQAPAAHRRGLWGRGVKVAVLDTGISTHPDLNIRGGASFVPGEPSTQDGNGHGTHVAGTIAALDNSIGVLGVAPSAELYAVKVLGASGSGSVSSIAQGLEWAGNNGMHVANLSLGSPSPSATLEQAVNSATSRGVLVVAASGNSGAGSISYPARYANAMAVGATDQDNNRASFSQYGAGLDIVAPGVNVQSTYPGSAYFSLNGTSMATPHVAGAAALVKQKNPSWSNVQIRNRLKNTATSLGSTNLYGSGLVNAEAATR

SEQ ID NO: 59313 - protein, 269 aa, Unidentified
AQSVPWGVSRVQAPAAHNRGLTGSGVKVAVLDTGISTHPDLNIRGGASFVPGEPSTQDGNGHGTHVAGTIAALDNGIGVLGVAPSAELYAVKVLGASGSGSVSSIAQGLEWAGNNRMHVANLSLGSPSPSATLEQAVNSATSRGVLVVAASGNSGAGQISYPARYANAMAVGATDQNNNRASFSQYGAGLDIVAPGVNVYSTYPGSTYASLNGTSMATPHVAGAAALVKQKNPSWSNVQIRNHLKITATSLGSTILYGSGLVNAEAATR

SEQ ID NO: 59314 - protein, 269 aa, Unidentified
AQSVPWGISRVQAPAAHNRGLTGSGVKVAVLDTGISTHPDLNIRGGASFVPGEPSTQDGNGHGTHVAGTIAALDNHIGVLGVAPRAELYAVKVLGASGSGSVSSIAQGLEWAGNNRMHVANLSLGLQAPSATLEQAVNSATSRGVLVVAASGNSGAGSISYPARYANAMAVGATDQNNNRASFSQYGAGLDIVAPGVNVMSTYPGSTYASLNGTSMATPHVAGAAALVKQKNPSWSNVQIRNHLKNTATSLGSTNLYGSGLVNAEAATR

SEQ ID NO: 59315 - protein, 269 aa, Unidentified
AQSVPWGISRVQAPAAHNRGLTGSGVKVAVLDTGISTHPDLNIRGGASFVPGEPSTQDGNGHGTHAAGTIAALNNSIGVLGVAPSAELYAVKVLGASGSGAISSIAQGLEWAGNNGMHVANLSLGSPSPSATLEQAVNSATSRGVLVVAASGNSGADSISYPARYANAMAVGATDQNNNRACFSQYGAGLDIVAPGVNVQSTYPGSTYASLNGTSMATPHVAGAAVLVKHKNPSWSNVRIRNHLKNTATSLGSTNLYGSGLVNAEAATR

SEQ ID NO: 59316 - protein, 269 aa, Unidentified
AQSVPWGISRVQAPAAHNRKLTGGGVKVAVLDTGISTHPDLNIRGGASFVPGEPSTQDGEGHGTHVAGTIAALNNSIGVLGVAPSAELYAVKVLGASGQGSVSSIAGGLEWAGLNGMHVANLSLGSPSPSATLEQAVNSATSRGVLVVAASGNSGAGSISYPARYANAMAVGATDQNNNRADFSQYGAGLDIVAPGVNVQSTYPGSTYASQNGTSMATPHVAGAAALVKQKNPSWSNVQIRNHLKNTATSLGSTNLYGSGLVNAEAATR

SEQ ID NO: 59317 - protein, 269 aa, Unidentified
AQSVPWGISRVQAPAAHNRGLTGSGVKVAVLDTGISTHPDLNIRGGASFVPGEPSTQDGNGHGTHVAGTIAALDNGIGVLGVAPRAELYAVKVLGASGSGSVSSIAQGLEWAGNNRMHVANLSLGLQAPSATLEQAVNSATSRGVLVVAASGNSGAGSISYPARYANAMAVGATDQNNNRASFSQYGAGLDIVAPGVNVYSTYPGSTYASLNGTSMATPHVAGAAALVKQKNPSWSNVQIRNHLKNTATSLGSTNLYGSGLVNAEAATR

SEQ ID NO: 59318 - protein, 269 aa, Unidentified
AQSVPWGISRVQAPAAHNRGLTGRGVKVAVLDTGISTHPDLDIRGGASFVPGEPSTQDGNGHGTHVAGTIAALNNSIGVLGVAPSAELYAVKVLGASGGGAISSIAQGLEWAGNNGMHVANLSLGSPSPSATLEQAVNSATSRGVLVVAASGNSGAGSISYPARYANAMAVGATDQNNNRASFSQYGAGLDIVAPGVNVQSTYPGSTYASLNGTSMATPHVAGAAVLVKQKNPSWSNVRIRNHLKNTARSLGSTNLYGSGLVNAEAATR

SEQ ID NO: 59319 - protein, 269 aa, Unidentified
AQSVPWGISRVQAPAAHNRGLTGSGVKVAVLDTGISTHPDLNIRGGASFVPGEPSTQDGNGHGTHVAGTIAALDNMIGVLGVAPRAELYAVKVLGASGSGSVSSIAQGLEWAGNNRMHVANLSLGLQAPSATLEQAVNSATSRGVLVVAASGNSGAGSISYPARYANAMAVGATDQNNNRASFSQYGAGLDIVAPGVNVRSTYPGSTYASLNGTSMATPHVAGAAALVKQKNPSWSNVQIRNHLKNTATSLGSTNLYGSGLVNAEAATR

SEQ ID NO: 59320 - protein, 269 aa, Unidentified
AQSVPWGISRVQAPAAHNRGLTGSGVKVAVLDTGISTHPDLNIRGGASFVPGEPSTQDGNGHGTHVAGTIAALNNGIGVLGVAPSAELYAVKVLGASGSGSVSSIAQGLEWAGNNSMHVANLSLGSESPSATLEQAVNSATSRGVLVVAASGNSGADSISYPARYANAMAVGATDQNNNRADFSQYGAGLDIVAPGVNVQSTYPGSTYASLNGTSMATPHVAGAAALVKQKNPSWSNVRIRDRLKNTATSLGSTNLYGSGLVNAEAATR

SEQ ID NO: 59321 - protein, 269 aa, Unidentified
AQSVPWGISRVQAPAAHNRRLTGRGVKVAVLDTGISTHPDLNIRGGASFVPGEPSTQDGNGHGTHVAGTIAALNNDIGVLGVAPSAELYAVKVLGASGSGSVSSIAQGLEWAGNNDMHVANLSLGSPSPSATLEQAVNSATSRGVLVVAASGNSGADSISYPARYANAMAVGATDQNNNRADFSQYGAGLDIVAPGVNVQSTYPGSTYASLNGTSMATPHVAGAAALVKQKNPSWSNVRIRDHLKNTATSLGSTNLYGSGLVNAEAATR

SEQ ID NO: 59322 - protein, 269 aa, Unidentified
AQSVPWGISRVQAPAAHNRGLTGSGVKVAVLDTGISTHPDLNIRGGASFVPGEPSTQDGEGHGTHVAGTIAALNNGIGVLGVAPSAELYAVKVLGASGSGSVSSIAQGLEWAGNNSMHVANLSLGSESPSATLEQAVNSATSRGVLVVAASGNSGADSISYPARYANAMAVGATDQNNNRADFSQYGAGLDIVAPGVNVQSTYPGSTYASLNGTSMATPHVAGAAALVKQKNPSWSNVRIRDHLKNTATSLGSTNLYGSGLVNAEAATR

SEQ ID NO: 59323 - protein, 269 aa, Bacillus lentus
AQTVPWGIRRVQAPAAHNLGLTGSGVKVAVLDTGISTHPDLRIRGGASFVPGEPSTQDGDGHGTHVAGTIAALDNSIGVLGVAPSAELYAVKVLGASGSGSVSSIAQGLEWAGNNGMHVANLSLGSPSPSATLEQAVNSATSRGVLVVAASGNSGAGSISYPARYANAMAVGATDQNNNRASFSQYGAGLDIVAPGVNVQSTYPGSTYASLNGTSMATPHVAGAAALVKQKNPSWSNVRIRNHLKNTATSLGDTNLYGSGLVNAEAATR

SEQ ID NO: 59324 - protein, 269 aa, Unidentified
AQSVPWGISRVQAPAAHNRKLTGGGVKVAVLDTGISTHPDLNIRGGASFVPGEPSTQDGEGHGTHVAGTIAALNNNIGVLGVAPSAELYAVKVLSASGQGSVSSIAQGLEWAGLNGMHVANLSLGSPSPSATLEQAVNSATSRGVLVVAASGNSGAGSISYPARYANAMAVGATDQNNNRADFSQYGAGLDIVAPGVNVQSTYPGSTYASLNGTSMATPHVAGAAALVKQKNPSWSNVQIRNHLKNTATSLGSTNLYGSGLVNAEAATR

SEQ ID NO: 59325 - protein, 269 aa, Unidentified
AQSVPWGISRVQAPAAHRRRLTGRGVKVAVLDTGISTHPDLNIRGGASFVPGEPSTQDGNGHGTHVAGTIAALDNSIGVLGVAPSAELYAVKVLGASGAGSVSSIAQGLEWAGANGMHVANLSLGSPSPSATLEQAVNSATSRGVLVVAASGNSGAGSISYPARYANAMAVGATDQDNNRASFSQYGAGLDIVAPGVNVQSTYPGSTYASLNGTSMATPHVAGAAALVKQKNPSWSNVQIRNRLKNTATSLGSTNLYGSGLVNAEAATR

SEQ ID NO: 59326 - protein, 269 aa, Unidentified
AQSVPWGISRVQAPAAHNRRLTGRGVKVAVLDTGISTHPDLRIRGGASFVPGEPSTQDGNGHGTHVAGTIAALDNNIGVLGVAPRAELYAVKVLGASGSGSVSSIAQGLEWAGNNRMHVANLSLGSPSPSATLEQAVNSATSRGVLVVAASGNSGAGSISYPARYANAMAVGATDQNNNRASFSQYGAGLDIVAPGVNVQSTWPGSTYASLNGTSQATPHVAGAAALVKQKNPSWSNVQIRNHLKNTATSLGSTNLYGSGLVNAEAATR

SEQ ID NO: 59327 - protein, 269 aa, Unidentified
AQSVPWGISRVQAPAAHNRRLTGRGVKVAVLDTGISTHPDLNIRGGASFVPGEPSTQDGEGHGTHVAGTIAALNNDIGVLGVAPSAELYAVKVLGASGSGSVSSIAQGLEWAGNNSMHVANLSLGSPSPSATLEQAVNSATSRGVLVVAASGNSGADSISYPARYANAMAVGATDQNNNRASFSQYGAGLDIVAPGVNVQSTYPGSTYASLNGTSMATPHVAGAAALVKQKNPSWSNVRIRNHLKNTATSLGSTNLYGSGLVNAEVATR

SEQ ID NO: 59328 - protein, 269 aa, Unidentified
AQSVPWGISRVQAPAAHNRGLTGSGVKVAVLDTGISTHEDLNIRGGASFVPGEPSTQDGNGHGTHVAGTIAALDNSIGVLGVAPRAELYAVKVLGASGSGSVSSIAQGLEWAGNNRMHVANLSLGLQAPSATLEQAVNSATSRGVLVVAASGNSGAGSISYPARYANAMAVGATDQNNNRASFSQYGAGLDIVAPGVNVQSTYIGSTYASLNGTSMATPHVAGAAALVKQKNPSWSNVQIRNHLKNTATSLGSTNLYGSGLVNAEAATR

SEQ ID NO: 59329 - protein, 269 aa, Unidentified
AQSVPWGISRVQAPAAHRRGLTGSGVKVAVLDTGISTHPDLNIRGGASFVPGEPSTQDGNGHGTHVAGTIAALDNNIGVLGVAPRAELYAVKVLGASGSGSVSSIAQGLEWAGNNGMHVANLSLGSPSPSATLEQAVNSATSRGVLVVAASGNSGAGSISYPARYANAMAVGATDQNNNRASFSQYGAGLDIVAPGVNVLSTWPGSTYASLNGTSMATPHVAGAAALVKQKNPSWSNVQIRNRLKNTATSLGGTNLYGSGLVNAEAATR

SEQ ID NO: 59330 - protein, 269 aa, Unidentified
AQSVPWGISRVQAPAAHNRGLTGSGVKVAVLDTGISTHPDLNIRGGASFVPGEPSTQDGNGHGTHAAGTIAALDNSIGVLGVAPSAELYAVKVLGASGSGAVSSIAQGLEWVGNNGMHIANLSLGSPSPSATLEQAVNSATSRGVLVVAASGNSGADSISYPARYANAMAVGATDQNNNRASFSQYGAGLDIVAPGVNVQSTYPGSTYASLNGTSMATPHVAGAAALVKHKNPSWSNVRIRNHLKNTATSLGSTNLYGSGLVNAEAATR

SEQ ID NO: 59331 - protein, 269 aa, Unidentified
AQSVPWGISRVQAPAAHNRGLTGSGVKVAVLDSGISTHPDLNIRGGASFVPGEPSTQDGNGHGTHVAGTIAALNNSIGVLGVAPSAELYAVKVLGASGGGAISSIAQGLEWAGLNGMHVANLSLGSPSPSATLEQAVNSATSRGVLVVAASGNSGAGSISYPARYANAMAVGATDQNNNRASFSQYGAGLDIVAPGVNVQSTAPQSTYASLNGTSMATPHVAGAAVLVKQKNPSWSNVQIRNHLKNTATSLGSTNLYGSGLVNAEAATR

SEQ ID NO: 59332 - protein, 269 aa, Unidentified
AQVVPWGISRVQAPAAHNRGLTGRGVKVAVLDTGISTHPDLNIRGGASFVPGEPSTQDGNGHGTHVAGTIAALDNNIGVLGVAPDAELYAVKVLGASGSGSVSSIAQGLEWAGNNRMHVANLSLGSPSPSATLEQAVNSATSRGVLVVAASGNSGAGSISYPARYANAMAVGATDQNNNRASFSQYGAGLDIVAPGVNVQSTWPGSTYASLNGTSQATPHVAGAAALVKQKNPSWSNVQIRNRLKNTATSLGSTNLYGSGLVNAEAATR

SEQ ID NO: 59333 - protein, 269 aa, Unidentified
AQSVPWGISRVQAPAAHNRGLTGSGVKVAVLDTGISTHPDLNIRGGASFVPGEPSTQDGNGHGTHVAGTIAALDNHIGVLGVAPRAELYAVKVLGASGSGSVSSIAQGLEWAGNNRMHVANLSLGLQAPSATLEQAVNSATSRGVLVVAASGNSGAGSISYPARYANAMAVGATDQNNNRASFSQYGAGLDIVAPGVNVYSTYPGSTYASLNGTSMATPHVAGAAALVKQKNPSWSNVQIRNHLKNTATSLGSTNLYGSGLVNAEAATR

SEQ ID NO: 59334 - protein, 269 aa, Unidentified
AQSVPWGISRVQAPAAHNRGLTGSGVKVAVLDTGISTHPDLRIRGGASFVPGEPSTQDGNGHGTHVAGTIAALDNSIGVLGVAPSAELYAVKVLGASGGGAISSIAQGLEWAGNNGMHVANLSLGSPSPSATLEQAVNSATSRGVLVVAASGNSGAGSISYPARYANAMAVGATDQNNNRASFSQYGAGLDIVAPGVNVQSTYPGSTYASLNGTSMATPHVAGAAVLVKQKNPSWSNVRIRNHLKNTATSLGSTNLYGSGLVRAEAATR

SEQ ID NO: 59335 - protein, 269 aa, Unidentified
AQSVPWGISRVQAPAAHNRGLTGSGVKVAVLDTGISTHPDLNIRGGASFVPGEPSTQDGNGHGTHVAGTIAALDNCIGVLGVAPRAELYAVKVLGASGSGSVSSIAQGLEWAGNNRMHVANLSLGLQAPSATLEQAVNSATSRGVLVVAASGNSGAGSISYPARYANAMAVGATDQNNNRASFSQYGAGLDIVAPGVNVASTYPGSTYASLNGTSMATPHVAGAAALVKQKNPSWSNVQIRNHLKNTATSLGSTNLYGSGLVNAEAATR

SEQ ID NO: 59336 - protein, 269 aa, Unidentified
AQSVPWGISRVQAPAAHNRGLAGGGVKVAVLDTGISTHPDLNIRGGASFVPGEPSTQDGNGHGTHVAGTIAALNNSIGVLGVAPSAELYAVKVLGASGGGAISSIAQGLEWAGNNGMHVANLSLGSPSPSATLEQAVNSATSRGVLVVAASGNSGAGSISYPARYANAMAVGATDQNNNRASFSQYGAGLDIVAPGVNVQSTYPGSTYASQNGTSMATPHVAGAAVLVKQKNPSWSNVRIRNHLKNTATSLGSTNLYGSGLVNAEAATR

SEQ ID NO: 59337 - protein, 269 aa, Unidentified
AQSVPWGISRVQAPAAHNRGLTGSGVKVAVLDSGISTHPDLNIRGGASFVPGEPSTQDGNGHGTHVAGTIAALNNSIGVLGVAPSAELYAVKVLGASGGGAISSIAQGLEWAGLNGMHVANLSLGSPSPSATLEQAVNSATSRGVLVVAASGNSGAGSISYPARYANAMAVGATDQNNNRASFSQYGAGLDIVAPGVNVQSTVPQSTYASLNGTSMATPHVAGAAVLVKQKNPSWSNVQIRNHLKNTATSLGSTNLYGSGLVNAEAATR

SEQ ID NO: 59338 - protein, 269 aa, Unidentified
AQSVPWGISRVQAPASHNRGLTGSGVKVAVLDTGISTHPDLNIRGGASFVPGEPSTQDGNGHGTHVAGTIAALNNSIGVLGVAPSAELYAVKVLGASGGGAISSIAQGLEWAGANGMHVANLSLGNPSPSATLEQAVNSATSRGVLVVAASGNSGAGSISYPARYANAMAVGATDQNNNRASFSQYGAGLDIVAPGVNVQSTVPGSTYASLNGTSMATPHVAGAAVLVKQKNPSWSNVQIRNHLKNTATSLGSTNLYGSGLVNAEAATR

SEQ ID NO: 59339 - protein, 269 aa, Unidentified
AQSVPWGISRVQAPAAHRRGLTGRGVKVAVLDTGISTHPDLNIRGGASFVPGEPSTQDGNGHGTHVAGTIAALDNSIGVLGVAPSAELYAVKVLGASGSGSVSSIAQGLEWAGNNGMHVANLSLGSPSPSATLEQAVNSATSRGVLVVAASGNSGAGSISYPARYANAMAVGATDQDNNRASFSQYGAGLDLVAPGVNVQSTYPQSTYFSLNGTSMATPHVAGAAALVKQKNPSWSNVQIRNRLKNTATSLGSTNLYGSGLVNAEAATR

SEQ ID NO: 59340 - protein, 269 aa, Unidentified
AQSVPWGISRVQAPAAHNRGLTGRGVKVAVLDTGISTHPDLNIRGGASFVPGEPSTQDGNGHGTHVAGTIAALNNDIGVLGVAPSAELYAVKVLGASGSGSVSSIAQGLEWAGNNDMHVANLSLGSPSPSATLEQAVNSATSRGVLVVAASGNSGADSISYPARYANAMAVGATDQNNNRADFSQYGAGLDIVAPGVNVQSTYPGSTYASLNGTSMATPHVAGAAALVKQKNPSWSNVRIRDRLKNTATSLGSTNLYGSGLVNAEAATR

SEQ ID NO: 59341 - protein, 269 aa, Unidentified
AQSVPWGISRVQAPAAHNRGLTGSGVKVAVLDTGISTHPDLNIRGGASFVPGEPSTQDGNGHGTHVAGTIAALDNSIGVLGVAPSAELYAVKVLGASGSGAISSIAQGLEWAGNNGMHVANLSLGSPSPSATLEQAVNSATSRGVLVVAASGNSGADSISYPARYANAMAVGATDQNNNRASFSQYGAGLDIVAPGVNVQSTYPGSTYASLNGTSMATPHVAGAAVLVKHKNPSWSNVRIRNHLKNTATSVGSTNLYGSGLVNAEAATR

SEQ ID NO: 59342 - protein, 269 aa, Unidentified
AQSVPWGISRVQAPAAHNRRLTGRGVKVAVLDTGISTHPDLNIRGGASFVPGEPSTQDGEGHGTHVAGTIAALNNGIGVLGVAPSAELYAVKVLGASGSGSVSSIAQGLEWAGNNDMHVANLSLGSPSPSATLEQAVNSATSRGVLVVAASGNSGADSISYPARYANAMAVGATDQNNNRADFSQYGAGLDIVAPGVNVQSTYPGSTYASLNGTSMATPHVAGAAALVKQKNPSWSNVRIRNHLKNTATSLGSTNLYGSGLVNAEAATR

SEQ ID NO: 59343 - protein, 269 aa, Unidentified
AQSVPWGISRVQAPAAHNRGLTGSGVKVAVLDTGISTHPDLNIRGGASFVPGEPSTQDGNGHGTHAAGTIAALNNSIGVLGVAPSAELYAVKVLGASGSGAISSIAQGLEWAGNNGMHVANLSLGSPSPSATLEQAVNSATSRGVLVVAASGNSGADSISYPARYANAMAVGATDQNNNRASFSQYGAGLDIVAPGVNVQSTYIGSTYASLNGTSMATPHVAGAAVLVKHKNPSWSNVRIRNHLKNTATSLGSTNLYGSGLVNAEAATR

SEQ ID NO: 59344 - protein, 269 aa, Unidentified
AQSVPWGISRVQAPAAHNRGLTGRGVKVAVLDTGISTHPDLNIRGGASFVPGEPSTQDGNGHGTHVAGTIAALDNNIGVLGVAPDAELYAVKVLGASGHGSVSSIAQGLEWAGNNRMHVANLSLGSPSPSATLEQAVNSATSRGVLVVAASGNSGAGSISYPARYANAMAVGATDQNNNRASFSQYGAGLDIVAPGVNVQSTWPGSTYASLNGTSQATPHVAGAAALVKQKNPSWSNVQIRNRLKNTATSLGSTNLYGSGLVNAEAATR

SEQ ID NO: 59345 - protein, 269 aa, Unidentified
AQSVPWGISRVQAPAAHNRRLTGSGVKVAVLDTGISTHPDLNIRGGASFVPGEPSTQDGNGHGTHVAGTIAALDNSIGVLGVAPSAELYAVKVLGASGGGAISSIAQGLEWAGNNGMHVANLSLGSPSPSATLEQAVNSATSRGVLVVAASGNSGAGSISYPARYANAMAVGATDQNNNRASFSQYGAGLDIVAPGVNVQSTYPGSTYASLNGTSMATPHVAGAAVLVKQKNPSWSNVRIRNHLKNTATSLGSTNLYGSGLVRAEAATR

SEQ ID NO: 59346 - protein, 269 aa, Unidentified
AQSVPWGISRVQAPAAHNRGLTGSGVKVAVLDTGISTHPDLNIRGGASFVPGEPSTQDGNGHGTHVAGTIAALNNSIGVLGVAPSAELYAVKVLGASGSGALSSIAQGLEWAGNNGMHVANLSLGSPSPSATLEQAVNSATSRGVLVVAASGNSGEGSISYPARYANAMAVGATDQNNNRADFSQYGAGLDIVAPGVNVQSTYPGSTYASLNGTSMATPHVAGAAVLVKQKNPSWSNVRIRDRLKNTATSLGSTNLYGSGLVNAEAATR

SEQ ID NO: 59347 - protein, 269 aa, Unidentified
AQSVPWGISRVQAPAAHNRGLTGSGVKVAVLDTGISTHPDLNIRGGASFVPGEPSTQDGNGHGTHVAGTIAALDNCIGVLGVAPRAELYAVKVLGASGSGSVSSIAQGLEWAGNNRMHVANLSLGLQAPSATLEQAVNSATSRGVLVVAASGNSGAGSISYPARYANAMAVGATDQNNNRASFSQYGAGLDIVAPGVNVMSTYPGSTYASLNGTSMATPHVAGAAALVKQKNPSWSNVQIRNHLKNTATSLGSTNLYGSGLVNAEAATR

SEQ ID NO: 59348 - protein, 269 aa, Unidentified
AQSVPWGISRVQAPAAHRRRLWGRGVKVAVLDTGISTHPDLNIRGGASFVPGEPSTQDGNGHGTHVAGTIAALDNSIGVLGVAPSAELYAVKVLGASGSGSVSSIAQGLEWAGNNGMHVANLSLGSPSPSATLEQAVNSATSRGVLVVAASGNSGAGSISYPARYANAMAVGATDQDNNRASFSQYGAGLDIVAPGVNVQSTYPQSTYASLNGTSMATPHVAGAAALVKQKNPSWSNVQIRNRLKNTATSLGSTNLYGSGLVNAEAATR

SEQ ID NO: 59349 - protein, 269 aa, Unidentified
AQSVPWGISRVQAPAAHNRGLTGSGVKVAVLDTGISTHPDLNIRGGASFVPGEPSTQDGNGHGTHVAGTIAALDNGIGVLGVAPRAELYAVKVLGASGSGSVSSIAQGLEWAGNNRMHVANLSLGLQAPSATLEQAVNSATSRGVLVVAASGNSGAGSISYPARYANAMAVGATDQNNNRASFSQYGAGLDIVAPGVNVFSTYPGSTYASLNGTSMATPHVAGAAALVKQKNPSWSNVQIRNHLKNTATSLGSTNLYGSGLVNAEAATR

SEQ ID NO: 59350 - protein, 269 aa, Unidentified
AQSVPWGISRVQAPAAHNRGLTGSGVKVAVLDTGISTHPDLNIRGGASFVPGEPSTQDGNGHGTHVAGTIAALNNSIGVLGVAPSAELYAVKVLGADGRGAISSIAQGLEWAGNNGMHVANLSLGSPSPSATLEQAVNSATSRGVLVVAASGNSGASSISYPARYANAMAVGATDQNNNRASFSQYGAGLDIVAPGVNVLSTWPGSTYASLNGTSMATPHVAGAAALVKQKNPSWSNVQIRNHLKNTATSLGSTNEYGSGLVNAEAATR

SEQ ID NO: 59351 - protein, 269 aa, Unidentified
AQSVPWGISRVQAPAAHRRGLWGRGVKVAVLDTGISTHPDLNIRGGASFVPGEPSTQDGNGHGTHVAGTIAALDNSIGVLGVAPSAELYAVKVLGASGAGSVSSIAQGLEWAGANGMHVANLSLGSPSPSATLEQAVNSATSRGVLVVAASGNSGAGSISYPARYANAMAVGATDQNNNRASFSQYGAGLDLVAPGVNVQSTYPGSTYASLNGTSMATPHVAGAAALVKQKNPSWSNVQIRNRLKNTATSLGSTNLYGSGLVNAEAATR

SEQ ID NO: 59352 - protein, 269 aa, Unidentified
AQSVPWGISRVQAPAAHNRRLWGRGVKVAVLDTGISTHPDLRIRGGASFVPGEPSTQDGNGHGTHVAGTIAALNNSIGVLGVAPSAELYAVKVLGASGAGSVSSIAQGLEWAGNNGMHVANLSLGSPSPSATLEQAVNSATSRGVLVVAASGNSGAGSISYPARYANAMAVGATDQNNNRASFSQYGAGLDIVAPGVNVQSTYIQSAYASLNGTSMATPHVAGAAALVKQKNPSWSNVQIRNHLKNTATSLGSTNLYGSGLVNAEAATR

SEQ ID NO: 59353 - protein, 270 aa, Synthetic construct
AQSVPWGISRVQAPAAHNRGLTGSGVRVAVLDTGIDSTHPDLNIRGGASFVPGEPSTQDGNGHGTHVAGTIAALNNSIGVLGVAPSAELYAVKVLNRSGSGSVSSIAQGLEWAGNNGMHVANLSLGSPSPSATLEQAVNSATSRGVLVVAASGNSGAGSISYPARYANAMAVGATDQNNNRASFSQYGPGLDIVAPGVNVQSTYPGSTYASLNGTSMATPHVAGAAALVRQRNPSWSNVQIRNHLENTATSLGSTNLFGSGLVNAEAATR

SEQ ID NO: 59354 - protein, 269 aa, Unidentified
AQSVPWGISRVQAPAAHNRRLTGSGVKVAVLDTGISTHPDLDIRGGASFVPGEPSTQDGNGHGTHVAGTIAALNNRIGVLGVAPSAELYAVKVLGASGGGAISSIAQGLEWAGNNGMHVANLSLGSPSPSATLEQAVNSATSRGVLVVAASGNSGAGSISYPARYANAMAVGATDQNNNRASFSQYGAGLDIVAPGVNVQSTYPGSTYASLNGTSMATPHVAGAAVLVKQKNPSWSNVRIRNHLKNTATSLGSTNLYGSGLVNAEAATR

SEQ ID NO: 59355 - protein, 269 aa, Unidentified
AQSVPWGISRVQAPAAHNRKLTGGGVKVAVLDTGISTHPDLNIRGGASFVPGEPSTQDGEGHGTHVAGTIAALNNSIGVLGVAPSAELYAVKVLGASGQGSVSSIAGGLEWAGLNGMHVANLSLGAPSPSATLEQAVNSATSRGVLVVAASGNSGAGSISYPARYANAMAVGATDQNNNRADFSQYGAGLDIVAPGVNVQSTYPGSTYASLNGTSMATPHVAGAAALVKQKNPSWSNVQIRNHLKNTATSLGSTNLYGSGLVNAEAATR

SEQ ID NO: 59356 - protein, 269 aa, Unidentified
AQSVPWGISRVQAPAAHNRGLTGSGVKVAVLDTGISTHPDLNIRGGASFVPGEPSTQDGNGHGTHVAGTIAALDNQIGVLGVAPRAELYAVKVLGASGSGSVSSIAQGLEWAGNNRMHVANLSLGLQAPSATLEQAVNSATSRGVLVVAASGNSGAGSISYPARYANAMAVGATDQNNNRASFSQYGAGLDIVAPGVNVYSTYPGSTYASLNGTSMATPHVAGAAALVKQKNPSWSNVQIRNHLKNTATSLGSTNLYGSGLVNAEAATR

SEQ ID NO: 59357 - protein, 269 aa, Unidentified
AQSVPWGISRVQAPAAHNRGLTGSGVKVAVLDTGISTHPDLNIRGGASFVPGEPSTQDGNGHGTHVAGTIAALDNRIGVLGVAPRAELYAVKVLGASGSGSVSSIAQGLEWAGNNRMHVANLSLGLQAPSATLEQAVNSATSRGVLVVAASGNSGAGSISYPARYANAMAVGATDQNNNRASFSQYGAGLDIVAPGVNVRSTYPGSTYASLNGTSMATPHVAGAAALVKQKNPSWSNVQIRNHLKNTATSLGSTNLYGSGLVNAEAATR

SEQ ID NO: 59358 - protein, 269 aa, Unidentified
AQSVPWGISRVQAPAAHNRGLTGSGVKVAVLDTGISTHPDLNIRGGASFVPGEPSTQDGNGHGTHVAGTIAALDNQIGVLGVAPRAELYAVKVLGASGSGSVSSIAQGLEWAGNNRMHVANLSLGLQAPSATLEQAVNSATSRGVLVVAASGNSGAGSISYPARYANAMAVGATDQNNNRASFSQYGAGLDIVAPGVNVRSTYPGSTYASLNGTSMATPHVAGAAALVKQKNPSWSNVQIRNHLKNTATSLGSTNLYGSGLVNAEAATR

SEQ ID NO: 59359 - protein, 269 aa, Unidentified
AQSVPWGISRVQAPAAHNRGLTGSGVKVAVLDTGISTHPDLNIRGGASFVPGEPSTQDGNGHGTHVAGTIAALDNQIGVLGVAPRAELYAVKVLGASGSGSVSSIAQGLEWAGNNRMHVANLSLGLQAPSATLEQAVNSATSRGVLVVAASGNSGAGSISYPARYANAMAVGATDQNNNRASFSQYGAGLDIVAPGVNVNSTYPGSTYASLNGTSMATPHVAGAAALVKQKNPSWSNVQIRNHLKNTATSLGSTNLYGSGLVNAEAATR

SEQ ID NO: 59360 - protein, 269 aa, Unidentified
AQSVPWGISRVQAPAAHNRRLTGRGVKVAVLDTGISTHPDLNIRGGASFVPGEPSTQDGNGHGTHVAGTIAALNNNIGVLGVAPSAELYAVKVLSASGGGSVSSIAQGLEWAGNNGMHVANLSLGAPSPSATLEQAVNSATSRGVLVVAASGNSGAGSISYPARYANAMAVGATDQNNNRASFSQYGAGLDIVAPGVSVQSTYPGSTYASQNGTSMATPHVAGAAALVKQKNPSWSNVQIRNHLKNTATSLGSTNLYGSGLVNAEAATR

SEQ ID NO: 59361 - protein, 269 aa, Unidentified
AQSVPWGISRVQAPAAHNRGLAGFGVKVAVLDTGISTHPDLNIRGGASFVPGEPSTQDGNGHGTHVAGTIAALNNSIGVLGVAPSAELYAVKVLGASGGGAISSIAQGLEWAGLNGMHVANLSLGSPSPSATLEQAVNSATSRGVLVVAASGNSGAGSISYPARYANAMAVGATDQNNNRASFSQYGAGLDIVAPGVNVQSTVPGSTYASLNGTSMATPHVAGAAVLVKQKNPSWSNVQIRNHLKNTATSLGSTNLYGSGLVNAEAATR

SEQ ID NO: 59362 - protein, 269 aa, Unidentified
AQSVPWGISRVQAPAAHNRGLTGRGVKVAVLDTGISTHPDLNIRGGASFVPGEPSTQDGNGHGTHVAGTIAALDNNIGVLGVAPDAELYAVKVLGASGTGSVSSIAQGLEWAGNNRMHVANLSLGSPSPSATLEQAVNSATSRGVLVVAASGNSGAGSISYPARYANAMAVGATDQNNNRASFSQYGAGLDIVAPGVNVQSTWPGSTYASLNGTSQATPHVAGAAALVKQKNPSWSNVQIRNRLKNTATSLGSTNLYGSGLVNAEAATR

SEQ ID NO: 59363 - protein, 269 aa, Unidentified
AQSVPWGISRVQAPAAHNRKLLGSGVKVAVLDTGISTHPDLNIRGGASFVPGEPSTQDGEGHGTHVAGTIAALNNDIGVLGVAPSAELYAVKVLGASGSGSVSSIAQGLEWAGNNDMHVANLSLGSESPSATLEQAVNSATSRGVLVVAASGNSGAGSISYPARYANAMAVGATDQNNNRASFSQYGAGLDIVAPGVNVQSTYPGSTYASLNGTSMATPHVAGAAALVKQKNPSWSNVRIRNRLKNTATSLGSTNLYGSGLVNAEAATR

SEQ ID NO: 59364 - protein, 269 aa, Unidentified
AQSVPWGISRVQAPAAHNRGLTGRGVKVAVLDTGISTHPDLNIRGGASFVPGEPSTQDGEGHGTHVAGTIAALNNGIGVLGVAPSAELYAVKVLGASGSGSVSSIAQGLEWAGNNSMHVANLSLGSESPSATLEQAVNSATSRGVLVVAASGNSGADSISYPARYANAMAVGATDQNNNRASFSQYGAGLDIVAPGVNVQSTYPGSTYASLNGTSMATPHVAGAAALVKQKNPSWSNVQIRDRLKNTATSLGSTNLYGSGLVNAEAATR

SEQ ID NO: 59365 - protein, 269 aa, Unidentified
AQSVPWGISRVQAPAAHNRGLTGSGVKVAVLDTGISTHPDLNIRGGASFVPGEPSTQDGNGHGTHVAGTIAALDNLIGVLGVAPRAELYAVKVLGASGSGSVSSIAQGLEWAGNNRMHVANLSLGLQAPSATLEQAVNSATSRGVLVVAASGNSGAGSISYPARYANAMAVGATDQNNNRASFSQYGAGLDIVAPGVNVDSTYPGSTYASLNGTSMATPHVAGAAALVKQKNPSWSNVQIRNHLKNTATSLGSTNLYGSGLVNAEAATR

SEQ ID NO: 59366 - protein, 269 aa, Unidentified
AQSVPWGISRVQAPAAHNRGLTGSGVKVAVLDTGISTHPDLNIRGGASFVPGEPSTQDGNGHGTHVAGTIAALNNSIGVLGVAPSAELYAVKVLGASGGGAISSIAQGLEWAGLNGMHVANLSLGSPSPSATLEQAVNSATSRGVLVVAASGNSGAGSISYPARYANAMAVGATDQNNNRASFSQYGAGLDIVAPGVNVQSTVPQSAYASLNGTSMATPHVAGAAVLVKQKNPSWSNVQIRNHLKNTATSLGSTNLYGSGLVNAEAATR

SEQ ID NO: 59367 - protein, 269 aa, Unidentified
AQSVPWGISRVQAPAAHNRGLTGSGVKVAVLDTGISTHPDLNIRGGASFVPGEPSTQDGNGHGTHVAGTIAALDNNIGVLGVAPRAELYAVKVLGASGSGSVSSIAQGLEWAGNNRMHVANLSLGLQAPSATLEQAVNSATSRGVLVVAASGNSGAGSISYPARYANAMAVGATDQNNNRASFSQYGAGLDIVAPGVNVLSTYPGSTYASLNGTSMATPHVAGAAALVKQKNPSWSNVQIRNHLKNTATSLGSTNLYGSGLVNAEAATR

SEQ ID NO: 59368 - protein, 269 aa, Unidentified
AQSVPWGISRVQAPAAHNRRLTGRGVKVAVLDTGISTHPDLNIRGGASFVPGEPSTQDGEGHGTHVAGTIAALNNDIGVLGVAPSAELYAVKVLGASGSGSVSSIAQGLEWAGNNSMHVANLSLGSPSPSATLEQAVNSATSRGVLVVAASGNSGAGSISYPARYANAMAVGATDQNNNRASFSQYGAGLDIVAPGVNVQSTYPGSTYASLNGTSMATPHVAGAAALVKQKNPSWSNVRIRDRLKNTATSLGSTNLYGSGLVNAEAATR

SEQ ID NO: 59369 - protein, 269 aa, Unidentified
AQSVPWGISRVQAPAAHRRGLTGSGVKVAVLDTGISTHPDLNIRGGASFVPGEPSTQDGNGHGTHVAGTIAALDNNIGVLGVAPRAELYAVKVLGASGSGSVSSIAQGLEWAGNNGMHVANLSLGLQAPSATLEQAVNSATSRGVLVVAASGNSGAGSISYPARYANAMAVGATDQNNNRASFSQYGAGLDIVAPGVNVLSTYPGSTYASLNGTSMATPHVAGAAALVKQKNPSWSNVQIRNHLKNTATSLGSTNLYGSGLVNAEAATR

SEQ ID NO: 59370 - protein, 269 aa, Unidentified
AQSVPWGISRVQAPAAHNRGLRGSGVKVAVLDTGISTHPDLNIRGGASFVPGEPSTQDGNGHGTHVAGTIAALNNNIGVLGVAPSAELYAVKVLGASGGGAISSIAQGLEWAGLNGMHVANLSLGSPSPSATLEQAVNSATSRGVLVVAASGNSGAGSISYPARYANAMAVGATDQNNNRASFSQYGAGLDIVAPGVNVQSTYPGSTYASLNGTSMATPHVAGAAVLVKQKNPSWSNVRIRNHLKNTATSLGSTNLYGSGLVNAEAATR

SEQ ID NO: 59371 - protein, 269 aa, Unidentified
AQSVPWGISRVQAPAAHNRGLAGSGVKVAVLDTGISTHPDLNIRGGASFVPGEPSTQDGNGHGTHVAGTIAALNNSIGVLGVAPSAELYAVKVLGASGGGAISSIAQGLEWAGNNGMHVANLSLGSPSPSATLEQAVNSATSRGVLVVAASGNSGAGSISYPARYANAMAVGATDQNNNRASFSQYGAGLDIVAPGVNVQSTYPGSTYASLNGTSMATPHVAGAAVLVKQKYPSWSNVRIRNHLKNTATSLGSTNLYGSGLVNVEAATR

SEQ ID NO: 59372 - protein, 269 aa, Unidentified
AQSVPWGISRVQAPAAHNRRLTGRGVKVAVLDTGISIHPDLRITGGASFVPGEPSTQDGNGHGTHVAGTIAALDNSIGVLGVAPSAELYAVKVLGASGSGSVSSIAQGLEWAGNNGMHVANLSLGSPSPSATLEQAVNSATSRGVLVVAASGNSGAGSISYPARYANAMAVGATDQNNNRASFSQYGAGLDIVAPGVNVQSTYPGSTYASLNGTSMATPHVAGAAALVKQKNPSWRNVQIRNRLKNTATSLGSTNLYGSGLVNAEAATR

SEQ ID NO: 59373 - protein, 269 aa, Unidentified
AQSVPWGISRVQAPAAHNRKLTGGGVKVAVLDTGISTHPDLNIRGGASFVPGEPSTQDGEGHGTHVAGTIAALNNSIGVLGVAPSAELYAVKVLSASGQGSVSSIAGGLEWAGLNGMHVANLSLGSPSPSATLEQAVNSATSRGVLVVAASGNSGAGSISYPARYANAMAVGATDQNNNRADFSQYGAGLDIVAPGVNVQSTYPGSTYASLNGTSMATPHVAGAAALVKQKNPSWSNVQIRNHLKNTATSLGSTNLYGSGLVNAEAATR

SEQ ID NO: 59374 - protein, 269 aa, Unidentified
AQSVPWGISRVQAPAAHNRGLAGRGVKVAVLDSGISTHPDLNIRGGASFVPGEPSTQDGEGHGTHVAGTIAALNNSIGVLGVAPSAELYAVKVLGASGSGSVSSIAQGLEWAGLNRMHVANLSLGSESPSATLEQAVNSATSRGVLVVAASGNSGAGSISYPARYANAMAVGATDQNNNRADFSQYGAGLDIVAPGVNVQSTYPGSTYASLNGTSMATPHVAGAAALVKQKNPSWSNVQIRNHLKNTATSLGSTNLYGSGLVNAEAATR

SEQ ID NO: 59375 - protein, 269 aa, Unidentified
AQSVPWGISRVQAPAAHNRRLTGRGVKVAVLDTGISTHPDLNIRGGASFVPGEPSTQDGNGHGTHVAGTIAALNNGIGVLGVAPSAELYAVKVLGASGSGSVSSIAQGLEWAGNNSMHVANLSLGSESPSATLEQAVNSATSRGVLVVAASGNSGADSISYPARYANAMAVGATDQNNNRADFSQYGAGLDIVAPGVNVQSTYPGSTYASLNGTSMATPHVAGAAALVKQKNPSWSNVQIRDHLKNTATSLGSTNLYGSGLVNAEAATR

SEQ ID NO: 59376 - protein, 269 aa, unidentified
AQSVPWGIERVQAPAAHNRGLTGSGVKVAVLDTGISTHPDLRIRGGASFVPGEPSTQDGNGHGTHVAGTIAALNNSIGVLGVAPSAELYAVKVLGASGSGSVSSIAQGLEWAGNNGMHVANLSLGSPSPSATLEQAVNSATSRGVLVVAASGNSGAGSISYPARYANAMAVGATDQNNNRASFSQYGAGLDIVAPGVNLLSTWPGSTYASLNGTSMATPHVAGAAALVKQKNPSWSNVQIRNHLKNTATSLGDTWEYGSGLVNAEAATR

SEQ ID NO: 59377 - protein, 269 aa, Unidentified
AQSVPWGISRVQAPAAHNRGLAGSGVKVAVLDTGISTHPDLNIRGGASFVPGEPSTQDGNGHGTHVAGTIAALNNSIGVLGVAPSAELYAVKVLGASGNGAISSIAGGLEWAGNNGMHVANLSLGSPSPSATLEQAVNSATSRGVLVVAASGNSGAGSISYPARYANAMAVGATDQNNNRASFSQYGAGLDIVAPGVNVQSTYPGSTYASQNGTSMATPHVAGAAVLVKQKNPSWSNVRIRNHLKNTATSLGSTNLYGSGLVNAEAATR

SEQ ID NO: 59378 - protein, 269 aa, Unidentified
AQSVPWGISRVQAPAAHNRGLTGSGVKVAVLDTGISTHPDLRITGGASFVPGEPSTQDGNGHGTHVAGTIAALDNSIGVLGVAPSAELYAVKVLGASGGGAISSIAQGLEWAGNNGMHVANLSLGSPSPSATLEQAVNSATSRGVLVVAASGNSGAGSISYPARYANAMAVGATDQNNNRASFSQYGAGLDIVAPGVNVQSTYPGSTYASLNGTSMATPHVAGAAVLVKQKNPSWSNVRIRNHLKNTATSLGSTNLYGSGLVNAEAATR

SEQ ID NO: 59379 - protein, 269 aa, Unidentified
AQSVPWGISRVQAPAAHNRGLTGSGVKVAVLDTGISTHPDLNIRGGASFVPGEPSTQDGNGHGTHVAGTIAALNNSIGVLGVAPSAELYAVKVLGASGGGAISSIAQGLEWAGLNVMHVANLSLGSPSPSATLEQAVNSATSRGVLVVAASGNSGAGSISYPARYANAMAVGATDQNNNRASFSQYGAGLDIVAPGVNVQSTAPGSAYASLNGTSMATPHVAGAAVLVKQKNPSWSNVQIRNHLKNTATSLGSTNLYGSGLVNAEAATR

SEQ ID NO: 59380 - protein, 269 aa, Unidentified
AQSVPWGISRVQAPAAHRRGLWGRGVKVAVLDTGISTHPDLNIRGGASFVPGEPSTQDGNGHGTHVAGTIAALDNSIGVLGVAPSAELYAVKVLGASGAGSVSSIAQGLEWAGANGMHVANLSLGSPSPSATLEQAVNSATSRGVLVVAASGNSGAGSISYPARYANAMAVGATDQDNNRASFSQYGAGLDIVAPGVNVQSTYPGSTYASLNGTSMATPHVAGAAALVKQKNPSWSNVQIRNRLKNTATSLGSTNLYGSGLVNAEAATR

SEQ ID NO: 59381 - protein, 269 aa, Unidentified
AQSVPWGISRVQAPAAHNRGLTGFGVKVAVLDTGISTHPDLNIRGGASFVPGEPSTQDGNGHGTHVAGTIAALNNSIGVLGVAPSAELYAVKVLGASGGGAISSIAQGLEWAGLNGMHVANLSLGNPSPSATLEQAVNSATSRGVLVVAASGNSGAGSISYPARYANAMAVGATDQNNNRASFSQYGAGLDIVAPGVNVQSTAPGSTYASLNGTSMATPHVAGAAVLVKQKNPSWSNVQIRNHLKNTATSLGSTNLYGSGLVNAEAATR

SEQ ID NO: 59382 - protein, 269 aa, Unidentified
AQSVPWGISRVQAPAAHNRGLTGSGVKVAVLDTGISTHPDLNIRGGASFVPGEPSTQDGNGHGTHVAGTIAALDNEIGVLGVAPRAELYAVKVLGASGSGSVSSIAQGLEWAGNNRMHVANLSLGLQAPSATLEQAVNSATSRGVLVVAASGNSGAGSISYPARYANAMAVGATDQNNNRASFSQYGAGLDIVAPGVNVSSTYPGSTYASLNGTSMATPHVAGAAALVKQKNPSWSNVQIRNHLKNTATSLGSTNLYGSGLVNAEAATR

SEQ ID NO: 59383 - protein, 269 aa, Unidentified
AQSVPWGISRVQAPAAHNRGLTGSGVKVAVLDTGISTHPDLNIRGGASFVPGEPSTQDGNGHGTHAAGTIAALNNSIGVLGVAPSAELYAVKVLGASGSGAISSIAQGLEWAGNNGMHVANLSLGSPSPSATLEQAVNSATSRGVLVVAASGNSGADSISYPARYANAMAVGATDQNNNRASFSQYGAGLDIVAPGVNVQSTYPGSTYTSLNGTSMATPHVAGAAVLVKHKNPSWSNVRIRNHLKNTATSLGSTNLYGSGLVNAEAATR

SEQ ID NO: 59384 - protein, 269 aa, Unidentified
AQSVPWGISRVQAPAAHNRGLTGSGVKVAVLDTGISTHPDLNIRGGASFVPGEPSTQDGNGHGTHVAGTIAALDNIIGVLGVAPRAELYAVKVLGASGSGSVSSIAQGLEWAGNNRMHVANLSLGLQAPSATLEQAVNSATSRGVLVVAASGNSGAGSISYPARYANAMAVGATDQNNNRASFSQYGAGLDIVAPGVNVNSTYPGSTYASLNGTSMATPHVAGAAALVKQKNPSWSNVQIRNHLKNTATSLGSTNLYGSGLVNAEAATR

SEQ ID NO: 59385 - protein, 269 aa, Unidentified
AQSVPWGISRVQAPAAHRRGLWGRGVKVAVLDTGISTHPDLNIRGGASFVPGEPSTQDGNGHGTHVAGTIAALDNSIGVLGVAPSAELYAVKVLGASGSGSVSSIAQGLEWAGNNGMHVANLSLGSPSPSATLEQAVNSATSRGVLVVAASGNSGAGSISYPARYANAMAVGATDQDNNRASFSQYGAGLDIVAPGVNVQSTYPQSAYASLNGTSMATPHVAGAAALVKQKNPSWSNVQIRNRLKNTATSLGSTNLYGSGLVNAEAATR

SEQ ID NO: 59386 - protein, 269 aa, Unidentified
AQSVPWGISRVQAPAAHNRKLTGSGVKVAVLDTGISTHPDLNIRGGASFVPGEPSTQDGEGHGTHVAGTIAALNNSIGVLGVAPSAELYAVKVLAASGQGSVSSIAGGLEWAGLNGMHVANLSLGSPSPSATLEQAVNSATSRGVLVVAASGNSGAGSISYPARYANAMAVGATDQNNNRADFSQYGAGLDIVAPGVNVQSTYPGSTYASQNGTSMATPHVAGAAALVKQKNPSWSNVQIRNHLKNTATSLGSTNLYGSGLVNAEAATR

SEQ ID NO: 59387 - protein, 269 aa, Unidentified
AQSVPWGISRVQAPAAHNRRLWGRGVKVAVLDTGISTHPDLNITGGASFVPGEPSTQDGNGHGTHVAGTIAALNNSIGVLGVAPSAELYAVKVLGASGAGSVSSIAQGLEWAGNNGMHVANLSLGSPSPSATLEQAVNSATSRGVLVVAASGNSGAGSISYPARYANAMAVGATDQNNNRASFSQYGAGLDIVAPGVSVQSTYIQSTYASLNGTSMATPHVAGAAALVKQKNPSWSNVQIRNHLKNTATSLGSTNLYGSGLVNAEAATR

SEQ ID NO: 59388 - protein, 269 aa, Unidentified
AQSVPWGISRVQAPAAHNRGLTGSGVKVAVLDTGISTHPDLNIRGGASFVPGEPSTQDGNGHGTHVAGTIAALDNVIGVLGVAPRAELYAVKVLGASGSGSVSSIAQGLEWAGNNRMHVANLSLGLQAPSATLEQAVNSATSRGVLVVAASGNSGAGSISYPARYANAMAVGATDQNNNRASFSQYGAGLDIVAPGVNVMSTYPGSTYASLNGTSMATPHVAGAAALVKQKNPSWSNVQIRNHLKNTATSLGSTNLYGSGLVNAEAATR

SEQ ID NO: 59389 - protein, 269 aa, Unidentified
AQSVPWGISRVQAPAAHNRRLTGRGVKVAVLDTGISTHPDLNIRGGASFVPGEPSTQDGEGHGTHVAGTIAALNNDIGVLGVAPSAELYAVKVLGASGSGSVSSIAQGLEWAGNNDMHVANLSLGSESPSATLEQAVNSATSRGVLVVAASGNSGADSISYPARYANAMAVGATDQNNNRADFSQYGAGLDIVAPGVNVQSTYPGSTYASLNGTSMATPHVAGAAALVKQKNPSWSNVQIRNHLKNTATSLGSTNLYGSGLVNAEAATR

SEQ ID NO: 59390 - protein, 269 aa, Unidentified
AQSVPWGISRVQAPAAHRRGLTGRGVKVAVLDTGISTHPDLNIRGGASFVPGEPSTQDGNGHGTHVAGTIAALDNSIGVLGVAPSAELYAVKVLGASGAGSVSSIAQGLEWAGNNGMHVANLSLGSPSPSATLEQAVNSATSRGVLVVAASGNSGAGSISYPARYANAMAVGATDQNNNRASFSQYGAGLDLVAPGVNVQSTYPQSTYVSLNGTSMATPHVAGAAALVKQKNPSWSNVQIRNRLKNTATSLGSTNLYGSGLVNAEAATR

SEQ ID NO: 59391 - protein, 269 aa, Unidentified
AQSVPWGISRVQAPAAHNRGLTGSGVKVAVLDTGISTHPDLNIRGGASFVPGEPSTQDGNGHGTHVAGTIAALDNMIGVLGVAPRAELYAVKVLGASGSGSVSSIAQGLEWAGNNRMHVANLSLGLQAPSATLEQAVNSATSRGVLVVAASGNSGAGSISYPARYANAMAVGATDQNNNRASFSQYGAGLDIVAPGVNVYSTYPGSTYASLNGTSMATPHVAGAAALVKQKNPSWSNVQIRNHLKNTATSLGSTNLYGSGLVNAEAATR

SEQ ID NO: 59392 - protein, 269 aa, Unidentified
AQSVPWGISRVQAPAAHRRGLTGRGVKVAVLDTGISTHPDLNIRGGASFVPGEPSTQDGNGHGTHVAGTIAALDNSIGVLGVAPSAELYAVKVLGASGSGSVSSIAQGLEWAGANGMHVANLSLGSPSPSATLEQAVNSATSRGVLVVAASGNSGAGSISYPARYANAMAVGATDQDNNRASFSQYGAGLDLVAPGVNVQSTYPQSTYASLNGTSMATPHVAGAAALVKQKNPSWSNVQIRNRLKNTATSLGSTNLYGSGLVNAEAATR

SEQ ID NO: 59393 - protein, 269 aa, Unidentified
AQSVPWGISRVQAPAAHNRKLTGGGVKVAVLDTGISTHPDLNIRGGASFVPGEPSTQDGEGHGTHVAGTIAALNNSIGVLGVAPSAELYAVKVLAASGNGSVSSIAQGLEWAGLNGMHVANLSLGAPSPSATLEQAVNSATSRGVLVVAASGNSGAGSISYPARYANAMAVGATDQNNNRADFSQYGAGLDIVAPGVNVQSTYPGSTYASLNGTSMATPHVAGAAALVKQKNPSWSNVQIRNHLKNTATSLGSTNLYGSGLVNAEAATR

SEQ ID NO: 59394 - protein, 269 aa, Unidentified
AQSVPWGISRVQAPAAHNRRLTGRGVKVAVLDTGISTHPDLRIRGGASFVPGEPSTQDGNGHGTHVAGTIAALNNSIGVLGVAPSAELYAVKVLGASGGGAISSIAQGLEWAGNNGMHVANLSLGSPSPSATLEQAVNSATSRGVLVVAASGNSGAGSISYPARYANAMAVGATDQNNNRASFSQYGAGLDIVAPGVNVQSTYPGSTYASLNGTSMATPHVAGAAVLVKQKNPSWSNVRIRNHLKNTATSLGSTNLYGSGLVNAEAATR

SEQ ID NO: 59395 - protein, 269 aa, Unidentified
AQSVPWGISRVQAPAAHNRGLAGSGVKVAVLDTGISTHPDLNIRGGASFVPGEPSTQDGNGHGTHVAGTIAALNNSIGVLGVAPSAELYAVKVLGASGGGAISSIAQGLEWAGNNGMHVANLSLGAPSPSATLEQAVNSATSRGVLVVAASGNSGAGSISYPARYANAMAVGATDQNNNRASFSQYGAGLDIVAPGVNVQSTYPGSTYASQNGTSMATPHVAGAAVLVKQKNPSWSNVRIRNHLKNTATSLGSTNLYGSGLVNAEAATR

SEQ ID NO: 59396 - protein, 269 aa, Unidentified
AQSVPWGISRVQAPAAHRRRLTGRGVKVAVLDTGISTHPDLNIRGGASFVPGEPSTQDGNGHGTHVAGTIAALDNSIGVLGVAPSAELYAVKVLGASGAGSVSSIAQGLEWAGNNGMHVANLSLGSPSPSATLEQAVNSATSRGVLVVAASGNSGAGSISYPARYANAMAVGATDQDNNRASFSQYGAGLDLVAPGVNVQSTYPGSTYASLNGTSMATPHVAGAAALVKQKNPSWSNVQIRNRLKNTATSLGSTNLYGSGLVNAEAATR

SEQ ID NO: 59397 - protein, 269 aa, Unidentified
AQSVPWGISRVQAPAAHNRRLTGSGVKVAVLDTGISTHPDLNIRGGASFVPGEPSTQDGNGHGTHVAGTIAALNNGIGVLGVAPSAELYAVKVLGASGSGSVSSIAQGLEWAGNNSMHVANLSLGSESPSATLEQAVNSATSRGVLVVAASGNSGADSISYPARYANAMAVGATDQNNNRASFSQYGAGLDIVAPGVNVQSTYPGSTYASLNGTSMATPHVAGAAALVKQKNPEWSNVQIRDRLKNTATSLGSTNLYGSGLVNAEAATR

SEQ ID NO: 59398 - protein, 269 aa, Bacillus lentus
AQSVPWGIRRVQAPAAHNLGLTGSGVKVAVLDTGISTHPDLRIRGGASFVPGEPSTQDGDGHGTHVAGTIAALNNSIGVLGVAPSAELYAVKVLGASGSGSVSSIAQGLEWAGNNGMHVANLSLGSPSPSATLEQAVNSATSRGVLVVAASGNSGAGSISYPARYANAMAVGATDQNNNRASFSQYGPGLDIVAPGVNVQSTYPGSTYASLNGTSMATPHVAGAAALVKQKNPSWSNVRIRNHLKNTATSLGDTNLYGSGLVNAEAATQ

SEQ ID NO: 59399 - protein, 269 aa, Unidentified
AQSVPWGISRVQAPAAHNRGLAGSGVKVAVLDTGISTHPDLNIRGGASFVPGEPSTQDGNGHGTHVAGTIAALNNNIGVLGVAPSAELYAVKVLGASGNGAISSIAQGLEWAGNNGMHVANLSLGAPSPSATLEQAVNSATSRGVLVVAASGNSGAGSISYPARYANAMAVGATDQNNNRASFSQYGAGLDIVAPGVNVQSTYPGSTYASLNGTSMATPHVAGAAVLVKQKNPSWSNVRIRNHLKNTATSLGSTNLYGSGLVNAEAATR

SEQ ID NO: 59400 - protein, 269 aa, Unidentified
AQSVPWGISRVQAPAAHNRGLTGSGVKVAVLDTGISTHPDLNIRGGASFVPGEPSTQDGNGHGTHVAGTIAALDNMIGVLGVAPRAELYAVKVLGASGSGSVSSIAQGLEWAGNNRMHVANLSLGLQAPSATLEQAVNSATSRGVLVVAASGNSGAGSISYPARYANAMAVGATDQNNNRASFSQYGAGLDIVAPGVNVDSTYPGSTYASLNGTSMATPHVAGAAALVKQKNPSWSNVQIRNHLKNTATSLGSTNLYGSGLVNAEAATR

SEQ ID NO: 59401 - protein, 269 aa, Unidentified
AQSVPWGISRVQAPAAHRRGLTGSGVKVAVLDTGISTHPDLRIRGGASFVPGEPSTQDGNGHGTHVAGTIAALNNSIGVLGVAPSAELYAVKVLGASGGGAISSIAQGLEWAGNNGMHVANLSLGSPSPSATLEQAVNSATSRGVLVVAASGNSGAGSISYPARYANAMAVGATDQNNNRASFSQYGAGLDIVAPGVNVQSTYPGSTYASLNGTSMATPHVAGAAVLVKQKNPSWSNVRIRNHLKNTATSLGSTNLYGSGLVRAEAATR

SEQ ID NO: 59402 - protein, 269 aa, Unidentified
AQSVPWGISRVQAPAAHNRRLTGRGVKVAVLDTGISTHPDLNIRGGASFVPGEPSTQDGEGHGTHVAGTIAALNNDIGVLGVAPSAELYAVKVLGASGSGSVSSIAQGLEWAGNNDMHVANLSLGSPSPSATLEQAVNSATSRGVLVVAASGNSGADSISYPARYANAMAVGATDQNNNRADFSQYGAGLDIVAPGVNVQSTYPGSTYASLNGTSMATPHVAGAAALVKQKNPSWSNVRIRNHLKNTATSLGSTNLYGSGLVNAEAATR

SEQ ID NO: 59403 - protein, 269 aa, Unidentified
AQSVPWGISRVQAPAVHNRRLTGRGVKVAVLDTGISTHPDLNIRGGASFVPGEPSTQDGNGHGTHVAGTIAALNNDIGVLGVAPSAELYAVKVLGASGSGSVSSIAQGLEWAGNNDMHVANLSLGSESPSATLEQAVNSATSRGVLVVAASGNSGAGSISYPARYANAMAVGATDQNNNRASFSQYGAGLDIVAPGVNVQSTYPGSTYASLNGTSMATPHVAGAAALVKQKNPSWSNVRIRDHLKNTATSLGSTNLYGSGLVNAEAATR

SEQ ID NO: 59404 - protein, 269 aa, Unidentified
AQSVPWGISRVQAPAAHNRGLTGSGVKVAVLDTGISTHPDLNIRGGASFVPGEPSTQDGNGHGTHVAGTIAALDNCIGVLGVAPRAELYAVKVLGASGSGSVSSIAQGLEWAGNNRMHVANLSLGLQAPSATLEQAVNSATSRGVLVVAASGNSGAGSISYPARYANAMAVGATDQNNNRASFSQYGAGLDIVAPGVNVRSTYPGSTYASLNGTSMATPHVAGAAALVKQKNPSWSNVQIRNHLKNTATSLGSTNLYGSGLVNAEAATR

SEQ ID NO: 59405 - protein, 269 aa, Unidentified
AQSVPWGISRVQAPAAHNRKLTGGGVKVAVLDTGISTHPDLNIRGGASFVPGEPSTQDGEGHGTHVAGTIAALNNNIGVLGVAPSAELYAVKVLSASGGGSVSSIANGLEWAGLNGMHVANLSLGSPSPSATLEQAVNSATSRGVLVVAASGNSGAGSISYPARYANAMAVGATDQNNNRASFSQYGAGLDIVAPGVNVQSTYPGSTYASLNGTSMATPHVAGAAALVKQKNPSWSNVQIRNHLKNTATSLGSTNLYGSGLVNAEAATR

SEQ ID NO: 59406 - protein, 269 aa, Unidentified
AQSVPWGISRVQAPAAHRRGLWGRGVKVAVLDTGISTHPDLNIRGGASFVPGEPSTQDGNGHGTHVAGTIAALDNSIGVLGVAPSAELYAVKVLGASGSGSVSSIAQGLEWAGANGMHVANLSLGSPSPSATLEQAVNSATSRGVLVVAASGNSGAGSISYPARYANAMAVGATDQDNNRASFSQYGAGLDLVAPGVNVQSTYPGSTYASLNGTSMATPHVAGAAALVKQKNPSWSNVQIRNRLKNTATSLGSTNLYGSGLVNAEAATR

SEQ ID NO: 59407 - protein, 269 aa, Unidentified
AQSVPWGISRVQAPAAHNRGLTGSGVKVAVLDTGISTHPDLNIRGGASFVPGEPSTQDGNGHGTHVAGTIAALDNHIGVLGVAPRAELYAVKVLGASGSGSVSSIAQGLEWAGNNRMHVANLSLGLQAPSATLEQAVNSATSRGVLVVAASGNSGAGSISYPARYANAMAVGATDQNNNRASFSQYGAGLDIVAPGVNVASTYPGSTYASLNGTSMATPHVAGAAALVKQKNPSWSNVQIRNHLKNTATSLGSTNLYGSGLVNAEAATR

SEQ ID NO: 59408 - protein, 269 aa, Unidentified
AQSVPWGIRRVQAPTAHNRGLTGSGVKVAVLDTGISTHPDLNIRGGASFVPGEPSTQDENGHGTHAAGTIAALNNSIGVLGVAPSAELYAVKVLGSGGSGSVSSIAQGLEWAGNNGMHVANLSLGSPSPSATLEQAVNSATSRGVLVVAASGNSGAGSISYPARYANAMAVGATDQNNNRASFSQYGAGLDIVAPGVNVQSTYPGSTYASLDGTSMATPHVAGAAALVKQKNPSWSNVRIRNHLKNTATSLGSTNLYGSGLVNAEAATR

SEQ ID NO: 59409 - protein, 269 aa, Unidentified
AQSVPWGISRVQAPAAHNRGLAGSGVKVAVLDTGISTHPDLNIRGGASFVPGEPSTQDGNGHGTHVAGTIAALNNNIGVLGVAPSAELYAVKVLGASGGGAISSIANGLEWAGNNGMHVANLSLGSPSPSATLEQAVNSATSRGVLVVAASGNSGAGSISYPARYANAMAVGATDQNNNRASFSQYGAGLDIVAPGVNVQSTYPGSTYASLNGTSMATPHVAGAAVLVKQKNPSWSNVRIRNHLKNTATSLGSTNLYGSGLVNAEAATR

SEQ ID NO: 59410 - protein, 269 aa, Unidentified
AQSVPWGISRVQAPAAHNRGLTGRGVKVAVLDTGISTHPDLNIRGGASFVPGEPSTQDGEGHGTHVAGTIAALNNGIGVLGVAPSAELYAVKVLGASGSGSVSSIAQGLEWAGNNDMHVANLSLGSPSPSATLEQAVNSATSRGVLVVAASGNSGADSISYPARYANAMAVGATDQNNNRASFSQYGAGLDIVAPGVNVQSTYPGSTYASLNGTSMATPHVAGAAALVKQKNPSWSNVRIRDRLKNTATSLGSTNLYGSGLVNAEAATR

SEQ ID NO: 59411 - protein, 269 aa, Unidentified
AQSVPWGISRVQAPAAHNRRLTGRGVKVAVLDTGISTHPDLNIRGGASFVPGEPSTQDGEGHGTHVAGTIAALNNGIGVLGVAPSAELYAVKVLGASGSGSVSSIAQGLEWAGNNDMHVANLSLGSPSPSATLEQAVNSATSRGVLVVAASGNSGAGSISYPARYANAMAVGATDQNNNRADFSQYGAGLDIVAPGVNVQSTYPGSTYASLNGTSMATPHVAGAAALVKQKNPSWSNVRIRNRLKNTATSLGSTNLYGSGLVNAEAATR

SEQ ID NO: 59412 - protein, 269 aa, Unidentified
AQSVPWGISRVQAPAAHNRRLTGRGVKVAVLDTGISTHPDLNIRGGASFVPGEPSTQDGEGHGTHVAGTIAALNNGIGVLGVAPSAELYAVKVLGASGSGSVSSIAQGLEWAGNNDMHVANLSLGSESPSATLEQAVNSATSRGVLVVAASGNSGADSISYPARYANAMAVGATDQNNNRASFSQYGAGLDIVAPGVNVQSTYPGSTYASLNGTSMATPHVAGAAALVKQKNPSWSNVQIRNRLKNTATSLGSTNLYGSGLVNAEAATR

SEQ ID NO: 59413 - protein, 269 aa, Unidentified
AQSVPWGISRVQAPAAHNRRLTGSGVKVAVLDTGISTHPDLNIRGGASFVPGEPSTQDGEGHGTHVAGTIAALNNDIGVLGVAPSAELYAVKVLGASGSGSVSSIAQGLEWAGNNSMHVANLSLGSPSPSATLEQAVNSATSRGVLVVAASGNSGAGSISYPARYANAMAVGATDQNNNRADFSQYGAGLDIVAPGVNVQSTYPGSTYASLNGTSMATPHVAGAAALVKQKNPSWSNVRIRDRLKNTATSLGSTNLYGSGLVNAEAATR

SEQ ID NO: 59414 - protein, 269 aa, Unidentified
AQSVPWGISRVQAPAAHNRGLTGSGVKVAVLDTGISTHPDLNIRGGASFVPGEPSTQDGNGHGTHAAGTIAALDNSIGVLGVAPSAELYAVKVLGASGSGAISSIAQGLEWAGNKGMHVANLSLGSPSPSATLEQAVNSATSRGVLVVAASGNSGADSISYPARYANAMAVGATDQNSNRASFSQYGAGLDIVAPGVNVQSTYPGSTYASLNGTSMATPHVAGAAALVKHKNPSWSNVQIRNHLKNTATSLGSTNLYGSGLVNAEAATR

SEQ ID NO: 59415 - protein, 269 aa, Unidentified
AQSVPWGISRVQAPAAHNRRLTGRGVKVAVLDTGISTHPDLNITGGASFVPGEPSTQDGNGHGTHVAGTIAALNNSIGVLGVAPSAELYAVKVLGASGAGSVSSIARGLEWAGNNGMHVANLSLGSPSPSATLEQAVNSATSRGVLVVAASGNSGAGSISYPARYANAMAVGATDQNNNRASFSQYGAGLDIVAPGVNVQSTYIQSAYASLNGTSMATPHVAGAAALVKQKNPSWSNVQIRNHLKNTATSLGSTNLYGSGLVNAEAATR

SEQ ID NO: 59416 - protein, 269 aa, Unidentified
AQSVPWGISRVQAPAAHNRGLTGSGVKVAVLDSGISTHPDLNIRGGASFVPGEPSTQDGNGHGTHVAGTIAALNNSIGVLGVAPSAELYAVKVLGASGGGAISSIAQGLEWAGANGMHVANLSLGSPSPSATLEQAVNSATSRGVLVVAASGNSGAGSISYPARYANAMAVGATDQNNNRASFSQYGAGLDIVAPGVNVQSTAPGSAYASLNGTSMATPHVAGAAVLVKQKNPSWSNVQIRNHLKNTATSLGSTNLYGSGLVNAEAATR

SEQ ID NO: 59417 - protein, 269 aa, Unidentified
AQSVPWGISRVQAPAAHRRGLTGRGVKVAVLDTGISTHPDLNIRGGASFVPGEPSTQDGNGHGTHVAGTIAALDNSIGVLGVAPSAELYAVKVLGASGSGSVSSIAQGLEWAGANGMHVANLSLGSPSPSATLEQAVNSATSRGVLVVAASGNSGAGSISYPARYANAMAVGATDQNNNRASFSQYGAGLDIVAPGVNVQSTYPQSAYFSLNGTSMATPHVAGAAALVKQKNPSWSNVQIRNRLKNTATSLGSTNLYGSGLVNAEAATR

SEQ ID NO: 59418 - protein, 269 aa, Unidentified
AQSVPWGISRVQAPAAHNRGLTGSGVKVAVLDTGISTHPDLNIRGGASFVPGEPSTQDGNGHGTHVAGTIAALNNSIGVLGVAPSAELYAVKVLGASGGGSIASIAQGLEWAGNNGMHVANLSLGSPSPSATLEQAVNSATSRGVLVVAASGNSGEGSISYPARYANAMAVGATDQNNNRADFSQYGAGLDIVAPGVNVQSTYPGSTYASLNGTSMATPHVAGAAVLVKQKNPSWSNVRIRDHLKNTATSLGSTNLYGSGLVNAEAATR

SEQ ID NO: 59419 - protein, 269 aa, Unidentified
AQSVPWGISRVQAPAAHNRKLTGGGVKVAVLDTGISTHPDLNIRGGASFVPGEPSTQDGEGHGTHVAGTIAALNNSIGVLGVAPSAELYAVKVLSASGNGSVSSIAGGLEWAGLNGMHVANLSLGAPSPSATLEQAVNSATSRGVLVVAASGNSGAGSISYPARYANAMAVGATDQNNNRADFSQYGAGLDIVAPGVNVQSTYPGSTYASLNGTSSATPHVAGAAALVKQKNPSWSNVQIRNHLKNTATSLGSTNLYGSGLVNAEAATR

SEQ ID NO: 59420 - protein, 269 aa, Unidentified
AQSVPWGISRVQAPAAHNRGLTGSGVKVAVLDTGISTHPDLNIRGGASFVPGEPSTQDGNGHGTHVAGTIAALDNMIGVLGVAPRAELYAVKVLGASGSGSVSSIAQGLEWAGNNRMHVANLSLGLQAPSATLEQAVNSATSRGVLVVAASGNSGAGSISYPARYANAMAVGATDQNNNRASFSQYGAGLDIVAPGVNVHSTYPGSTYASLNGTSMATPHVAGAAALVKQKNPSWSNVQIRNHLKNTATSLGSTNLYGSGLVNAEAATR

SEQ ID NO: 59421 - protein, 269 aa, Unidentified
AQSVPWGISRVQAPAAHNRGLTGSGVKVAVLDTGISTHPDLNITGGASFVPGEPSTQDGNGHGTHVAGTIAALNNRIGVLGVAPSAELYAVKVLGASGGGAISSIAQGLEWAGNNGMHVANLSLGSPSPSATLEQAVNSATSRGVLVVAASGNSGAGSISYPARYANAMAVGATDQNNNRASFSQYGAGLDIVAPGVNVQSTYPGSTYASLNGTSMATPHVAGAAVLVKQKNPSWSNVRIRNRLKNTATSLGSTNLYGSGLVNAEAATR

SEQ ID NO: 59422 - protein, 269 aa, Unidentified
AQSVPWGISRVQAPAAHNRGLTGRGVKVAVLDTGISTHPDLNIRGGASFVPGEPSTQDGEGHGTHVAGTIAALNNDIGVLGVAPSAELYAVKVLGASGSGSVSSIAQGLEWAGNNSMHVANLSLGSESPSATLEQAVNSATSRGVLVVAASGNSGADSISYPARYANAMAVGATDQNNNRASFSQYGAGLDIVAPGVNVQSTYPGSTYASLNGTSMATPHVAGAAALVKQKNPSWSNVQIRDRLKNTATSLGSTNLYGSGLVNAEAATR

SEQ ID NO: 59423 - protein, 269 aa, Unidentified
AQSVPWGISRVQAPAAHRRGLTGRGVKVAVLDTGISTHPDLNIRGGASFVPGEPSTQDGNGHGTHVAGTIAALDNSIGVLGVAPSAELYAVKVLGASGSGSVSSIAQGLEWAGANGMHVANLSLGSPSPSATLEQAVNSATSRGVLVVAASGNSGAGSISYPARYANAMAVGATDQNNNRASFSQYGAGLDLVAPGVNVQSTYPQSAYASLNGTSMATPHVAGAAALVKQKNPSWSNVQIRNRLKNTATSLGSTNLYGSGLVNAEAATR

SEQ ID NO: 59424 - protein, 269 aa, Unidentified
AQSVPWGISRVQAPAAHNRRLTGRGVKVAVLDTGISTHPDLNIRGGASFVPGEPSTQDGEGHGTHVAGTIAALNNDIGVLGVAPSAELYAVKVLGASGSGSVSSIAQGLEWAGNNDMHVANLSLGSPSPSATLEQAVNSATSRGVLVVAASGNSGADSISYPARYANAMAVGATDQNNNRADFSQYGAGLDIVAPGVNVQSTYPGSTYASLNGTSMATPHVAGAAALVKQKNPSWSNVQILNHLKNTATSLGSTNLYGSGLVNAEAATR

SEQ ID NO: 59425 - protein, 269 aa, Unidentified
AQSVPWGIERVQAPAAHNRGLTGSGVKVAVLDTGISTHPDLRIRGGASFVPGEPSTQDGNGHGTHVAGTAAALDNSIGVLGVAPSAELYAVKVLGASGSGSVSSIAQGLEWAGNNGMHVANLSLGSPSPSATLEQAVNSATSRGVLVVAASGNSGEPSISYPARYANAMAVGATDQNNNRASFSQYGPGLDIVAPGVNVQSTYPGSTYASLNGTSMATPHVAGAAALVKQKNPSWSNVQIRNHLKNTATSLGSTNEYGSGLVNAEAATR

SEQ ID NO: 59426 - protein, 269 aa, Unidentified
AQSVPWGISRVQAPAAHNRGLAGSGVKVAVLDTGISTHPDLNIRGGASFVPGEPSTQDGNGHGTHVAGTIAALDNSIGVLGAAPSAELYAVKVLGASGGGAISSIAQGLEWAGNNGMHVANLSLGSPSPSATLEQAVNSATSRGVLVVAASGNSGAGSISYPARYANAMAVGATDQNNNRASFSQYGAGLDIVAPGVNVQSTYPGSTYASLNGTSMATPHVAGAAVLVKQKNPSWSNVRIRNHLKNTATSLGSTNLYGSGLVNAEAATR

SEQ ID NO: 59427 - protein, 269 aa, Unidentified
AQSVPWGISRVQAPAAHNRGLAGSGVKVAVLDTGISTHPDLNIRGGASFVPGEPSTQDGNGHGTHVAGTIAALNNNIGVLGVAPSAELYAVKVLSASGQGAISSIAQGLEWAGNNGMHVANLSLGSPSPSATLEQAVNSATSRGVLVVAASGNSGAGSISYPARYANAMAVGATDQNNNRASFSQYGAGLDIVAPGVNVQSTYPGSTYASLNGTSMATPHVAGAAVLVKQKNPSWSNVRIRNHLKNTATSLGSTNLYGSGLVNAEAATR

SEQ ID NO: 59428 - protein, 269 aa, Unidentified
AQSVPWGISRVQAPAAHNRGLAGSGVKVAVLDTGISTHPDLNIRGGASFVPGEPSTQDGNGHGTHVAGTIAALNNSIGVLGVAPSAELYAVKVLGASGGGAISSIANGLEWAGNNGMHVANLSLGAPSPSATLEQAVNSATSRGVLVVAASGNSGAGSISYPARYANAMAVGATDQNNNRASFSQYGAGLDIVAPGVNVQSTYPGSTYASLNGTSMATPHVAGAAVLVKQKNPSWSNVRIRNHLKNTATSLGSTNLYGSGLVNAEAATR

SEQ ID NO: 59429 - protein, 269 aa, Unidentified
AQSVPWGISRVQAPAAHNRGLTGRGVKVAVLDTGISTHPDLNIRGGASFVPGEPSTQDGNGHGTHVAGTIAALDNSIGVLGVAPSAELYAVKVLGASGAGAISSIAQGLEWAGNNGMHVANLSLGSPSPSATLEQAVNSATSRGVLVVAASGNSGAGSISYPARYANAMAVGATDQNNNRADFSQYGAGLDIVAPGVNVQSTYPGSTYASLNGTSMATPHVAGAAVLVKQKNPSWSNVRIRNHLKNTATSLGSTNLYGSGLVNAEAATR

SEQ ID NO: 59430 - protein, 269 aa, Unidentified
AQSVPWGISRVQAPAAHRRGLTGSGVKVAVLDTGISTHPDLNIRGGASFVPGEPSTQDGNGHGTHVAGTIAALNNRIGVLGVAPSAELYAVKVLGASGGGAISSIAQGLEWAGNNGMHVANLSLGSPSPSATLEQAVNSATSRGVLVVAASGNSGAGSISYPARYANAMAVGATDQNNNRASFSQYGAGLDIVAPGVNVQSTYPGSTYASENGTSMATPHVAGAAVLVKQKNPSWSNVRIRNHLKNTATSLGSTNLYGSGLVNAEAATR

SEQ ID NO: 59431 - protein, 269 aa, Unidentified
AQSVPWGISRVQAPAAHNRGLTGSGVKVAVLDTGISTHPDLNIRGGASFVPGEPSTQDGNGHGTHVAGTIAALDNFIGVLGVAPRAELYAVKVLGASGSGSVSSIAQGLEWAGNNRMHVANLSLGLQAPSATLEQAVNSATSRGVLVVAASGNSGAGSISYPARYANAMAVGATDQNNNRASFSQYGAGLDIVAPGVNVMSTYPGSTYASLNGTSMATPHVAGAAALVKQKNPSWSNVQIRNHLKNTATSLGSTNLYGSGLVNAEAATR

SEQ ID NO: 59432 - protein, 269 aa, Unidentified
AQSVPWGISRVQAPAAHNRRLTGSGVKVAVLDTGISTHPDLNIRGGASFVPGEPSTQDGNGHGTHVAGTIAALNNDIGVLGVAPSAELYAVKVLGASGSGSVSSIAQGLEWAGNNSMHVANLSLGSESPSATLEQAVNSATSRGVLVVAASGNSGADSISYPARYANAMAVGATDQNNNRADFSQYGAGLDIVAPGVNVQSTYPGSTYASLNGTSMATPHVAGAAALVKQKNPSWSNVRIRDHLKNTATSLGSTNLYGSGLVNAEAATR

SEQ ID NO: 59433 - protein, 269 aa, Unidentified
AQSVPWGISRVQAPAAHNRGLTGSGVKVAVLDTGISTHPDLNIRGGASFVPGEPSTQDGNGHGTHVAGTIAALDNRIGVLGVAPRAELYAVKVLGASGSGSVSSIAQGLEWAGNNRMHVANLSLGLQAPSATLEQAVNSATSRGVLVVAASGNSGAGSISYPARYANAMAVGATDQNNNRASFSQYGAGLDIVAPGVNVPSTYPGSTYASLNGTSMATPHVAGAAALVKQKNPSWSNVQIRNHLKNTATSLGSTNLYGSGLVNAEAATR

SEQ ID NO: 59434 - protein, 269 aa, Unidentified
AQSVPWGISRVQAPAAHNRGLTGSGVKVAVLDTGISTHPDLNIRGGASFVPGEPSTQDGNGHGTHVAGTIAALDNKIGVLGVAPRAELYAVKVLGASGSGSVSSIAQGLEWAGNNRMHVANLSLGLQAPSATLEQAVNSATSRGVLVVAASGNSGAGSISYPARYANAMAVGATDQNNNRASFSQYGAGLDIVAPGVNVMSTYPGSTYASLNGTSMATPHVAGAAALVKQKNPSWSNVQIRNHLKNTATSLGSTNLYGSGLVNAEAATR

SEQ ID NO: 59435 - protein, 269 aa, Unidentified
AQSVPWGISRVQAPAAHRRGLTGRGVKVAVLDTGISTHPDLNIRGGASFVPGEPSTQDGNGHGTHVAGTIAALDNSIGVLGVAPSAELYAVKVLGASGAGSVSSIAQGLEWAGNNGMHVANLSLGSPSPSATLEQAVNSATSRGVLVVAASGNSGAGSISYPARYANAMAVGATDQNNNRASFSQYGAGLDLVAPGVNVQSTYPQSTYFSLNGTSMATPHVAGAAALVKQKNPSWSNVQIRNRLKNTATSLGSTNLYGSGLVNAEAATR

SEQ ID NO: 59436 - protein, 269 aa, Unidentified
AQSVPWGISRVQAPAAHRRRLTGRGVKVAVLDTGISTHPDLNIRGGASFVPGEPSTQDGNGHGTHVAGTIAALDNSIGVLGVAPSAELYAVKVLGASGSGSVSSIAQGLEWAGANGMHVANLSLGSPSPSATLEQAVNSATSRGVLVVAASGNSGAGSISYPARYANAMAVGATDQDNNRASFSQYGAGLDIVAPGVNVQSTYPGSTYFSLNGTSMATPHVAGAAALVKQKNPSWSNVQIRNRLKNTATSLGSTNLYGSGLVNAEAATR

SEQ ID NO: 59437 - protein, 269 aa, Unidentified
AQSVPWGISRVQAPAAHNRGLTGSGVKVAVLDTGISTHPDLNIRGGASFVPGEPSTQDGNGHGTHVAGTIAALDNNIGVLGVAPRAELYAVKVLGASGSGSVSSIAQGLEWAGNNRMHVANLSLGLQAPSATLEQAVNSATSRGVLVVAASGNSGAGSISYPARYANAMAVGATDQNNNRASFSQYGAGLDIVAPGVNVQSTYIGSTYASLNGTSMATPHVAGAAALVKQKNPSWSNVQIRNHLKNTATSLGSTNLYGSGLVNAEAATR

SEQ ID NO: 59438 - protein, 269 aa, Unidentified
AQSVPWGISRVQAPAAHNRRLTGSGVKVAVLDTGISTHPDLNIRGGASFVPGEPSTQDGEGHGTHVAGTIAALNNGIGVLGVAPSAELYAVKVLGASGSGSVSSIAQGLEWAGNNSMHVANLSLGSESPSATLEQAVNSATSRGVLVVAASGNSGADSISYPARYANAMAVGATDQNNNRADFSQYGAGLDIVAPGVNVQSTYPGSTYASLNGTSMATPHVAGAAALVKQKSPSWSNVQIRNHLKNTATSLGSTNLYGSGLVNAEAATR

SEQ ID NO: 59439 - protein, 269 aa, Unidentified
AQSVPWGISRVQAPAAHNRGLTGRGVKVAVLDTGISTHPDLNIRGGASFVPGEPSTQDGNGHGTHVAGTIAALDNNIGVLGVAPSAELYAVKVLGASGSGSVSSIAQGLEWAGNNGMHVANLSLGLQAPSATLEQAVNSATSRGVLVVAASGNSGAGSISYPARYANAMAVGATDQNNNRASFSQYGAGLDIVAPGVNVLSTYPGSTYASLNGTSMATPHVAGAAALVKQKNPSWSNVQIRNRLKNTATSLGSTNLYGSGLVNAEAATR

SEQ ID NO: 59440 - protein, 269 aa, Unidentified
AQSVPWGISRVQAPAAHRRGLWGRGVKVAVLDTGISTHPDLNIRGGASFVPGEPSTQDGNGHGTHVAGTIAALDNSIGVLGVAPSAELYAVKVLGASGAGSVSSIAQGLEWAGNNGMHVANLSLGSPSPSATLEQAVNSATSRGVLVVAASGNSGAGSISYPARYANAMAVGATDQNNNRASFSQYGAGLDIVAPGVNVQSTYPGSAYFSLNGTSMATPHVAGAAALVKQKNPSWSNVQIRNRLKNTATSLGSTNLYGSGLVNAEAATR

SEQ ID NO: 59441 - protein, 269 aa, Unidentified
AQSVPWGISRVQAPAAHNRKLTGSGVKVAVLDTGISTHPDLNIRGGASFVPGEPSTQDGEGHGTHVAGTIAALNNNIGVLGVAPSAELYAVKVLGASGQGSVSSIAGGLEWAGLNGMHVANLSLGSPSPSATLEQAVNSATSRGVLVVAASGNSGAGSISYPARYANAMAVGATDQNNNRADFSQYGAGLDIVAPGVNVQSTYPGSTYASQNGTSMATPHVAGAAALVKQKNPSWSNVQIRNHLKNTATSLGSTNLYGSGLVNAEAATR

SEQ ID NO: 59442 - protein, 269 aa, Bacillus clausii
AQSVPWGISRVQAPAAHNRGLTGSGVKVAVLDTGISTHPDLNIRGGASFVPGEPSTQDGNGHGTHVAGTIAALDNSIGVLGVAPRAELYAVKVLGASGSGSVSSIAQGLEWAGNNRMHVANLSLGLQAPSATLEQAVNSATSRGVLVVAASGNSGAGSISYPARYANAMAVGATDQNNNRADFSQYGAGLDIVAPGVNVQSTYPGSTYASLNGTSMATPHVAGAAALVKQKNPSWSNVQIRRHLKNTATSLGSTNLYGSGLVNAEAATR

SEQ ID NO: 59443 - protein, 269 aa, Unidentified
AQSVPWGISRVQAPAAHNRGLTGFGVKVAVLDSGISTHPDLNIRGGASFVPGEPSTQDGNGHGTHVAGTIAALNNSIGVLGVAPSAELYAVKVLGASGGGAISSIAQGLEWAGANGMHVANLSLGSPSPSATLEQAVNSATSRGVLVVAASGNSGAGSISYPARYANAMAVGATDQNNNRASFSQYGAGLDIVAPGVNVQSTVPGSTYASLNGTSMATPHVAGAAVLVKQKNPSWSNVQIRNHLKNTATSLGSTNLYGSGLVNAEAATR

SEQ ID NO: 59444 - protein, 269 aa, Unidentified
AQSVPWGISRVQAPAAHNRRLTGRGVKVAVLDTGISTHPDLNIRGGASFVPGEPSTQDGEGHGTHVAGTIAALNNDIGVLGVAPSAELYAVKVLGASGSGSVSSIAQGLEWAGNNDMHVANLSLGSPSPSATLEQAVNSATSRGVLVVAASGNSGADSISYPARYANAMAVGATDQNNNRADFSQYGAGLDIVAPGVNVQSTYPGSTYASLNGTSMATPHVAGAAALVKQKNPSWSNVQIRNRLKNTATSLGSTNLYGSGLVNAEAATR

SEQ ID NO: 59445 - protein, 269 aa, Unidentified
AQSVPWGISRVQAPAAHNRGLTGSGVKVAVLDTGISTHPDLNIRGGASFVPGEPSTQDGNGHGTHVAGTIAALDNMIGVLGVAPRAELYAVKVLGASGSGSVSSIAQGLEWAGNNRMHVANLSLGLQAPSATLEQAVNSATSRGVLVVAASGNSGAGSISYPARYANAMAVGATDQNNNRASFSQYGAGLDIVAPGVNVFSTYPGSTYASLNGTSMATPHVAGAAALVKQKNPSWSNVQIRNHLKNTATSLGSTNLYGSGLVNAEAATR

SEQ ID NO: 59446 - protein, 269 aa, Unidentified
AQSVPWGISRVQAPAAHRRGLTGSGVKVAVLDTGISTHPDLNITGGASFVPGEPSTQDGNGHGTHVAGTIAALDNSIGVLGVAPSAELYAVKVLGASGGGAISSIAQGLEWAGNNGMHVANLSLGSPSPSATLEQAVNSATSRGVLVVAASGNSGAGSISYPARYANAMAVGATDQNNNRASFSQYGAGLDIVAPGVNVQSTYPGSTYASLNGTSMATPHVAGAAVLVKQKNPSWSNVRIRNHLKNTATSLGSTNLYGSGLVNAEAATR

SEQ ID NO: 59447 - protein, 269 aa, Unidentified
AQSVPWGISRVQAPAAHNRGLTGRGVKVAVLDTGISTHPDLNIRGGASFVPGEPSTQDGEGHGTHVAGTIAALNNSIGVLGVAPSAELYAVKVLGASGAGAISSIAQGLEWAGNNGMHVANLSLGSPSPSATLEQAVNSATSRGVLVVAASGNSGAGSISYPARYANAMAVGATDQNNNRASFSQYGAGLDIVAPGVNVQSTYIGSTYASLNGTSMATPHVAGAAVLVKQKNPSWSNVRIRNHLKNTATSLGSTNLYGSGLVNAEAATR

SEQ ID NO: 59448 - protein, 269 aa, Unidentified
AQSVPWGISRVQAPAAHNRGLTGSGVKVAVLDTGISTHPDLNIRGGASFVPGEPSTQDGNGHGTHVAGTIAALDNNIGVLGVAPRAELYAVKVLGASGSGSVSSIAQGLEWAGNNRMHVANLSLGLQAPSATLEQAVNSATSRGVLVVAASGNSGAGSISYPARYANAMAVGATDQNNNRASFSQYGAGLDIVAPGVNVFSTYPGSTYASLNGTSMATPHVAGAAALVKQKNPSWSNVQIRNHLKNTATSLGSTNLYGSGLVNAEAATR

SEQ ID NO: 59449 - protein, 269 aa, Unidentified
AQSVPWGISRVQAPAAHNRGLTGSGVKVAVLDTGISTHPDLNIRGGASFVPGEPSTQDGNGHGTHVAGTIAALNNSIGVLGVAPSAELYAVKVLGASGGGAISSIAQGLEWAGNNGMHVANLSLGSPSPSATLEQAVNSATSRGVLVVAASGNSGADSISYPARYANAMAVGATDQNNNRASFSQYGAGLDIVAPGVNVQSTYPGSTYASLNGTSMATPHVAGAAVLVKQKRPSWSNVRIRDHLKNTATSLGSTNLYGSGLVNAEAATR

SEQ ID NO: 59450 - protein, 269 aa, Unidentified
AQSVPWGISRVQAPAAHNRGLTGSGVKVAVLDTGISTHPDLNIRGGASFVPGEPSTQDGNGHGTHVAGTIAALDNNIGVLGVAPSAELYAVKVLGASGSGSVSSIAQGLEWAGNNRMHVANLSLGLQAPSATLEQAVNSATSRGVLVVAASGNSGAGSISYPARYANAMAVGATDQNNNRASFSQYGAGLDIVAPGVNVLSTYPGSTYASLNGTSMATPHVAGAAALVKQKNPSWSNVQIRNRLKNTATSLGSTNLYGSGLVNAEAATR

SEQ ID NO: 59451 - protein, 269 aa, Unidentified
AQSVPWGISRVQAPAAHNRRLTGRGVKVAVLDTGISTHPDLNIRGGASFVPGEPSTQDGEGHGTHVAGTIAALNNDIGVLGVAPSAELYAVKVLGASGSGSVSSIAQGLEWAGNNSMHVANLSLGSESPSATLEQAVNSATSRGVLVVAASGNSGADSISYPARYANAMAVGATDQNNNRASFSQYGAGLDIVAPGVNVQSTYPGSTYASLNGTSMATPHVAGAAALVKQKNPSWSNVQIRNHLKNTATSLGSTNLYGSGLVNAEDATR

SEQ ID NO: 59452 - protein, 269 aa, Unidentified
AQSVPWGISRVQAPAAHRRGLTGRGVKVAVLDTGISTHPDLNIRGGASFVPGEPSTQDGNGHGTHVAGTIAALDNSIGVLGVAPSAELYAVKVLGASGAGSVSSIAQGLEWAGANGMHVANLSLGSPSPSATLEQAVNSATSRGVLVVAASGNSGAGSISYPARYANAMAVGATDQNNNRASFSQYGAGLDIVAPGVNVQSTYPQSAYASLNGTSMATPHVAGAAALVKQKNPSWSNVQIRNRLKNTATSLGSTNLYGSGLVNAEAATR

SEQ ID NO: 59453 - protein, 269 aa, Unidentified
AQSVPWGISRVQAPAAHNRRLTGSGVKVAVLDTGISTHPDLNIRGGASFVPGEPSTQDGNGHGTHVAGTIAALNNDIGVLGVAPSAELYAVKVLGASGSGSVSSIAQGLEWAGNNDMHVANLSLGSESPSATLEQAVNSATSRGVLVVAASGNSGAGSISYPARYANAMAVGATDQNNNRADFSQYGAGLDIVAPGVNVQSTYPGSTYASLNGTSMATPHVAGAAALVKRKNPSWSNVQIRDRLKNTATSLGSTNLYGSGLVNAEAATR

SEQ ID NO: 59454 - protein, 269 aa, Unidentified
AQSVPWGISRVQAPAAHNRGLTGSGVKVAVLDTGISTHPDLNIRGGASFVPGEPSTQDGNGHGTHVAGTIAALDNNIGVLGVAPRAELYAVKVLGASGSGSVSSIAQGLEWAGNNRMHVANLSLGLQAPSATLEQAVNSATSRGVLVVAASGNSGAGSISYPARYANAMAVGATDQNNNRASFSQYGAGLDIVAPGVNVMSTYPGSTYASLNGTSMATPHVAGAAALVKQKNPSWSNVQIRNHLKNTATSLGSTNLYGSGLVNAEAATR

SEQ ID NO: 59455 - protein, 269 aa, Unidentified
AQSVPWGISRVQAPAAHNRRLTGSGVKVAVLDTGISTHPDLDIRGGASFVPGEPSTQDGNGHGTHVAGTIAALNNSIGVLGVAPSAELYAVKVLGASGGGAISSIAQGLEWAGNNGMHVANLSLGSPSPSATLEQAVNSATSRGVLVVAASGNSGAGSISYPARYANAMAVGATDQNNNRASFSQYGAGLDIVAPGVNVQSTYPGSTYASLNGTSMATPHVAGAAVLVKQKNPSWSNVRIRNHLKNTATSLGSTNLYGSGLVRAEAATR

SEQ ID NO: 59456 - protein, 269 aa, Unidentified
AQVVPWGISRVQAPAAHNRGLTGSGVKVAVLDTGISTHEDLNIRGGASFVPGEPSTQDGNGHGTHVAGTIAALDNSIGVLGVAPDAELYAVKVLGASGSGSVSSIAQGLEWAGNNRMHVANLSLGRPSPSATLEQAVNSATSRGVLVVAASGNSGAGSISYPARYANAMAVGATDQNNNRASFSQYGAGLDIVAPGVNVQSTYIGSTYASKNGTSMATPHVAGAAALVKQKNPSWSNVQIRNHLKNTATSLGSTNLYGSGLVNAEAATR

SEQ ID NO: 59457 - protein, 269 aa, Unidentified
AQSVPWGISRVQAPAAHNRKLTASGVKVAVLDTGISTHPDLWIRGGASFVPGEPSTQDGNGHGTHVAGTIAALNNSIGVLGVAPSAELYAVKVLGASGSGSVSSIAQGLEWAGNNRMHVANLSLGIESPSATLEQAVNSATSRGVLVVAASGNSGADSISYPARYANAMAVGATDQNNNRADFSQYGAGLDIVAPGVNVQSTYPGSTYASLNGTSMATPHVAGAAALVKQKNPSWSNVQIRNHLKNTATSLGSTNLYGSGLVNAEAATR

SEQ ID NO: 59458 - protein, 269 aa, Unidentified
AQSVPWGISRVQAPAAHNRGLTGFGVKVAVLDTGISTHPDLNIRGGASFVPGEPSTQDGNGHGTHVAGTIAALNNSIGVLGVAPSAELYAVKVLGASGGGAISSIAQGLEWAGANGMHVANLSLGSPSPSATLEQAVNSATSRGVLVVAASGNSGAGSISYPARYANAMAVGATDQNNNRASFSQYGAGLDIVAPGVNVQSTVPQSTYASLNGTSMATPHVAGAAVLVKQKNPSWSNVQIRNHLKNTATSLGSTNLYGSGLVNAEAATR

SEQ ID NO: 59459 - protein, 269 aa, Unidentified
AQSVPWGISRVQAPAAHNRGLTGSGVKVAVLDTGISTHPDLNIRGGASFVPGEPSTQDGNGHGTHVAGTIAALDNKIGVLGVAPRAELYAVKVLGASGSGSVSSIAQGLEWAGNNRMHVANLSLGLQAPSATLEQAVNSATSRGVLVVAASGNSGAGSISYPARYANAMAVGATDQNNNRASFSQYGAGLDIVAPGVNVYSTYPGSTYASLNGTSMATPHVAGAAALVKQKNPSWSNVQIRNHLKNTATSLGSTNLYGSGLVNAEAATR

SEQ ID NO: 59460 - protein, 269 aa, Unidentified
AQSVPWGISRVQAPAAHNRGLTGSGVKVAVLDTGISTHPDLNIRGGASFVPGEPSTQDGNGHGTHVAGTIAALDNNIGVLGVAPRAELYAVKVLGASGSGSVSSIAQGLEWAGNNRMHVANLSLGLQAPSATLEQAVNSATSRGVLVVAASGNSGAGSISYPARYANAMAVGATDQNNNRASFSQYGAGLDIVAPGVNVYSTYPGSTYASLNGTSMATPHVAGAAALVKQKNPSWSNVQIRNHLKNTATSLGSTNLYGSGLVNAEAATR

SEQ ID NO: 59461 - protein, 269 aa, Unidentified
AQSVPWGISRVQAPAAHNRRLTGRGVKVAVLDTGISTHPDLNIRGGASFVPGEPSTQDGNGHGTHVAGTIAALNNGIGVLGVAPSAELYAVKVLGASGSGSVSSIAQGLEWAGNNSMHVANLSLGSESPSATLEQAVNSATSRGVLVVAASGNSGADSISYPARYANAMAVGATDQNNNRADFSQYGAGLDIVAPGVNVQSTYPGSTYASLNGTSMATPHVAGAAALVKQKNPSWSNVRIRNHLKNTATSLGSTNLYGSGLVNAEAATR

SEQ ID NO: 59462 - protein, 269 aa, Bacillus lentus
AQTVPWGISRVQAPAAHNRGLTGSGVKVAVLDTGISTHPDLNIRGGASFVPGEPSTQDGNGHGTHVAGTIAALNNSIGVLGVAPSAELYAVKVLGADGSGAISSIAQGLEWAGNNGMHVANLSLGSPSPSATLEQAVNSATSRGVLVVAASGNSGASSISYPARYANAMAVGATDQNNNRASFSQYGPGLDIMAPGVNIQSTYPGSTYASLNGTSMATPHVAGAAALVKQKNPSWSNVQIRNHLKNTATSLGSTNLYGSGLVNAEAATR

SEQ ID NO: 59463 - protein, 269 aa, Unidentified
AQSVPWGISRVQAPAAHNRKLTGSGVKVAVLDTGISTHPDLNIRGGASFVPGEPSTQDGEGHGTHVAGTIAALNNNIGVLGVAPSAELYAVKVLSASGNGSVSSIAGGLEWAGLNGMHVANLSLGSPSPSATLEQAVNSATSRGVLVVAASGNSGAGSISYPARYANAMAVGATDQNNNRADFSQYGAGLDIVAPGVNVQSTYPGSTYASQNGTSSATPHVAGAAALVKQKNPSWSNVQIRNHLKNTATSLGSTNLYGSGLVNAEAATR

SEQ ID NO: 59464 - protein, 269 aa, Unidentified
AQSVPWGISRVQAPAAHRRRLTGRGVKVAVLDTGISTHPDLNIRGGASFVPGEPSTQDGNGHGTHVAGTIAALDNSIGVLGVAPSAELYAVKVLGASGSGSVSSIAQGLEWAGANGMHVANLSLGSPSPSATLEQAVNSATSRGVLVVAASGNSGAGSISYPARYANAMAVGATDQDNNRASFSQYGAGLDLVAPGVNVQSTYPGSTYASLNGTSMATPHVAGAAALVKQKNPSWSNVQIRNRLKNTATSLGSTNLYGSGLVNAEAATR

SEQ ID NO: 59465 - protein, 269 aa, Unidentified
AQSVPWGISRVQAPAAHNRGLTGSGVKVAVLDTGISTHPDLNIRGGASFVPGEPSTQDGNGHGTHAAGTIAALNNSIGVLGVAPSAELYAVKVLGASGSGAISSIAQGLEWAGNNGMHVANLSLGSPSPSATLEQAVNSATSRGVLVVAASGNSGADSISYPARYANAMAVGATDQNNNRASFSQYGAGLDIVAPGVNVQSTWPGSTYASLNGTSMATPHVAGAAVLVKHKNPSWSNVRIRNHLKNTATSLGSTNLYGSGLVNAEAATR

SEQ ID NO: 59466 - protein, 269 aa, Unidentified
AQSVPWGISRVQAPAAHNRKLTGGGVKVAVLDTGISTHPDLNIRGGASFVPGEPSTQDGEGHGTHVAGTIAALNNNIGVLGVAPSAELYAVKVLSASGNGSVSSIAQGLEWAGLNGMHVANLSLGAPSPSATLEQAVNSATSRGVLVVAASGNSGAGSISYPARYANAMAVGATDQNNNRASFSQYGAGLDIVAPGVNVQSTYPGSTYASQNGTSSATPHVAGAAALVKQKNPSWSNVQIRNHLKNTATSLGSTNLYGSGLVNAEAATR

SEQ ID NO: 59467 - protein, 269 aa, Unidentified
AQSVPWGISRVQAPAAHNRRLTGRGVKVAVLDTGISTHPDLNITGGASFVPGEPSTQDGNGHGTHVAGTIAALNNSIGVLGVAPSAELYAVKVLGASGGGAISSIAQGLEWAGNNGMHVANLSLGSPSPSATLEQAVNSATSRGVLVVAASGNSGAGSISYPARYANAMAVGATDQNNNRASFSQYGAGLDIVAPGVNVQSTYPGSTYASLNGTSMATPHVAGAAVLVKQKNPSWSNVRIRNHLKNTATSLGSTNLYGSGLVNAEAATR

SEQ ID NO: 59468 - protein, 269 aa, Unidentified
AQSVPWGISRVQAPAAHNRGLTGSGVKVAVLDTGISTHPDLNIRGGASFVPGEPSTQDGNGHGTHVAGTIAALNNSIGVLGVAPSAELYAVKVLGASGGGAISSIAQGLEWAGANGMHVANLSLGNPSPSATLEQAVNSATSRGVLVVAASGNSGAGSISYPARYANAMAVGATDQNNNRASFSQYGAGLDIVAPGVNVQSTVPGSAYASLNGTSMATPHVAGAAVLVKQKNPSWSNVQIRNHLKNTATSLGSTNLYGSGLVNAEAATR

SEQ ID NO: 59469 - protein, 269 aa, Unidentified
AQSVPWGISRVQAPAAHNRGLTGRGVKVAVLDSGISTHPDLNIRGGASFVPGEPSTQDGNGHGTHVAGTIAALNNSIGVLGVAPSAELYAVKVLGASGSGSVSSIAQGLEWAGLNRMHVANLSLGIPSPSATLEQAVNSATSRGVLVVAASGNSGEGSIDYPARYANAMAVGATDQNNNRADFSQYGAGLDIVAPGVNVQSTYPGSTYASLNGTSMATPHVAGAAALVKQKNPSWSNVQIRNHLKNTATSLGSTNLYGSGLVNAEAATR

SEQ ID NO: 59470 - protein, 269 aa, Unidentified
AQSVPWGISRVQAPAAHNRGLAGSGVKVAVLDTGISTHPDLNIRGGASFVPGEPSTQDGNGHGTHVAGTIAALNNNIGVLGVAPSAELYAVKVLGASGGGAISSIAQGLEWAGNNGMHVANLSLGSPSPSATLEQAVNSATSRGVLVVAASGNSGAGSISYPARYANAMAVGATDQNNNRASFSQYGAGLDIVAPGVNVQSTYPGSTYASQNGTSMATPHVAGAAVLVKQKNPSWSNVRIRNHLKNTATSLGSTNLYGSGLVNAEAATR

SEQ ID NO: 59471 - protein, 269 aa, Unidentified
AQSVPWGISRVQAPAAHNRRLWGSGVKVAVLDTGISTHPDLNIRGGASFVPGEPSTQDGNGHGTHVAGTIAALNNSIGVLGVAPSAELYAVKVLGASGSGAVSSIAQGLEWAGNNGMHVANLSLGSPSPSATLEQAVNSATSRGVLVVAASGNSGAGSISYPARYANAMAVGATDQNNNRASFSQYGAGLDIVAPGVNVQSTYPQSAYFSLNGTSMATPHVAGAAVLVKQKNPSWSNVRIRNHLKNTATSLGSTNLYGSGLVNAEAATR

SEQ ID NO: 59472 - protein, 269 aa, Unidentified
AQSVPWGISRVQAPAAHNRRLTGRGVKVAVLDTGISTHPDLNIRGGASFVPGEPSTQDGEGHGTHVAGTIAALNNGIGVLGVAPSAELYAVKVLGASGSGSVSSIAQGLEWAGNNDMHVANLSLGSESPSATLEQAVNSATSRGVLVVAASGNSGAGSISYPARYANAMAVGATDQNNNRADFSQYGAGLDIVAPGVNVQSTYPGSTYASLNGTSMATPHVAGAAALVKQKNPSWSNVQIRNRLKNTATSLGSTNLYGSGLVNAEAATR

SEQ ID NO: 59473 - protein, 269 aa, Unidentified
AQSVPWGISRVQAPAAHNRGLTGSGVKVAVLDTGISTHEDLNIRGGASFVPGEPSTQDGNGHGTHVAGTIAALNNSIGVLGVAPSAELYAVKVLGADGEGAISSIAQGLEWAGNNGMHVANLSLGSPSPSATLEQAVNSATSRGVLVVAASGNSGASSIGYPARYANAMAVGATDQNNNRASFSRYGAGLDIVAPGVNVQSTYPGSTYASLNGTSMATPHVAGAAALVKQKNPSWSNVQIRNHLKNTATSLGSTNLYGSGLVNAEAATR

SEQ ID NO: 59474 - protein, 269 aa, Unidentified
AQSVPWGISRVQAPAAHNRGLTGSGVKVAVLDTGISTHPDLNIRGGASFVPGEPSTQDGNGHGTHAAGTIAALDNSIGVLGVAPSAELYAVKVLGASGSGAISSIAQGLEWAGNNGMHVANLSLGSPSPSATLEQAVNSATSRGVLVVAASGNSGADSISYPARYANAMAVGATDQNNNRASFSQYGAGLDIVAPGVNVQSTYPGSTYASLNGTSMATPHVAGAAALVKHKNPSWSNVRIRNHLKNTATSLGSTDLYGSGLVNAEAATR

SEQ ID NO: 59475 - protein, 269 aa, Unidentified
AQSVPWGISRVQAPAAHRRGLTGRGVKVAVLDTGISTHPDLNIRGGASFVPGEPSTQDGNGHGTHVAGTIAALDNSIGVLGVAPSAELYAVKVLGASGSGSVSSIAQGLEWAGNNGMHVANLSLGSPSPSATLEQAVNSATSRGVLVVAASGNSGAGSISYPARYANAMAVGATDQDNNRASFSQYGAGLDIVAPGVNVQSTYPQSAYFSLNGTSMATPHVAGAAALVKQKNPSWSNVQIRNRLKNTATSLGSTNLYGSGLVNAEAATR

SEQ ID NO: 59476 - protein, 269 aa, Unidentified
AQSVPWGISRVQAPAAHNRRLTGRGVKVAVLDTGISTHPDLNIRGGASFVPGEPSTQDGNGHGTHVAGTIAALNNDIGVLGVAPSAELYAVKVLGASGSGSVSSIAQGLEWAGNNDMHVANLSLGSESPSATLEQAVNSATSRGVLVVAASGNSGADSISYPARYANAMAVGATDQNNNRASFSQYGAGLDIVAPGVNVQSTYPGSTYASLNGTSMATPHVAGAAALVKQKNPSWSNVRIRDHLKNTATSLGSTNLYGSGLVNAEAATR

SEQ ID NO: 59477 - protein, 269 aa, Unidentified
AQSVPWGISRVQAPAAHNRRLTGRGVKVAVLDTGISTHPDLNIRGGASFVPGEPSTQDGNGHGTHVAGTIAALNNNIGVLGVAPSAELYAVKVLSASGQGSVSSIANGLEWAGLNGMHVANLSLGSPSPSATLEQAVNSATSRGVLVVAASGNSGAGSISYPARYANAMAVGATDQNNNRASFSQYGAGLDIVAPGVNVQSTYPGSTYASQNGTSMATPHVAGAAALVKQKNPSWSNVQIRNHLKNTATSLGSTNLYGSGLVNAEAATR

SEQ ID NO: 59478 - protein, 269 aa, Unidentified
AQSVPWGISRVQAPAAHRRGLTGSGVKVAVLDTGISTHPDLRIRGGASFVPGEPSTQDGNGHGTHVAGTIAALNNRIGVLGVAPSAELYAVKVLGASGGGAISSIAQGLEWAGNNGMHVANLSLGSPSPSATLEQAVNSATSRGVLVVAASGNSGAGSISYPARYANAMAVGATDQNNNRASFSQYGAGLDIVAPGVNVQSTYPGSTYASLNGTSMATPHVAGAAVLVKQKNPSWSNVRIRNHLKNTATSLGSTNLYGSGLVNAEAATR

SEQ ID NO: 59479 - protein, 269 aa, Unidentified
AQSVPWGISRVQAPAAHNRGLTGSGVKVAVLDTGISTHPDLNIRGGASFVPGEPSTQDGNGHGTHVAGTIAALDNYIGVLGVAPRAELYAVKVLGASGSGSVSSIAQGLEWAGNNRMHVANLSLGLQAPSATLEQAVNSATSRGVLVVAASGNSGAGSISYPARYANAMAVGATDQNNNRASFSQYGAGLDIVAPGVNVMSTYPGSTYASLNGTSMATPHVAGAAALVKQKNPSWSNVQIRNHLKNTATSLGSTNLYGSGLVNAEAATR

SEQ ID NO: 59480 - protein, 269 aa, Unidentified
AQSVPWGISRVQAPAAHNRKLTGGGVKVAVLDTGISTHPDLNIRGGASFVPGEPSTQDGEGHGTHVAGTIAALNNNIGVLGVAPSAELYAVKVLSASGGGSVSSIAQGLEWAGLNGMHVANLSLGAPSPSATLEQAVNSATSRGVLVVAASGNSGAGSISYPARYANAMAVGATDQNNNRASFSQYGAGLDIVAPGVNVQSTYPGSTYASLNGTSMATPHVAGAAALVKQKNPSWSNVQIRNHLKNTATSLGSTNLYGSGLVNAEAATR

SEQ ID NO: 59481 - protein, 269 aa, Unidentified
AQSVPWGISRVQAPAAHNRGLTGRGVKVAVLDTGISTHPDLNIRGGASFVPGEPSTQDGNGHGTHVAGTIAALNNGIGVLGVAPSAELYAVKVLGASGSGSVSSIAQGLEWAGNNSMHVANLSLGSPSPSATLEQAVNSATSRGVLVVAASGNSGADSISYPARYANAMAVGATDQNNNRADFSQYGAGLDIVAPGVNVQSTYPGSTYASLNGTSMATPHVAGAAALVKQKNPSWSNVRIRDRLKNTATSLGSTNLYGSGLVNAEAATR

SEQ ID NO: 59482 - protein, 269 aa, Unidentified
AQSVPWGISRVQAPAAHNRGLTGSGVKVAVLDTGISTHPDLNIRGGASFVPGEPSTQDGNGHGTHVAGTIAALNNSIGVLGVAPSAELYAVKVLGASGSGGISSIAQGLEWAGNNGMHVANLSLGSPSPSATLEQAVNSATSRGVLVVAASGNSGEGSISYPARYANAMAVGATDQNNNRADFSQYGAGLDIVAPGVNVQSTYPGSTYASLNGTSMATPHVAGAAVLVKQKNPSWSNVRIRDRLKNTATSLGSTNLYGSGLVNAEAATR

SEQ ID NO: 59483 - protein, 269 aa, Unidentified
AQSVPWGISRVQAPAAHNRGLAGSGVKVAVLDTGISTHPDLNIRGGASFVPGEPSTQDGNGHGTHVAGTIAALNNSIGVLGVAPSAELYAVKVLGASGQGAISSIAQGLEWAGNNGMHVANLSIGSSSPSATLEQAVNSATSRGVLVVAASGNSGAGSISYPARYANAMAVGATDQNNNRASFSQYGAGLDIVAPGVNVQSTYPGSTYASLNGTSMATPHVAGAAVLVKQKNPSWSNVRIRNHLKNTATSLGSTNLYGSGLVNAEAATR

SEQ ID NO: 59484 - protein, 269 aa, Unidentified
AQSVPWGISRVQAPAAHNRGLTGSGVKVAVLDTGISTHPDLNIRGGASFVPGEPSTQDGNGHGTHAAGTIAALNNSIGVLGVAPSAELYAVKVLGASGSGAISSIAQGLEWAGNNGMHVANLSLGSPSPSATLEQAVNSATSRGVLVVAASGNSGAGSISYPARYANAMAVGATDQNNNRASFSQYGAGLDIVAPGVNVQSTYPGSTYASLNGTSMATPHVAGAAVLVKHKNPSWSNVRIRDHLKKTATSLGSTNLYGSGLVNAEAATR

SEQ ID NO: 59485 - protein, 269 aa, Unidentified
AQSVPWGISRVQAPAAHNRGLTGSGVKVAVLDTGISTHPDLNIRGGASFVPGEPSTQDGEGHGTHVAGTIAALNNDIGVLGVAPSAELYAVKVLGASGSGSVSSIAQGLEWAGNNSMHVANLSLGSESPSATLEQAVNSATSRGVLVVAASGNSGADSISYPARYANAMAVGATDQNNNRASFSQYGAGLDIVAPGVNVQSTYPGSTYASLNGTSMATPHVAGAAALVKQKNPSWSNVVIREHLKNTATSLGSTNLYGSGLVNATAATR

SEQ ID NO: 59486 - protein, 269 aa, Unidentified
AQSVPWGISRVQAPAAHNRGLTGSGVKVAVLDTGISTHPDLNIRGGASFVPGEPSTQDGNGHGTHVAGTIAALDNSIGVLGVAPSAELYAVKVLGASGSGAISSIAQGLEWAGNNGMHVANLSLGSPSPSATLEQAVNSATSRGVLVVAASGNSGADSISYPARYANAMAVGATDQNNNRASFSQFGAGLDIVAPGVNVQSTYPGSTYASLNGTSMATPHVAGAAVLVKHKNPSWSNVRIRNHLKNTATSLGSTNLYGSGLVNAEAATR

SEQ ID NO: 59487 - protein, 269 aa, Unidentified
AQSVPWGISRVQAPAAHNRGLTGSGVKVAVLDTGISTHPDLNIRGGASFVPGEPSTQDGNGHGTHVAGTIAALDNTIGVLGVAPRAELYAVKVLGASGSGSVSSIAQGLEWAGNNRMHVANLSLGLQAPSATLEQAVNSATSRGVLVVAASGNSGAGSISYPARYANAMAVGATDQNNNRASFSQYGAGLDIVAPGVNVDSTYPGSTYASLNGTSMATPHVAGAAALVKQKNPSWSNVQIRNHLKNTATSLGSTNLYGSGLVNAEAATR

SEQ ID NO: 59488 - protein, 269 aa, Unidentified
AQSVPWGISRVQAPAAHNRGLTGSGVKVAVLDTGISTHPDLNIRGGASFVPGEPSTQDGNGHGTHVAGTIAALNNSIGVLGVAPSAELYAVKVLGASGGGAISSIAQGLEWAGNNGMHVANLSLGSPSPSATLEQAVNSATSRGVLVVAASGNSGEGSISYPARYANAMAVGATDQNNNRADFSQYGAGLDIVAPGVNVQSTYPGSTYASLNGTSSATPHVAGAAVLVKQKNPSWSNVRIRDRLKNTATSLGSTNLYGSGLVNAEAATR

SEQ ID NO: 59489 - protein, 269 aa, Unidentified
AQSVPWGISRVQAPAAHNRGLTGRGVKVAVLDTGISTHPDLNIRGGASFVPGEPSTQDGNGHGTHVAGTIAALDNNIGVLGVAPDAELYAVKVLGASGSGSVSSIAQGLEWAGNNRMHVANLSLGSQSPSATLEQAVNSATSRGVLVVAASGNSGAGSISYPARYANAMAVGATDQNNNRASFSQYGAGLDIVAPGVNVQSTWPGSTYASLNGTSQATPHVAGAAALVKQKNPSWSNVQIRNRLKNTATSLGSTNLYGSGLVNAEAATR

SEQ ID NO: 59490 - protein, 269 aa, Unidentified
AQSVPWGISRVQAPAAHNRGLTGSGVKVAVLDTGISTHPDLNIRGGASFVPGEPSTQDGNGHGTHVAGTIAALDNHIGVLGVAPRAELYAVKVLGASGSGSVSSIAQGLEWAGNNRMHVANLSLGLQAPSATLEQAVNSATSRGVLVVAASGNSGAGSISYPARYANAMAVGATDQNNNRASFSQYGAGLDIVAPGVNVHSTYPGSTYASLNGTSMATPHVAGAAALVKQKNPSWSNVQIRNHLKNTATSLGSTNLYGSGLVNAEAATR

SEQ ID NO: 59491 - protein, 269 aa, Unidentified
AQSVPWGISRVQAPAAHNRRLTGRGVKVAVLDTGISTHPDLNIRGGASFVPGEPSTQDGEGHGTHVAGTIAALNNDIGVLGVAPSAELYAVKVLGASGSGSVSSIAQGLEWAGNNSMHVANLSLGSESPSATLEQAVNSATSRGVLVVAASGNSGADSISYPARYANAMAVGATDQNNNRASFSQYGAGLDIVAPGVNVQSTYPGSTYASLNGTSMATPHVAGAAALVKQKNPSWSNVQIRDHLKNTATSLGSTNLYGSGLVNAEAATR

SEQ ID NO: 59492 - protein, 269 aa, Unidentified
AQSVPWGISRVQAPAAHNRGLRGGGVKVAVLDTGISTHPDLNIRGGASFVPGEPSTQDGNGHGTHVAGTIAALNNSIGVLGVAPSAELYAVKVLSASGNGAISSIAQGLEWAGNNGMHVANLSLGSPSPSATLEQAVNSATSRGVLVVAASGNSGAGSISYPARYANAMAVGATDQNNNRASFSQYGAGLDIVAPGVNVQSTYPGSTYASLNGTSMATPHVAGAAVLVKQKNPSWSNVRIRNHLKNTATSLGSTNLYGSGLVNAEAATR

SEQ ID NO: 59493 - protein, 269 aa, Unidentified
AQSVPWGISRVQAPAAHNRGLTGSGVKVAVLDTGISTHPDLNIRGGASFVPGEPSTQDGNGHGTHVAGTIAALDNCIGVLGVAPRAELYAVKVLGASGSGSVSSIAQGLEWAGNNRMHVANLSLGLQAPSATLEQAVNSATSRGVLVVAASGNSGAGSISYPARYANAMAVGATDQNNNRASFSQYGAGLDIVAPGVNVNSTYPGSTYASLNGTSMATPHVAGAAALVKQKNPSWSNVQIRNHLKNTATSLGSTNLYGSGLVNAEAATR

SEQ ID NO: 59494 - protein, 269 aa, Unidentified
AQSVPWGISRVQAPAAHNRGLRGSGVKVAVLDTGISTHPDLNIRGGASFVPGEPSTQDGNGHGTHVAGTIAALNNSIGVLGVAPSAELYAVKVLAASGQGAISSIAQGLEWAGNNGMHVANLSLGAPSPSATLEQAVNSATSRGVLVVAASGNSGAGSISYPARYANAMAVGATDQNNNRASFSQYGAGLDIVAPGVNVQSTYPGSTYASLNGTSMATPHVAGAAVLVKQKNPSWSNVRIRNHLKNTATSLGSTNLYGSGLVNAEAATR

SEQ ID NO: 59495 - protein, 269 aa, Unidentified
AQSVPWGISRVQAPAAHNRRLTGRGVKVAVLDTGISTHPDLNIRGGASFVPGEPSTQDGEGHGTHVAGTIAALNNGIGVLGVAPSAELYAVKVLGASGSGSVSSIAQGLEWAGNNDMHVANLSLGSPSPSATLEQAVNSATSRGVLVVAASGNSGAGSISYPARYANAMAVGATDQNNNRADFSQYGAGLDIVAPGVNVQSTYPGSTYASLNGTSMATPHVAGAAALVKQKNPSWSNVQIRDRLKNTATSLGSTNLYGSGLVNAEAATR

SEQ ID NO: 59496 - protein, 269 aa, Unidentified
AQSVPWGISRVQAPAAHNRGLRGSGVKVAVLDTGISTHPDLNIRGGASFVPGEPSTQDGNGHGTHVAGTIAALNNSIGVLGVAPSAELYAVKVLGASGGGAISSIAQGLEWAGNNGMHVANLSLGSPSPSATLEQAVNSATSRGVLVVAASGNSGAGSISYPARYANAMAVGATDQNNNRASFSQYGAGLDIVAPGVNVQSTYPGSTYASLNGTSMATPHVAGAAVLVKQKNPSWSNVRIRNHLKNTATSLGSKNLYGSGNVNAEAATR

SEQ ID NO: 59497 - protein, 269 aa, Unidentified
AQSVPWGISRVQAPAAHNRGLAGGGVKVAVLDTGISTHPDLNIRGGASFVPGEPSTQDGNGHGTHVAGTIAALNNSIGVLGVAPSAELYAVKVLGASGQGAISSIAQGLEWAGNNGMHVANLSLGAPSPSATLEQAVNSATSRGVLVVAASGNSGAGSISYPARYANAMAVGATDQNNNRASFSQYGAGLDIVAPGVNVQSTYPGSTYASLNGTSMATPHVAGAAVLVKQKNPSWSNVRIRNHLKNTATSLGSTNLYGSGLVNAEAATR

SEQ ID NO: 59498 - protein, 269 aa, Unidentified
AQSVPWGISRVQAPAAHNRRLTGRGVKVAVLDTGISTHPDLNIRGGASFVPGEPSTQDGEGHGTHVAGTIAALNNGIGVLGVAPSAELYAVKVLGASGSGSVSSIAQGLEWAGNNDMHVANLSLGSPSPSATLEQAVNSATSRGVLVVAASGNSGADSISYPARYANAMAVGATDQNNNRADFSQYGAGLDIVAPGVNVQSTYPGSTYASLNGTSMATPHVAGAAALVKQKNPSWSNVQIRDHLKNTATSLGSTNLYGSGLVNAEAATR

SEQ ID NO: 59499 - protein, 269 aa, Unidentified
AQSVPWGISRVQAPAAHNRGLTGSGVKVAVLDTGISTHPDLNIRGGASFVPGEPSTQDGNGHGTHVAGTIAALDNIIGVLGVAPRAELYAVKVLGASGSGSVSSIAQGLEWAGNNRMHVANLSLGLQAPSATLEQAVNSATSRGVLVVAASGNSGAGSISYPARYANAMAVGATDQNNNRASFSQYGAGLDIVAPGVNVMSTYPGSTYASLNGTSMATPHVAGAAALVKQKNPSWSNVQIRNHLKNTATSLGSTNLYGSGLVNAEAATR

SEQ ID NO: 59500 - protein, 269 aa, Unidentified
AQSVPWGISRVQAPAAHRRRLTGRGVKVAVLDTGISTHPDLNIRGGASFVPGEPSTQDGNGHGTHVAGTIAALDNSIGVLGVAPSAELYAVKVLGASGSGSVSSIAQGLEWAGNNGMHVANLSLGSPSPSATLEQAVNSATSRGVLVVAASGNSGAGSISYPARYANAMAVGATDQDNNRASFSQYGAGLDLVAPGVNVQSTYPGSTYFSLNGTSMATPHVAGAAALVKQKNPSWSNVQIRNRLKNTATSLGSTNLYGSGLVNAEAATR

SEQ ID NO: 59501 - protein, 269 aa, Unidentified
AQSVPWGISRVQAPAAHRRGLTGRGVKVAVLDTGISTHPDLNIRGGASFVPGEPSTQDGNGHGTHVAGTIAALDNSIGVLGVAPSAELYAVKVLGASGAGSVSSIAQGLEWAGNNGMHVANLSLGSPSPSATLEQAVNSATSRGVLVVAASGNSGAGSISYPARYANAMAVGATDQDNNRASFSQYGAGLDLVAPGVNVQSTYPGSAYASLNGTSMATPHVAGAAALVKQKNPSWSNVQIRNRLKNTATSLGSTNLYGSGLVNAEAATR

SEQ ID NO: 59502 - protein, 269 aa, Unidentified
AQSVPWGISRVQAPAAHNRGLTGRGVKVAVLDTGISTHPDLNIRGGASFVPGEPSTQDGNGHGTHVAGTIAALDNNIGVLGVAPRAELYAVKVLGASGSGSVSSIAQGLEWAGNNRMHVANLSLGSPSPSATLEQAVNSATSRGVLVVAASGNSGAGSISYPARYANAMAVGATDQNNNRASFSQYGAGLDIVAPGVNVLSTWPGSAYASLNGTSQATPHVAGAAALVKQKNPSWSNVQIRNHLKNTATSLGSTNLYGSGLVNAEAATR

SEQ ID NO: 59503 - protein, 269 aa, Unidentified
AQSVPWGISRVQAPAAHNRGLTGSGVKVAVLDTGISTHPDLNIRGGASFVPGEPSTQDGNGHGTHVAGTIAALDNHIGVLGVAPRAELYAVKVLGASGSGSVSSIAQGLEWAGNNRMHVANLSLGLQAPSATLEQAVNSATSRGVLVVAASGNSGAGSISYPARYANAMAVGATDQNNNRASFSQYGAGLDIVAPGVNVRSTYPGSTYASLNGTSMATPHVAGAAALVKQKNPSWSNVQIRNHLKNTATSLGSTNLYGSGLVNAEAATR

SEQ ID NO: 59504 - protein, 269 aa, Unidentified
AQSVPWGISRVQAPAAHNRGLTGSGVKVAVLDSGISTHPDLNIRGGASFVPGEPSTQDGNGHGTHVAGTIAALNNSIGVLGVAPSAELYAVKVLGASGGGAISSIAQGLEWAGANGMHVANLSLGNPSPSATLEQAVNSATSRGVLVVAASGNSGAGSISYPARYANAMAVGATDQNNNRASFSQYGAGLDIVAPGVNVQSTAPGSTYASLNGTSMATPHVAGAAVLVKQKNPSWSNVQIRNHLKNTATSLGSTNLYGSGLVNAEAATR

SEQ ID NO: 59505 - protein, 269 aa, Unidentified
AQSVPWGISRVQAPAAHNRGLTGSGVKVAVLDTGISTHPDLNITGGASFVPGEPSTQDGNGHGTHVAGTIAALDNSIGVLGVAPSAELYAVKVLGASGGGAISSIAQGLEWAGNNGMHVANLSLGSPSPSATLEQAVNSATSRGVLVVAASGNSGAGSISYPARYANAMAVGATDQNNNRASFSQYGAGLDIVAPGVNVQSTYPGSTYASLNGTSMATPHVAGAAVLVKQKNPSWSNVRIRNRLKNTATSLGSTNLYGSGLVNAEAATR

SEQ ID NO: 59506 - protein, 269 aa, Unidentified
AQSVPWGISRVQAPAAHNRGLTGRGVKVAVLDTGISTHPDLNITGGASFVPGEPSTQDGNGHGTHVAGTIAALNNSIGVLGVAPSAELYAVKVLGASGGGAISSIAQGLEWAGNNGMHVANLSLGSPSPSATLEQAVNSATSRGVLVVAASGNSGAGSISYPARYANAMAVGATDQNNNRASFSQYGAGLDIVAPGVNVQSTYPGSTYASLNGTSMATPHVAGAAVLVKQKNPSWSNVRIRNHLKNTATSLGSTNLYGSGLVRAEAATR

SEQ ID NO: 59507 - protein, 269 aa, Unidentified
AQSVPWGISRVQAPAAHNRGLTGSGVKVAVLDTGISTHPDLNIRGGASFVPGEPSTQDGNGHGTHVAGTIAALNNSIGVLGVAPSAELYAVKVLGASGGGAISSIAQGLEWAGANGMHVANLSLGNPSPSATLEQAVNSATSRGVLVVAASGNSGAGSISYPARYANAMAVGATDQNNNRASFSQYGAGLDIVAPGVNVQSTVPQSTYASLNGTSMATPHVAGAAVLVKQKNPSWSNVQIRNHLKNTATSLGSTNLYGSGLVNAEAATR

SEQ ID NO: 59508 - protein, 269 aa, Unidentified
AQSVPWGISRVQAPAAHRRGLKGSGVKVAVLDTGISTHPDLDIRGGASFVPGEPSTQDGNGHGTHVAGTIAALNNSIGVLGVAPSAELYAVKVLGASGGGAISSIAQGLEWAGNNGMHVANLSLGSPSPSATLEQAVNSATSRGVLVVAASGNSGAGSISYPARYANAMAVGATDQNNNRASFSQYGAGLDIVAPGVNVQSTYPGSTYASLNGTSMATPHVAGAAVLVKQKNPSWSNVRIRNHLKNTATSLGSTNLYGSGLVNAEAATR

SEQ ID NO: 59509 - protein, 269 aa, Unidentified
AQSVPWGISRVQAPAAHNRRLTGRGVKVAVLDTGISTHPDLRITGGASFVPGEPSTQDGNGHGTHVAGTIAALNNSIGVLGVAPSAELYAVKVLGASGAGSVSSIAQGLEWAGNNGMHVANLSLGSPSPSATLEQAVNSATSRGVLVVAASGNSGAGSISYPARYANAMAVGATDQNNNRASFSQYGAGLDIVAPGVNVQSTYIQSAYASLNGTSMATPHVAGAAALVKQKNPSWSNVQIRNHLKNTATSLGSTNLYGSGLVNAEAATR

SEQ ID NO: 59510 - protein, 269 aa, Unidentified
AQSVPWGISRVQAPAAHNRGLTGSGVKVAVLDTGISTHPDLNIRGGASFVPGEPSTQDGNGHGTHVAGTIAALDNYIGVLGVAPRAELYAVKVLGASGSGSVSSIAQGLEWAGNNRMHVANLSLGLQAPSATLEQAVNSATSRGVLVVAASGNSGAGSISYPARYANAMAVGATDQNNNRASFSQYGAGLDIVAPGVNVYSTYPGSTYASLNGTSMATPHVAGAAALVKQKNPSWSNVQIRNHLKNTATSLGSTNLYGSGLVNAEAATR

SEQ ID NO: 59511 - protein, 269 aa, Unidentified
AQSVPWGISRVQAPAAHNRGLTGSGVKVAVLDTGISTHPDLNIRGGASFVPGEPSTQDGNGHGTHVAGTIAALNNSIGVLGVAPSAELYAVKVLGASGSGAISSIAQGLEWAGNNGMHVANLSLGSPSPSATLEQAVNSATSRGVLVVAASGNSGEGSISYPARYANAMAVGATDQNNNRADFSQYGAGLDIVAPGVNVQSTYPGSTYASLNGTSMATPHVAGAAVLVKQKNPSWSNVRIRDRLKNTATSLGSTNLYGSGLVNAEAATR

SEQ ID NO: 59512 - protein, 269 aa, Unidentified
AQSVPWGISRVQAPAAHNRKLTGGGVKVAVLDTGISTHPDLNIRGGASFVPGEPSTQDGEGHGTHVAGTIAALNNNIGVLGVAPSAELYAVKVLAASGGGSVSSIAQGLEWAGLNGMHVANLSLGSPSPSATLEQAVNSATSRGVLVVAASGNSGAGSISYPARYANAMAVGATDQNNNRASFSQYGAGLDIVAPGVNVQSTYPGSTYASQNGTSMATPHVAGAAALVKQKNPSWSNVQIRNHLKNTATSLGSTNLYGSGLVNAEAATR

SEQ ID NO: 59513 - protein, 269 aa, Unidentified
AQSVPWGISRVQAPAAHRRGLWGRGVKVAVLDTGISTHPDLNIRGGASFVPGEPSTQDGNGHGTHVAGTIAALDNSIGVLGVAPSAELYAVKVLGASGSGSVSSIAQGLEWAGNNGMHVANLSLGSPSPSATLEQAVNSATSRGVLVVAASGNSGAGSISYPARYANAMAVGATDQDNNRASFSQYGAGLDLVAPGVNVQSTYPGSTYFSLNGTSMATPHVAGAAALVKQKNPSWSNVQIRNRLKNTATSLGSTNLYGSGLVNAEAATR

SEQ ID NO: 59514 - protein, 269 aa, Unidentified
AQSVPWGISRVQAPAAHNRGLTGRGVKVAVLDTGISTHPDLNIRGGASFVPGEPSTQDGEGHGTHVAGTIAALNNGIGVLGVAPSAELYAVKVLGASGSGSVSSIAQGLEWAGNNDMHVANLSLGSESPSATLEQAVNSATSRGVLVVAASGNSGAGSISYPARYANAMAVGATDQNNNRADFSQYGAGLDIVAPGVNVQSTYPGSTYASLNGTSMATPHVAGAAALVKQKNPSWSNVQIRDRLKNTATSLGSTNLYGSGLVNAEAATR

SEQ ID NO: 59515 - protein, 269 aa, Unidentified
AQSVPWGISRVQAPAAHNRGLTGSGVKVAVLDTGISTHPDLNIRGGASFVPGEPSTQDGNGHGTHVAGTIAALNNSIGVLGVAPSAELYAVKVLGASGGGSIASIAQGLEWAGNNGMHVANLSLGSPSPSATLEQAVNSATSRGVLVVAASGNSGAGSISYPARYANAMAVGATDQNNNRADFSQYGAGLDIVAPGVNVQSTYPGSTYASLNGTSMATPHVAGAAVLVKQKRPSWSNVRIRDHLKNTATSLGSTNLYGSGLVNAEAATR

SEQ ID NO: 59516 - protein, 269 aa, Unidentified
AQSVPWGISRVQAPAAHNRGLAGSGVKVAVLDTGISTHPDLNIRGGASFVPGEPSTQDGNGHGTHVAGTIAALDNSIGVLGVAPSAELYAVKVLAASGQGAISSIAQGLEWAGNNGMHVANLSLGSPSPSATLEQAVNSATSRGVLVVAASGNSGAGSISYPARYANAMAVGATDQNNNRASFSQYGAGLDIVAPGVNVQSTYPGSTYASLNGTSMATPHVAGAAVLVKQKNPSWSNVRIRNHLKNTATSLGSTNLYGSGLVNAEAATR

SEQ ID NO: 59517 - protein, 269 aa, Unidentified
AQSVPWGISRVQAPAAHNRGLTGRGVKVAVLDTGISTHPDLRIRGGASFVPGEPSTQDGNGHGTHVAGTIAALDNSIGVLGVAPSAELYAVKVLGASGGGAISSIAQGLEWAGNNGMHVANLSLGSPSPSATLEQAVNSATSRGVLVVAASGNSGAGSISYPARYANAMAVGATDQNNNRASFSQYGAGLDIVAPGVNVQSTYPGSTYASLNGTSMATPHVAGAAVLVKQKNPSWSNVRIRNHLKNTATSLGSTNLYGSGLVNAEAATR

SEQ ID NO: 59518 - protein, 269 aa, Unidentified
AQSVPWGISRVQAPAAHNRKLTGSGVKVAVLDTGISTHPDLNIRGGASFVPGEPSTQDGEGHGTHVAGTIAALNNNIGVLGVAPSAELYAVKVLAASGNGSVSSIAQGLEWAGLNGMHVANLSLGSPSPSATLEQAVNSATSRGVLVVAASGNSGAGSISYPARYANAMAVGATDQNNNRADFSQYGAGLDIVAPGVNVQSTYPGSTYASQNGTSMATPHVAGAAALVKQKNPSWSNVQIRNHLKNTATSLGSTNLYGSGLVNAEAATR

SEQ ID NO: 59519 - protein, 269 aa, Unidentified
AQSVPWGISRVQAPAAHNRGLTGSGVKVAVLDTGISTHPDLNIRGGASFVPGEPSTQDGNGHGTHVAGTIAALNNSIGVLGVAPSAELYAVKVLGASGAGALSSIAQGLEWAGNNGMHVANLSLGSPSPSATLEQAVNSATSRGVLVVAASGNSGAESISYPARYANAMAVGATDQNNNRASFSQYGAGLDIVAPGVNVQSTYPGSTYASLNGTSMATPHVAGAAVLVKQKNPSWSNVRIRDRLKNTATSLGSTNLYGSGLVNAEAATR

SEQ ID NO: 59520 - protein, 269 aa, Unidentified
AQSVPWGISRVQAPAAHNRGLTGSGVKVAVLDTGISTHPDLKIRGGASFVPGEPSTQDGNGHGTHAAGTIAALNNSIGVLGVAPSAELYAVKVLGASGSGAISSIAQGLEWAGNNGMHVANLSLGSPSPSATLEQAVNSATSRGVLVVAASGNSGADSISYPARYANAMAVGATDQNNNRASFSQYGAGLDIVAPGVNVQSTYPGSTYASLNGTSMATPHVAGAAVLVKHKNPSWSNVRIRNHLKNTATSLGSTNLYGSGLVNAEAATR

SEQ ID NO: 59521 - protein, 269 aa, Unidentified
AQSVPWGISRVQAPAAHNRGLAGSGVKVAVLDTGISTHPDLNIRGGASFVPGEPSTQDGNGHGTHVAGTIAALNNSIGVLGVAPSAELYAVKVLGASGGGAISSIAQGLEWAGNNGMHVANLSLGSPSPSATLEQAVNSATSRGVLVVAASGNSGAGSISYPARYANAMAVGATDQNNNRASFSQYGAGLDIVAPGVNVQSTYPGSTYASLNGTSMATPHVAGAAVLVKQKYPSWSNVRIRNHLKNTATSLGSTNLYGSGLVNAEVATR

SEQ ID NO: 59522 - protein, 269 aa, Unidentified
AQSVPWGISRVQAPAAHNRGLTGSGVKVAVLDTGISTHEDLNIRGGASFVPGEPSTQDGNGHGTHVAGTIAALDNSIGVLGVAPRAELYAVKVLGASGSGSVSSIAQGLEWAGNNRMHVANLSLGLQAPSATLEQAVNSATSRGVLVVAASGNSGAGSISYPARYANAMAVGATDQNNNRASFSQYGAGLDIVAPGVNVQSTYPGSTYASLNGTSMATPHVAGAAALVKQKNPSWSNVQIRNHLKNTATSLGSTILYGSGLVNAEAATR

SEQ ID NO: 59523 - protein, 269 aa, Unidentified
AQSVPWGISRVQAPAAHNRGLAGGGVKVAVLDTGISTHPDLNIRGGASFVPGEPSTQDGNGHGTHVAGTIAALNNSIGVLGVAPSAELYAVKVLGASGQGALSSIANGLEWAGNNGMHVANLSLGSPSPSATLEQAVNSATSRGVLVVAASGNSGAGSISYPARYANAMAVGATDQNNNRASFSQYGAGLDIVAPGVNVQSTYPGSTYASLNGTSMATPHVAGAAVLVKQKNPSWSNVRIRNHLKNTATSLGSTNLYGSGLVNAEAATR

SEQ ID NO: 59524 - protein, 269 aa, Unidentified
AQSVPWGISRVQAPAAHNRGLAGSGVKVAVLDTGISTHPDLNIRGGASFVPGEPSTQDGNGHGTHVAGTIAALNNSIGVLGVAPSAELYAVKVLAASGQGAISSIAQGLEWAGNNGMHVANLSLGSPSPSATLEQAVNSATSRGVLVVAASGNSGAGSISYPARYANAMAVGATDQNNNRASFSQYGAGLDIVAPGVNVQSTYPGSTYASQNGTSMATPHVAGAAVLVKQKNPSWSNVRIRNHLKNTATSLGSTNLYGSGLVNAEAATR

SEQ ID NO: 59525 - protein, 269 aa, Unidentified
AQSVPWGISRVQAPAAHNRGLAGRGVKVAVLDSGISTHPDLNIRGGASFVPGEPSTQDGNGHGTHVAGTIAALNNSIGVLGVAPSAELYAVKVLGASGSGSVSSIAQGLEWAGLNRMHVANLSLGIPSPSATLEQAVNSATSRGVLVVAASGNSGEGSIDYPARYANAMAVGATDQNNNRASFSQYGAGLDIVAPGVNVQSTYPGSTYASLNGTSMATPHVAGAAALVKQKNPSWSNVQIRNHLKNTATSLGSTNLYGSGLVNAEAATR

SEQ ID NO: 59526 - protein, 269 aa, Unidentified
AQSVPWGISRVQAPAAHNRGLTGSGVKVAVLDTGISTHPDLNIRGGASFVPGEPSTQDGNGHGTHVAGTIAALDNSIGVLGVAPRAELYAVKVLGASGSGSVSSIAQGLEWAGNNGMHVANLSLGLQAPSATLEQAVNSATSRGVLVVAASGNSGAGSISYPARYANAMAVGATDQNNNRASFSQYGAGLDIVAPGVNVLSTWPGSTYASLNGTSMATPHVAGAAALVKQKNPSWSNVQIRNRLKNTATSLGSTNLYGSGLVNAEAATR

SEQ ID NO: 59527 - protein, 269 aa, Unidentified
AQSVPWGISRVQAPAAHNRKLTGSGVKVAVLDTGISTHPDLNIRGGASFVPGEPSTQDGEGHGTHVAGTIAALNNNIGVLGVAPSAELYAVKVLAASGNGSVSSIAGGLEWAGLNGMHVANLSLGSPSPSATLEQAVNSATSRGVLVVAASGNSGAGSISYPARYANAMAVGATDQNNNRADFSQYGAGLDIVAPGVNVQSTYPGSTYASLNGTSMATPHVAGAAALVKQKNPSWSNVQIRNHLKNTATSLGSTNLYGSGLVNAEAATR

SEQ ID NO: 59528 - protein, 269 aa, Unidentified
AQSVPWGISRVQAPAAHRRGLWGRGVKVAVLDTGISTHPDLNIRGGASFVPGEPSTQDGNGHGTHVAGTIAALDNSIGVLGVAPSAELYAVKVLGASGSGSVSSIAQGLEWAGANGMHVANLSLGSPSPSATLEQAVNSATSRGVLVVAASGNSGAGSISYPARYANAMAVGATDQNNNRASFSQYGAGLDLVAPGVNVQSTYPGSTYFSLNGTSMATPHVAGAAALVKQKNPSWSNVQIRNRLKNTATSLGSTNLYGSGLVNAEAATR

SEQ ID NO: 59529 - protein, 269 aa, Unidentified
AQSVPWGISRVQAPAAHNRGLRGSGVKVAVLDTGISTHPDLNIRGGASFVPGEPSTQDGNGHGTHVAGTIAALNNSIGVLGVAPSAELYAVKVLGASGQGAISSIAQGLEWAGLNGMHVANLSLGSPSPSATLEQAVNSATSRGVLVVAASGNSGAGSISYPARYANAMAVGATDQNNNRASFSQYGAGLDIVAPGVNVQSTYPGSTYASQNGTSMATPHVAGAAVLVKQKNPSWSNVRIRNHLKNTATSLGSTNLYGSGLVNAEAATR

SEQ ID NO: 59530 - protein, 269 aa, Unidentified
AQSVPWGISRVQAPAAHRRGLTGRGVKVAVLDTGISTHPDLNIRGGASFVPGEPSTQDGNGHGTHVAGTIAALDNSIGVLGVAPSAELYAVKVLGASGAGSVSSIAQGLEWAGANGMHVANLSLGSPSPSATLEQAVNSATSRGVLVVAASGNSGAGSISYPARYANAMAVGATDQNNNRASFSQYGAGLDIVAPGVNVQSTYPGSAYFSLNGTSMATPHVAGAAALVKQKNPSWSNVQIRNRLKNTATSLGSTNLYGSGLVNAEAATR

SEQ ID NO: 59531 - protein, 269 aa, Synthetic construct
AQSVPWGISRVQAPAAHNRGLTGSGVKVAVLDTGISTHPDLNIRGGASFVPGEPSTQDGNGHGTHVAGTIAALNNSIGVLGVAPSAELYAVKVLGASGSGSVSSIAQGLEWAGNNGMHVANLSLGSPSPSATLEQAVNSATSRGVLVVAASGNSGAGSISYPARYANAMAVGATDQNNNRASFSQYGAGLDIVHQGVNCDSTAPGSSYASLNQPSMATPHVAGAAALVKQKNPSWSNVQIRNHLKNTATSLGSTNLYGSGLVNAEAATR

SEQ ID NO: 59532 - protein, 269 aa, Unidentified
AQSVPWGISRVQAPAAHRRRLTGRGVKVAVLDTGISTHPDLNIRGGASFVPGEPSTQDGNGHGTHVAGTIAALDNSIGVLGVAPSAELYAVKVLGASGSGSVSSIAQGLEWAGANGMHVANLSLGSPSPSATLEQAVNSATSRGVLVVAASGNSGAGSISYPARYANAMAVGATDQNNNRASFSQYGAGLDIVAPGVNVQSTYPQSTYFSLNGTSMATPHVAGAAALVKQKNPSWSNVQIRNRLKNTATSLGSTNLYGSGLVNAEAATR

SEQ ID NO: 59533 - protein, 269 aa, Unidentified
AQSVPWGISRVQAPAAHNRGLTGSGVKVAVLDTGISTHPDLNIRGGASFVPGEPSTQDGNGHGTHVAGTIAALNNSIGVLGVAPSAELYAVKVLGASGGGAISSIAQGLEWAGANGMHVANLSLGSPSPSATLEQAVNSATSRGVLVVAASGNSGAGSISYPARYANAMAVGATDQNNNRASFSQYGAGLDIVAPGVNVQSTAPQSAYASLNGTSMATPHVAGAAVLVKQKNPSWSNVQIRNHLKNTATSLGSTNLYGSGLVNAEAATR

SEQ ID NO: 59534 - protein, 269 aa, Unidentified
AQSVPWGISRVQAPAAHNRKLTGGGVKVAVLDTGISTHPDLNIRGGASFVPGEPSTQDGEGHGTHVAGTIAALNNSIGVLGVAPSAELYAVKVLGASGNGSVSSIAGGLEWAGLNGMHVANLSLGAPSPSATLEQAVNSATSRGVLVVAASGNSGAGSISYPARYANAMAVGATDQNNNRASFSQYGAGLDIVAPGVNVQSTYPGSTYASQNGTSMATPHVAGAAALVKQKNPSWSNVQIRNHLKNTATSLGSTNLYGSGLVNAEAATR

SEQ ID NO: 59535 - protein, 269 aa, Unidentified
AQSVPWGISRVQAPAAHNRGLTGSGVKVAVLDTGISTHPDLNIRGGASFVPGEPSTQDGNGHGTHVAGTIAALDNIIGVLGVAPRAELYAVKVLGASGSGSVSSIAQGLEWAGNNRMHVANLSLGLQAPSATLEQAVNSATSRGVLVVAASGNSGAGSISYPARYANAMAVGATDQNNNRASFSQYGAGLDIVAPGVNVYSTYPGSTYASLNGTSMATPHVAGAAALVKQKNPSWSNVQIRNHLKNTATSLGSTNLYGSGLVNAEAATR

SEQ ID NO: 59536 - protein, 269 aa, Unidentified
AQSVPWGISRVQAPAAHNRKLTGSGVKVAVLDTGISTHPDLNIRGGASFVPGEPSTQDGEGHGTHVAGTIAALNNNIGVLGVAPSAELYAVKVLSASGQGSVSSIAGGLEWAGLNGMHVANLSLGAPSPSATLEQAVNSATSRGVLVVAASGNSGAGSISYPARYANAMAVGATDQNNNRADFSQYGAGLDIVAPGVNVQSTYPGSTYASLNGTSSATPHVAGAAALVKQKNPSWSNVQIRNHLKNTATSLGSTNLYGSGLVNAEAATR

SEQ ID NO: 59537 - protein, 269 aa, Unidentified
AQSVPWGISRVQAPAAHNRRLTGSGVKVAVLDTGISTHPDLNIRGGASFVPGEPSTQDGEGHGTHVAGTIAALNNGIGVLGVAPSAELYAVKVLGASGSGSVSSIAQGLEWAGNNSMHVANLSLGSESPSATLEQAVNSATSRGVLVVAASGNSGAGSISYPARYANAMAVGATDQNNNRADFSQYGAGLDIVAPGVNVQSTYPGSTYASLNGTSMATPHVAGAAALVKQKNPSWSNVRIRDHLKNTATSLGSTNLYGSGLVNAEAATR

SEQ ID NO: 59538 - protein, 269 aa, Unidentified
AQSVPWGISRVQAPAAHNRGLTGSGVKVAVLDTGISTHPDLNIRGGASFVPGEPSTQDGNGHGTHVAGTIAALDNHIGVLGVAPRAELYAVKVLGASGSGSVSSIAQGLEWAGNNRMHVANLSLGLQAPSATLEQAVNSATSRGVLVVAASGNSGAGSISYPARYANAMAVGATDQNNNRASFSQYGAGLDIVAPGVNVNSTYPGSTYASLNGTSMATPHVAGAAALVKQKNPSWSNVQIRNHLKNTATSLGSTNLYGSGLVNAEAATR

SEQ ID NO: 59539 - protein, 269 aa, Unidentified
AQVVPWGISRVQAPAAHNRGLTGRGVKVAVLDTGISTHPDLNIRGGASFVPGEPSTQDGNGHGTHVAGTIAALDNNIGVLGVAPDAELYAVKVLGASGSGSVSSIAQGLEWAGNNRMHVANLSLGSPSPSATLEQAVNSATSRGVLVVAASGNSGAGSISYPARYANAMAVGATDQNNNRASFSQYGAGLDIVAPGVNVQSTWPGSTYASLNGTSMATPHVAGAAALVKQKNPSWSNVQIRNRLKNTATSLGSTNLYGSGLVNAEAATR

SEQ ID NO: 59540 - protein, 269 aa, Unidentified
AQSVPWGISRVQAPAAHNRGLTGSGVKVAVLDTGISTHPDLNIRGGASFVPGEPSTQDGEGHGTHVAGTIAALDNSIGVLGVAPSAELYAVKVLGASGAGAISSIAQGLEWAGNNGMHVANLSLGSPSPSATLEQAVNSATSRGVLVVAASGNSGAGSISYPARYANAMAVGATDQNNNRADFSQYGAGLDIVAPGVNVQSTYPGSTYASLNGTSMATPHVAGAAVLVKQKNPSWSNVRIRNHLKNTATSLGSTNLYGSGLVNAEAATR

SEQ ID NO: 59541 - protein, 269 aa, Unidentified
AQSVPWGISRVQAPAAHNRGLAGRGVKVAVLDSGISTHPDLNIRGGASFVPGEPSTQDGEGHGTHVAGTIAALNNSIGVLGVAPSAELYAVKVLGASGSGSVSSIAQGLEWAGLNRMHVANLSLGSPSPSATLEQAVNSATSRGVLVVAASGNSGAGSIDYPARYANAMAVGATDQNNNRADFSQYGAGLDIVAPGVNVQSTYPGSTYASLNGTSMATPHVAGAAALVKQKNPSWSNVQIRNHLKNTATSLGSTNLYGSGLVNAEAATR

SEQ ID NO: 59542 - protein, 269 aa, Unidentified
AQSVPWGISRVQAPAAHRRGLTGRGVKVAVLDTGISTHPDLNIRGGASFVPGEPSTQDGNGHGTHVAGTIAALDNSIGVLGVAPSAELYAVKVLGASGAGSVSSIAQGLEWAGNNGMHVANLSLGSPSPSATLEQAVNSATSRGVLVVAASGNSGAGSISYPARYANAMAVGATDQDNNRASFSQYGAGLDLVAPGVNVQSTYPQSTYASLNGTSMATPHVAGAAALVKQKNPSWSNVQIRNRLKNTATSLGSTNLYGSGLVNAEAATR

SEQ ID NO: 59543 - protein, 269 aa, Unidentified
AQSVPWGISRVQAPAAHNRRLTGRGVKVAVLDTGISTHPDLNIRGGASFVPGEPSTQDGNGHGTHVAGTIAALNNDIGVLGVAPSAELYAVKVLGASGSGSVSSIAQGLEWAGNNDMHVANLSLGSESPSATLEQAVNSATSRGVLVVAASGNSGAGSISYPARYANAMAVGATDQNNNRADFSQYGAGLDIVAPGVNVQSTYPGSTYASLNGTSMATPHVAGAAALVKQKNPSWSNVQIRDRLKNTATSLGSTNLYGSGLVNAEAATR

SEQ ID NO: 59544 - protein, 269 aa, Unidentified
AQSVPWGISRVQAPAAHNRGLTGRGVKVAVLDTGISTHPDLRITGGASFVPGEPSTQDGNGHGTHVAGTIAALNNSIGVLGVAPSAELYAVKVLGASGAGSVSSIAQGLEWAGLNGMHVANLSLGSPSPSATLEQAVNSATSRGVLVVAASGNSGAGSISYPARYANAMAVGATDQNNNRASFSQYGAGLDIVAPGVNVQSTYIQSAYASLNGTSMATPHVAGAAALVKQKNPSWSNVQIRNHLKNTATSLGSTNLYGSGLVNAEAATR

SEQ ID NO: 59545 - protein, 269 aa, Unidentified
AQSVPWGISRVQAPAAHNRGLTGSGVKVAVLDTGISTHEDLNIRGGASFVPGEPSTQDGNGHGTHVAGTIAALDNSIGVLGVAPRAELYAVKVLGASGSGSVSSIAQGLEWAGNNRMHVANLSLGLQAPSATLEQAVNSATSRGVLVVAASGNSGAGSISYPARYANAMAVGATDQNNNRASFSQYGAGLDIVAPGVNVQSTYPPSTYASLNGTSMATPHVAGAAALVKQKNPSWSNVQIRNHLKNTATSLGSTNLYGSGLVNAEAATR

SEQ ID NO: 59546 - protein, 269 aa, Unidentified
AQSVPWGISRVQAPAAHNRGLTGRGVKVAVLDTGISTHPDLNIRGGASFVPGEPSTQDGNGHGTHVAGTIAALNNGIGVLGVAPSAELYAVKVLGASGSGSVSSIAQGLEWAGNNSMHVANLSLGSESPSATLEQAVNSATSRGVLVVAASGNSGADSISYPARYANAMAVGATDQNNNRADFSQYGAGLDIVAPGVNVQSTYPGSTYASLNGTSMATPHVAGAAALVKQKNPSWSNVRIRNRLKNTATSLGSTNLYGSGLVNAEAATR

SEQ ID NO: 59547 - protein, 269 aa, Unidentified
AQSVPWGISRVRAPAAHNRGLTGSGVKVAVLDTGISTHPDLNIRGGASFVPGEPSTQDGNGHGTHVAGTIAALNNSIGVLGVAPSAELYAVKVLGASGGGAISSIAQGLEWAGLNGMHVANLSLGNPSPSATLEQAVNSATSRGVLVVAASGNSGAGSISYPARYANAMAVGATDQNNNRASFSQYGAGLDIVAPGVNVQSTVPGSTYASLNGTSMATPHVAGAAVLVKQKNPSWSNVQIRNHLKNTATSLGSTNLYGSGLVNAEAATR

SEQ ID NO: 59548 - protein, 269 aa, Unidentified
AQSVPWGISRVQAPAAHNRGLAGSGVKVAVLDTGISTHPDLNIRGGASFVPGEPSTQDGNGHGTHVAGTIAALDNSIGVLGVAPSAELYAVKVLGASGGGAISSIAQGLEWAGNNGMHVANLSLGSPSPSATLEQAVNSATSRGVLVVAASGNSGAGSISYPARYANAMAVGATDQNNNRASFSQYGAGLDIVAPGVNVQSTYPGSTYASLNGTSMATPHVAGAAVLVKQKNPSWSNVRIRNHLKNTATSLGSTNLYGSGLVNAEVATR

SEQ ID NO: 59549 - protein, 269 aa, Unidentified
AQSVPWGISRVQAPAAHNRGLTGSGVKVAVLDTGISTHPDLNIRGGASFVPGEPSTQDGNGHGTHVAGTIAALNNSIGVLGVAPSAELYAVKVLGASGSGAISSIAQGLEWAGNNGMHVANLSLGSPSPSATLEQAVNSATSRGVLVVAASGNSGADSISYPARYANAMAVGATDQNNNRASFSQYGAGLDIVAPGVNVQSTWIGSTYASLNGTSMATPHVAGAAVLVKHKNPSWSNVRIRNHLKNTATSLGSTNLYGSGLVNAEAATR

SEQ ID NO: 59550 - protein, 269 aa, Unidentified
AQSVPWGISRVQAPAAHNRGLTGSGVKVAVLDTGISTHPDLNIRGGASFVPGEPSTQDGNGHGTHAAGTIAALDNSIGVLGVAPSAELYAVKVLGASGSGAISSIAQGLEWAGNNGMHVANLSLGSPSPSATLEQAVNSATSRGVLVVAASGNSGADSISYPARYANAMAVGATDQNNNRASFSQYGAGLDIVAPGVNVQSTYPGSTYASLNGTSMATPHVAGAAALVKHKNPSWSNVRIHNHLKNTATSLGSTNLYGSGLVNAEAATR

SEQ ID NO: 59551 - protein, 269 aa, Unidentified
AQSVPWGISRVQAPAAHNRGLTGSGVKVAVLDTGISTHPDLNIRGGASFVPGEPSTQDGNGHGTHVAGTIAALNNSIGVLGVAPSAELYAVKVLGASGGGSIASIAQGLEWAGNNGMHVANLSLGNESPSATLEQAVNSATSRGVLVVAASGNSGAGSISYPARYANAMAVGATDQNNNRASFSQYGAGLDIVAPGVNVQSTYPGSTYASLNGTSMATPHVAGAAVLVKQKNPSWSNVRIRDHLKNTATSLGSTNLYGSGLVNAEAATR

SEQ ID NO: 59552 - protein, 269 aa, Unidentified
AQSVPWGISRVQAPAAHNRKLTGGGVKVAVLDTGISTHPDLNIRGGASFVPGEPSTQDGEGHGTHVAGTIAALNNNIGVLGVAPSAELYAVKVLSASGNGSVSSIAGGLEWAGLNGMHVANLSLGAPSPSATLEQAVNSATSRGVLVVAASGNSGAGSISYPARYANAMAVGATDQNNNRASFSQYGAGLDIVAPGVNVQSTYPGSTYASLNGTSSATPHVAGAAALVKQKNPSWSNVQIRNHLKNTATSLGSTNLYGSGLVNAEAATR

SEQ ID NO: 59553 - protein, 269 aa, Unidentified
AQSVPWGISRVQAPAAHRRGLTGRGVKVAVLDTGISTHPDLNIRGGASFVPGEPSTQDGNGHGTHVAGTIAALDNSIGVLGVAPSAELYAVKVLGASGAGSVSSIAQGLEWAGANGMHVANLSLGSPSPSATLEQAVNSATSRGVLVVAASGNSGAGSISYPARYANAMAVGATDQNNNRASFSQYGAGLDLVAPGVNVQSTYPGSAYASLNGTSMATPHVAGAAALVKQKNPSWSNVQIRNRLKNTATSLGSTNLYGSGLVNAEAATR

SEQ ID NO: 59554 - protein, 269 aa, Unidentified
AQSVPWGISRVQAPAAHNRGLRGFGVKVAVLDTGISTHPDLNIRGGASFVPGEPSTQDGNGHGTHVAGTIAALNNSIGVLGVAPSAELYAVKVLGASGGGAISSIAQGLEWAGNNGMHFANLSLGSPSPSATLEQAVNSATSRGVLVVAASGNSGAGSISYPARYANAMAVGATDQNNNRASFSQYGAGLDIVAPGVNVQSTYPGSTYASLNGTSMATPHVAGAAVLVKQKNPSWSNVRIRNHLKNTATSLGSTNLYGSGLVNAEAATR

SEQ ID NO: 59555 - protein, 269 aa, Unidentified
AQSVPWGISRVQAPAAHNRRLTGRGVKVAVLDTGISTHPDLNIRGGASFVPGEPSTQDGNGHGTHVAGTIAALNNDIGVLGVAPSAELYAVKVLGASGSGSVSSIAQGLEWAGNNSMHVANLSLGSPSPSATLEQAVNSATSRGVLVVAASGNSGADSISYPARYANAMAVGATDQNNNRADFSQYGAGLDIVAPGVNVQSTYPGSTYASLNGTSMATPHVAGAAALVKQKNPSWSNVRIRDHLKNTATSLGSTNLYGSGLVNAEAATR

SEQ ID NO: 59556 - protein, 269 aa, Unidentified
AQSVPWGISRVQAPAAHNRRLTGRGVKVAVLDTGISTHPDLNIRGGASFVPGEPSTQDGNGHGTHVAGTIAALNNNIGVLGVAPSAELYAVKVLSASGGGSVSSIANGLEWAGLNGMHVANLSLGSPSPSATLEQAVNSATSRGVLVVAASGNSGAGSISYPARYANAMAVGATDQNNNRASFSQYGAGLDIVAPGVNVQSTYPGSTYASQNGTSMATPHVAGAAALVKQKNPSWSNVQIRNHLKNTATSLGSTNLYGSGLVNAEAATR

SEQ ID NO: 59557 - protein, 269 aa, Unidentified
AQSVPWGISRVQAPAAHRRGLTGRGVKVAVLDTGISTHPDLNIRGGASFVPGEPSTQDGNGHGTHVAGTIAALDNSIGVLGVAPSAELYAVKVLGASGSGSVSSIAQGLEWAGNNGMHVANLSLGSPSPSATLEQAVNSATSRGVLVVAASGNSGAGSISYPARYANAMAVGATDQNNNRASFSQYGAGLDLVAPGVNVQSTYPQSAYFSLNGTSMATPHVAGAAALVKQKNPSWSNVQIRNRLKNTATSLGSTNLYGSGLVNAEAATR

SEQ ID NO: 59558 - protein, 269 aa, Unidentified
AQSVPWGISRVQAPAAHRRGLTGSGVKVAVLDTGISTHPDLDIRGGASFVPGEPSTQDGNGHGTHVAGTIAALNNRIGVLGVAPSAELYAVKVLGASGGGAISSIAQGLEWAGNNGMHVANLSLGSPSPSATLEQAVNSATSRGVLVVAASGNSGAGSISYPARYANAMAVGATDQNNNRASFSQYGAGLDIVAPGVNVQSTYPGSTYASLNGTSMATPHVAGAAVLVKQKNPSWSNVRIRNHLKNTATSLGSTNLYGSGLVNAEAATR

SEQ ID NO: 59559 - protein, 269 aa, Unidentified
AQSVPWGISRVQAPAAHNRGLTGSGVKVAVLDTGISTHPDLNIRGGASFVPGEPSTQDGNGHGTHVAGTIAALDNWIGVLGVAPRAELYAVKVLGASGSGSVSSIAQGLEWAGNNRMHVANLSLGLQAPSATLEQAVNSATSRGVLVVAASGNSGAGSISYPARYANAMAVGATDQNNNRASFSQYGAGLDIVAPGVNVFSTYPGSTYASLNGTSMATPHVAGAAALVKQKNPSWSNVQIRNHLKNTATSLGSTNLYGSGLVNAEAATR

SEQ ID NO: 59560 - protein, 269 aa, Unidentified
AQSVPWGISRVQAPAAHNRRLTGSGVKVAVLDTGISTHPDLNIRGGASFVPGEPSTQDGNGHGTHVAGTIAALNNGIGVLGVAPSAELYAVKVLGASGSGSVSSIAQGLEWAGNNSMHVANLSLGSESPSATLEQAVNSATSRGVLVVAASGNSGADSISYPARYANAMAVGATDQNNNRASFSQYGAGLDIVAPGVNVQSTYPGSTYASLNGTSMATPHVAGAAALVKQKNPFWSNVQIRDRLKNTATSLGSTNLYGSGLVNAEAATR

SEQ ID NO: 59561 - protein, 269 aa, Unidentified
AQSVPWGISRVQAPAAHNRRLTGSGVKVAVLDTGISTHPDLNIRGGASFVPGEPSTQDGNGHGTHVAGTIAALNNSIGVLGVAPSAELYAVKVLGASGAGAISSIAQGLEWAGANGMHVANLSLGSPSPSATLEQAVNSATSRGVLVVAASGNSGAGSISYPARYANAMAVGATDQDNNRASFSQYGAGLDIVAPGVNVQSTYPGSTYASLNGTSMATPHVAGAAVLVKQKNPSWSNVRIRNHLKNTATSLGSTNLYGSGLVNAEAATR

SEQ ID NO: 59562 - protein, 269 aa, Unidentified
AQSVPWGISRVQAPAAHNRGLAGGGVKVAVLDTGISTHPDLNIRGGASFVPGEPSTQDGNGHGTHVAGTIAALNNNIGVLGVAPSAELYAVKVLGASGQGAISSIAQGLEWAGNNGMHVANLSLGSPSPSATLEQAVNSATSRGVLVVAASGNSGAGSISYPARYANAMAVGATDQNNNRASFSQYGAGLDIVAPGVNVQSTYPGSTYASLNGTSMATPHVAGAAVLVKQKNPSWSNVRIRNHLKNTATSLGSTNLYGSGLVNAEAATR

SEQ ID NO: 59563 - protein, 269 aa, Unidentified
AQTIPWGISRVQAPAAHNRGLTGSGVKVAVLDTGISTHPDLNIRGGASFVPGEPSTQDGNGHGTHVAGTIAALNNSIGVLGVAPSAELYAVKVLGADGRGAISSIAQGLEWAGNNGMHVANLSLGSPSPSATLEQAVNSATSRGVLVVAASGNSGASSISYPARYANAMAVGATDQNNNRASFSQYGAGLDIVAPGVNIQSTYPGSTYASLNGTSMATPHVAGAAALVKQKNPSWSNVQIRNHLKNTATSLGSTNLYGSGLVNAEAATR

SEQ ID NO: 59564 - protein, 269 aa, Unidentified
AQSVPWGISRVQAPAAHNRGLAGSGVKVAVLDTGISTHPDLNIRGGASFVPGEPSTQDGNGHGTHVAGTIAALNNSIGVLGVAPSAELYAVKVLAASGNGAISSIAQGLEWAGNNGMHVANLSLGSPSPSATLEQAVNSATSRGVLVVAASGNSGAGSISYPARYANAMAVGATDQNNNRASFSQYGAGLDIVAPGVNVQSTYPGSTYASQNGTSMATPHVAGAAVLVKQKNPSWSNVRIRNHLKNTATSLGSTNLYGSGLVNAEAATR

SEQ ID NO: 59565 - protein, 269 aa, Unidentified
AQSVPWGISRVQAPAAHRRGLTGRGVKVAVLDTGISTHPDLNIRGGASFVPGEPSTQDGNGHGTHVAGTIAALDNSIGVLGVAPSAELYAVKVLGASGSGSVSSIAQGLEWAGNNGMHVANLSLGSPSPSATLEQAVNSATSRGVLVVAASGNSGAGSISYPARYANAMAVGATDQDNNRASFSQYGAGLDLVAPGVNVQSTYPGSAYFSLNGTSMATPHVAGAAALVKQKNPSWSNVQIRNRLKNTATSLGSTNLYGSGLVNAEAATR

SEQ ID NO: 59566 - protein, 269 aa, Unidentified
AQSVPWGISRVQAPAAHNRGLTGFGVKVAVLDTGISTHPDLNIRGGASFVPGEPSTQDGNGHGTHVAGTIAALNNSIGVLGVAPSAELYAVKVLGASGGGAISSIAQGLEWAGANGMHVANLSLGSPSPSATLEQAVNSATSRGVLVVAASGNSGAGSISYPARYANAMAVGATDQNNNRASFSQYGAGLDIVAPGVNVQSTAPGSAYASLNGTSMATPHVAGAAVLVKQKNPSWSNVQIRNHLKNTATSLGSTNLYGSGLVNAEAATR

SEQ ID NO: 59567 - protein, 269 aa, Unidentified
AQSVPWGISRVQAPAAHNRGLTGSGVKVAVLDTGISTHPDLNIRGGASFVPGEPSTQDGNGHGTHVAGTIAALNNSIGVLGVAPSAELYAVKVLGASGGGAISSIAQGLEWAGNNGMHVANLSLGSPSPSATLEQAVNSATSRGVLVVAASGNSGEGSISYPARYANAMAVGATDQNNNRASFSQYGAGLDIVAPGVNVQSTYPGSTYASLNGTSMATPHVAGAAVLVKQKNPSWSNVRIRDHLKNTATSLGSTNLYGSGLVNAFAATR

SEQ ID NO: 59568 - protein, 269 aa, Unidentified
AQSVPWGISRVQAPAAHNRGLTGSGVKVAVLDTGISTHPDLNIRGGASFVPGEPSTQDGNGHGTHAAGTIAALNNSIGVLGVAPSAELYAVKVLGASGSGAISSIAQGLEWAGNNGMHVANLSLGSPSPSATLEQAVNSATSRGVLVVAASGNSGADSISYPARYANAMAVGATDQNNNRASFSQYGAGLDIVAPGVNVQSTYPGSTYASLNGTSMATPHVAGVAVLVKHKNPSWSNVRIRNHLKNTATSLGSTNLYGSGLVNAEAATR

SEQ ID NO: 59569 - protein, 269 aa, Unidentified
AQSVPWGISRVQAPAAHNRGLTGRGVKVAVLDTGISTHPDLNIRGGASFVPGEPSTQDGNGHGTHVAGTIAALNNGIGVLGVAPSAELYAVKVLGASGSGSVSSIAQGLEWAGNNSMHVANLSLGSESPSATLEQAVNSATSRGVLVVAASGNSGAGSISYPARYANAMAVGATDQNNNRADFSQYGAGLDIVAPGVNVQSTYPGSTYASLNGTSMATPHVAGAAALVKQKNPSWSNVRIRDRLKNTATSLGSTNLYGSGLVNAEAATR

SEQ ID NO: 59570 - protein, 269 aa, Unidentified
AQSVPWGISRVQAPAAHNRRLTGRGVKVAVLDTGISTHPDLNIRGGASFVPGEPSTQDGEGHGTHVAGTIAALNNDIGVLGVAPSAELYAVKVLGASGSGSVSSIAQGLEWAGNNDMHVANLSLGSPSPSATLEQAVNSATSRGVLVVAASGNSGADSISYPARYANAMAVGATDQNNNRADFSQYGAGLDIVAPGVNVQSTYPGSTYASLNGTSMATPHVAGAAALVKQKNPSWSNVQIRDHLKNTATSLGSTNLYGSGLVNAEAATR

SEQ ID NO: 59571 - protein, 269 aa, Unidentified
AQSVPWGISRVQAPAAHNRGLTGSGVKVAVLDTGISTHPDLNIRGGASFVPGEPSTQDGEGHGTHVAGTIAALNNGIGVLGVAPSAELYAVKVLGASGSGSVSSIAQGLEWAGNNSMHVANLSLGSESPSATLEQAVNSATSRGVLVVAASGNSGADSISYPARYANAMAVGATDQNNNRASFSQYGAGLDIVAPGVNVQSTYPGSTYASLNGTSMATPHVAGAAALVKQKNPSWSNVRIRDRLKNTATSLGSTNLYGSGLVNAEAATR

SEQ ID NO: 59572 - protein, 269 aa, Unidentified
AQSVPWGISRVQAPAAHNRGLAGSGVKVAVLDTGISTHPDLNIRGGASFVPGEPSTQDGNGHGTHVAGTIAALNNSIGVLGVAPSAELYAVKVLGASGGGAISSIAQGLEWAGLNGMHVANLSLGSPSPSATLEQAVNSATSRGVLVVAASGNSGAGSISYPARYANAMAVGATDQNNNRASFSQYGAGLDIVAPGVNVQSTVPGSAYASLNGTSMATPHVAGAAVLVKQKNPSWSNVQIRNHLKNTATSLGSTNLYGSGLVNAEAATR

SEQ ID NO: 59573 - protein, 269 aa, Unidentified
AQSVPWGISRVQAPAAHNRGLAGSGVKVAVLDTGISTHPDLNIRGGASFVPGEPSTQDGNGHGTHVAGTIAALNNSIGVLGVAPSAELYAVKVLGASGQGAISSIAQGLEWAGNNGMHVANLSLGASSPSATLEQAVNSATSRGVLVVAASGNSGAGSISYPARYANAMAVGATDQNNNRASFSQYGAGLDIVAPGVNVQSTYPGSTYASLNGTSMATPHVAGAAVLVKQKNPSWSNVRIRNHLKNTATSLGSTNLYGSGLVNAEAATR

SEQ ID NO: 59574 - protein, 269 aa, Unidentified
AQSVPWGISRVQAPAAHNRGLTGSGVKVAVLDTGISTHPDLNIRGGASFVPGEPSTQDGNGHGTHAAGTIAALNNSIGVLGVAPSAELYAVKVLGASGSGAISSIAQGLEWAGNNGMHVANLSFGSPSPSATLEQAVNSATSRGVLVVAASGNSGADSISYPARYANAMAVGATDQNNNRASFSQYGAGLDIVAPGVNVQSTYPGSTYASLNGTSMATPHVAGAAVLVKHKNPSWSNVRIRNHLKNTATSLGSTNLYGSGLVNAEAATR

SEQ ID NO: 59575 - protein, 269 aa, Unidentified
AQSVPWGISRVQAPAAHNRGLTGSGVKVAVLDTGISTHPDLNIRGGASFVPGEPSTQDGNGHGTHVAGTIAALNNSIGVLGVAPSAELYAVKVLGASGGGAISSIAQGLEWAGNNGMHVANLSLGSESPSATLEQAVNSATSRGVLVVAASGNSGAGSISYPARYANAMAVGATDQNNNRADFSQYGAGLDIVAPGVNVQSTYPGSTYASLNGTSMATPHVAGAAVLVKQKNPSWSNVRIRDHLKNTATSLGSTNLYGSGLVNAEAATR

SEQ ID NO: 59576 - protein, 269 aa, Unidentified
AQSVPWGISRVQAPASHNRGLTGFGVKVAVLDTGISTHPDLNIRGGASFVPGEPSTQDGNGHGTHVAGTIAALNNSIGVLGVAPSAELYAVKVLGASGGGAISSIAQGLEWAGLNGMHVANLSLGSPSPSATLEQAVNSATSRGVLVVAASGNSGAGSISYPARYANAMAVGATDQNNNRASFSQYGAGLDIVAPGVNVQSTVPGSTYASLNGTSMATPHVAGAAVLVKQKNPSWSNVQIRNHLKNTATSLGSTNLYGSGLVNAEAATR

SEQ ID NO: 59577 - protein, 269 aa, Unidentified
AQSVPWGISRVQAPAAHRRGLTGSGVKVAVLDTGISTHPDLNIRGGASFVPGEPSTQDGNGHGTHVAGTIAALDNNIGVLGVAPSAELYAVKVLGASGSGSVSSIAQGLEWAGNNGMHVANLSLGLQAPSATLEQAVNSATSRGVLVVAASGNSGAGSISYPARYANAMAVGATDQNNNRASFSQYGAGLDIVAPGVNVLSTYPGSTYASLNGTSMATPHVAGAAALVKQKNPSWSNVQIRNHLKNTATSLGSTNLYGSGLANAEAATR

SEQ ID NO: 59578 - protein, 269 aa, Unidentified
AQSVPWGISRVQAPAAHNRGLAGSGVKVAVLDTGISTHPDLNIRGGASFVPGEPSTQDGNGHGTHVAGTIAALNNSIGVLGVAPSAELYAVKVLAASGGGAISSIAQGLEWAGNNGMHVANLSLGSPSPSATLEQAVNSATSRGVLVVAASGNSGAGSISYPARYANAMAVGATDQNNNRASFSQYGAGLDIVAPGVNVQSTYPGSTYASQNGTSMATPHVAGAAVLVKQKNPSWSNVRIRNHLKNTATSLGSTNLYGSGLVNAEAATR

SEQ ID NO: 59579 - protein, 269 aa, Unidentified
AQSVPWGISRVQAPAAHNRRLTGRGVKVAVLDTGISTHPDLNIRGGASFVPGEPSTQDGNGHGTHVAGTIAALNNDIGVLGVAPSAELYAVKVLGASGSGSVSSIAQGLEWAGNNDMHVANLSLGSESPSATLEQAVNSATSRGVLVVAASGNSGADSISYPARYANAMAVGATDQNNNRASFSQYGAGLDIVAPGVNVQSTYPGSTYASLNGTSMATPHVAGAAALVKQKNPSWSNVQIRDRLKNTATSLGSTNLYGSGLVNAEAATR

SEQ ID NO: 59580 - protein, 269 aa, Unidentified
AQSVPWGISRVQAPAAHNRKLTGSGVKVAVLDTGISTHPDLNIRGGASFVPGEPSTQDGEGHGTHVAGTIAALNNNIGVLGVAPSAELYAVKVLSASGQGSVSSIAQGLEWAGLNGMHVANLSLGAPSPSATLEQAVNSATSRGVLVVAASGNSGAGSISYPARYANAMAVGATDQNNNRASFSQYGAGLDIVAPGVNVQSTYPGSTYASQNGTSMATPHVAGAAALVKQKNPSWSNVQIRNHLKNTATSLGSTNLYGSGLVNAEAATR

SEQ ID NO: 59581 - protein, 269 aa, Unidentified
AQSVPWGISRVQAPAAHRRGLWGRGVKVAVLDTGISTHPDLNIRGGASFVPGEPSTQDGNGHGTHVAGTIAALDNSIGVLGVAPSAELYAVKVLGASGAGSVSSIAQGLEWAGNNGMHVANLSLGSPSPSATLEQAVNSATSRGVLVVAASGNSGAGSISYPARYANAMAVGATDQDNNRASFSQYGAGLDLVAPGVNVQSTYPGSTYASLNGTSMATPHVAGAAALVKQKNPSWSNVQIRNRLKNTATSLGSTNLYGSGLVNAEAATR

SEQ ID NO: 59582 - protein, 269 aa, Unidentified
AQSVPWGISRVQAPAAHNRGLTGSGVKVAVLDTGISTHPDLNIRGGASFVPGEPSTQDGNGHGTHVAGTIAALDNQIGVLGVAPRAELYAVKVLGASGSGSVSSIAQGLEWAGNNRMHVANLSLGLQAPSATLEQAVNSATSRGVLVVAASGNSGAGSISYPARYANAMAVGATDQNNNRASFSQYGAGLDIVAPGVNVMSTYPGSTYASLNGTSMATPHVAGAAALVKQKNPSWSNVQIRNHLKNTATSLGSTNLYGSGLVNAEAATR

SEQ ID NO: 59583 - protein, 269 aa, Unidentified
AQSVPWGISRVQAPAAHNRGLTGSGVKVAVLDTGISTHPDLNIRGGASFVPGEPSTQDGNGHGTHVAGTIAALDNQIGVLGVAPRAELYAVKVLGASGSGSVSSIAQGLEWAGNNRMHVANLSLGLQAPSATLEQAVNSATSRGVLVVAASGNSGAGSISYPARYANAMAVGATDQNNNRASFSQYGAGLDIVAPGVNVASTYPGSTYASLNGTSMATPHVAGAAALVKQKNPSWSNVQIRNHLKNTATSLGSTNLYGSGLVNAEAATR

SEQ ID NO: 59584 - protein, 269 aa, Unidentified
AQSVPWGISRVQAPAAHNRGLTGSGVKVAVLDTGISTHPDLNIRGGASFVPGEPSTQDGNGHGTHVAGTIAALDNNIGVLGVAPRAELYAVKVLGASGSGSVSSIAQGLEWAGNNRMHVANLSLGLQAPSATLEQAVNSATSRGVLVVAASGNSGAGSISYPARYANAMAVGATDQNNNRASFSQYGAGLDIVAPGVNVQSTYPGSTYASKNGTSMATPHVAGAAALVKQKNPSWSNVQIRNHLKNTATSLGSTNLYGSGLVNAEAATR

SEQ ID NO: 59585 - protein, 269 aa, Unidentified
AQSVPWGISRVQAPAAHNRKLTGGGVKVAVLDTGISTHPDLNIRGGASFVPGEPSTQDGEGHGTHVAGTIAALNNNIGVLGVAPSAELYAVKVLSASGGGSVSSIAGGLEWAGLNGMHVANLSLGSPSPSATLEQAVNSATSRGVLVVAASGNSGAGSISYPARYANAMAVGATDQNNNRASFSQYGAGLDIVAPGVNVQSTYPGSTYASQNGTSSATPHVAGAAALVKQKNPSWSNVQIRNHLKNTATSLGSTNLYGSGLVNAEAATR

SEQ ID NO: 59586 - protein, 269 aa, Unidentified
AQSVPWGISRVQAPAAHNRGLTGSGVKVAVLDTGISTHPDLNIRGGASFVPGEPSTQDGNGHGTHVAGTIAALDNPIGVLGVAPRAELYAVKVLGASGSGSVSSIAQGLEWAGNNRMHVANLSLGLQAPSATLEQAVNSATSRGVLVVAASGNSGAGSISYPARYANAMAVGATDQNNNRASFSQYGAGLDIVAPGVNVDSTYPGSTYASLNGTSMATPHVAGAAALVKQKNPSWSNVQIRNHLKNTATSLGSTNLYGSGLVNAEAATR

SEQ ID NO: 59587 - protein, 269 aa, Bacillus lentus
AQAVPWGIRRVQAPAAHNLGLTGSGVKVAVLDTGISTHPDLRIRGGASFVPGEPSTQDGDGHGTHVAGTIAALDNSIGVLGVAPSAELYAVKVLGASGSGSVSSIAQGLEWAGNNGMHVANLSLGSPSPSATLEQAVNSATSRGVLVVAASGNSGAGSISYPARYANAMAVGATDQNNNRASFSQYGAGLDIVAPGVNVQSTYPGSTYASLNGTSMATPHVAGAAALVKQKNPSWSNVRIRNHLKNTATSLGDTNLYGSGLVNAEAATR

SEQ ID NO: 59588 - protein, 269 aa, Unidentified
AQSVPWGISRVQAPAAHNRGLTGSGVKVAVLDTGISTHPDLNIRGGASFVPGEPSTQDGEGHGTHVAGTIAALNNSIGVLGVAPSAELYAVKVLGASGGGAISSIAQGLEWAGNNGMHVANLSLGSPSPSATLEQAVNSATSRGVLVVAASGNSGADSISYPARYANAMAVGATDQNNNRASFSQYGAGLDIVAPGVNVQSTYPGSTYASLNGTSMATPHVAGAAVLVKQKNPSWSNVRIRDHLKNTATSLGSTNLYGSGLVNAEAATR

SEQ ID NO: 59589 - protein, 269 aa, Unidentified
AQSVPWGISRVQAPAAHNRGLTGSGVKVAVLDTGISTHPDLNIRGGASFVPGEPSTQDGNGHGTHVAGTIAALDNCIGVLGVAPRAELYAVKVLGASGSGSVSSIAQGLEWAGNNRMHVANLSLGLQAPSATLEQAVNSATSRGVLVVAASGNSGAGSISYPARYANAMAVGATDQNNNRASFSQYGAGLDIVAPGVNVSSTYPGSTYASLNGTSMATPHVAGAAALVKQKNPSWSNVQIRNHLKNTATSLGSTNLYGSGLVNAEAATR

SEQ ID NO: 59590 - protein, 269 aa, Unidentified
AQSVPWGISRVQAPAAHNRGLAGRGVKVAVLDTGISTHPDLNIRGGASFVPGEPSTQDGNGHGTHVAGTIAALDNSIGVLGVAPSAELYAVKVLGASGGGAISSIAQGLEWAGNNGMHVANLSLGSPSPSATLEQAVNSATSRGVLVVAASGNSGAGSISYPARYANAMAVGATDQNNNRASFSQYGAGLDIVAPGVNVQSTYPGSTYASLNGTSMATPHVAGAAVLVKQKNPSWSNVRIRNHLKNTATSLGSTNLYGSGLVNAEAATR

SEQ ID NO: 59591 - protein, 269 aa, Unidentified
AQSVPWGISRVQAPAAHNRGLTGSGVKVAVLDTGISTHPDLNITGGASFVPGEPSTQDGNGHGTHVAGTIAALDNSIGVLGVAPSAELYAVKVLGASGGGAISSIAQGLEWAGNNGMHVANLSLGSPSPSATLEQAVNSATSRGVLVVAASGNSGAGSISYPARYANAMAVGATDQNNNRASFSQYGAGLDIVAPGVNVQSTYPGSTYASLNGTSMATPHVAGAAVLVKQKNPSWSNVRIRNHLKNTATSLGSTNLYGSGLVRAEAATR

SEQ ID NO: 59592 - protein, 269 aa, Unidentified
AQSVPWGISRVQAPAAHNRGLTGSGVKVAVLDTGISTHPDLNIRGGASFVPGEPSTQDGNGHGTHVAGTIAALDNRIGVLGVAPRAELYAVKVLGASGSGSVSSIAQGLEWAGNNRMHVANLSLGLQAPSATLEQAVNSATSRGVLVVAASGNSGAGSISYPARYANAMAVGATDQNNNRASFSQYGAGLDIVAPGVNVMSTYPGSTYASLNGTSMATPHVAGAAALVKQKNPSWSNVQIRNHLKNTATSLGSTNLYGSGLVNAEAATR

SEQ ID NO: 59593 - protein, 269 aa, Unidentified
AQSVPWGISRVQAPAAHNRGLTGSGVKVAVLDTGISTHPDLNIRGGASFVPGEPSTQDGNGHGTHVAGTIAALDNTIGVLGVAPRAELYAVKVLGASGSGSVSSIAQGLEWAGNNRMHVANLSLGLQAPSATLEQAVNSATSRGVLVVAASGNSGAGSISYPARYANAMAVGATDQNNNRASFSQYGAGLDIVAPGVNVYSTYPGSTYASLNGTSMATPHVAGAAALVKQKNPSWSNVQIRNHLKNTATSLGSTNLYGSGLVNAEAATR

SEQ ID NO: 59594 - protein, 269 aa, Unidentified
AQSVPWGISRVRAPAAHNRGLTGSGVKVAVLDTGISTHPDLNIRGGASFVPGEPSTQDGNGHGTHVAGTIAALDNSIGVLGVAPSAELYAVKVLGASGSGATSSIAQGLEWAGNNGMHVANLSLGSPTPSATLEQAVNSATSRGVLVVAASGNSGAGSISYPARYANAMAVGATDQNNNRASFSQYGAGLDIVAPGVNVQSTYPGSTYASLDGTSSATPHVAGAAALVKQKNPSWSNVRIRNHLKNTATSLGSTNSYGSGLVDAEAATR

SEQ ID NO: 59595 - protein, 269 aa, Unidentified
AQSVPWGISRVQAPAAHNRRLWGRGVKVAVLDTGISTHPDLRITGGASFVPGEPSTQDGNGHGTHVAGTIAALNNSIGVLGVAPSAELYAVKVLGASGAGSVSSIAQGLEWAGNNGMHVANLSLGSPSPSATLEQAVNSATSRGVLVVAASGNSGAGSISYPARYANAMAVGATDQNNNRASFSQYGAGLDIVAPGVNVQSTYIGSAYASLNGTSMATPHVAGAAALVKQKNPSWSNVQIRNHLKNTATSLGSTNLYGSGLVNAEAATR

SEQ ID NO: 59596 - protein, 269 aa, Unidentified
AQSVPWGISRVQAPAAHNRGLAGGGVKVAVLDTGISTHPDLNIRGGASFVPGEPSTQDGNGHGTHVAGTIAALNNNIGVLGVAPSAELYAVKVLGASGNGAISSIAQGLEWAGNNGMHVANLSLGSPSPSATLEQAVNSATSRGVLVVAASGNSGAGSISYPARYANAMAVGATDQNNNRASFSQYGAGLDIVAPGVNVQSTYPGSTYASLNGTSMATPHVAGAAVLVKQKNPSWSNVRIRNHLKNTATSLGSTNLYGSGLVNAEAATR

SEQ ID NO: 59597 - protein, 269 aa, Unidentified
AQSVPWGISRVQAPAAHNRGLAGGGVKVAVLDTGISTHPDLNIRGGASFVPGEPSTQDGNGHGTHVAGTIAALNNSIGVLGVAPSAELYAVKVLGASGGGAISSIAQGLEWAGNNGMHVANLSLGAPSPSATLEQAVNSATSRGVLVVAASGNSGAGSISYPARYANAMAVGATDQNNNRASFSQYGAGLDIVAPGVNVQSTYPGSTYASLNGTSMATPHVAGAAVLVKQKNPSWSNVRIRNHLKNTATSLGSTNLYGSGLVNAEAATR

SEQ ID NO: 59598 - protein, 269 aa, Unidentified
AQSVPWGISRVQAPAAHNRGLTGSGVKVAVLDTGISTHPDLNIRGGASFVPGEPSTQDGNGHGTHVAGTIAALDNNIGVLGVAPDAELYAVKVLGASGSGSVSSIAQGLEWAGNNRMHVANLSLGLQAPSATLEQAVNSATSRGVLVVAASGNSGAGSISYPARYANAMAVGATDQNNNRASFSQYGAGLDIVAPGVNVLSTYPGSTYASLNGTSMATPHVAGAAALVKQKNPSWSNVQIRNHLKNTATSLGSTNLYGSGLVNAEAATR

SEQ ID NO: 59599 - protein, 269 aa, Unidentified
AQSVPWGIGRVQAPAAHRRGLTGRGVKVAVLDTGISTHPDLNIRGGASFVPGEPSTQDGNGHGTHVAGTIAALDNSIGVLGVAPSAELYAVKVLGASGSGSVSSIAQGLEWAGNNRMHVANLSLGSPSPSATLEQAVNSATSRGVLVVAASGNSGAGSINYPARYANAMAVGATDQNNNRASFSQYGAGLDIVAPGVNVLSTYPGSTYASLNGTSMATPHVAGAAALVKQKNPSWSNVQIRNRLKNTATSLGSTNLYGSGLVNAEAATR

SEQ ID NO: 59600 - protein, 269 aa, Unidentified
AQSVPWGISRVQAPAAHNRRLTGRGVKVAVLDTGISTHPDLNIRGGASFVPGEPSTQDGNGHGTHVAGTIAALNNGIGVLGVAPSAELYAVKVLGASGSGSVSSIAQGLEWAGNNSMHVANLSLGSPSPSATLEQAVNSATSRGVLVVAASGNSGADSISYPARYANAMAVGATDQNNNRADFSQYGAGLDIVAPGVNVQSTYPGSTYASLNGTSMATPHVAGAAALVKQKNPSWSNVRIRNRLKNTATSLGSTNLYGSGLVNAEAATR

SEQ ID NO: 59601 - protein, 273 aa, Unidentified
AQSVPWGISRVQAPAAHNRGLTGSGVKVAVLDTGISTHHQSLANLVNTSLGSFVPGEPSTQDGNGHGTHVAGTIAALNNSIGVLGVAPSAELYAVKVLGASGSGSVSSIAQGLEWAGNNGMHVANLSLGSPSPSATLEQAVNSATSRGVLVVAASGNSGAGSISYPARYANAMAVGATDQNNNRASFSQYGAGLDIVAPGVNVQSTYPGSTYASLNGTSMATPHVAGAAALVKQKNPSWSNVQIRNHLKNTATSLGSTNLYGSGLVNAEAATR

SEQ ID NO: 59602 - protein, 269 aa, Unidentified
AQSVPWGISRVQAPAAHNRRLTGRGVKVAVLDTGISTHPDLNIRGGASFVPGEPSTQDGEGHGTHVAGTIAALNNDIGVLGVAPSAELYAVKVLGASGSGSVSSIAQGLEWAGNNSMHVANLSLGSESPSATLEQAVNSATSRGVLVVAASGNSGADSISYPARYANAMAVGATDQNNNRASFSQYGAGLDIVAPGVNVQSTYPGSTYASLNGTSMATPHVAGAAALVKQKNPSWSNVRIRNHLKNTATSLGSTNLYGSGLVNAEAATR

SEQ ID NO: 59603 - protein, 269 aa, Unidentified
AQSVPWGISRVQAPAAHNRGLTGSGVKVAVLDTGISTHPDLNIRGGASFVPGEPSTQDGNGHGTHVAGTIAALDNGIGVLGVAPRAELYAVKVLGASGSGSVSSIAQGLEWAGNNRMHVANLSLGLQAPSATLEQAVNSATSRGVLVVAASGNSGAGSISYPARYANAMAVGATDQNNNRASFSQYGAGLDIVAPGVNVQSTYLGSTYASLNGTSMATPHVAGAAALVKQKNPSWSNVQIRNHLKNTATSLGSTNLYGSGLVNAEAATR

SEQ ID NO: 59604 - protein, 269 aa, Unidentified
AQSVPWGISRVQAPAAHRRGLTGRGVKVASSIQVFSTHPDLNIRGGASFVPGEPSTQDGNGHGTHVAGTIAALNNSIGVLGVAPSAELYAVKVLGASGSGSVSSIAQGLEWAGNNGMHVANLSLGSPSPSATLEQAVNSATSRGVLVVAASGNSGAGSISYPARYANAMAVGATDQNNNRASFSQYGAGLDIVAPGVNVQSTYPGSTYASLNGTSMATPHVAGAAALVKQKNPSWSNVQIRNHLKNTATSLGSTNLYGSGLVNAEAATR

SEQ ID NO: 59605 - protein, 269 aa, Unidentified
AQSVPWGISRVQAPAAHNRGLAGRGVKVAVLDTGISTHPDLNIRGGASFVPGEPSTQDGNGHGTHVAGTIAALNNSIGVLGVAPSAELYAVKVLGASGGGAISSIAQGLEWAGNNGMHVANLSLGSESPSATLEQAVNSATSRGVLVVAASGNSGAGSISYPARYANAMAVGATDQNNNRASFSQYGAGLDIVAPGVNVQSTYPGSTYASLNGTSMATPHVAGAAVLVKQKNPSWSNVRIRNHLKNTATSLGSTNLYGSGLVNAEAATR

SEQ ID NO: 59606 - protein, 269 aa, Unidentified
AQSVPWGISRVQAPAAHNRGLTGSGVKVAVLDTGISTHPDLNIRGGASFVPGEPSTQDGNGHGTHVAGTIAALDNKIGVLGVAPRAELYAVKVLGASGSGSVSSIAQGLEWAGNNRMHVANLSLGLQAPSATLEQAVNSATSRGVLVVAASGNSGAGSISYPARYANAMAVGATDQNNNRASFSQYGAGLDIVAPGVNVFSTYPGSTYASLNGTSMATPHVAGAAALVKQKNPSWSNVQIRNHLKNTATSLGSTNLYGSGLVNAEAATR

SEQ ID NO: 59607 - protein, 269 aa, Unidentified
AQSVPWGISRVQAPAAHNRKLTGFGVKVAVLDTGISTHPDLWIRGGASFVPGEPSTQDGEGHGTHVAGTIAALNNSIGVLGVAPSAELYAVKVLGASGSGSVSSIAQGLEWAGLNRMHVANLSLGSPSPSATLEQAVNSATSRGVLVVAASGNSGAGSISYPARYANAMAVGATDQNNNRADFSQYGAGLDIVAPGVNVQSTYPGSTYASLNGTSMATPHVAGAAALVKQKNGSWSNVQIRNHLKNTATSLGSTNLYGSGLVNAEAATR

SEQ ID NO: 59608 - protein, 269 aa, Unidentified
AQSVPWGISRVQAPAAHNRGLTGSGVKVAVLDTGISTHPDLNIRGGASFVPGEPSTQDGNGHGTHVAGTIAALDNCIGVLGVAPRAELYAVKVLGASGSGSVSSIAQGLEWAGNNRMHVANLSLGLQAPSATLEQAVNSATSRGVLVVAASGNSGAGSISYPARYANAMAVGATDQNNNRASFSQYGAGLDIVAPGVNVHSTYPGSTYASLNGTSMATPHVAGAAALVKQKNPSWSNVQIRNHLKNTATSLGSTNLYGSGLVNAEAATR

SEQ ID NO: 59609 - protein, 269 aa, Unidentified
AQSVPWGISRVQAPASHNRGLTGSGVKVAVLDTGISTHPDLNIRGGASFVPGEPSTQDGNGHGTHVAGTIAALNNSIGVLGVAPSAELYAVKVLGASGGGAISSIAQGLEWAGLNGMHVANLSLGSPSPSATLEQAVNSATSRGVLVVAASGNSGAGSISYPARYANAMAVGATDQNNNRASFSQYGAGLDIVAPGVNVQSTVPQSTYASLNGTSMATPHVAGAAVLVKQKNPSWSNVQIRNHLKNTATSLGSTNLYGSGLVNAEAATR

SEQ ID NO: 59610 - protein, 269 aa, Unidentified
AQSVPWGISRVQAPAAHNRGLTGSGVKVAVLDTGISTHPDLNIRGGASFVPGEPSTQDGNGHGTHVAGTIAALDNLIGVLGVAPRAELYAVKVLGASGSGSVSSIAQGLEWAGNNRMHVANLSLGLQAPSATLEQAVNSATSRGVLVVAASGNSGAGSISYPARYANAMAVGATDQNNNRASFSQYGAGLDIVAPGVNVMSTYPGSTYASLNGTSMATPHVAGAAALVKQKNPSWSNVQIRNHLKNTATSLGSTNLYGSGLVNAEAATR

SEQ ID NO: 59611 - protein, 269 aa, Unidentified
AQSVPWGISRVQAPAAHNRRLTGRGVKVAVLDTRISIHPDLNITGGASFVPGEPSTQDGNGHGTHVAGTIAALDNSIGVLGVAPSAELYAVKVLGASGSGSVSSIAQGLEWAGNNGMHVANLSLGSPSPSATLEQAVNSATSRGVLVVAASGNSGAGSISYPARYANAMAVGATDQNNNRASFSQYGAGLDIVAPGVNVQSTYPGSTYASLNGTSMATPHVAGAAALVKQKNPSWRNVQIRNRLKNTATSLGSTNLYGSGLVNAEAATR

SEQ ID NO: 59612 - protein, 269 aa, Unidentified
AQSVPWGISRVQAPAAHNRGLTGSGVKVAVLDTGISTHPDLNIRGGASFVPGEPSTQDGNGHGTHVAGTIAALDNEIGVLGVAPRAELYAVKVLGASGSGSVSSIAQGLEWAGNNRMHVANLSLGLQAPSATLEQAVNSATSRGVLVVAASGNSGAGSISYPARYANAMAVGATDQNNNRASFSQYGAGLDIVAPGVNVMSTYPGSTYASLNGTSMATPHVAGAAALVKQKNPSWSNVQIRNHLKNTATSLGSTNLYGSGLVNAEAATR

SEQ ID NO: 59613 - protein, 269 aa, Unidentified
AQSVPWGISRVQAPAAHNRGLTGSGVKVAVLDTGISTHPDLNIRGGASFVPGEPSTQDGNGHGTHAAGTIAALNNSIGVLGVAPSAELYAVKVLGASGSGAISSIAQGLEWAGNNGMHVANLSLGLPSPSATLEQAVNSATSRGVLVVAASGNSGADSISYPARYANAMAVGATDQNNNRASFSQYGAGLDIVAPGVNVQSTYPGSTYASLNGTSMATPHVAGAAVLVKHKNPSWSNVRIRNHLKNTATSLGSTNLYGSGLVNAEAATR

SEQ ID NO: 59614 - protein, 269 aa, Bacillus sp. (in: firmicutes)
AQSVPWGIRRVQAPTAHNRGLTGSGVKVAVLDTGISTHPDLNIRGGASFVPGEPSTQDENGHGTHAAGTIAALDNSIGVLGVAPSAELYAVKVLGAGGSGSVSSIAQGLEWAGNNGMHVANLSLGSPSPSATLEQAVNSATSRGVLVVAASGNSGAGSISYPARYANAMAVGATDQNNNRASFSQYGAGLDIVAPGVNVQSTYPGSTYASLDGTSMATPHVAGAAALVKQKNPSWSNVRIRNHLKNTATSLGSTNLYGSGLVNAEAATR

SEQ ID NO: 59615 - protein, 269 aa, Unidentified
AQSVPWGISRVQAPAAHRRGLTGRGVKVAVLDTGISTHPDLNIRGGASFVPGEPSTQDGNGHGTHVAGTIAALDNSIGVLGVAPSAELYAVKVLGASGAGSVSSIAQGLEWAGNNGMHVANLSLGSPSPSATLEQAVNSATSRGVLVVAASGNSGAGSISYPARYANAMAVGATDQDNNRASFSQYGAGLDIVAPGVNVQSTYPQSTYFSLNGTSMATPHVAGAAALVKQKNPSWSNVQIRNRLKNTATSLGSTNLYGSGLVNAEAATR

SEQ ID NO: 59616 - protein, 269 aa, Unidentified
AQSVPWGISRVQAPASHNRGLTGSGVKVAVLDTGISTHPDLNIRGGASFVPGEPSTQDGNGHGTHVAGTIAALNNSIGVLGVAPSAELYAVKVLGASGGGAISSIAQGLEWAGLNGMHVANLSLGSPSPSATLEQAVNSATSRGVLVVAASGNSGAGSISYPARYANAMAVGATDQNNNRASFSQYGAGLDIVAPGVNVQSTAPGSAYASLNGTSMATPHVAGAAVLVKQKNPSWSNVQIRNHLKNTATSLGSTNLYGSGLVNAEAATR

SEQ ID NO: 59617 - protein, 269 aa, Unidentified
AQSVPWGISRVQAPAAHNRGLTGSGVKVAVLDTGISTHPDLNIRGGASFVPGEPSTQDGNGHGTHVAGTIAALDNEIGVLGVAPRAELYAVKVLGASGSGSVSSIAQGLEWAGNNRMHVANLSLGLQAPSATLEQAVNSATSRGVLVVAASGNSGAGSISYPARYANAMAVGATDQNNNRASFSQYGAGLDIVAPGVNVRSTYPGSTYASLNGTSMATPHVAGAAALVKQKNPSWSNVQIRNHLKNTATSLGSTNLYGSGLVNAEAATR

SEQ ID NO: 59618 - protein, 269 aa, Unidentified
AQSVPWGISRVQAPAAHNRGLTGSGVKVAVLDSGISTHPDLNIRGGASFVPGEPSTQDGNGHGTHVAGTIAALNNSIGVLGVAPSAELYAVKVLGASGGGAISSIAQGLEWAGLNGMHVANLSLGNPSPSATLEQAVNSATSRGVLVVAASGNSGAGSISYPARYANAMAVGATDQNNNRASFSQYGAGLDIVAPGVNVQSTAPGSTYASLNGTSMATPHVAGAAVLVKQKNPSWSNVQIRNHLKNTATSLGSTNLYGSGLVNAEAATR

SEQ ID NO: 59619 - protein, 269 aa, Unidentified
AQSVPWGISRVQAPAAHNRGLTGSGVKVAVLDTGISTHPDLNIRGGASFVPGEPSTQDGNGHGTHVAGTIAALDNNIGVLGVAPRAELYAVKVLGASGSGSVSSIAQGLEWAGNNRMHVANLSLTSQAPSATLEQAVNSATSRGVLVVAASGNSGAGSISYPARYANAMAVGATDQNNNRASFSQYGAGLDIVAPGVNVLSTYPGSTYASLNGTSMATPHVAGAAALVKQKNPSWSNVQIRNHLKNTATSLGSTNLYGSGLVNAEAATR

SEQ ID NO: 59620 - protein, 269 aa, Unidentified
AQSVPWGISRVQAPAAHNRGLTGSGVKVAVLDTGISTHPDLNIRGGASFVPGEPSTQDGNGHGTHVAGTIAALDNSIGVLGVAPSAELYAVKVLGADGRGAISSIAQGLEWAGNNGMHVANLSLGSPSPSATLEQAVNSATSRGVLVVAASGNSGASSISYPARYANAMAVGATDQNNNRASFSQYGAGLDIVAPGVNVLSTWPGSTYASLNGTSMATPHVAGAAALVKQKNPSWSNVQIRNHLKNTATSLGSTNLYGSGLVNAEAATR

SEQ ID NO: 59621 - protein, 269 aa, Unidentified
AQSVPWGISRVQAPAAHNRGLAGRGVKVAVLDTGISTHPDLNIRGGASFVPGEPSTQDGNGHGTHVAGTIAALNNSIGVLGVAPSAELYAVKVLGASGSGSVSSIAQGLEWAGLNRMHVANLSLGIPSPSATLEQAVNSATSRGVLVVAASGNSGEGSIDYPARYANAMAVGATDQNNNRADFSQYGAGLDIVAPGVNVQSTYPGSTYASLNGTSMATPHVAGAAALVKQKNPSWSNVQIRNHLKNTATSLGSTNLYGSGLVNAEAATR

SEQ ID NO: 59622 - protein, 269 aa, Unidentified
AQSVPWGISRVQAPAAHNRGLRGSGVKVAVLDTGISTHPDLNIRGGASFVPGEPSTQDGNGHGTHVAGTIAALNNSIGVLGVAPSAELYAVKVLGASGGGAISSIANGLEWAGNNGMHVANLSLGAPSPSATLEQAVNSATSRGVLVVAASGNSGAGSISYPARYANAMAVGATDQNNNRASFSQYGAGLDIVAPGVNVQSTYPGSTYASLNGTSMATPHVAGAAVLVKQKNPSWSNVRIRNHLKNTATSLGSTNLYGSGLVNAEAATR

SEQ ID NO: 59623 - protein, 269 aa, Unidentified
AQSVPWGISRVQAPAAHNRGLTGSGVKVAVLDTGISTHPDLNIRGGASFVPGEPSTQDGNGHGTHVAGTIAALDNSIGVLGVAPRAHLYAVKVLGASGSGSVSSIAQGLEWAGNNRMHVANLSLGLQAPSATLEQAVNSATSRGVLVVAASGNSGAGSISYPARYANAMAVGATDQNNNRASFSQYGAGLDIVAPGVNVYSTYPGSTYASLNGTSMATPHVAGAAALVKQKNPSWSNVQIRNHLKNTATSLGSTNLYGSGLVNAEAATR

SEQ ID NO: 59624 - protein, 269 aa, Unidentified
AQSVPWGISRVQAPAAHNRKLTGSGVKVAVLDTGISTHPDLNIRGGASFVPGEPSTQDGEGHGTHVAGTIAALNNSIGVLGVAPSAELYAVKVLSASGQGSVSSIANGLEWAGLNGMHVANLSLGAPSPSATLEQAVNSATSRGVLVVAASGNSGAGSISYPARYANAMAVGATDQNNNRADFSQYGAGLDIVAPGVNVQSTYPGSTYASLNGTSMATPHVAGAAALVKQKNPSWSNVQIRNHLKNTATSLGSTNLYGSGLVNAEAATR

SEQ ID NO: 59625 - protein, 269 aa, Unidentified
AQTVPWGISRVQAPAAHNRGLTGSGVKVAVLDTGISTHPDLNIRGGASFVPGEPSTQDGNGHGTHVAGTIAALNNSIGVLGVAPSAELYAVKVLGADGRGAISSIAQGLEWAGNNGMHVANLSLGSPSPSATLEQAVNSATSRGVLVVAASGNSGASSISYPARYANAMAVGATDQNNNRASFSQYGPGLDIMAPGVNVQSTYPGSTYASLNGTSMATPHVAGAAALVKQKNPSWSNVQIRNHLKNTATSLGSTNLYGSGLVNAEAATR

SEQ ID NO: 59626 - protein, 269 aa, Unidentified
AQSVPWGISRVQAPAAHNRGLAGSGVKVAVLDTGISTHPDLNIRGGASFVPGEPSTQDGNGHGTHVAGTIAALNNNIGVLGVAPSAELYAVKVLGASGNGAISSIAQGLEWAGNNGMHVANLSLGSPSPSATLEQAVNSATSRGVLVVAASGNSGAGSISYPARYANAMAVGATDQNNNRASFSQYGAGLDIVAPGVNVQSTYPGSTYASQNGTSMATPHVAGAAVLVKQKNPSWSNVRIRNHLKNTATSLGSTNLYGSGLVNAEAATR

SEQ ID NO: 59627 - protein, 269 aa, Unidentified
AQSVPWGISRVQAPAAHNRGLAGGGVKVAVLDTGISTHPDLNIRGGASFVPGEPSTQDGNGHGTHVAGTIAALDNSIGVLGVAPSAELYAVKVLGASGGGAISSIAQGLEWAGNNGMHVANLSLGSPSPSATLEQAVNSATSRGVLVVAASGNSGAGSISYPARYANAMAVGATDQNNNRASFSQYGAGLDIVAPGVNVQSTYPGSTYASLNGTSMATPHVAGAAVLVKQKNPSWSNVRIRNHLKNTATSLGSTNLYGSGLVNAEAATR

SEQ ID NO: 59628 - protein, 269 aa, Unidentified
AQSVPWGISRVQAPAAHNRGLTGSGVKVAVLDTGISTHPDLNIRGGASFVPGEPSTQDGNGHGTHVAGTIAALDNCIGVLGVAPRAELYAVKVLGASGSGSVSSIAQGLEWAGNNRMHVANLSLGLQAPSATLEQAVNSATSRGVLVVAASGNSGAGSISYPARYANAMAVGATDQNNNRASFSQYGAGLDIVAPGVNVGSTYPGSTYASLNGTSMATPHVAGAAALVKQKNPSWSNVQIRNHLKNTATSLGSTNLYGSGLVNAEAATR

SEQ ID NO: 59629 - protein, 269 aa, Unidentified
AQSVPWGISRVQAPASHNRGLTGSGVKVAVLDSGISTHPDLNIRGGASFVPGEPSTQDGNGHGTHVAGTIAALNNSIGVLGVAPSAELYAVKVLGASGGGAISSIAQGLEWAGLNGMHVANLSLGSPSPSATLEQAVNSATSRGVLVVAASGNSGAGSISYPARYANAMAVGATDQNNNRASFSQYGAGLDIVAPGVNVQSTAPGSTYASLNGTSMATPHVAGAAVLVKQKNPSWSNVQIRNHLKNTATSLGSTNLYGSGLVNAEAATR

SEQ ID NO: 59630 - protein, 269 aa, Unidentified
AQSVPWGISRVQAPAAHRRRLTGRGVKVAVLDTGISTHPDLNIRGGASFVPGEPSTQDGNGHGTHVAGTIAALNNSIGVLGVAPSAELYAVKVLGASGGGAISSIAQGLEWAGNNGMHVANLSLGSPSPSATLEQAVNSATSRGVLVVAASGNSGAGSISYPARYANAMAVGATDQNNNRASFSQYGAGLDIVAPGVNVQSTYPGSTYASLNGTSMATPHVAGAAVLVKQKNPSWSNVRIRNHLKNTATSLGSTNLYGSGLVNAEAATR

SEQ ID NO: 59631 - protein, 269 aa, Unidentified
AQSVPWGISRVQAPAAHRRRLTGSGVKVAVLDTGISTHPDLNITGGASFVPGEPSTQDGNGHGTHVAGTIAALNNSIGVLGVAPSAELYAVKVLGASGGGAISSIAQGLEWAGNNGMHVANLSLGSPSPSATLEQAVNSATSRGVLVVAASGNSGAGSISYPARYANAMAVGATDQNNNRASFSQYGAGLDIVAPGVNVQSTYPGSTYASLNGTSMATPHVAGAAVLVKQKNPSWSNVRIRNHLKNTATSLGSTNLYGSGLVNAEAATR

SEQ ID NO: 59632 - protein, 269 aa, Unidentified
AQSVPWGISRVQAPAAHNRGLTGSGVKVAVLDTGISTHPDLRITGGASFVPGEPSTQDGNGHGTHVAGTIAALNNSIGVLGVAPSAELYAVKVLGASGGGAISSIAQGLEWAGNNGMHVANLSLGSPSPSATLEQAVNSATSRGVLVVAASGNSGAGSISYPARYANAMAVGATDQNNNRASFSQYGAGLDIVAPGVNVQSTYPGSTYASLNGTSMATPHVAGAAVLVKQKNPSWSNVRIRNHLKNTATSLGSTNLYGSGLVRAEAATR

SEQ ID NO: 59633 - protein, 269 aa, Unidentified
AQSVPWGISRVQAPAAHNRGLTGSGVKVAVLDTGISTHEDLNVRGGVSFVPGEPSYQDGNGHGTHVAGTIAALNNSIGVVGVAPSADLYAVKVLGASGSGSVSSIAQGLEWAGNNGMHVANLSLGSPEPSATLEQAVNSATSRGVLVVAASGNSGAGSISYPARYANAMAVGATDQNNNRASFSQYGAGLDIVAPGVNVQSTYPGSTYASLNGTSMATPHVAGAAALVKQKNPSWSNVQIRDHLKNTATSLGSTNLYGSGLVNAEAATR

SEQ ID NO: 59634 - protein, 269 aa, Unidentified
AQSVPWGISRVQAPAAHNRGLTGSGVKVAVLDTGISTHPDLNIRGGASFVPGEPSTQDGNGHGTHVAGTIAALDNLIGVLGVAPRAELYAVKVLGASGSGSVSSIAQGLEWAGNNRMHVANLSLGLQAPSATLEQAVNSATSRGVLVVAASGNSGAGSISYPARYANAMAVGATDQNNNRASFSQYGAGLDIVAPGVNVRSTYPGSTYASLNGTSMATPHVAGAAALVKQKNPSWSNVQIRNHLKNTATSLGSTNLYGSGLVNAEAATR

SEQ ID NO: 59635 - protein, 269 aa, Unidentified
AQSVPWGISRVQAPAAHNRGLTGGGVKVAVLDTGISTHPDLNIRGGASFVPGEPSTQDSNGHGTHVAGTIAALNNNIGVLGVAPSAELYAVKVLGASGNGSVSSIAGGLEWAGNNGMHVANLSLGAPSPSATLEQAVNSATSRGVLVVAASGNSGAGSISYPARYANAMAVGATDQNNNRASFSQYGAGLDIVAPGVNVQSTYPGSTYASQNGTSMATPHVAGAAALVKQKNPSWSVVQIRNHLKNTATSLGSTNLYGSGLVNAEAATR

SEQ ID NO: 59636 - protein, 269 aa, Unidentified
AQSVPWGISRVQAPAAHNRKLTGGGVKVAVLDTGISTHPDLNIRGGASFVPGEPSTQDGEGHGTHVAGTIAALNNNIGVLGVAPSAELYAVKVLGASGQGSVSSIANGLEWAGLNGMHVANLSLGAPSPSATLEQAVNSATSRGVLVVAASGNSGAGSISYPARYANAMAVGATDQNNNRASFSQYGAGLDIVAPGVNVQSTYPGSTYASLNGTSMATPHVAGAAALVKQKNPSWSNVQIRNHLKNTATSLGSTNLYGSGLVNAEAATR

SEQ ID NO: 59637 - protein, 269 aa, Unidentified
AQSVPWGISRVQAPAAHNRRLWGSGVKVAVLDTGISTHPDLNIRGGASFVPGEPSTQDGNGHGTHVAGTIAALNNRIGVLGVAPSAELYAVKVLGASGAGAISSIAQGLEWAGNNGMHVANLSLGSPSPSATLEQAVNSATSRGVLVVAASGNSGAGSISYPARYANAMAVGATDQDNNRASFSQYGAGLDIVAPGVNVQSTYPGSTYASLNGTSMATPHVAGAAVLVKQKNPSWSNVQIRNHLKNTATSLGSTNLYGSGLVNAEAATR

SEQ ID NO: 59638 - protein, 269 aa, Unidentified
AQSVPWGISRVQAPAAHNRGLTGSGVKVAVLDTGISTHPDLNIRGGASFVPGEPSTQDGNGHGTHVAGTIAALDNLIGVLGVAPRAELYAVKVLGASGSGSVSSIAQGLEWAGNNRMHVANLSLGLQAPSATLEQAVNSATSRGVLVVAASGNSGAGSISYPARYANAMAVGATDQNNNRASFSQYGAGLDIVAPGVNVYSTYPGSTYASLNGTSMATPHVAGAAALVKQKNPSWSNVQIRNHLKNTATSLGSTNLYGSGLVNAEAATR

SEQ ID NO: 59639 - protein, 269 aa, Unidentified
AQSVPWGISRVQAPAAHNRRLTGRGVKVAVLDTGISTHPDLRITGGASFAPGEPSTQDGNGHGTHVAGTIAALNNSIGVLGVAPSAELYAVKVLGASGAGSVSSIAQGLEWAGNNGMHVANLSLGSPSPSATLEQAVNSATSRGVLVVAASGNSGAGSISYPARYANAMAVGATDQNNNRASFSQYGAGLDIVAPGVNVQSTYIQSTYASLNGTSMATPHVAGAAALVKQKNPSWSNVQIRNHLKNTATSLGSTNLYGSGLVNAEAATR

SEQ ID NO: 59640 - protein, 269 aa, Unidentified
AQSVPWGISRVQAPAAHNRKLTGGGVKVAVLDTGISTHPDLNIRGGASFVPGEPSTQDGEGHGTHVAGTIAALNNSIGVLGVAPSAELYAVKVLAASGQGSVSSIAQGLEWAGLNGMHVANLSLGAPSPSATLEQAVNSATSRGVLVVAASGNSGAGSISYPARYANAMAVGATDQNNNRADFSQYGAGLDIVAPGVNVQSTYPGSTYASLNGTSMATPHVAGAAALVKQKNPSWSNVQIRNHLKNTATSLGSTNLYGSGLVNAEAATR

SEQ ID NO: 59641 - protein, 269 aa, Unidentified
AQSVPWGISRVQAPAAHRRGLTGRGVKVAVLDTGISTHPDLNIRGGASFVPGEPSTQDGNGHGTHVAGTIAALDNSIGVLGVAPSAELYAVKVLGASGAGSVSSIAQGLEWAGANGMHVANLSLGSPSPSATLEQAVNSATSRGVLVVAASGNSGAGSISYPARYANAMAVGATDQDNNRASFSQYGAGLDIVAPGVNVQSTYPGSTYFSLNGTSMATPHVAGAAALVKQKNPSWSNVQIRNRLKNTATSLGSTNLYGSGLVNAEAATR

SEQ ID NO: 59642 - protein, 269 aa, Unidentified
AQSVPWGISRVQAPAAHRRGLTGRGVKVAVLDTGISTHPDLNIRGGASFVPGEPSTQDGNGHGTHVAGTIAALDNSIGVLGVAPSAELYAVKVLGASGSGSVSSIAQGLEWAGNNGMHVANLSLGSPSPSATLEQAVNSATSRGVLVVAASGNSGAGSISYPARYANAMAVGATDQDNNRASFSQYGAGLDLVAPGVNVQSTYPQSAYASLNGTSMATPHVAGAAALVKQKNPSWSNVQIRNRLKNTATSLGSTNLYGSGLVNAEAATR

SEQ ID NO: 59643 - protein, 269 aa, Unidentified
AQSVPWGISRVQAPAAHNRGLTGSGVKVAVLDTGISTHPDLNIRGGASFVPGEPSTQDGNGHGTHVAGTIAALDNVIGVLGVAPRAELYAVKVLGASGSGSVSSIAQGLEWAGNNRMHVANLSLGLQAPSATLEQAVNSATSRGVLVVAASGNSGAGSISYPARYANAMAVGATDQNNNRASFSQYGAGLDIVAPGVNVHSTYPGSTYASLNGTSMATPHVAGAAALVKQKNPSWSNVQIRNHLKNTATSLGSTNLYGSGLVNAEAATR

SEQ ID NO: 59644 - protein, 269 aa, Unidentified
AQSVPWGISRVQAPAAHNRGLTGSGVKVAVLDTGISTHPDLNIRGGASFVPGEPSTQDGNGHGTHVAGTIAALNNSIGVLGVAPSAELYAVKVLGASGGGSIASIAQGLEWAGNNGMHVANLSLGSESPSATLEQAVNSATSRGVLVVAASGNSGAGSISYPARYANAMAVGATDQNNNRADFSQYGAGLDIVAPGVNVQSTYPGSTYASLNGTSMATPHVAGAAVLVKQKNPSWSNVRIRDHLKNTATSLGSTNLYGSGLVNAEAATR

SEQ ID NO: 59645 - protein, 269 aa, Unidentified
AQSVPWGIERVQAPAAHNRGLTGSGVKVAVLDTGISTHPDLNIRGGASFVPGEPSTQDENGHGTHVAGTIAALDNSIGVLGVAPSAELYAVKVLGASGSGSVSSIAQGLEWAGNNGMHVANLSLGSPSPSATLEQAVNSATSRGVLVVAASGNSGEPEISYPARYANAMAVGATDQNNNRASFSQYGAGLDIVAPGVNVLSTYPGSTYASLNGTSMATPHVAGAAALVKQKNPSWSNVQIRNHLKNTATSLGSTNEYGSGLVNAEAATR

SEQ ID NO: 59646 - protein, 269 aa, Unidentified
AQSVPWGISRVQAPAAHRRGLTGSGVKVAVLDTGISTHPDLNIRGGASFVPGEPSTQDGNGHGTHVAGTIAALNNRIGVLGVAPSAELYAVKVLGASGGGAISSIAQGLEWAGNNGMHVANLSLGSPSPSATLEQAVNSATSRGVLVVAASGNSGAGSISYPARYANAMAVGATDQNNNRASFSQYGAGLDIVAPGVNVQSTYPGSTYASLNGTSMATPHVAGAAVLVKQKNPSWSNVRIRNHLKNTATSLGSTNLYGSGLVRAEAATR

SEQ ID NO: 59647 - protein, 269 aa, Unidentified
AQSVPWGISRVQAPAAHNRGLTGSGVKVAVLDTGISTHPDLNIRGGASFVPGEPSTQDGNGHGTHVAGTIAALDNVIGVLGVAPRAELYAVKVLGASGSGSVSSIAQGLEWAGNNRMHVANLSLGLQAPSATLEQAVNSATSRGVLVVAASGNSGAGSISYPARYANAMAVGATDQNNNRASFSQYGAGLDIVAPGVNVDSTYPGSTYASLNGTSMATPHVAGAAALVKQKNPSWSNVQIRNHLKNTATSLGSTNLYGSGLVNAEAATR

SEQ ID NO: 59648 - protein, 269 aa, Unidentified
AQSVPWGISRVQAPAAHNRGLAGSGVKVAVLDTGISTHPDLNIRGGASFVPGEPSTQDGNGHGTHVAGTIAALNNSIGVLGVAPSAELYAVKVLGASGGGAISSVAQGLEWAGNNGMHVANLSLGSPSPSATLEQAVNSATSRGVLVVAASGNSGAGSISYPARYANAMAVGATDQNNNRASFSQYGAGLDIVAPGVNVQSTYPGSTYASQNGTSMATPHVAGAAVLVKQKNPSWSNVRIRNHLKNTATSLGSTNLYGSGLVNAEAATR

SEQ ID NO: 59649 - protein, 269 aa, Unidentified
AQSVPWGISRVQAPAAHNRGLTGSGVKVAVLDTGISTHPDLNIRGGASFVPGEPSTQDGNGHGTHVAGTIAALDNGIGVLGVAPRAELYAVKVLGASGSGSVSSIAQGLEWAGNNRMHVANLSLGLQAPSATLEQAVNSATSRGVLVVAASGNSGAGSISYPARYANAMAVGATDQNNNRASFSQYGAGLDIVAPGVNVRSTYPGSTYASLNGTSMATPHVAGAAALVKQKNPSWSNVQIRNHLKNTATSLGSTNLYGSGLVNAEAATR

SEQ ID NO: 59650 - protein, 269 aa, Unidentified
AQSVPWGISRVQAPAAHRRGLWGRGVKVAVLDTGISTHPDLNIRGGASFVPGEPSTQDGNGHGTHVAGTIAALDNSIGVLGVAPSAELYAVKVLGASGSGSVSSIAQGLEWAGNNGMHVANLSLGSPSPSATLEQAVNSATSRGVLVVAASGNSGAGSISYPARYANAMAVGATDQDNNRASFSQYGAGLDLVAPGVNVQSTYPQSTYASLNGTSMATPHVAGAAALVKQKNPSWSNVQIRNRLKNTATSLGSTNLYGSGLVNAEAATR

SEQ ID NO: 59651 - protein, 269 aa, Unidentified
AQSVPWGISRVQAPAAHNRGLAGSGVKVAVLDTGISTHPDLNIRGGASFVPGEPSTQDGNGHGTHVAGTIAALNNSIGVLGVAPSAELYAVKVLSASGGGAISSIAQGLEWAGNNGMHVANLSLGSPSPSATLEQAVNSATSRGVLVVAASGNSGAGSISYPARYANAMAVGATDQNNNRASFSQYGAGLDIVAPGVNVQSTYPGSTYASQNGTSMATPHVAGAAVLVKQKNPSWSNVRIRNHLKNTATSLGSTNLYGSGLVNAEAATR

SEQ ID NO: 59652 - protein, 269 aa, Unidentified
AQSVPWGISRVQAPAAHNRGLTGSGVKVAVLDTGISTHPDLNIRGGASFVPGEPSTQDGNGHGTHVAGTIAALDNCIGVLGVAPRAELYAVKVLGASGSGSVSSIAQGLEWAGNNRMHVANLSLGLQAPSATLEQAVNSATSRGVLVVAASGNSGAGSISYPARYANAMAVGATDQNNNRASFSQYGAGLDIVAPGVNVFSTYPGSTYASLNGTSMATPHVAGAAALVKQKNPSWSNVQIRNHLKNTATSLGSTNLYGSGLVNAEAATR

SEQ ID NO: 59653 - protein, 269 aa, Unidentified
AQSVPWGISRVQAPAAHNRGLTGSGVKVAVLDTGISTHPDLNIRGGASFVPGEPSTQDGNGHGTHVAGTIAALDNAIGVLGVAPRAELYAVKVLGASGSGSVSSIAQGLEWAGNNRMHVANLSLGLQAPSATLEQAVNSATSRGVLVVAASGNSGAGSISYPARYANAMAVGATDQNNNRASFSQYGAGLDIVAPGVNVFSTYPGSTYASLNGTSMATPHVAGAAALVKQKNPSWSNVQIRNHLKNTATSLGSTNLYGSGLVNAEAATR

SEQ ID NO: 59654 - protein, 269 aa, Unidentified
AQSVPWGIERVQAPAAHNRGLTGSGVKVAVLDTGISTHPDLRIRGGASFVPGEPSTQDGNGHGTHVAGTIAALDNSIGVLGVAPSAELYAVKVLGASGSGSVSSIAQGLEWAGNNGMHVANLSLGSPSPSATLEQAVNSATSRGVLVVAASGNSGAGSISYPARYANAMAVGATDQNNNRASFSQYGPGLDIVAPGVNVLSTWPGSTYASLNGTSMATPHVAGAAALVKQKNPSWSNVQIRNHLKNTATSLGDTNEYGSGLVNAEAATR

SEQ ID NO: 59655 - protein, 269 aa, Unidentified
AQSVPWGISRVQAPAAHNRGLTGSGVKVAVLDTGISTHPDLNIRGGASFVPGEPSTQDGNGHGTHVAGTIAALNNSIGVLGVAPSAELYAVKVLGADGRGAISSIAQGLEWAGNNGMHVANLSLGSPSPSATLEQAVNSATSRGVLVVAASGNSGASSISYPARYANAMAVGATDQNNNRASFSQYGPGLDIMAPGVNIQSTYPGSTYASLNGTSMATPHVAGAAALVKQKNPSWSNVQIRNHLKNTATSLGSTNLYGSGLVNAEAATR

SEQ ID NO: 59656 - protein, 269 aa, Unidentified
AQSVPWGISRVQAPAAHRRRLTGRGVKVAVLDTGISTHPDLNIRGGASFVPGEPSTQDGNGHGTHVAGTIAALDNSIGVLGVAPSAELYAVKVLGASGAGSVSSIAQGLEWAGNNGMHVANLSLGSPSPSATLEQAVNSATSRGVLVVAASGNSGAGSISYPARYANAMAVGATDQDNNRASFSQYGAGLDIVAPGVNVQSTYPGSAYASLNGTSMATPHVAGAAALVKQKNPSWSNVQIRNRLKNTATSLGSTNLYGSGLVNAEAATR

SEQ ID NO: 59657 - protein, 269 aa, Unidentified
AQSVPWGISRVQAPAAHNRGLTGSGVKVAVLDTGISTHPDLNIRGGASFVPGEPSTQDGNGHGTHVAGTIAALDNQIGVLGVAPRAELYAVKVLGASGSGSVSSIAQGLEWAGNNRMHVANLSLGLQAPSATLEQAVNSATSRGVLVVAASGNSGAGSISYPARYANAMAVGATDQNNNRASFSQYGAGLDIVAPGVNVDSTYPGSTYASLNGTSMATPHVAGAAALVKQKNPSWSNVQIRNHLKNTATSLGSTNLYGSGLVNAEAATR

SEQ ID NO: 59658 - protein, 269 aa, Unidentified
AQSVPWGISRVQAPAAHNRGLTGSGVKVAVLDTGISTHPDLNIRGGASFVPGEPSTQDGNGHGTHVAGTIAALNNSIGVLGVAPSAELYAVKVLGASGGGAISSIAQGLEWAGNNGMHVANLSLGSPSPSATLEQAVNSATSRGVIVVAASGNSGAESISYPARYANAMAVGATDQNNNRASFSQYGAGLDIVAPGVNVQSTYPGSTYASLNGTSMATPHVAGAAVLVKQKNPSWSNVRIRDHLKNTATSLGSTNLYGSGLVNAEAATR

SEQ ID NO: 59659 - protein, 269 aa, Unidentified
AQSVPWGISRVQAPAAHNRRLTGRGVKVAVLDTGISTHPDLNIRGGASFVPGEPSTQDGNGHGTHVAGTIAALNNNIGVLGVAPSAELYAVKVLWASGQGSVSSIANGLEWAGLNGMHVANLSLGSPSPSATLEQAVNSATSRGVLVVAASGNSGAGSISYPARYANAMAVGATDQNNNRASFSQYGAGLDIVAPGVNVQSTYPGSTYASQNGTSMATPHVAGAAALVKQKNPSWSNVQIRNHLKNTATSLGSTNLYGSGLVNAEAATR

SEQ ID NO: 59660 - protein, 269 aa, Unidentified
AQSVPWGISRVQAPAAHNRRLTGRGVKVAVLDTGISTHPDLNIRGGASFVPGEPSTQDGNGHGTHVAGTIAALNNGIGVLGVAPSAELYAVKVLGASGSGSVSSIAQGLEWAGNNDMHVANLSLGSPSPSATLEQAVNSATSRGVLVVAASGNSGADSISYPARYANAMAVGATDQNNNRADFSQYGAGLDIVAPGVNVQSTYPGSTYASLNGTSMATPHVAGAAALVKQKNPSWSNVQIRDRLKNTATSLGSTNLYGSGLVNAEAATR

SEQ ID NO: 59661 - protein, 269 aa, Unidentified
AQSVPWGISRVQAPAAHNRGLTGSGVKVAVLDTGISTHPDLNIRGGASFVPGEPSTQDGNGHGTHVAGTIAALNNSIGVLGVAPSAELYAVKVLGADGRGAISSIAQGLEWAGNNGMHVANLSLGSPSPSATLEQAVNSATSRGVLVVAASGNDGASSISYPARYANAMAVGATDQNNNRASFSQYGAGLDIVAPGVNVLSTWPGSTYASLNGTSMATPHVAGAAALVKQKNPSWSNVQIRNHLKNTATSLGSTNLYGSGLVNAEAATR

SEQ ID NO: 59662 - protein, 269 aa, Unidentified
AQSVPWGISRVQAPAAHNRKLTGGGVKVAVLDTGISTHPDLNIRGGASFVPGEPSTQDGEGHGTHVAGTIAALNNNIGVLGVAPSAELYAVKVLSASGQGSVSSIAGGLEWAGLNGMHVANLSLGSPSPSATLEQAVNSATSRGVLVVAASGNSGAGSISYPARYANAMAVGATDQNNNRASFSQYGAGLDIVAPGVNVQSTYPGSTYASLNGTSMATPHVAGAAALVKQKNPSWSNVQIRNHLKNTATSLGSTNLYGSGLVNAEAATR

SEQ ID NO: 59663 - protein, 275 aa, Unidentified
AQSVPWGISRVQAPAAHNRGLTGSGVRVAVLDTGIXSTHPDLNIRGGASFVPGEXPSTQDGNGHGTHVAGTIAALDNSIGVLGVAPSAELYAVKVLGADGRGAXSSIAQGLEWAGNNGMHVASLSLGSPSPSATLEQAVNSATSRGVLVVAASGNSGAGSXXXXISYPARYANAMAVGATDQNNNRASFSQYGAGLDIVAPGVNVQSTYPGSTYASLNGTSXATPHVAGAAALVKQKNPSWSNVQIRNHLKNTATSLGSTNLYGSGLVNAEAAAR

SEQ ID NO: 59664 - protein, 269 aa, Unidentified
AQSVPWGISRVQAPAAHNRGLTGSGVKVAVLDTGISTHPDLNIRGGASFVPGEPSTQDGNGHGTHAAGTIAALNNSIGVLGVAPSAELYAVKVLGASGSGAISSIAQGLEWAGDNGMHVANLSLGSPSPSATLEQAVNSATSRGVLVVAASGNSGADSISYPARYANAMAVGATDQNNNRASFSQYGAGLDIVAPGVNVQSTYPGSTYASLNGTSMATPHVAGAAVLVKHKNPSWSNVRIRNHLKNTATSLGSTNLYGSGLVNAEAATR

SEQ ID NO: 59665 - protein, 269 aa, Unidentified
AQSVPWGISRVQAPAAHNRRLTGGGVKVAVLDTGISTHPDLRIRGGASFVPGEPSTQDGNGHGTHVAGTIAALNNNIGVLGVAPSAELYAVKVLAASGGGSVSSIAGGLEWAGLNGMHVANLSLGSPSPSATLEQAVNSATSRGVLVVAASGNSGAGSISYPARYANAMAVGATDQNNNRASFSQYGAGLDIVAPGVNVQSTYPGSTYASLNGTSMATPHVAGAAALVKQKNPSWSNVQIRNHLKNTATSLGSTNLYGSGLVNAEAATR

SEQ ID NO: 59666 - protein, 269 aa, Unidentified
AQSVPWGISRVQAPAAHNRGLAGSGVKVAVLDTGISTHPDLNIRGGASFVPGEPSTQDGNGHGTHVAGTIAALNNSIGVLGVAPSAELYAVKVLGASGNGAISSIAQGLEWAGNNGMHVANLSLGASSPSATLEQAVNSATSRGVLVVAASGNSGAGSISYPARYANAMAVGATDQNNNRASFSQYGAGLDIVAPGVNVQSTYPGSTYASLNGTSMATPHVAGAAVLVKQKNPSWSNVRIRNHLKNTATSLGSTNLYGSGLVNAEAATR

SEQ ID NO: 59667 - protein, 269 aa, Unidentified
AQSVPWGISRVQAPAAHNRGLTGSGVKVAVLDTGISTHPDLNIRGGASFVPGEPSTQDGNGHGTHVAGTIAALDNGIGVLGVAPRAELYAVKVLGASGSGSVSSIAQGLEWAGNNRMHVANLSLGLQAPSATLEQAVNSATSRGVLVVAASGNSGAGSISYPARYANAMAVGATDQNNNRASFSQYGAGLDIVAPGVNVMSTYPGSTYASLNGTSMATPHVAGAAALVKQKNPSWSNVQIRNHLKNTATSLGSTNLYGSGLVNAEAATR

SEQ ID NO: 59668 - protein, 269 aa, Unidentified
AQSVPWGISRVQAPAAHNRGLTGSGVKVAVLDTGISTHPDLNIRGGASFVPGEPSTQDGNGHGTHAAGTIAALNNSIGVLGVAPSAELYAVKVLGASGSGAISSIAQGLEWAGNNGMHVANLSLGSPSPSATLEQAVNSATSRGVLVVAASGNSGADSISYPARYANAMAVGATDQNNNRASFSQYGAGLDIVAPGVNVQSTYPGSTYASLNGTSMATPHVAGAAVLVKHKNPSWSNVRIRSHLKNTATSLGSTNLYGSGLVNAEAATR

SEQ ID NO: 59669 - protein, 269 aa, Unidentified
AQSVPWGISRVQAPAAHNRGLAGSGVKVAVLDTGISTHPDLNIRGGASFVPGEPSTQDGNGHGTHVAGTIAALNNSIGVLGVAPSAELYAVKVLGASGGGAISSIAQGLEWAGNNGMHVANLSLGSPSPSATLEQAVNSATSRGVLVVAASGNSGADSISYPARYANAMAVGATDQNNNRAEFSQYGAGLDIVAPGVNVQSTYPGSTYASLNGTSMATPHVAGAAALVKQKNPSWSNVVIRDHLKNTATSLGSTNLYGSGLVNAEAATR

SEQ ID NO: 59670 - protein, 269 aa, Unidentified
AQSVPWGISRVQAPAAHNRGLTGSGVKVAVLDTGISTHPDLNIRGGASFVPGEPSTQDGEGHGTHVAGTIAALNNSIGVLGVAPSAELYAVKVLGASGAGAISSIAQGLEWAGNNGMHVANLSLGSPSPSATLEQAVNSATSRGVLVVAASGNSGAGSISYPARYANAMAVGATDQNNNRADFSQYGAGLDIVAPGLNVQSTYPGSTYASLNGTSMATPHVAGAAVLVKQKNPSWSNVRIRNHLKNTATSLGSTNLYGSGLVNAEAATR

SEQ ID NO: 59671 - protein, 269 aa, Unidentified
AQSVPWGISRVQAPAAHNRGLTGSGVKVAVLDTGISTHPDLRITGGASFVPGEPSTQDGNGHGTHVAGTIAALNNRIGVLGVAPSAELYAVKVLGASGGGAISSIAQGLEWAGNNGMHVANLSLGSPSPSATLEQAVNSATSRGVLVVAASGNSGAGSISYPARYANAMAVGATDQNNNRASFSQYGAGLDIVAPGVNVQSTYPGSTYASLNGTSMATPHVAGAAVLVKQKNPSWSNVRIRNHLKNTATSLGSTNLYGSGLVNAEAATR

SEQ ID NO: 59672 - protein, 269 aa, Unidentified
AQSVPWGISRVQAPAAHNRGLTGRGVKVAVLDTGISTHPDLNIRGGASFVPGEPSTQDGEGHGTHVAGTIAALNNGIGVLGVAPSAELYAVKVLGASGSGSVSSIAQGLEWAGNNDMHVANLSLGSESPSATLEQAVNSATSRGVLVVAASGNSGAGSISYPARYANAMAVGATDQNNNRADFSQYGAGLDIVAPGVNVQSTYPGSTYASLNGTSMATPHVAGAAALVKQKNPSWSNVRIRDHLKNTATSLGSTNLYGSGLVNAEAATR

SEQ ID NO: 59673 - protein, 269 aa, Unidentified
AQSVPWGISRVQAPAAHNRGLTGSGVKVAVLDTGISTHPDLNIRGGASFVPGEPSTQDGNGHGTHVAGTIAALNNNIGVLGVAPSAELYAVKVLSASGNGSVSSIANGLEWAGNNGMHVANLSLGAPSPSATLEQAVNSATSRGVLVVAASGNSGAGSISYPARYANAMAVGATDQNNNRADFSQYGAGLDIVAPGVNVQSTYPGSTYASQNGTSMATPHVAGAAALVKQKNPSLSNVQIRNHLKNTATSLGSTNLYGSGLVNAEAATR

SEQ ID NO: 59674 - protein, 269 aa, Unidentified
AQSVPWGISRVQAPAAHNRGLAGSGVKVAVLDTGISTHPDLNIRGGASFVPGEPSTQDGNGHGTHVAGTIAALNNSIGVLGVAPSAELYAVKVLAASGNGAISSIAQGLEWAGNNGMHVANLSLGAPSPSATLEQAVNSATSRGVLVVAASGNSGAGSISYPARYANAMAVGATDQNNNRASFSQYGAGLDIVAPGVNVQSTYPGSTYASLNGTSMATPHVAGAAVLVKQKNPSWSNVRIRNHLKNTATSLGSTNLYGSGLVNAEAATR

SEQ ID NO: 59675 - protein, 269 aa, Unidentified
AQSVPWGISRVQAPAAHNRGLAGSGVKVAVLDTGISTHPDLNIRGGASFVPGEPSTQDGNGHGTHVAGTIAALNNNIGVLGVAPSAELYAVKVLAASGNGAISSIAQGLEWAGNNGMHVANLSLGSPSPSATLEQAVNSATSRGVLVVAASGNSGAGSISYPARYANAMAVGATDQNNNRASFSQYGAGLDIVAPGVNVQSTYPGSTYASLNGTSMATPHVAGAAVLVKQKNPSWSNVRIRNHLKNTATSLGSTNLYGSGLVNAEAATR

SEQ ID NO: 59676 - protein, 269 aa, Unidentified
AQSVPWGISRVQAPAAHNRGLAGGGVKVAVLDTGISTHPDLNIRGGASFVPGEPSTQDGNGHGTHVAGTIAALNNSIGVLGVAPSAELYAVKVLGASGQGAISSIAQGLEWAGNNGMHVANLSLGSPSPSATLEQAVNSATSRGVLVVAASGNSGAGSISYPARYANAMAVGATDQNNNRASFSQYGAGLDIVAPGVNVQSTYPGSTYASQNGTSMATPHVAGAAVLVKQKNPSWSNVRIRNHLKNTATSLGSTNLYGSGLVNAEAATR

SEQ ID NO: 59677 - protein, 269 aa, Unidentified
AQSVPWGISRVQAPASHNRGLTGSGVKVAVLDSGISTHPDLNIRGGASFVPGEPSTQDGNGHGTHVAGTIAALNNSIGVLGVAPSAELYAVKVLGASGGGAISSIAQGLEWAGLNGMHVANLSLGSPSPSATLEQAVNSATSRGVLVVAASGNSGAGSISYPARYANAMAVGATDQNNNRASFSQYGAGLDIVAPGVNVQSTVPGSTYASLNGTSMATPHVAGAAVLVKQKNPSWSNVQIRNHLKNTATSLGSTNLYGSGLVNAEAATR

SEQ ID NO: 59678 - protein, 269 aa, Unidentified
AQSVPWGISCVQAPAAHNRGLTGSGVKVAVLDTGISTHPDLNIRGGASFVPGEPSTQDGNGHGTHAAGTIAALNNSIGVLGVAPSAELYAVKVLGASGSGAISSIAQGLEWAGNNGMHVANLSLGSPSPSATLEQAVNSATSRGVLVVAASGNSGADSISYPARYANAMAVGATDQNNNRASFSQYGAGLDIVAPGVNVQSTYPGSTYASLNGTSMATPHVAGAAVLVKHKNPSWSNVRIRNHLKNTATSLGSTNLYGSGLVNAEAATR

SEQ ID NO: 59679 - protein, 269 aa, Unidentified
AQSVPWGISRVQAPAAHNRRLTGSGVKVAVLDTGISTHPDLNIRGGASFVPGEPSTQDGEGHGTHVAGTIAALNNDIGVLGVAPSAELYAVKVLGASGSGSVSSIAQGLEWAGNNSMHVANLSLGSESPSATLEQAVNSATSRGVLVVAASGNSGADSISYPARYANAMAVGATDQNNNRADFSQYGAGLDIVAPGVNVQSTYPGSTYASLNGTSMATPHVAGAAALVKQKNPSWSNVRIRNHLKNTATSLGSTNLYGSGLVNAEAATR

SEQ ID NO: 59680 - protein, 269 aa, Unidentified
AQSVPWGISRVQAPAAHNRGLTGSGVKVAVLDTGISTHPDLNIRGGASFVPGEPSTQDGNGHGTHAAGTIAALNNSIGVLGVAPSAELYAVKVLGASGSGAISSIAQGLEWAGNNGMHVANLSLGSPSPSATLEQAVNSATSRGVLVVAASGNSGADSISYPARYANAMAVGATDQNNNRASFSQYGAGLDIVAPGVNVQSTYPGSTYASLNGTSMATPHVAGAAVLVKHENPSWSNVRIRNHLKNTATSLGSTNLYGSGLVNAEAATR

SEQ ID NO: 59681 - protein, 269 aa, Unidentified
AQSVPWGISRVQAPAAHNRRLTGSGVKVAVLDTGISTHPDLNIRGGASFVPGEPSTQDGNGHGTHVAGTIAALNNGIGVLGVAPSAELYAVKVLGASGSGSVSSIAQGLEWAGNNSMHVANLSLGSPSPSATLEQAVNSATSRGVLVVAASGNSGADSISYPARYANAMAVGATDQNNNRADFSQYGAGLDIVAPGVNVQSTYPGSTYASLNGTSMATPHVAGAAALVKQKNPSWSNVRIRDRLKNTATSLGSTNLYGSGLVNAEAATR

SEQ ID NO: 59682 - protein, 269 aa, Unidentified
AQSVPWGISRVQAPAAHNRRLTGRGVKVAVLDTGISTHPDLNIRGGASFVPGEPSTQDGNGHGTHVAGTIAALNNNIGVLGVAPSAELYAVKVLAASGGGSVSSIAGGLEWAGLNGMHVANLSLGSPSPSATLEQAVNSATSRGVLVVAASGNSGAGSISYPARYANAMAVGATDQNNNRASFSQYGAGLDIVAPGVNVQSTYPGSTYASQNGTSMATPHVAGAAALVKQKNPSWSNVQIRNHLKNTATSLGSTNLYGSGLVNAEAATR

SEQ ID NO: 59683 - protein, 269 aa, Unidentified
AQSVPWGISRVQAPAAHNRGLTGSGVKVAVLDTGISTHPDLDITGGASFVPGEPSTQDGNGHGTHVAGTIAALNNSIGVLGVAPSAELYAVKVLGASGGGAISSIAQGLEWAGNNGMHVANLSLGSPSPSATLEQAVNSATSRGVLVVAASGNSGAGSISYPARYANAMAVGATDQNNNRASFSQYGAGLDIVAPGVNVQSTYPGSTYASLNGTSMATPHVAGAAVLVKQKNPSWSNVRIRNHLKNTATSLGSTNLYGSGLVRAEAATR

SEQ ID NO: 59684 - protein, 269 aa, Unidentified
AQSVPWGISRVQAPAAHNRGLTGSGVKVAVLDTGISTHPDLNIRGGASFVPGEPSTQDGNGHGTHVAGTIAALDNLIGVLGVAPRAELYAVKVLGASGSGSVSSIAQGLEWAGNNRMHVANLSLGLQAPSATLEQAVNSATSRGVLVVAASGNSGAGSISYPARYANAMAVGATDQNNNRASFSQYGAGLDIVAPGVNVNSTYPGSTYASLNGTSMATPHVAGAAALVKQKNPSWSNVQIRNHLKNTATSLGSTNLYGSGLVNAEAATR

SEQ ID NO: 59685 - protein, 269 aa, Unidentified
AQSVPWGISRVQAPAAHRRRLTGSGVKVAVLDTGISTHPDLNIRGGASFVPGEPSTQDGNGHGTHVAGTIAALNNSIGVLGVAPSAELYAVKVLGASGGGAISSIAQGLEWAGNNGMHVANLSLGSPSPSATLEQAVNSATSRGVLVVAASGNSGAGSISYPARYANAMAVGATDQNNNRASFSQYGAGLDIVAPGVNVQSTYPGSTYASLNGTSMATPHVAGAAVLVKQKNPSWSNVRIRNRLKNTATSLGSTNLYGSGLVNAEAATR

SEQ ID NO: 59686 - protein, 269 aa, Unidentified
AQSVPWGISRVQAPAAHNRGLLGFGVKVAVLDTGISTHPDLNIRGGASFVPGEPSTQDGNGHGTHVAGTIAALNNNIGVLGVAPSAELYAVKVLGASGSGSVSSIAQGLEWAGNNRMHVANLSLGDPSPSATLEQAVNSATSRGVLVVAASGNSGAGSIDYPARYANAMAVGATDQNNNRASFSQYGAGLDIVAPGVNVQSTYPGSAYASENGTSMATPHVAGAAALVKQKNPSWSNVQIRNHLKNTATSLGSTNLYGSGLVNAEAATR

SEQ ID NO: 59687 - protein, 269 aa, Unidentified
AQSVPWGISRVQAPAAHNRGLTGSGVKVAVLDTGISTHPDLDIRGGASFVPGEPSTQDGNGHGTHVAGTIAALNNRIGVLGVAPSAELYAVKVLGASGGGAISSIAQGLEWAGNNGMHVANLSLGSPSPSATLEQAVNSATSRGVLVVAASGNSGAGSISYPARYANAMAVGATDQNNNRASFSQYGAGLDIVAPGVNVQSTYPGSTYASLNGTSMATPHVAGAAVLVKQKNPSWSNVRIRNRLKNTATSLGSTNLYGSGLVNAEAATR

SEQ ID NO: 59688 - protein, 269 aa, Unidentified
AQSVPWGISRVQAPAAHNRRLTGSGVKVAVLDTGISTHPDLNIRGGASFVPGEPSTQDGEGHGTHVAGTIAALNNDIGVLGVAPSAELYAVKVLGASGSGSVSSIAQGLEWAGNNDMHVANLSLGSESPSATLEQAVNSATSRGVLVVAASGNSGADSISYPARYANAMAVGATDQNNNRADFSQYGAGLDIVAPGVNVQSTYPGSTYASLNGTSMATPHVAGAAALVKQKNPSWSNVRIRNHLKNTATSLGSTNLYGSGLVNAEAATR

SEQ ID NO: 59689 - protein, 269 aa, Unidentified
AQSVPWGISRVQAPAAHRRGLTGRGVKVAVLDTGISTHPDLNIRGGASFVPGEPSTQDGNGHGTHVAGTIAALDNSIGVLGVAPSAELYAVKVLGASGAGSVSSIAQGLEWAGANGMHVANLSLGSPSPSATLEQAVNSATSRGVLVVAASGNSGAGSISYPARYANAMAVGATDQDNNRASFSQYGAGLDIVAPGVNVQSTYPGSAYASLNGTSMATPHVAGAAALVKQKNPSWSNVQIRNRLKNTATSLGSTNLYGSGLVNAEAATR

SEQ ID NO: 59690 - protein, 269 aa, Unidentified
AQSVPWGISRVQAPAAHNRGLTGSGVKVAVLDTGISTHPDLNIRGGASFVPGEPSTQDGNGHGTHVAGTIAALNNSIGVLGVAPSAELYAVKVLGASGGGAISSIAQGLEWAGANVMHVANLSLGSPSPSATLEQAVNSATSRGVLVVAASGNSGAGSISYPARYANAMAVGATDQNNNRASFSQYGAGLDIVAPGVNVQSTVPQSTYASLNGTSMATPHVAGAAVLVKQKNPSWSNVQIRNHLKNTATSLGSTNLYGSGLVNAEAATR

SEQ ID NO: 59691 - protein, 269 aa, Unidentified
AQSVPWGISRVQAPAAHNRGLRGFGVKVAVLDTGISTHPDLNIRGGASFVPGEPSTQDGNGHGTHVAGTIAALNNSIGVLGVAPSAELYAVKVLGASGGGAISSIAQGLEWAGNNGMHVANLSLGSPSPSATLEQAVNSATSRGVLVVAASGNSGAGSISYPARYANAMAVGATDQNNNRASFSQYGAGLDIVAPGVNVQSTYPGSTYASLNGTSMATPHVAGAAVLVKQKNPSWSNVRIRNHLKNTATSLGSTNLYGSGLVNAHAATR

SEQ ID NO: 59692 - protein, 269 aa, Unidentified
AQSVPWGISRVQAPAAHNRGLTGSGVKVAVLDTGISTHPDLNIRGGASFVPGEPSTQDGNGHGTHVAGTIAALNNSIGVLGVAPSAELYAVKVLGASGGGSIASIAQGLEWAGNNGMHVANLSLGSPSPSATLEQAVNSATSRGVLVVAASGNSGEGSISYPARYANAMAVGATDQNNNRASFSQYGAGLDIVAPGVNVQSTYPGSTYASLNGTSMATPHVAGAAVLVKQKRPSWSNVRIRDHLKNTATSLGSTNLYGSGLVNAEAATR

SEQ ID NO: 59693 - protein, 269 aa, Unidentified
AQSVPWGISRVQAPAAHNRGLTGSGVKVAVLDTGISTHPDLNIRGGASFVPGEPSTQDGNGHGTHVAGTIAALDNTIGVLGVAPRAELYAVKVLGASGSGSVSSIAQGLEWAGNNRMHVANLSLGLQAPSATLEQAVNSATSRGVLVVAASGNSGAGSISYPARYANAMAVGATDQNNNRASFSQYGAGLDIVAPGVNVHSTYPGSTYASLNGTSMATPHVAGAAALVKQKNPSWSNVQIRNHLKNTATSLGSTNLYGSGLVNAEAATR

SEQ ID NO: 59694 - protein, 269 aa, Unidentified
AQSVPWGISRVQAPAAHRRGLTGRGVKVAVLDTGISTHPDLNIRGGASFVPGEPSTQDGNGHGTHVAGTIAALDNSIGVLGVAPSAELYAVKVLGASGSGSVSSIAQGLEWAGANGMHVANLSLGSPSPSATLEQAVNSATSRGVLVVAASGNSGAGSISYPARYANAMAVGATDQDNNRASFSQYGAGLDIVAPGVNVQSTYPQSAYASLNGTSMATPHVAGAAALVKQKNPSWSNVQIRNRLKNTATSLGSTNLYGSGLVNAEAATR

SEQ ID NO: 59695 - protein, 269 aa, Unidentified
AQSVPWGISRVQAPAAHNRGLAGSGVKVAVLDTGISTHPDLNIRGGASFVPGEPSTQDGNGHGTHVAGTIAALNNSIGVLGVAPSAELYAVKVLAASGQGAISSIAQGLEWAGNNGMHVANLSLGAPSPSATLEQAVNSATSRGVLVVAASGNSGAGSISYPARYANAMAVGATDQNNNRASFSQYGAGLDIVAPGVNVQSTYPGSTYASLNGTSMATPHVAGAAVLVKQKNPSWSNVRIRNHLKNTATSLGSTNLYGSGLVNAEAATR

SEQ ID NO: 59696 - protein, 269 aa, Unidentified
AQSVPWGISRVQAPAAHNRGLTGSGVKVAVLDTGISTHPDLNIRGGASFVPGEPSTQDGNGHGTHVAGTIAALDNEIGVLGVAPRAELYAVKVLGASGSGSVSSIAQGLEWAGNNRMHVANLSLGLQAPSATLEQAVNSATSRGVLVVAASGNSGAGSISYPARYANAMAVGATDQNNNRASFSQYGAGLDIVAPGVNVFSTYPGSTYASLNGTSMATPHVAGAAALVKQKNPSWSNVQIRNHLKNTATSLGSTNLYGSGLVNAEAATR

SEQ ID NO: 59697 - protein, 269 aa, Unidentified
AQSVPWGISRVQAPAAHNRGLTGRGVKVAVLDTGISTHPDLNIRGGASFVPGEPSTQDGEGHGTHVAGTIAALNNSIGVLGVAPSAELYAVKVLGASGSGSVSSIAQGLEWAGLNRMHVANLSLGIPSPSATLEQAVNSATSRGVLVVAASGNSGEGSIDYPARYANAMAVGATDQNNNRADFSQYGAGLDIVAPGVNVQSTYPGSTYASLNGTSMATPHVAGAAALVKQKNPSWSNVQIRNHLKNTATSLGSTNLYGSGLVNAEAATR

SEQ ID NO: 59698 - protein, 269 aa, Unidentified
AQSVPWGISRVQAPAAHRRGLTGRGVKVAVLDTGISTHPDLNIRGGASFVPGEPSTQDGNGHGTHVAGTIAALNNSIGVLGVAPDAELYAVKVLGASGSGSVSSIAQGLEWAGNNGMHVANLSLGSPSPSATLEQAVNSATSRGVLVVAASGNSGAGSISYPARYANAMAVGATDQNNYRASFSQYGAGLDIVAPGVNVLSTWPGSAYASLNGTSQATPHVAGAAALVKQKNPSWSNVQIRNRLKNTATSLGSTNLYGSGLVNAEAATR

SEQ ID NO: 59699 - protein, 269 aa, Unidentified
AQSVPWGISRVQAPAAHNRGLTGRGVKVAVLDTGISTHPDLNIRGGASFVPGEPSTQDGNGHGTHVAGTIAALNNGIGVLGVAPSAELYAVKVLGASGSGSVSSIAQGLEWAGNNDMHVANLSLGSPSPSATLEQAVNSATSRGVLVVAASGNSGADSISYPARYANAMAVGATDQNNNRADFSQYGAGLDIVAPGVNVQSTYPGSTYASLNGTSMATPHVAGAAALVKQKNPSWSNVRIRDRLKNTATSLGSTNLYGSGLVNAEAATR

SEQ ID NO: 59700 - protein, 269 aa, Unidentified
AQSVPWGISRVQAPAAHNRGLTGSGVKVAVLDTGISTHPDLNIRGGASFVPGEPSTQDGNGHGTHVAGTIAALDNMIGVLGVAPRAELYAVKVLGASGSGSVSSIAQGLEWAGNNRMHVANLSLGLQAPSATLEQAVNSATSRGVLVVAASGNSGAGSISYPARYANAMAVGATDQNNNRASFSQYGAGLDIVAPGVNVSSTYPGSTYASLNGTSMATPHVAGAAALVKQKNPSWSNVQIRNHLKNTATSLGSTNLYGSGLVNAEAATR

SEQ ID NO: 59701 - protein, 269 aa, Unidentified
AQSVPWGISRVQAPAAHNRGLAGSGVKVAVLDTGISTHPDLNIRGGASFVPGEPSTQDGNGHGTHVAGTIAALNNSIGVLGVAPSAELYAVKVLSASGNGAISSIAQGLEWAGNNGMHVANLSLGAPSPSATLEQAVNSATSRGVLVVAASGNSGAGSISYPARYANAMAVGATDQNNNRASFSQYGAGLDIVAPGVNVQSTYPGSTYASLNGTSMATPHVAGAAVLVKQKNPSWSNVRIRNHLKNTATSLGSTNLYGSGLVNAEAATR

SEQ ID NO: 59702 - protein, 269 aa, Unidentified
AQSVPWGISRVQAPAAHNRRLTGSGVKVAVLDTGISTHPDLNIRGGASFVPGEPSTQDGEGHGTHVAGTIAALNNDIGVLGVAPSAELYAVKVLGASGSGSVSSIAQGLEWAGNNSMHVANLSLGSESPSATLEQAVNSATSRGVLVVAASGNSGADSISYPARYANAMAVGATDQNNNRASFSQYGAGLDIVAPGVNVQSTYPGSTYASLNGTSMATPHVAGAAALVKQKNPSWSNVQIRDRLKNTATSLGSTNLYGSGLVNAEAATR

SEQ ID NO: 59703 - protein, 269 aa, Unidentified
AQSVPWGISRVQAPAAHNRGLAGSGVKVAVLDTGISTHPDLNIRGGASFVPGEPSTQDGNGHGTHVAGTIAALNNSIGVLGVAPSAELYAVKVLSASGGGAISSIANGLEWAGNNGMHVANLSLGSPSPSATLEQAVNSATSRGVLVVAASGNSGAGSISYPARYANAMAVGATDQNNNRASFSQYGAGLDIVAPGVNVQSTYPGSTYASLNGTSMATPHVAGAAVLVKQKNPSWSNVRIRNHLKNTATSLGSTNLYGSGLVNAEAATR

SEQ ID NO: 59704 - protein, 269 aa, Unidentified
AQSVPWGISRVQAPAAHRRGLWGRGVKVAVLDTGISTHPDLNIRGGASFVPGEPSTQDGNGHGTHVAGTIAALDNSIGVLGVAPSAELYAVKVLGASGSGSVSSIAQGLEWAGANGMHVANLSLGSPSPSATLEQAVNSATSRGVLVVAASGNSGAGSISYPARYANAMAVGATDQNNNRASFSQYGAGLDIVAPGVNVQSTYPQSTYFSLNGTSMATPHVAGAAALVKQKNPSWSNVQIRNRLKNTATSLGSTNLYGSGLVNAEAATR

SEQ ID NO: 59705 - protein, 269 aa, Unidentified
AQSVPWGISRVQAPAAHNRGLAGGGVKVAVLDTGISTHPDLNIRGGASFVPGEPSTQDGNGHGTHVAGTIAALNNSIGVLGVAPSAELYAVKVLSASGNGAISSIAQGLEWAGNNGMHVANLSLGSPSPSATLEQAVNSATSRGVLVVAASGNSGAGSISYPARYANAMAVGATDQNNNRASFSQYGAGLDIVAPGVNVQSTYPGSTYASLNGTSMATPHVAGAAVLVKQKNPSWSNVRIRNHLKNTATSLGSTNLYGSGLVNAEAATR

SEQ ID NO: 59706 - protein, 269 aa, Unidentified
AQSVPWGISRVQAPAAHRRRLWGRGVKVAVLDTGISTHPDLNIRGGASFVPGEPSTQDGNGHGTHVAGTIAALDNSIGVLGVAPSAELYAVKVLGASGAGSVSSIAQGLEWAGNNGMHVANLSLGSPSPSATLEQAVNSATSRGVLVVAASGNSGAGSISYPARYANAMAVGATDQDNNRASFSQYGAGLDIVAPGVNVQSTYPGSTYASLNGTSMATPHVAGAAALVKQKNPSWSNVQIRNRLKNTATSLGSTNLYGSGLVNAEAATR

SEQ ID NO: 59707 - protein, 269 aa, Unidentified
AQSVPWGISRVQAPAAHNRGLTGRGVKVAVLDTGISTHPDLNIRGGASFVPGEPSTQDGNGHGTHVAGTIAALDNNIGVLGVAPDAELYAVKVLGASGVGSVSSIAQGLEWAGNNRMHVANLSLGSPSPSATLEQAVNSATSRGVLVVAASGNSGAGSISYPARYANAMAVGATDQNNNRASFSQYGAGLDIVAPGVNVQSTWPGSTYASLNGTSQATPHVAGAAALVKQKNPSWSNVQIRNRLKNTATSLGSTNLYGSGLVNAEAATR

SEQ ID NO: 59708 - protein, 269 aa, Unidentified
AQSVPWGISRVQAPAAHNRGLAGSGVKVAVLDTGISTHPDLNIRGGASFVPGEPSTQDGNGHGTHVAGTIAALNNNIGVLGVAPSAELYAVKVLSASGNGAISSIAQGLEWAGNNGMHVANLSLGSPSPSATLEQAVNSATSRGVLVVAASGNSGAGSISYPARYANAMAVGATDQNNNRASFSQYGAGLDIVAPGVNVQSTYPGSTYASLNGTSMATPHVAGAAVLVKQKNPSWSNVRIRNHLKNTATSLGSTNLYGSGLVNAEAATR

SEQ ID NO: 59709 - protein, 269 aa, Unidentified
AQSVPWGISRVQAPAAHNRGLTGSGVKVAVLDTGISTHPDLNIRGGASFVPGEPSTQDGNGHGTHVAGTIAALNNDIGVLGVAPSAELYAVKVLGASGSGSVSSIAQGLEWAGNNSMHVANLSLGSESPSATLEQAVNSATSRGVLVVAASGNSGADSISYPARYANAMAVGATDQNNNRADFSQYGAGLDIVAPGVNVQSTYPGSTYASLNGTSMATPHVAGAAALVKQKNPSWSNVRIRDRLKNTATSLGSTNLYGSGLVNAEAATR

SEQ ID NO: 59710 - protein, 269 aa, Unidentified
AQSVPWGISRVQAPAAHNRRLTGRGVKVAVLDTGISTHPDLNIRGGASFVPGEPSTQDGNGHGTHVAGTIAALDNSIGVLGVAPSAELYAVKVLGASGGGAISSIAQGLEWAGNNGMHVANLSLGSPSPSATLEQAVNSATSRGVLVVAASGNSGAGSISYPARYANAMAVGATDQNNNRASFSQYGAGLDIVAPGVNVQSTYPGSTYASLNGTSMATPHVAGAAVLVKQKNPSWSNVRIRNHLKNTATSLGSTNLYGSGLVNAEAATR

SEQ ID NO: 59711 - protein, 269 aa, Unidentified
AQSVPWGISRVQAPAAHRRGLTGSGVKVAVLDTGISTHPDLNIRGGASFVPGEPSTQDGNGHGTHVAGTIAALDNSIGVLGVAPSAELYAVKVLGASGGGAISSIAQGLEWAGNNGMHVANLSLGSPSPSATLEQAVNSATSRGVLVVAASGNSGAGSISYPARYANAMAVGATDQNNNRASFSQYGAGLDIVAPGVNVQSTYPGSTYASLNGTSMATPHVAGAAVLVKQKNPSWSNVRIRNRLKNTATSLGSTNLYGSGLVNAEAATR

SEQ ID NO: 59712 - protein, 269 aa, Unidentified
AQSVPWGISRVQAPAAHNRGLAGSGVKVAVLDTGISTHPDLNIRGGASFVPGEPSTQDGNGHGTHVAGTIAALNNSIGVLGVAPSAELYAVKVLGASGGGAISSIAQGLEWAGNNGMHVANVSLGSPSPSATLEQAVNSATSRGVLVVAASGNSGAGSISYPARYANAMAVGATDQNNNRASFSQYGAGLDIVAPGVNVQSTYPGSTYASQNGTSMATPHVAGAAVLVKQKNPSWSNVRIRNHLKNTATSLGSTNLYGSGLVNAEAATR

SEQ ID NO: 59713 - protein, 269 aa, Unidentified
AQSVPWGISRVQAPAAHNRGLAGGGVKVAVLDTGISTHPDLNIRGGASFVPGEPSTQDGNGHGTHVAGTIAALNNSIGVLGVAPSAELYAVKVLGASGQGAISSIAGGLEWAGNNGMHVANLSLGSPSPSATLEQAVNSATSRGVLVVAASGNSGAGSISYPARYANAMAVGATDQNNNRASFSQYGAGLDIVAPGVNVQSTYPGSTYASLNGTSMATPHVAGAAVLVKQKNPSWSNVRIRNHLKNTATSLGSTNLYGSGLVNAEAATR

SEQ ID NO: 59714 - protein, 269 aa, Unidentified
AQSVPWGISRVQAPAAHNRGLTGFGVKVAVLDTGISTHPDLNIRGGASFVPGEPSTQDGNGHGTHVAGTIAALNNSIGVLGVAPSAELYAVKVLGASGGGAISSIAQGLEWAGANGMHVANLSLGSPSPSATLEQAVNSATSRGVLVVAASGNSGAGSISYPARYANAMAVGATDQNNNRASFSQYGAGLDIVAPGVNVQSTVPGSAYASLNGTSMATPHVAGAAVLVKQKNPSWSNVQIRNHLKNTATSLGSTNLYGSGLVNAEAATR

SEQ ID NO: 59715 - protein, 269 aa, Unidentified
AQSVPWGISRVQAPAAHRRRLTGRGVKVAVLDTGISTHPDLNIRGGASFVPGEPSTQDGNGHGTHVAGTIAALDNSIGVLGVAPSAELYAVKVLGASGSGSVSSIAQGLEWAGNNGMHVANLSLGSPSPSATLEQAVNSATSRGVLVVAASGNSGAGSISYPARYANAMAVGATDQDNNRASFSQYGAGLDIVAPGVNVQSTYPQSTYFSLNGTSMATPHVAGAAALVKQKNPSWSNVQIRNRLKNTATSLGSTNLYGSGLVNAEAATR

SEQ ID NO: 59716 - protein, 269 aa, Unidentified
AQSVPWGISRVQAPAAHRRGLTGSGVKVAVLDTGISTHPDLNITGGASFVPGEPSTQDGNGHGTHVAGTIAALNNSIGVLGVAPSAELYAVKVLGASGGGAISSIAQGLEWAGNNGMHVANLSLGSPSPSATLEQAVNSATSRGVLVVAASGNSGAGSISYPARYANAMAVGATDQNNNRASFSQYGAGLDIVAPGVNVQSTYPGSTYASLNGTSMATPHVAGAAVLVKQKNPSWSNVRIRNHLKNTATSLGSTNLYGSGLVRAEAATR

SEQ ID NO: 59717 - protein, 269 aa, Unidentified
AQSVPWGISRVQAPAAHNRRLTGSGVKVAVLDTGISTHPDLNIRGGASFVPGEPSTQDGNGHGTHVAGTIAALNNSIGVLGVAPSAELYAVKVLGASGGGAISSIAQGLEWAGANGMHVANLSLGSPSPSATLEQAVNSATSRGVLVVAASGNSGAGSISYPARYANAMAVGATDQNNNRASFSQYGAGLDIVAPGVNVQSTYPQSTYASLNGTSMATPHVAGAAVLVKQKNPSWSNVRIRNHLKNTATSLGSTNLYGSGLVNAEAATR

SEQ ID NO: 59718 - protein, 269 aa, Unidentified
AQSVPWGISRVQAPAAHNRGLTGSGVKVAVLDTGISTHPDLNIRGGASFVPGEPSTQDGNGHGTHAAGTIAALNNSIGVLGVAPSAELYAVKVLGASGSGAISSIAQGLEWAGNNGMHVANLSLGSPSPSATLEQAVNSATSRGVLVVAASGNSGADSISYPARYANAMAVGATDQNNNRASFSQYGAGLDIVAPGVNVQSTYPGSTYASLNGTSMATPHVAGTAVLVKHKNPSWSNVRIRNHLKNTATSLGSTNLYGSGLVNAEAATR

SEQ ID NO: 59719 - protein, 269 aa, Unidentified
AQSVPWGISRVQAPAAHNRGLTGRGVKVAVLDTGISTHPDLNIRGGASFVPGEPSTQDGNGHGTHVAGTIAALNNDIGVLGVAPSAELYAVKVLGASGSGSVSSIAQGLEWAGNNDMHVANLSLGSESPSATLEQAVNSATSRGVLVVAASGNSGADSISYPARYANAMAVGATDQNNNRASFSQYGAGLDIVAPGVNVQSTYPGSTYASLNGTSMATPHVAGAAALVKQKNPSWSNVRIRDRLKNTATSLGSTNLYGSGLVNAEAATR

SEQ ID NO: 59720 - protein, 269 aa, Unidentified
AQSVPWGISRVQAPAAHNRRLTGRGVKVAVLDTGISTHPDLNIRGGASFVPGEPSTQDGNGHGTHVAGTIAALNNNIGVLGVAPSAELYAVKVLGASGGGSVSSIAGGLEWAGLNGMHVANLSLGAPSPSATLEQAVNSATSRGVLVVAASGNSGAGSISYPARYANAMAVGATDQNNNRASFSQYGAGLDIVAPGVNVQSTYPGSTYASQNGTSMATPHVAGAAALVKQKNPSWSNVQIRNHLKNTATSLGSTNLYGSGLVNAEAATR

SEQ ID NO: 59721 - protein, 269 aa, Unidentified
AQSVPWGISRVQAPAAHNRGLAGSGVKVAVLDTGISTHPDLNIRGGASFVPGEPSTQDGNGHGTHVAGTIAALNNSIGVLGVAPSAELYAVKVLSASGNGAISSIAQGLEWAGNNGMHVANLSLGSPSPSATLEQAVNSATSRGVLVVAASGNSGAGSISYPARYANAMAVGATDQNNNRASFSQYGAGLDIVAPGVNVQSTYPGSTYASQNGTSMATPHVAGAAVLVKQKNPSWSNVRIRNHLKNTATSLGSTNLYGSGLVNAEAATR

SEQ ID NO: 59722 - protein, 269 aa, Unidentified
AQSVPWGISRVQAPAAHNRGLTGSGVKVAVLDTGISTHPDLNIRGGASFVPGEPSTQDGNGHGTHVAGTIAALDNWIGVLGVAPRAELYAVKVLGASGSGSVSSIAQGLEWAGNNRMHVANLSLGLQAPSATLEQAVNSATSRGVLVVAASGNSGAGSISYPARYANAMAVGATDQNNNRASFSQYGAGLDIVAPGVNVDSTYPGSTYASLNGTSMATPHVAGAAALVKQKNPSWSNVQIRNHLKNTATSLGSTNLYGSGLVNAEAATR

SEQ ID NO: 59723 - protein, 269 aa, Unidentified
AQSVPWGISRVQAPAAHNRGLTGSGVKVAVLDTGISTHPDLNIRGGASFVPGEPSTQDGNGHGTHVAGTIAALDNFIGVLGVAPRAELYAVKVLGASGSGSVSSIAQGLEWAGNNRMHVANLSLGLQAPSATLEQAVNSATSRGVLVVAASGNSGAGSISYPARYANAMAVGATDQNNNRASFSQYGAGLDIVAPGVNVHSTYPGSTYASLNGTSMATPHVAGAAALVKQKNPSWSNVQIRNHLKNTATSLGSTNLYGSGLVNAEAATR

SEQ ID NO: 59724 - protein, 269 aa, Unidentified
AQSVPWGISRVQAPAAHNRRLTGSGVKVAVLDTGISTHPDLNIRGGASFVPGEPSTQDGEGHGTHVAGTIAALNNDIGVLGVAPSAELYAVKVLGASGSGSVSSIAQGLEWAGNNSMHVANLSLGSPSPSATLEQAVNSATSRGVLVVAASGNSGADSISYPARYANAMAVGATDQNNNRADFSQYGAGLDIVAPGVNVQSTYPGSTYASLNGTSMATPHVAGAAALVKQKNPSWSNVRIRNRLKNTATSLGSTNLYGSGLVNAEAATR

SEQ ID NO: 59725 - protein, 269 aa, Unidentified
AQSVPWGISRVQAPAAHNRGLTGFGVKVAVLDSGISTHPDLNIRGGASFVPGEPSTQDGNGHGTHVAGTIAALNNSIGVLGVAPSAELYAVKVLGASGGGAISSIAQGLEWAGLNGMHVANLSLGSPSPSATLEQAVNSATSRGVLVVAASGNSGAGSISYPARYANAMAVGATDQNNNRASFSQYGAGLDIVAPGVNVQSTVPGSTYASLNGTSMATPHVAGAAVLVKQKNPSWSNVQIRNHLKNTATSLGSTNLYGSGLVNAEAATR

SEQ ID NO: 59726 - protein, 269 aa, Unidentified
AQSVPWGISRVQAPAAHNRGLTGSGVKVAVLDTGISTHPDLNIRGGASFVPGEPSTQDGNGHGTHVAGTIAALNNSIGVLGVAPSAELYAVKVLGASGSGAISSIAQGLEWAGNNGMHVANLSLGSPSPSATLEQAVNSATSRGVLVVAASGNSGADSISYPARYANAMAVGATDQNNNRASFSQYGAGLDIVAPGVNVQSTYPGSRYASLNGTSMATPHVAGAAVLVKHKNPSWSNVRIRNHLKNTATSLGSANLYGSGLVNAEAATR

SEQ ID NO: 59727 - protein, 269 aa, Unidentified
AQSVPWGISRVQAPAAHNRGLTGSGVKVAVLDTGISTHPDLNIRGGASFVPGEPSTQDGNGHGTHVAGTIAALNNSIGVLGVAPSAELYAVKVLGASGSGAISSIAQGLEWAGNNGMHVANLSLGSPSPSATLEQAVNSATSRGVLVVAASGNSGADSISYPARYANAMAVGATDQNNNRASFSQYGAGLDIVAPGVNVQSTWPGSTYASLNGTSMATPHVAGAAVLVKHKNPSWSNVRIRNHLKNTATSVGSTNLYGSGLVNAEAATR

SEQ ID NO: 59728 - protein, 269 aa, Unidentified
AQSVPWGISRVQAPAAHNRGLTGSGVKVAVLDTGISTHPDLNIRGGASFVPGEPSTQDGNGHGTHVAGTIAALDNAIGVLGVAPRAELYAVKVLGASGSGSVSSIAQGLEWAGNNRMHVANLSLGLQAPSATLEQAVNSATSRGVLVVAASGNSGAGSISYPARYANAMAVGATDQNNNRASFSQYGAGLDIVAPGVNVNSTYPGSTYASLNGTSMATPHVAGAAALVKQKNPSWSNVQIRNHLKNTATSLGSTNLYGSGLVNAEAATR

SEQ ID NO: 59729 - protein, 269 aa, Unidentified
AQSVPWGISRVQAPAAHNRGLTGSGVKVAVLDTGISTHPDLNIRGGASFVPGEPSTQDGNGHGTHVAGTIAALDNMIGVLGVAPRAELYAVKVLGASGSGSVSSIAQGLEWAGNNRMHVANLSLGLQAPSATLEQAVNSATSRGVLVVAASGNSGAGSISYPARYANAMAVGATDQNNNRASFSQYGAGLDIVAPGVNVGSTYPGSTYASLNGTSMATPHVAGAAALVKQKNPSWSNVQIRNHLKNTATSLGSTNLYGSGLVNAEAATR

SEQ ID NO: 59730 - protein, 269 aa, Unidentified
AQSVPWGISRVQAPAAHRRRLTGRGVKVAVLDTGISTHPDLNIRGGASFVPGEPSTQDGNGHGTHVAGTIAALDNSIGVLGVAPSAELYAVKVLGASGAGSVSSIAQGLEWAGNNGMHVANLSLGSPSPSATLEQAVNSATSRGVLVVAASGNSGAGSISYPARYANAMAVGATDQDNNRASFSQYGAGLDIVAPGVNVQSTYPQSTYASLNGTSMATPHVAGAAALVKQKNPSWSNVQIRNRLKNTATSLGSTNLYGSGLVNAEAATR

SEQ ID NO: 59731 - protein, 269 aa, Unidentified
AQSVPWGISRVQAPAAHNRRLTGSGVKVAVLDTGISTHPDLNIRGGASFVPGEPSTQDGEGHGTHVAGTIAALNNGIGVLGVAPSAELYAVKVLGASGSGSVSSIAQGLEWAGNNDMHVANLSLGSPSPSATLEQAVNSATSRGVLVVAASGNSGADSISYPARYANAMAVGATDQNNNRADFSQYGAGLDIVAPGVNVQSTYPGSTYASLNGTSMATPHVAGAAALVKQKNPSWSNVRIRDHLKNTATSLGSTNLYGSGLVNAEAATR

SEQ ID NO: 59732 - protein, 269 aa, Unidentified
AQSVPWGISRVQAPAAHNRGLTGSGVKVAVLDTGISTHPDLNIRGGASFVPGEPSTQDGNGHGTHAAGTIAALDNSIGVLGVAPSAELYAVKVLGASGSGAISSIAQGLEWAGNNGMHVASLSLGSPSPSATLEQAVNSATSRGVLVVAASGNSGADSISYPARYANAMAVGATDQNNNRASFSQYGAGLDIVAPGVNVQSTYPGSTYASLNGTSMATPHVAGAAALVKHKNPSWSNVQIRNQLKNTATSLGSTNLYGSGLVNAEAATR

SEQ ID NO: 59733 - protein, 269 aa, Unidentified
AQSVPWGISRVQAPAAHNRGLTGSGVKVAVLDTGISTHPDLNIRGGASFVPGEPSTQDGNGHGTHVAGTIAALDNIIGVLGVAPRAELYAVKVLGASGSGSVSSIAQGLEWAGNNRMHVANLSLGLQAPSATLEQAVNSATSRGVLVVAASGNSGAGSISYPARYANAMAVGATDQNNNRASFSQYGAGLDIVAPGVNVRSTYPGSTYASLNGTSMATPHVAGAAALVKQKNPSWSNVQIRNHLKNTATSLGSTNLYGSGLVNAEAATR

SEQ ID NO: 59734 - protein, 269 aa, Unidentified
AQSVPWGISRVQAPAAHNRRLTGRGVKVAVLDTGISTHPDLNIRGGASFVPGEPSTQDGNGHGTHVAGTIAALNNSIGVLGVAPSAELYAVKVLGASGGGAISSIAQGLEWAGNNGMHVANLSLGSPSPSATLEQAVNSATSRGVLVVAASGNSGAGSISYPARYANAMAVGATDQNNNRASFSQYGAGLDIVAPGVNVQSTYPGSTYASLNGTSMATPHVAGAAVLVKQKNPSWSNVRIRNHLKNTATSLGSTNLYGSGLVRAEAATR

SEQ ID NO: 59735 - protein, 269 aa, Unidentified
AQSVPWGISRVQAPAAHNRRLTGSGVKVAVLDTGISTHPDLNIRGGASFVPGEPSTQDGEGHGTHVAGTIAALNNGIGVLGVAPSAELYAVKVLGASGSGSVSSIAQGLEWAGNNSMHVANLSLGSPSPSATLEQAVNSATSRGVLVVAASGNSGADSISYPARYANAMAVGATDQNNNRADFSQYGAGLDIVAPGVNVQSTYPGSTYASLNGTSMATPHVAGAAALVKQKNPSWSNVRIRNRLKNTATSLGSTNLYGSGLVNAEAATR

SEQ ID NO: 59736 - protein, 269 aa, Unidentified
AQSVPWGISRVQAPAAHNRRLTGRGVKVAVLDTGISTHPDLNIRGGASFVPGEPSTQDGNGHGTHVAGTIAALNNGIGVLGVAPSAELYAVKVLGASGSGSVSSIAQGLEWAGNNDMHVANLSLGSESPSATLEQAVNSATSRGVLVVAASGNSGADSISYPARYANAMAVGATDQNNNRADFSQYGAGLDIVAPGVNVQSTYPGSTYASLNGTSMATPHVAGAAALVKQKNPSWSNVRIRNHLKNTATSLGSTNLYGSGLVNAEAATR

SEQ ID NO: 59737 - protein, 269 aa, Unidentified
AQSVPWGISRVQAPAAHNRGLAGSGVKVAVLDTGISTHPDLNIRGGASFVPGEPSTQDGNGHGTHVAGTIAALDNSIGVLGVAPSAELYAVKVLAASGNGAISSIAQGLEWAGNNGMHVANLSLGSPSPSATLEQAVNSATSRGVLVVAASGNSGAGSISYPARYANAMAVGATDQNNNRASFSQYGAGLDIVAPGVNVQSTYPGSTYASLNGTSMATPHVAGAAVLVKQKNPSWSNVRIRNHLKNTATSLGSTNLYGSGLVNAEAATR

SEQ ID NO: 59738 - protein, 269 aa, Unidentified
AQVVPWGISRVQAPAAHNRGLTGSGVKVAVLDTGISTHPDLNIRGGASFVPGEPSTQDGNGHGTHVAGTIAALDNNIGVLGVAPRAELYAVKVLGASGSGSVSSIAQGLEWAGNNRMHVANLSLGLQAPSATLEQAVNSATSRGVLVVAASGNSGAGSISYPARYANAMAVGATDQNNNRASFSQYGAGLDIVAPGVNVQSTYPGSTYASLNGTSMATPHVAGAAALVKQKNPSWSNVQIRNHLKNTATSLGSTNLYGSGLVNAEAATR

SEQ ID NO: 59739 - protein, 269 aa, Unidentified
AQSVPWGISRVQAPAAHNRGLTGSGVKVAVLDTGISTHPDLNIRGGASFVPGEPSTQDGNGHGTHVAGTIAALDNEIGVLGVAPRAELYAVKVLGASGSGSVSSIAQGLEWAGNNRMHVANLSLGLQAPSATLEQAVNSATSRGVLVVAASGNSGAGSISYPARYANAMAVGATDQNNNRASFSQYGAGLDIVAPGVNVNSTYPGSTYASLNGTSMATPHVAGAAALVKQKNPSWSNVQIRNHLKNTATSLGSTNLYGSGLVNAEAATR

SEQ ID NO: 59740 - protein, 269 aa, Unidentified
AQSVPWGISRVQAPAAHNRGLTGFGVKVAVLDTGISTHPDLNIRGGASFVPGEPSTQDGNGHGTHVAGTIAALNNSIGVLGVAPSAELYAVKVLGASGGGAISSIAQGLEWAGANGMHVANLSLGSPSPSATLEQAVNSATSRGVLVVAASGNSGAGSISYPARYANAMAVGATDQNNNRASFSQYGAGLDIVAPGVNVQSTAPQSTYASLNGTSMATPHVAGAAVLVKQKNPSWSNVQIRNHLKNTATSLGSTNLYGSGLVNAEAATR

SEQ ID NO: 59741 - protein, 269 aa, Unidentified
AQSVPWGISRVQAPAAHNRRLTGSGVKVAVLDTGISTHPDLNIRGGASFVPGEPSTQDGNGHGTHVAGTIAALNNGIGVLGVAPSAELYAVKVLGASGSGSVSSIAQGLEWAGNNDMHVANLSLGSESPSATLEQAVNSATSRGVLVVAASGNSGADSISYPARYANAMAVGATDQNNNRASFSQYGAGLDIVAPGVNVQSTYPGSTYASLNGTSMATPHVAGAAALVKQKNPSWSNVRIRDRLKNTATSLGSTNLYGSGLVNAEAATR

SEQ ID NO: 59742 - protein, 269 aa, Unidentified
AQSVPWGISRVQAPAAHNRRLTGSGVKVAVLDTGISTHPDLNIRGGASFVPGEPSTQDGEGHGTHVAGTIAALNNGIGVLGVAPSAELYAVKVLGASGSGSVSSIAQGLEWAGNNSMHVANLSLGSESPSATLEQAVNSATSRGVLVVAASGNSGADSISYPARYANAMAVGATDQNNNRADFSQYGAGLDIVAPGVNVQSTYPGSTYASLNGTSMATPHVAGAAALVKQKNPSWSNVRIRNHLKNTATSLGSTNLYGSGLVNAEAATR

SEQ ID NO: 59743 - protein, 269 aa, Unidentified
AQSVPWGISRVQAPAAHNRGLTGSGVKVAVLDTGISTHPDLNIRGGASFVPGEPSTQDGNGHGTHVAGTIAALDNTIGVLGVAPRAELYAVKVLGASGSGSVSSIAQGLEWAGNNRMHVANLSLGLQAPSATLEQAVNSATSRGVLVVAASGNSGAGSISYPARYANAMAVGATDQNNNRASFSQYGAGLDIVAPGVNVRSTYPGSTYASLNGTSMATPHVAGAAALVKQKNPSWSNVQIRNHLKNTATSLGSTNLYGSGLVNAEAATR

SEQ ID NO: 59744 - protein, 269 aa, Unidentified
AQVVPWGISRVQAPAAHNRGLTGSGVKVAVLDTGISTHEDLNIRGGASFVPGEPSTQDGNGHGTHVAGTIAALDNSIGVLGVAPSAELYAVKVLGASGSGSVSSIAQGLEWAGNNRMHVANLSLGSPSPSATLEQAVNSATSRGVLVVAASGNSGAGQISYPARYANAMAVGATDQNNNRASFSQYGAGLDIVAPGVNVQSTYIGSTYASKNGTSMATPHVAGAAALVKQKNPSWSNVQIRNHLKNTATSLGSTILYGSGLVNAEAATR

SEQ ID NO: 59745 - protein, 269 aa, Unidentified
AQSVPWGISRVQAPAAHNRGLAGSGVKVAVLDTGISTHPDLNIRGGASFVPGEPSTQDGNGHGTHVAGTIAALNNSIGVLGVAPSAELYAVKVLSASGQGAISSIAQGLEWAGNNGMHVANLSLGSPSPSATLEQAVNSATSRGVLVVAASGNSGAGSISYPARYANAMAVGATDQNNNRASFSQYGAGLDIVAPGVNVQSTYPGSTYASQNGTSMATPHVAGAAVLVKQKNPSWSNVRIRNHLKNTATSLGSTNLYGSGLVNAEAATR

SEQ ID NO: 59746 - protein, 269 aa, Unidentified
AQSVPWGISRVQAPAAHNRGLTGSGVKVAVLDTGISTHPDLNIRGGASFVPGEPSTQDGNGHGTHVAGTIAALDNIIGVLGVAPRAELYAVKVLGASGSGSVSSIAQGLEWAGNNRMHVANLSLGLQAPSATLEQAVNSATSRGVLVVAASGNSGAGSISYPARYANAMAVGATDQNNNRASFSQYGAGLDIVAPGVNVDSTYPGSTYASLNGTSMATPHVAGAAALVKQKNPSWSNVQIRNHLKNTATSLGSTNLYGSGLVNAEAATR

SEQ ID NO: 59747 - protein, 269 aa, Unidentified
AQSVPWGISRVQAPAAHNRGLTGSGVKVAVLDTGISTHPDLNIRGGASFVPGEPSTQDGNGHGTHVAGTIAALDNMIGVLGVAPRAELYAVKVLGASGSGSVSSIAQGLEWAGNNRMHVANLSLGLQAPSATLEQAVNSATSRGVLVVAASGNSGAGSISYPARYANAMAVGATDQNNNRASFSQYGAGLDIVAPGVNVMSTYPGSTYASLNGTSMATPHVAGAAALVKQKNPSWSNVQIRNHLKNTATSLGSTNLYGSGLVNAEAATR

SEQ ID NO: 59748 - protein, 269 aa, Unidentified
AQSVPWGISRVQAPAAHNRGLTGRGVKVAVLDTGISTHPDLNIRGGASFVPGEPSTQDGNGHGTHVAGTIAALNNDIGVLGVAPSAELYAVKVLGASGSGSVSSIAQGLEWAGNNDMHVANLSLGSESPSATLEQAVNSATSRGVLVVAASGNSGAGSISYPARYANAMAVGATDQNNNRADFSQYGAGLDIVAPGVNVQSTYPGSTYASLNGTSMATPHVAGAAALVKQKNPSWSNVRIRDRLKNTATSLGSTNLYGSGLVNAEAATR

SEQ ID NO: 59749 - protein, 269 aa, Unidentified
AQSVPWGISRVQAPAAHNRGLTGSGVKVAVLDTGISTHPDLNIRGGASFVPGEPSTQDGNGHGTHVAGTIAALNNSIGVLGVAPSAELYAVKVLGADGEGAISSIAQGLEWAGNNGMHVANLSLGSPSPSATLEQAVNSATSRGVLVVAASGNSGASSIGYPARYANAMAVGATDQNNNRASFSRYGAGLDIVAPGVNVQSTYPGSTYASLNGTSMATPHVAGAAALVKQKNPSWSNVQIRNHLKNTATSLGDTNLYGSGLVNAEAATR

SEQ ID NO: 59750 - protein, 269 aa, Unidentified
AQSVPWGISRVQAPAAHNRRLTGSGVKVAVLDTGISTHPDLNIRGGASFVPGEPSTQDGEGHGTHVAGTIAALNNGIGVLGVAPSAELYAVKVLGASGSGSVSSIAQGLEWAGNNDMHVANLSLGSESPSATLEQAVNSATSRGVLVVAASGNSGAGSISYPARYANAMAVGATDQNNNRADFSQYGAGLDIVAPGVNVQSTYPGSTYASLNGTSMATPHVAGAAALVKQKNPSWSNVRIRDHLKNTATSLGSTNLYGSGLVNAEAATR

SEQ ID NO: 59751 - protein, 269 aa, Unidentified
AQSVPWGISRVQAPAAHNRGLTGSGVKVAVLDTGISTHPDLNIRGGASFVPGEPSTQDGNGHGTHVAGTIAALDNYIGVLGVAPRAELYAVKVLGASGSGSVSSIAQGLEWAGNNRMHVANLSLGLQAPSATLEQAVNSATSRGVLVVAASGNSGAGSISYPARYANAMAVGATDQNNNRASFSQYGAGLDIVAPGVNVFSTYPGSTYASLNGTSMATPHVAGAAALVKQKNPSWSNVQIRNHLKNTATSLGSTNLYGSGLVNAEAATR

SEQ ID NO: 59752 - protein, 269 aa, Unidentified
AQSVPWGISRVQAPAAHNRGLTGSGVKVAVLDTGISTHPDLNIRGGASFVPGEPSTQDGNGHGTHVAGTIAALDNYIGVLGVAPRAELYAVKVLGASGSGSVSSIAQGLEWAGNNRMHVANLSLGLQAPSATLEQAVNSATSRGVLVVAASGNSGAGSISYPARYANAMAVGATDQNNNRASFSQYGAGLDIVAPGVNVNSTYPGSTYASLNGTSMATPHVAGAAALVKQKNPSWSNVQIRNHLKNTATSLGSTNLYGSGLVNAEAATR

SEQ ID NO: 59753 - protein, 269 aa, Unidentified
AQSVPWGISRVQAPAAHNRGLTGSGVKVAVLDTGISTHPDLNIRGGASFVPGEPSTQDGNGHGTHVAGTIAALDNCIGVLGVAPRAELYAVKVLGASGSGSVSSIAQGLEWAGNNRMHVANLSLGLQAPSATLEQAVNSATSRGVLVVAASGNSGAGSISYPARYANAMAVGATDQNNNRASFSQYGAGLDIVAPGVNVYSTYPGSTYASLNGTSMATPHVAGAAALVKQKNPSWSNVQIRNHLKNTATSLGSTNLYGSGLVNAEAATR

SEQ ID NO: 59754 - protein, 269 aa, Unidentified
AQSVPWGISRVQAPAAHNRGLTGSGVKVAVLDTGISTHPDLNIRGGASFVPGEPSTQDGNGHGTHAAGTIAALNNSIGVLGVAPSAELYAVKVLGASGSGAISSIAQGLEWAGNNGMHVANLSLGSPSPSATLEQAVNSATSRGVLVVAASGNSGADSISYPARYANAMAVGATDQNNNRASFSQYGAGLDIVAPGVNVQSTYLGSTYASLNGTSMATPHVAGAAVLVKHKNPSWSNVRIRNHLKNTATSLGSTNLYGSGLVNAEAATR

SEQ ID NO: 59755 - protein, 269 aa, Unidentified
AQSVPWGISRVQAPAAHNRGLTGRGVKVAVLDTGISTHPDLNIRGGASFVPGEPSTQDGNGHGTHVAGTIAALNNDIGVLGVAPSAELYAVKVLGASGSGSVSSIAQGLEWAGNNSMHVANLSLGSESPSATLEQAVNSATSRGVLVVAASGNSGADSISYPARYANAMAVGATDQNNNRADFSQYGAGLDIVAPGVNVQSTYPGSTYASLNGTSMATPHVAGAAALVKQKNPSWSNVQIRDRLKNTATSLGSTNLYGSGLVNAEAATR

SEQ ID NO: 59756 - protein, 269 aa, Unidentified
AQSVPWGISRVQAPAAHNRKLTGSGVKVAVLDTGISTHPDLNIRGGASFVPGEPSTQDGEGHGTHVAGTIAALNNNIGVLGVAPSAELYAVKVLAASGNGSVSSIANGLEWAGLNGMHVANLSLGSPSPSATLEQAVNSATSRGVLVVAASGNSGAGSISYPARYANAMAVGATDQNNNRADFSQYGAGLDIVAPGVNVQSTYPGSTYASLNGTSMATPHVAGAAALVKQKNPSWSNVQIRNHLKNTATSLGSTNLYGSGLVNAEAATR

SEQ ID NO: 59757 - protein, 268 aa, Unidentified
AQSVPWGISRVQAPAAHNRGLQGSGVKVAVLDTGISTHPDLNIRGGASFVPGEPSTQDGNGHGTHVAGTIAALNNSIGVLGVAPSAELYAVKVLGASGGGASSIAQGLEWAGNNGMHVANLSLGSPSPSATLEQAVNSATSRGVLVVAASGNSGADSISYPARYANAMAVGATDQNNNRADFSQYGAGLDIVAPGVNVQSTYPGSTYASLNGTSMATPHVAGAAVLVKQKNPSWSNVRIRDHLKNTATSLGSTNLYGSGLVNAEAATR

SEQ ID NO: 59758 - protein, 268 aa, Unidentified
AQSVPWGISRVQAPAAHNRGLTGSGVKVAVLDGISTHPDLNIRGGASFVPGEPSTQDGNGHGTHVAGTIAALNNSIGVLGVAPSAELYAVKVLGASGGGAISSIAQGLEWAGLNGMHVANLSLGSPSPSATLEQAVNSATSRGVLVVAASGNSGAGSISYPARYANAMAVGATDQNNNRASFSQYGAGLDIVAPGVNVQSTAPQSAYASLNGTSMATPHVAGAAVLVKQKNPSWSNVQIRNHLKNTATSLGSTNLYGSGLVNAEAATR

SEQ ID NO: 59759 - protein, 268 aa, Unidentified
AQSVPWGISRVQAPAAHNRGLAGSGVKVAVLDTGISTHPDLNIRGGASFVPGEPSTQDGNGHGTHVAGTIAALNNSIGVLGVAPSAELYAVKVLGASGGAISSIAQGLEWAGNNGMHVANLSLGSPSPSATLEQAVNSATSRGVLVVAASGNSGADSISYPARYANAMAVGATDQNNNRAEFSQYGAGLDIVAPGVNVQSTYPGSTYASLNGTSMATPHVAGAATLVKQKNPSWSNVVIREHLKNTATSLGSTNLYGSGLVNAEAATR

SEQ ID NO: 59760 - protein, 268 aa, Unidentified
AQSVPWGISRVQAPAAHNRGLAGSGVKVAVLDTGISTHPDLNIRGGASFVPGEPSTQDGNGHGTHVAGTIAALNNSIGVLGVAPSAELYAVKVLGASGGGAISSIAQGLEWAGNNGMHVANLSLGSPSPSATLEQAVNSATSRGVLVVAASGNSGADSISYPARYANAMAVGATDQNNNRAEFSQYGAGLDIVAPGVNVQSTYPGSTYASLNGTSMATPHVAGAALVKQKNPSWSNVRIRHHLKNTATSLGSTNLYGSGLVNAEAATR

SEQ ID NO: 59761 - protein, 268 aa, Unidentified
AQSVPWGISRVQAPAAHNRGLQGSGVKVAVLDTGISTHPDLNIRGGASFVPGEPSTQDGNGHGTHVAGTIAALNNSIGVLGVAPSAELYAVKVLGASGGAISSIAQGLEWAGNNGMHVANLSLGSPSPSATLEQAVNSATSRGVLVVAASGNSGADSISYPARYANAMAVGATDQNNNRADFSQYGAGLDIVAPGVNVQSTYPGSTYASLNGTSMATPHVAGAATLVKQKNPSWSNVRIRHHLKNTATSLGSTNLYGSGLVNAEAATR

SEQ ID NO: 59762 - protein, 268 aa, Unidentified
AQSVPWGISRVQAPAAHNRRLTGSGVKVAVLDTGISTHPDLNIRGGASFVPGEPSTQDGEGHGTHVAGTIAALNNIGVLGVAPSAELYAVKVLGASGSGSVSSIAQGLEWAGNNSMHVANLSLGSESPSATLEQAVNSATSRGVLVVAASGNSGADSISYPARYANAMAVGATDQNNNRADFSQYGAGLDIVAPGVNVQSTYPGSTYASLNGTSMATPHVAGAAALVKQKNPSWSNVQIRDRLKNTATSLGSTNLYGSGLVNAEAATR

SEQ ID NO: 59763 - protein, 268 aa, Unidentified
AQSVPWGISRVQAPAAHNRRLTGRGVKVAVLDTGISTHPDLNIRGGASFVPGEPSTQDGNGHGTHVAGTIAALNNDIGVLGVAPSAELYAVKVLGASGSGSVSSIAQGLEWAGNNMHVANLSLGSESPSATLEQAVNSATSRGVLVVAASGNSGAGSISYPARYANAMAVGATDQNNNRADFSQYGAGLDIVAPGVNVQSTYPGSTYASLNGTSMATPHVAGAAALVKQKNPSWSNVRIRDRLKNTATSLGSTNLYGSGLVNAEAATR

SEQ ID NO: 59764 - protein, 268 aa, Unidentified
AQSVPWGISRVQAPAAHNRGLTGFGVKVAVLDTGISTHPDLNIRGGASFVPGEPSTQDGNGHGTHVAGTIAALNNSIGVLGVAPSAELYAVKVLGASGGAISSIAQGLEWAGLNGMHVANLSLGNPSPSATLEQAVNSATSRGVLVVAASGNSGAGSISYPARYANAMAVGATDQNNNRASFSQYGAGLDIVAPGVNVQSTAPGSAYASLNGTSMATPHVAGAAVLVKQKNPSWSNVQIRNHLKNTATSLGSTNLYGSGLVNAEAATR

SEQ ID NO: 59765 - protein, 268 aa, Unidentified
AQSVPWGISRQAPAAHSRRLTGRGVKVAVLDTGISTHPDLNIRGGASFVPGEPSTDDGNGHGTHVAGTIAALNNGIGVLGVAPSAELYAVKVLGASGSGSVSSIAQGLEWAGNNGMHVANLSLGSPSPSATLEQAVNSATSRGVLVVAASGNSGAGSISYPARYANAMAVGATDQNNNRASFSQYGAGLDIVAPGVNVQSTYPGSTYASLNGTSMATPHVAGAAALVKQKNPSWSNVRIRDRLKNTATSLGSTNLYGSGLVNAEAATR

SEQ ID NO: 59766 - protein, 268 aa, Unidentified
AQSVPWGISRVQASAAHNRRLTGRGVKVAVLDTGISTHPDLNIRGGASFVPGEPSTQDGNGHGTHVAGTIAALNNIGVLGVAPSAELYAVKVLGASGSGSVSSIAQGLEWAGNNSMHVANLSLGSESPSATLEQAVNSATSRGVLVVAASGNSGAGSISYPARYANAMAVGATDQNNNRADFSQYGAGLDIVAPGVNVQSTYPGSTYASLNGTSMATPHVAGAAALVKQKNPSWSNVRIRDHLKNTATSLGSTNLYGSGLVNAEAATR

SEQ ID NO: 59767 - protein, 268 aa, Unidentified
AQSVPWGISRVQAPAAHNRGLQGSGVKVAVLDTGISTHPDLNIRGGASFVPGEPSTQDGNGHGTHVAGTIAALNNSIGVLGVAPSAELYAVKVLGASGGAISSIAQGLEWAGNNGMHVANLSLGSPSPSATLEQAVNSATSRGVLVVAASGNSGADSISYPARYANAMAVGATDQNNNRAEFSQYGAGLDIVAPGVNVQSTYPGSTYASLNGTSMATPHVAGAASLVKQKNPSWSNVVIRHHLKNTATSLGSTNLYGSGLVNAEAATR

SEQ ID NO: 59768 - protein, 268 aa, Unidentified
AQSVPWGISRVQAPAAHNRGLTGRGVKVAVLDTGISTHPDLNIRGGASFVPGEPSTQDGEGHGTHVAGTIAALNNDIGVLGVAPSAELYAVKVLGASGSGSVSSIAQGLEWAGNNMHVANLSLGSESPSATLEQAVNSATSRGVLVVAASGNSGAGSISYPARYANAMAVGATDQNNNRADFSQYGAGLDIVAPGVNVQSTYPGSTYASLNGTSMATPHVAGAAALVKQKNPSWSNVRIRDRLKNTATSLGSTNLYGSGLVNAEAATR

SEQ ID NO: 59769 - protein, 268 aa, Unidentified
AQSVPWGISRVQAPAAHNRGLAGSGVKVAVLDTGISTHPDLNIRGGASFVPGEPSTQDGNGHGTHVAGTIAALNNSIGVLGVAPSAELYAVKVLGASGGGAISSIAQGLEWAGNNGMHVANLSLGSPSPSATLEQAVNSATSRGVLVVAASGNSGADSISYPARYANAMAVGATDQNNNRADFSQYGAGLDIVAPGVNVQSTYPGSTYASLNGTSMATPHVAGAALVKQKNPSWSNVVIRDHLKNTATSLGSTNLYGSGLVNAEAATR

SEQ ID NO: 59770 - protein, 268 aa, Unidentified
AQSVPWGISRVQAPAAHRRGLWGRGVKVAVLDTGISTHPDLNIRGGASFVPGEPSTQDGNGHGTHVAGTIAALDNSIGVLGVAPSAELYAVKVLGASGAGSVSSIAQGLEWAGNNGMHVANLSLGSPSPSATLEQAVNSATSRGVLVVAASGNSGAGSISYPARYANAMAVGATDQNNNRASFSQYGAGLDLVAPGVNVQSTYPGSTYFSLNGTSMATPHVAGAAALVKQKNPSWSNVQIRNRLKNTATSLGSTNLYGSGLVNAEAAT

SEQ ID NO: 59771 - protein, 268 aa, Unidentified
AQSVPWGISRVQAPAAHNRGLTGSGVKVAVLDTGISTHPDLDIRGGASFVPGEPSTQDGNGHGTHVAGTIAALNNRIGVLGVAPSAELYAVKVLGASGGGAISSIAQGLEWAGNNGMHVANLSLGSPSPSATLEQAVNSATSRGVLVVAASGNSGAGSISYPARYANAMAVGATDQNNNRASFSQYGAGLDIVAPGVNVQSTYPGSTYASLNGTSMATPHVAGAAVLVKQKNPSWSNVRIRNHLKNTATSLGSTNLYGSGLVRAEAAT

SEQ ID NO: 59772 - protein, 268 aa, Unidentified
AQSVPWGISRVQAPAAHNRGLTGSGVKVAVLDTGISTHPDLNIRGGASFVPGEPSTQDGNGHGTHAAGTIAALNNSIGVLGVAPSAELYAVKVLGASGSGAISSIAQGLEWAGNNGMHVANLSLGSPSPSATLEQAVNSATSRGVLVVAASGNSGADSISYPARYANAMAVGATDQNNNRASFSQYGAGLDIVAPGVNVQSTYPGSTYASLNGTSMATPHVAGAAVLVKHKNPSWSNVRIRNHLKNTATSVGSTNLYGSGLVNAEAAT

SEQ ID NO: 59773 - protein, 268 aa, Unidentified
AQSVPWGISRVQAPAAHNRGLTGSGVKVAVLDTGISTHPDLNIRGGASFVPGEPSTQDGNGHGTHVAGTIAALDNSIGVLGVAPRAELYAVKVLGASGSGSVSSIAQGLEWAGNNRMHVANLSLGLQAPSATLEQAVNSATSRGVLVVAASGNSGAGSISYPARYANAMAVGATDQNNNRADFSQYGAGLDIVAPGVNVQSTYPGSTYASLNGTSMATPHVAGAAALVKQKNPSWSNRQIRNHLKNTATSLGSTNLYGSGLVNAEAAT

SEQ ID NO: 59774 - protein, 353 aa, Synthetic construct
AEEAKEKYLIGFNEQEAVSEFVEQVEANDEVAILSEEEEVEIELLHEFETIPVLSVELSPEDVDALELDPAISYIEEDAEVTTMAQSVPWGISRVQAPAAHNRGLTGSGVKVAVLDTGISTHPDLNIRGGASFVPGEPSTQDGNGHGTHVAGTIAALNNSIGVLGVAPSAELYAVKVLGADGEGAISSIAQGLEWAGNNGMHVANLSLGSPSPSATLEQAVNSATSRGVLVVAASGNSGASSISYPARYANAMAVGATDQNNNRASFSQYGAGLDIVAPGVNVQSTYPGSTYASLNGTSMATPHVAGAAALVKQKNPSWSNVQIRAIKTYLATSLGSTNLYGSGLVNAEAATR

SEQ ID NO: 59775 - protein, 353 aa, Synthetic construct
AEEAKEKYLIGFNEQEAVSEFVEQVEANDEVAILSEEEEVEIELLHEFETIPVLSVELSPEDVDALELDPAISYIEEDAEVTTMAQSVPWGISRVQAPAAHNRGLTGSGVKVAVLDTGISTHPDLNIRGGASFVPGEPSTQDGNGHGTHVAGTIAALNNSIGVLGVAPSAELYAVKVLGADGEGAISSIAQGLEWAGNNGMHVANLSLGSPSPSATLEQAVNSATSRGVLVVAASGNSGASSISYPARYANAMAVGATDQNNNRASFSQYGAGLDIVAPGVNVQSTYPGSTYASLNGTSMATPHVAGAAALVKQKNPSWSNVQIRATIAQLATSLGSTNLYGSGLVNAEAATR

SEQ ID NO: 59776 - protein, 353 aa, Synthetic construct
AEEAKEKYLIGFNEQEAVSEFVEQVEANDEVAILSEEEEVEIELLHEFETIPVLSVELSPEDVDALELDPAISYIEEDAEVTTMAQSVPWGISRVQMLRILDRGLTGSGVKVAVLDTGISTHPDLNIRGGASFVPGEPSTQDGNGHGTHVAGTIAALNNSIGVLGVAPSAELYAVKVLGADGEGAISSIAQGLEWAGNNGMHVANLSLGSPSPSATLEQAVNSATSRGVLVVAASGNSGASSISYPARYANAMAVGATDQNNNRASFSQYGAGLDIVAPGVNVQSTYPGSTYASLNGTSMATPHVAGAAALVKQKNPSWSNVQIRNHLKNTATSLGSTNLYGSGLVNAEAATR

SEQ ID NO: 59777 - protein, 353 aa, Synthetic construct
AEEAKEKYLIGFNEQEAVSEFVEQVEANDEVAILSEEEEVEIELLHEFETIPVLSVELSPEDVDALELDPAISYIEEDAEVTTMAQSVPWGISRVQAPAAHNRGLTGSGVKVAVLDTGISTHPDLNIRGGASFIVNDIRTQDGNGHGTHVAGTIAALNNSIGVLGVAPSAELYAVKVLGADGEGAISSIAQGLEWAGNNGMHVANLSLGSPSPSATLEQAVNSATSRGVLVVAASGNSGASSISYPARYANAMAVGATDQNNNRASFSQYGAGLDIVAPGVNVQSTYPGSTYASLNGTSMATPHVAGAAALVKQKNPSWSNVQIRNHLKNTATSLGSTNLYGSGLVNAEAATR

SEQ ID NO: 59778 - protein, 384 aa, Bacillus lentus
MMRKKSFWLGMLTAFMLVFTMAFSDSASAARAEEAKEKYLIGFNEQEAVSEFVEQVEANDEVAILSEEEEVEIELLHEFETIPVLSVELSPEDVDALELDPAISYIEEDAEVTTMAQTIPWGISRVQAPAAHNRGLTGSGVKVAVLDTGISTHPDLNVRGGASFVPGEPSTQDGNGHGTHVAGTIAALNNSIGVLGVAPSAELYAVKVLGADGRGAISSIAQGLEWAGNNGMHVANLSLGSPSPSATLEQAVNSATSRGVLVVAASGNSGASSISYPARYANAMAVGATDQNNNRASFSQYGAGLDIVAPGVNVQSTYPGSTYASDNGTSMATPHVAGVAALVKQKNPSWSNVQIRNHLKNTATGLGNTNLYGSGLVNAEAATR

SEQ ID NO: 59779 - protein, 380 aa, Synthetic construct
MMRKKSFWLGMLTAFMLVFTMASIASAAEEAKEKYLIGFNEQEAVSEFVEQVEANDEVAILSEEEEVEIELLHEFETIPVLSVELSPEDVDALELDPAISYIEEDAEVTTMAQTIPWGISRVQAPAAHNRGLTGSGVKVAVLDTGISTHPDLNIRGGASFVPGEPSTQDGNAHGTHVAGTIAALNNSIGVLGVAPSAELYAVKVLGADGRGAISSIAQGLEWAGNNGMHVANLSLGSPSPSATLEQAVNSATSRGVLVVAASGNSGASSISYPARYANAMAVGATDQNNNRASFSQYGAGLDIVAPGVNIQSTYPGSTYASDNGTSMATPHVAGAAALVKQKNPSWSNVQIRNHLKNTATSLGSTNLYGSGLVNAEAATR

SEQ ID NO: 59780 - protein, 380 aa, Bacillus lentus
MMRKKSFWLGMLTAFMLVFTMASIASAAEEAKEKYLIGFNEQEAVSEFVEQVEANDEVAILSEEEEVEIELLHEFETIPVLSVELSPEDVDALELDPAISYIEEDAEVTTMAQTIPWGISRVQAPAAHNRGLTGSGVKVAVLDTGISTHPDLNIRGGASFVPGEPSTQDGNGHGTHVAGTIAALNNSIGVLGVAPSAELYAVKVLGADGRGAISSIAQGLEWAGNNGMHVANLSLGSPSPSATLEQAVNSATSRGVLVVAASGNSGASSISYPARYANAMAVGATDQNNNRASFSQYGAGLDIVAPGVNVQSTYPGSTYASLNGTSMATPHVAGVAALVKQKNPSWSNVQIRNHLKNTATGLGNTNLYGSGLVNAEAATR

SEQ ID NO: 59781 - protein, 380 aa, Bacillus licheniformis
MMRKKSFWLGMLTAFMLVFTMASIASAAEEAKEKYLIGFNEQEAVSEFVEQVEANDEVAILSEEEEVEIELLHEFETIPVLSVELSPEDVDALELDPAISYIEEDAEVTTMAQTIPWGISRVQAPAAHNRGLTGSGVKVAVLDTGISTHPDLNIRGGASFVPGEPSTQDGNGHGTHVAGTIAALNNSIGVLGVAPSAELYAVKVLGADGRGAISSIAQGLEWAGNNGMHVANLSLGSPSPSATLEQAVNSATSRGVLVVAASGNSGASSISYPARYANAMAVGATDQNNNRASFSQYGPGLDIMAPGVNIQSTYPGSTYASLNGTSMATPHVAGAAALVKQKNPSWSNVQIRNHLKNTATSLGSTNLYGSGLVNAEAATR

SEQ ID NO: 59782 - protein, 380 aa, Unidentified
MRSKKLWIVASTALLISVAFSSSIASAAEEAKEKYLIGFNEQEAVSEFVEQVEANDEVAILSEEEEVEIELLHEFETIPVLSVELSPEDVDALELDPAISYIEEDAEVTTMAQSVPWGISRVQAPAAHNRGLTGSGVKVAVLDTGISTHPDLNIRGGASFVPGEPSTQDGNGHGTHVAGTIAALNNSIGVLGVAPSAELYAVKVLGASGSGSVSSIAQGLEWAGNNGMHVANLSLGSPSPSATLEQAVNSATSRGVLVVAASGNSGAGSISYPARYANAMAVGATDQNNNRASFSQYGAGLDIVAPGVNVQSTYPGSTYASLNGTSMATPHVAGAAALVKQKNPSWSNVQIRNHLKNTATSLGSTNLYGSGLVNAEAATR

SEQ ID NO: 59783 - protein, 376 aa, Unidentified
LGKIVASTALLISVAFSSSIASAAEEAKEKYLIGFNEQEAVTEFVEQVEANDEVAILSEEEEVEIELLHEFETIPVLSVELSPEDVDALELDPAISYIEEDAEVTTMAQSVPWGISRVQAPAAHNRGLTGSGVKVAVLDTGISTHPDLNIRGGASFVPGEPSTQDGNGHGTHVAGTIAALNNSIGVLGVAPSAELYAVKVLGASGSGSVSSIAQGLEWAGNNGMHVANLSLGSPSPSATLEQAVNSATSRGVLVVAASGNSGAGSISYPARYANAMAVGATDQNNNRASFSQYGAGLDIVAPGVNVQSTYPGSTYASLNGTSMATPHVAGAAALVKQKNPSWSNVQIRNHLKNTAESLGSTNLYGSGLVNAEAATR

SEQ ID NO: 59784 - protein, 376 aa, Unidentified
LGKIVASTALLISVAFSSSIASAAEEAKEKYLIGFNEQEAVTEFVEQVEANDEVAILSEEEEVEIELLHEFETIPVLSVELSPEDVDALELDPAISYIEEDAEVTTMAQSVPWGISRVQAPAAHNRGLTGSGVKVAVLDTGISTHPDLNIRGGASFVPGEPSTQDGNGHGTHVAGTIAALNNSIGVLGVAPSAELYAVKVLGASGSGSVSSIAQGLEWAGNNGMHVANLSLGSPSPSATLEQAVNSATSRGVLVVAASGNSGAGSISYPARYANAMAVGATDQNNNRASFSQYGAGLDIVAPGVNVQSTYPGSTYASLNGTSMATPHVAGAAALVKQKNPSWSNVQIRNHLKNTAQSLGSTNLYGSGLVNAEAATR

SEQ ID NO: 59785 - protein, 376 aa, Unidentified
LGKIVASTALLISVAFSSSIASAAEEAKEKYLIGFNEQEAVTEFVEQVEANDEVAILSEEEEVEIELLHEFETIPVLSVELSPEDVDALELDPAISYIEEDAEVTTMAQSVPWGISRVQAPAAHNRGLTGSGVKVAVLDTGISTHPDLNIRGGASFVPGEPSTQDGNGHGTHVAGTIAALNNSIGVLGVAPSAELYAVKVLGASGSGSVSSIAQGLEWAGNNGMHVANLSLGSPSPSATLEQAVNSATSRGVLVVAASGNSGAGSISYPARYANAMAVGATDQNNNRASFSQYGAGLDIVAPGVNVQSTYPGSTYASLNGTSMATPHVAGAAALVKQKNPSWSNVQIRNHLKNTAKSLGSTNLYGSGLVNAEAATR

SEQ ID NO: 59786 - protein, 376 aa, Unidentified
LGKIVASTALLISVAFSSSIASAAEEAKEKYLIGFNEQEAVTEFVEQVEANDEVAILSEEEEVEIELLHEFETIPVLSVELSPEDVDALELDPAISYIEEDAEVTTMAQSVPWGISRVQAPAAHNRGLTGSGVKVAVLDTGISTHPDLNQRGGASFVPGEPSTQDGNGHGTHVAGTIAALNNSIGVLGVAPSAELYAVKVLGASGSGSVSSIAQGLEWAGNNGMHVANLSLGSPSPSATLEQAVNSATSRGVLVVAASGNSGAGSISYPARYANAMAVGATDQNNNRASFSQYGAGLDIVAPGVNVQSTYPGSTYASLNGTSMATPHVAGAAALVKQKNPSWSNVQIRNHLKNTATSLGSTNLYGSGLVNAEAATR

SEQ ID NO: 59787 - protein, 376 aa, Unidentified
LGKIVASTALLISVAFSSSIASAAEEAKEKYLIGFNEQEAVTEFVEQVEANDEVAILSEEEEVEIELLHEFETIPVLSVELSPEDVDALELDPAISYIEEDAEVTTMAQSVPWGISRVQAPAAHNRGLTGSGVKVAVLDTGISTHPDLNIRGGASFVPGEPSTQDGNGHGTHVAGTIAALNNSIGVLGVAPSAELYAVKVLGASGSGSVSSIAQGLEWAGNNGMHVANLSLGSPSPSATLEQAVNSATSTGVLVVAASGNSGAGSISYPARYANAMAVGATDQNNNRASFSQYGAGLDIVAPGVNVQSTYPGSTYASLNGTSMATPHVAGAAALVKQKNPSWSNVQIRNHLKNTATSLGSTNLYGSGLVNAEAATR

SEQ ID NO: 59788 - protein, 376 aa, Unidentified
LGKIVASTALLISVAFSSSIASAAEEAKEKYLIGFNEQEAVTEFVEQVEANDEVAILSEEEEVEIELLHEFETIPVLSVELSPEDVDALELDPAISYIEEDAEVTTMAQSVPWGISRVQAPAAHNRGLTGSGVKVAVLDTGISTHPDLNIRGGASFVPGEPSTQDGNGHGTHVAGTIAALNNSIGVLGVAPSAELYAVKVLGASGSGSVSSIAQGLEWAGNNGMHVANLSLGSPSPSATLEQAVNSATSNGVLVVAASGNSGAGSISYPARYANAMAVGATDQNNNRASFSQYGAGLDIVAPGVNVQSTYPGSTYASLNGTSMATPHVAGAAALVKQKNPSWSNVQIRNHLKNTATSLGSTNLYGSGLVNAEAATR

SEQ ID NO: 59789 - protein, 376 aa, Bacillus sp.
LGKIVASTALLISVAFSSSIASAAEEAKEKYLIGFNEQEAVSEFVEQVEANDEVAILSEEEEVEIELLHEFETIPVLSVELSPEDVDALELDPAISYIEEDAEVTTMAQSVPWGISRVQAPAAHNRGLTGSGVKVAVLDTGISTHPDLNIRGGASFVPGEPSTQDGNGHGTHVAGTIAALNNSIGVLGVAPSAELYAVKVLGASGSGSVSSIAQGLEWAGNNGTHVANLSLGSPSPSATLEQAVNSATSRGVLVVAASGNSGAGSISYPARYANAMAVGATDQNNNRASFSQYGAGLDIVAPGVNVQSTYPGSTYASLNGTSMATPHVAGVAALVKQKNPSWSNVQIRNHLKNTATSLGSTNLYGSGLVNAEAATR

SEQ ID NO: 59790 - protein, 376 aa, Unidentified
LGKIVASTALLISVAFSSSIASAAEEAKEKYLIGFNEQEAVTEFVEQVEANDEVAILSEEEEVEIELLHEFETIPVLSVELSPEDVDALELDPAISYIEEDAEVTTMAQSVPWGISRVQAPAAHNRGLTGSGVKVAVLDTGISTHPDLNIRGGASFVPGEPSTQDGNGHGTHVAGTIAALNNSIGVLGVAPSAELYAVKVLGASGSGSVSSIAQGLEWAGNNGMHVANLSLGSPSPSATLEQAVNSATSRGVLVVAASGNSGAGSISYPARYANAMAVGATDQNNNRASFSQYGAGLDIVAPGVNVQSTYPGSTYASLNGTSMATPHVAGAAALVKQKNPSWSPVQIRNHLKNTATSLGSTNLYGSGLVNAEAATR

SEQ ID NO: 59791 - protein, 376 aa, Unidentified
LGKIVASTALLISVAFSSSIASAAEEAKEKYLIGFNEQEAVTEFVEQVEANDEVAILSEEEEVEIELLHEFETIPVLSVELSPEDVDALELDPAISYIEEDAEVTTMAQSVPWGISRVQAPAAHNRGLTGSGVKVAVLDTGISTHPDLNIRGGASFVPGEPSTQDGNGHGTHVAGTIAALNNSIGVLGVAPSAELYAVKVLGASGSGSVSSIAQGLEWAGNNGMYVANLSLGSPSPSATLEQAVNSATSRGVLVVAASGNSGAGSISYPARYANAMAVGATDQNNNRASFSQYGAGLDIVAPGVNVQSTYPGSTYASLNGTSMATPHVAGAAALVKQKNPSWSNVQIRNHLKNTATSLGSTNLYGSGLVNAEAATR

SEQ ID NO: 59792 - protein, 376 aa, Unidentified
LGKIVASTALLISVAFSSSIASAAEEAKEKYLIGFNEQEAVTEFVEQVEANDEVAILSEEEEVEIELLHEFETIPVLSVELSPEDVDALELDPAISYIEEDAEVTTMAQSVPWGISRVQAPAAHNRGLTGSGVKVAVLDTGISTHPDLNIRGGASFVPGEPSTQDGNGHGTHVAGTIAALNNSIGVLGVAPSAELYAVKVLGASGSGSVSSIAQGLEWAGNNGMHVANLSLGSPSPSATLEQAVNSATSRGVLVVAASGNSGAGSISYPARYANAMAVGATDQNNNRASFSQYGAGLDIVAPGVNVQSTYPGSTYASLNGTSMATPHVAGAAALVKQKNPSWSNVQIRNHLKNTARSLGSTNLYGSGLVNAEAATR

SEQ ID NO: 59793 - protein, 376 aa, Unidentified
LGKIVASTALLISVAFSSSIASAAEEAKEKYLIGFNEQEAVTEFVEQVEANDEVAILSEEEEVEIELLHEFETIPVLSVELSPEDVDALELDPAISYIEEDAEVTTMAQSVPWGISRVQAPAAHNRGLTGSGVKVAVLDTGISTHPDLNIRGGASFVPGEPSTQDGNGHGTHVAGTIAALNNSIGVLGVAPSAELYAVKVLGASGSGSVSSIAQGLEWAGNNGMHVANLSLGSPSPSATLEQAVNSATSRGVLVVAASGNSGAGSISYPAQYANAMAVGATDQNNNRASFSQYGAGLDIVAPGVNVQSTYPGSTYASLNGTSMATPHVAGAAALVKQKNPSWSNVQIRNHLKNTATSLGSTNLYGSGLVNAEAATR

SEQ ID NO: 59794 - protein, 376 aa, Unidentified
LGKIVASTALLISVAFSSSIASAAEEAKEKYLIGFNEQEAVTEFVEQVEANDEVAILSEEEEVEIELLHEFETIPVLSVELSPEDVDALELDPAISYIEEDAEVTTMAQSVPWGISRVQAPAAHNRGLTGSGVKVAVLDTGISTHPDLNIRGGASFVPGEPSTQDGNGHGTHVAGTIAALNNSIGVLGVAPSAELYAVKVLGASGSGSVSSIAQGLEWAGNNGMHVANLSLGSPSPSATLEQAVNSATSSGVLVVAASGNSGAGSISYPARYANAMAVGATDQNNNRASFSQYGAGLDIVAPGVNVQSTYPGSTYASLNGTSMATPHVAGAAALVKQKNPSWSNVQIRNHLKNTATSLGSTNLYGSGLVNAEAATR

SEQ ID NO: 59795 - protein, 376 aa, Unidentified
LGKIVASTALLISVAFSSSIASAAEEAKEKYLIGFNEQEAVTEFVEQVEANDEVAILSEEEEVEIELLHEFETIPVLSVELSPEDVDALELDPAISYIEEDAEVTTMAQSVPWGISRVQAPAAHNRGLTGSGVKVAVLDTGISTHPDLNIRGGASFVPGEPSTQDGNGHGTHVAGTIAALNNSIGVLGVAPSAELYAVKVLGASGSGSVSSIAQGLEWAGNNGMWVANLSLGSPSPSATLEQAVNSATSRGVLVVAASGNSGAGSISYPARYANAMAVGATDQNNNRASFSQYGAGLDIVAPGVNVQSTYPGSTYASLNGTSMATPHVAGAAALVKQKNPSWSNVQIRNHLKNTATSLGSTNLYGSGLVNAEAATR

SEQ ID NO: 59796 - protein, 376 aa, Unidentified
LGKIVASTALLISVAFSSSIASAAEEAKEKYLIGFNEQEAVTEFVEQVEANDEVAILSEEEEVEIELLHEFETIPVLSVELSPEDVDALELDPAISYIEEDAEVTTMAQSVPWGISRVQAPAAHNRGLTGSGVKVAVLDTGISTHPDLNERGGASFVPGEPSTQDGNGHGTHVAGTIAALNNSIGVLGVAPSAELYAVKVLGASGSGSVSSIAQGLEWAGNNGMHVANLSLGSPSPSATLEQAVNSATSRGVLVVAASGNSGAGSISYPARYANAMAVGATDQNNNRASFSQYGAGLDIVAPGVNVQSTYPGSTYASLNGTSMATPHVAGAAALVKQKNPSWSNVQIRNHLKNTATSLGSTNLYGSGLVNAEAATR

SEQ ID NO: 59797 - protein, 376 aa, Unidentified
LGKIVASTALLISVAFSSSIASAAEEAKEKYLIGFNEQEAVTEFVEQVEANDEVAILSEEEEVEIELLHEFETIPVLSVELSPEDVDALELDPAISYIEEDAEVTTMAQSVPWGISRVQAPAAHNRGLTGSGVKVAVLDTGISTHPDLNKRGGASFVPGEPSTQDGNGHGTHVAGTIAALNNSIGVLGVAPSAELYAVKVLGASGSGSVSSIAQGLEWAGNNGMHVANLSLGSPSPSATLEQAVNSATSRGVLVVAASGNSGAGSISYPARYANAMAVGATDQNNNRASFSQYGAGLDIVAPGVNVQSTYPGSTYASLNGTSMATPHVAGAAALVKQKNPSWSNVQIRNHLKNTATSLGSTNLYGSGLVNAEAATR

SEQ ID NO: 59798 - protein, 376 aa, Unidentified
LGKIVASTALLISVAFSSSIASAAEEAKEKYLIGFNEQEAVTEFVEQVEANDEVAILSEEEEVEIELLHEFETIPVLSVELSPEDVDALELDPAISYIEEDAEVTTMAQSVPWGISRVQAPAAHNRGLTGSGVKVAVLDTGISTHPDLNRRGGASFVPGEPSTQDGNGHGTHVAGTIAALNNSIGVLGVAPSAELYAVKVLGASGSGSVSSIAQGLEWAGNNGMHVANLSLGSPSPSATLEQAVNSATSRGVLVVAASGNSGAGSISYPARYANAMAVGATDQNNNRASFSQYGAGLDIVAPGVNVQSTYPGSTYASLNGTSMATPHVAGAAALVKQKNPSWSNVQIRNHLKNTATSLGSTNLYGSGLVNAEAATR

SEQ ID NO: 59799 - protein, 376 aa, Unidentified
LGKIVASTALLISVAFSSSIASAAEEAKEKYLIGFNEQEAVTEFVEQVEANDEVAILSEEEEVEIELLHEFETIPVLSVELSPEDVDALELDPAISYIEEDAEVTTMAQSVPWGISRVQAPAAHNRGLTGSGVQVAVLDTGISTHPDLNIRGGASFVPGEPSTQDGNGHGTHVAGTIAALNNSIGVLGVAPSAELYAVKVLGASGSGSVSSIAQGLEWAGNNGMHVANLSLGSPSPSATLEQAVNSATSRGVLVVAASGNSGAGSISYPARYANAMAVGATDQNNNRASFSQYGAGLDIVAPGVNVQSTYPGSTYASLNGTSMATPHVAGAAALVKQKNPSWSNVQIRNHLKNTATSLGSTNLYGSGLVNAEAATR

SEQ ID NO: 59800 - protein, 367 aa, Unidentified
LGKIVASTALLISVAFSSSIASAAEEAKXKYLIGFNEQEAVSEFVEQVEANDEVAILSEEEEVEIELLHEFETIPVLSVELSPEDVDALELDPAISYIEEDAEVTTMRVQAPAAHNRGLTGSGVKVAVLDTGISTHPDLNIRGGASFVPGEPSTQDGNGHGTHVAGTIAALNNSIGVLGVAPNAELYAVKVLGASGSGSVSSIAQGLEWAGNNGMHVANLSLGSPSPSATLEQAVNSATSRGVLVVAASGNSGAGSISYPARYANAMAVGATDQNNNRASFSQYGAGLDIVAPGVNVQSTYPGSTYASLNGTSMATPHVAGAAALVKQKNPSWSNVQIRNHLKNTATSLGSTNLYGSGLVNAEAATR

SEQ ID NO: 59801 - protein, 367 aa, Unidentified
LGKIVASTALLISVAFSSSIASAAEEAKEKYLIGFNEQEAVSEFVEQVEANDXVAILSEEEEVEIELLHEFETIPVLSVELSPEDVDALELDPAISYIEEDAEVTTMRVQAPAAHNRGLTGSGVKVAVLDTGISTHPDLNIRGGASFVPGEPSTQDGNGHGTHVAGTIAALNNSIGVLGVAPNAELYAVKVLGASGSGSVSSIAQGLEWAGNNGMHVANLSLGSPSPSATLEQAVNSATSRGVLVVAASGNSGAGSISYPARYANAMAVGATDQNNNRASFSQYGAGLDIVAPGVNVQSTYPGSTYASLNGTSMATPHVAGAAALVKQKNPSWSNVQIRNHLKNTATSLGSTNLYGSGLVNAEAATR

SEQ ID NO: 59802 - protein, 303 aa, Unidentified
AEEAKEKYLIGFNEQEAVSEFVEQVEANDEVAILSEEEEVEIELLHEFETIPVLSVELSPEDVDALELDPAISYIEEDAEVTTMAQSVPWGISRVQAPAAHNRGLTGSGVKVAVLDTGISTHPDLNIRGGASFVPGEPSTQDGNGHGTHVAGTIAALNNSIGVLGVAPSAELYAVKVLGASGSGSVSSIAQGLEWAGNNGMHVANLSLGSPSPSATLEQAVNSATSRGVLVVAASGNSGAGSISYPARYANAMAVGATDQNNNRASFSQYGAGLDIVAPGVNVQSTYPGCVTADTWVTTAEGP

SEQ ID NO: 59803 - protein, 303 aa, Unidentified
AEEAKEKYLIGFNEQEAVSEFVEQVEANDEVAILSEEEEVEIELLHEFETIPVLSVELSPEDVDALELDPAISYIEEDAEVTTMAQSVPWGISRVQAPAAHNRGLTGSGVKVAVLDTGISTHPDLNIRGGASFVPGEPSTQDGNGHGTHVAGTIAALNNSIGVLGVAPSAELYAVKVLGASGSGSVSSIAQGLEWAGNNGMHVANLSLGSPSPSATLEQAVNSATSRGVLVVAASGNSGAGSISYPARYANAMAVGATDQNNNRASFSQYGAGLDIVAPGVNVQSTYPGCVTADTWVMTTAGP

SEQ ID NO: 59804 - protein, 274 aa, Bacillus licheniformis
AQVVPYGIPLIKADKVQAQGFKGANVKVAVLDTGIQASHPDLNVVGGASFVAGEAYNTDGNGHGTHVSGTVAALDNNTGVLGVAPSVSLYAVKVLNSSGSGSYSGIVSGIEWATTNGMDVINISLGGPSGSTAMKQAVDNAYARGVVVVAAAGNSGSSGNDNTIQYPAKYDSVIAVGAVDSNSQRASFSSVGAELEVMAPGVGVYSTYPTNTYATLSGTSMASPHVAGAAALILSKHPNLSASQVRNRLSSTATYLGSSFYYGKGLINVEAAAQ

SEQ ID NO: 59805 - protein, 274 aa, Bacillus licheniformis
AQTVPYGIPLIKADKVQAQGFKGANVKVAVLDTGIQASHPDLNVVGGASFVAGEAYNTDGNGHGTHVSGTVAALDNNIGVLGVAPSVSLYAVKVLNSSGSGSYSGIVSGIEWATTNGMDVINMSLGSPSGSTAMKQAVDNAYARGVVVVAAAGNSGSSGNTNTIQYPAKYDSVIAVGAVDSNSQRASFSSVGAELEVMAPGVGVYSTYPTNTYATLSGTSMASPHVAGAAALILSKHPNLSASQVRNRLSSTATYLGDSFYYGKGLINVEAAAQ

SEQ ID NO: 59806 - protein, 275 aa, Bacillus licheniformis
AQTVPYGIPLIKADKVQAQGFKGANVRVAVLDTGIQASHPDLNVVGGASFVAGEAYNTDGNGHGTHVAGTVAALDNTTGVLGVAPNVSLYAVKVLNSXSGGGTYSGIVSGIEWATTNGMDVISMSLGGPSGSTAMKQAVDNAYARGVVVVAAAGNSGSSGNTNTIGXPAKYDSVIAVGAVDSNSNRASFSSVGAELEVMAPGAGVYSTYPTSTYATLSGTSXASPHVAGAAALILSKHPNLSASQVRNRLSSTATYLGSSFYYGKGLINVEAAAQ

SEQ ID NO: 59807 - protein, 274 aa, Bacillus licheniformis
AQVVPYGIPLIKADKVQAQGFKGANVKVAVLDTGIQASHPDLNVVGGASFVAGEAYNTDGNGHGTHVSGTVAALDNNTGVLGVAPSVSLYAVKVLNSSGSGSYSGIVSGIEWATTNGMDVINISLGSPSGSTAMKQAVDNAYARGVVVVAAAGNSGSSGNTNTIQYPAKYDSVIAVGAVDSNSQRASFSSVGAELEVMAPGVGVYSTYPTNTYATLSGTSMASPHVAGAAALILSKHPNLSASQVRNRLSSTATYLGSSFYYGKGLINVEAAAQ

SEQ ID NO: 59808 - protein, 274 aa, Bacillus clausii
AQTVPYGIPLIKADKVQAQGFKGANVKVAVLDTGIQASHPDLNVVGGASFVAGEAYNTDGNGHGTHVSGTVAALDNNIGVLGVAPSVSLYAVKVLNSSGSGSYSGIVSGIEWATTNGMDVINMSLGSPSGSTAMKQAVDNAYARGVVVVAAAGNSGSSGNTNTIQYPAKYDSVIAVGAVDSNSQRASFSSVGAELEVMAPGVGVYSTYPTNTYATLSGTSMASPHVAGAAALILSKHPNLSASQVRNRLSSTATYLGPSFYYGKGLINVEAAAQ

SEQ ID NO: 59809 - protein, 274 aa, Bacillus licheniformis
AQVVPYGIPLIKADKVQAQGFKGANVKVAVLDTGIQASHPDLNVVGGASFVAGEAYNTDGNGHGTHVSGTVAALDNNTGVLGVAPSVSLYAVKVLNSSGSGSYSGIVSGIEWATTNGMDVINMSLGTPSGSTAMKQAVDNAYARGVVVVAAAGNSGSSGNTNTIQYPAKYDSVIAVGAVDSNSQRASFSSVGAELEVMAPGVGVYSTYPTNTYATLSGTSMASPHVAGAAALILSKHPNLSASQVRNRLSSTATYLGPSFYYGKGLINVEAAAQ

SEQ ID NO: 59810 - protein, 274 aa, Bacillus licheniformis
AQVVPYGIPLIKADKVQAQGFKGANVKVAVLDTGIQASHPDLNVVGGASFVAGEAYNTDGNGHGTHVSGTVAALDNNTGVLGVAPSVSLYAVKVLNSSGSGSYSGIVSGIEWATTNGMDVINISLGGPSGSTAMKQAVDNAYARGVVVVAAAGNSGSSGNTNTIQYPAKYDSVIAVGAVDSNSQRASFSSVGAELEVMAPGAQVYSTYPTNTYATLSGTSMASPHVAGAAALILSKHPNLSASQVRNRLSSTATYLGPSFYYGKGLINVEAAAQ

SEQ ID NO: 59811 - protein, 274 aa, Bacillus licheniformis
AQVVPYGIPLIKADKVQAQGFKGANVKVAVLDTGIQASHPDLNVVGGASFVAGEAYNTDGNGHGTHVSGTVAALDNNTGVLGVAPSVSLYAVKVLNSSGSGSYSGIVSGIEWATTNGMDVINISLGSPSGSTAMKQAVDNAYARGVVVVAAAGNSGSSGNTNTIQYPAKYDSVIAVGAVDSNSNRASFSSVGAELEVMAPGVGVYSTYPTNTYATLSGTSMASPHVAGAAALILSKHPNLSASQVRNRLSSTATYLGPSFYYGKGLINVEAAAQ

SEQ ID NO: 59812 - protein, 274 aa, Bacillus licheniformis
AQVVPYGIPLIKADKVQAQGFKGANVKVAVLDTGIQASHPDLNVVGGASFVAGEAYNTDGNGHGTHVSGTVAALDNNTGVLGVAPSVSLYAVKVLNSSGSGSYSGIVSGIEWATTNGMDVINISLGTPSGSTAMKQAVDNAYARGVVVVAAAGNSGSSGNTNTIQYPAKYDSVIAVGAVDSNSQRASFSSVGAELEVMAPGVGVYSTYPTNTYATLSGTSMASPHVAGAAALILSKHPNLSASQVRNRLSSTATYLGSSFYYGKGLINVEAAAQ

SEQ ID NO: 59813 - protein, 274 aa, Bacillus licheniformis
AQVVPYGIPLIKADKVQAQGFKGANVKVAVLDTGIQASHPDLNVVGGASFVAGEAYNTDGNGHGTHVSGTVAALDNNTGVLGVAPSVSLYAVKVLNSSGSGSYSGIVSGIEWATTNGMDVINMSLGSPSGSTAMKQAVDNAYARGVVVVAAAGNSGSSGNTNTIEYPAKYDSVIAVGAVDSNSQRASFSSVGAELEVMAPGVGVYSTYPTNTYATLSGTSMASPHVAGAAALILSKHPNLSASQVRNRLSSTATYLGPSFYYGKGLINVEAAAQ

SEQ ID NO: 59814 - protein, 274 aa, Bacillus licheniformis
AQVVPYGIPLIKADKVQAQGFKGANVKVAVLDTGIQASHPDLNVVGGASFVAGEAYNTDGNGHGTHVSGTVAALDNNTGVLGVAPSVSLYAVKVLNSSGSGSYSGIVSGIEWATTNGMDVINISLGGPSGSTAMKQAVDNAYARGVVVVAAAGNNGSSGNTNTIQYPAKYDSVIAVGAVDSNSQRASFSSVGAELEVMAPGVGVYSTYPTNTYATLSGTSMASPHVAGAAALILSKHPNLSASQVRNRLSSTATYLGSSFYYGKGLINVEAAAQ

SEQ ID NO: 59815 - protein, 274 aa, Bacillus licheniformis
AQVVPYGIPLIKADKVQAQGFKGANVKVAVLDTGIQASHPDLNVVGGASFVAGEAYNTDGNGHGTHVAGTVAALDNNTGVLGVAPSVSLYAVKVLNSSGSGSYSGIVSGIEWATTNGMDVINISLGQPSGSTAMKQAVDNAYARGVVVVAAAGNSGSSGNTNTIQYPAKYDSVIAVGAVDSNSQRASFSSVGAELEVMAPGVGVYSTYPTNTYATLSGTSMASPHVAGAAALILSKHPNLSASQVRNRLSSTATYLGPSFYYGKGLINVEAAAQ

SEQ ID NO: 59816 - protein, 274 aa, Bacillus licheniformis
AQVVPYGIPLIKADKVQAQGFKGANVKVAVLDTGIQASHPDLNVVGGASFVAGEAYNTDGNGHGTHVSGTAAALDNNTGVLGVAPSVSLYAVKVLNSSGSGSYSGIVSGIEWATTNGMDVINISLGGPSGSTAMKQAVDNAYARGVVVVAAAGNSGSSGNTNTIQYPAKYDSVIAVGAVDSNSQRASFSSVGAELEVMAPGVGVYSTYPTNTYATLSGTSMASPHVAGAAALILSKHPNLSASQVRNRLSSTATYLGSSFYYGKGLINVEAAAQ

SEQ ID NO: 59817 - protein, 274 aa, Bacillus licheniformis
AQVVPYGIPLIKADKVQAQGFKGANVKVAVLDTGIQASHPDLNVVGGASFVAGEAYNTDGNGHGTHVSGTVAALDNTTGVLGVAPSVSLYAVKVLNSSGSGSYSGIVSGIEWATTNGMDVINISLGSPSGSTAMKQAVDNAYARGVVVVAAAGNSGSSGNTNTIQYPAKYDSVIAVGAVDSNSQRASFSSVGAELEVMAPGVGVYSTYPTNTYATLSGTSMASPHVAGAAALILSKHPNLSASQVRNRLSSTATYLGPSFYYGKGLINVEAAAQ

SEQ ID NO: 59818 - protein, 274 aa, Bacillus licheniformis
AQTVPYGIPLIKADKVQAQGFKGANVKVAVLDTGIQASHPDLNVVGGASFVAGEAYNTDGNGHGTHVSGTVAALDNNTGVLGVAPSVSLYAVKVLNSSGSGSYSGIVSGIEWATTNGMDVINMSLGSPSGSTAMKQAVDNAYARGVVVVAAAGNSGSSGNTNTIQYPAKYDSVIAVGAVDSNSQRASFSSVGAELEVMAPGVGVYSTYPPNTYATLSGTSMASPHVAGAAALILSKHPNLSASQVRNRLSSTATYLGPSFYYGKGLINVEAAAQ

SEQ ID NO: 59819 - protein, 274 aa, Bacillus licheniformis
AQVVPYGIPLIKADKVQAQGFKGANVKVAVLDTGIQASHPDLNVVGGASFVAGEAYNTDGNGHGTHVAGTVAALDNNTGVLGVAPSVSLYAVKVLNSSGSGSYSGIVSGIEWATTNGMDVINISLGEPSGSTAMKQAVDNAYARGVVVVAAAGNSGSSGNTNTIQYPAKYDSVIAVGAVDSNSQRASFSSVGAELEVMAPGVGVYSTYPTNTYATLSGTSMASPHVAGAAALILSKHPNLSASQVRNRLSSTATYLGPSFYYGKGLINVEAAAQ

SEQ ID NO: 59820 - protein, 274 aa, Bacillus licheniformis
AQVVPYGIPLIKADKVQAQGFKGANVKVAVLDTGIQASHPDLNVVGGASFVAGEAYNTDGNGHGTHVAGTVAALDNTTGVLGVAPHVSLYAVKVLNSSGSGSYSGIVSGIEWATFNGMDVINISLGGAHGSTAMKQAVDNAYVRGVVVVAAAGNSGSSGNTNTIQYPAKYDSVIAVGAVDSNSNRASFSSVGAELEVMAPGVGVYSTYPTNTYATLSGTSMASPHVAGAAALILSKHPNLSASQVRNRLSSTATYLGPSFYYGKGLINVEAAAQ

SEQ ID NO: 59821 - protein, 274 aa, Bacillus licheniformis
AQVVPYGIPLIKADKVQAQGFKGANVKVAVLDTGIQASHPDLNVVGGASFVAGEAYNTDGNGHGTHVAGTVAALDNNTGVLGVAPSVSLYAVKVLNSSGSGSYSGIVSGIEWATTNGMDVINISLGVPSGSTAMKQAVDNAYARGVVVVAAAGNSGSSGNTNTIQYPAKYDSVIAVGAVDSNSQRASFSSVGAELEVMAPGVGVYSTYPTNTYATLSGTSMASPHVAGAAALILSKHPNLSASQVRNRLSSTATYLGPSFYYGKGLINVEAAAQ

SEQ ID NO: 59822 - protein, 274 aa, Bacillus licheniformis
AQTVPYGIPLIKADKVQAQGFKGANVKVAVLDTGIQASHPDLNVVGGASFVAGEAYNTDGNGHGTHVSGTAAALDNNTGVLGVAPSVSLYAVKVLNSSGNGSYSGIVSGIEWATTNGMDVINMSLGGPSGSTAMKQAVDNAYARGVVVVAAAGNSGSSGNTNTIQYPAKYDSVIAVGAVDSNSQRASFSSVGAELEVMAPGAGVYSTYPPNTYATLSGTSMASPHVAGAAALILSKHPTLSASQVRNRLSSTATYLGSSFYYGKGLINVEAAAQ

SEQ ID NO: 59823 - protein, 275 aa, Bacillus licheniformis
AQTVPYGIPLIKADKVQAQGFKGANVRVAVLDTGIQASHPDLNVVGGASFVAGEAYNTDGNGHGTHVAGTVAALDNTTGVLGVAPNVSLYAVKVLNSSGXGGTYSGIVSGIEWATTNGMDVISMSLGGPSGSTAMKQAVDNAYARGVVVVAAAGNSGSSGNTNTIGXPAKYDSVIAVGAVDSNSNRASFSSVGAELEVMAPGAGVYSTYPTSTYATLSGTSXASPHVAGAAALILSKHPNLSASQVRNRLSSTATYLGSSFYYGKGLINVEAAAQ

SEQ ID NO: 59824 - protein, 274 aa, Bacillus licheniformis
AQVVPYGIPLIKADKVQAQGFKGANVKVAVLDTGIQASHPDLNVVGGASFVAGEAYNTDGNGHGTHVSGTVAALDNNTGVLGVAPSVSLYAVKVLNSSGSGSYSGIVSGIEWATTNGMDVINISLGGRSGSTAMKQAVDNAYARGVVVVAAAGNSGSSGNTNTIQYPAKYDSVIAVGAVDSNSQRASFSSVGAELEVMAPGVGVYSTYPTNTYATLSGTSMASPHVAGAAALILSKHPNLSASQVRNRLSSTATYLGDSFYYGKGLINVEAAAQ

SEQ ID NO: 59825 - protein, 274 aa, Bacillus licheniformis
AQVVPYGIPLIKADKVQAQGFKGANVKVAVLDTGIQASHPDLNVVGGASFVAGEAYNTDGNGHGTHVSGTVAALDNNTGVLGVAPSVSLYAVKVLNSSGSGSYSGIVSGIEWATTNGMDVINISLGGPRGSTAMKQAVDNAYARGVVVVAAAGNSGSSGNTNTIQYPAKYDSVIAVGAVDSNSQRASFSSVGAELEVMAPGAGVYSTYPTNTYATLSGTSMASPHVAGAAALILSKHPNLSASQVRNRLSSTATYLGDSFYYGKGLINVEAAAQ

SEQ ID NO: 59826 - protein, 274 aa, Bacillus licheniformis
AQVVPYGIPLIKADKVQAQGFKGANVKVAVLDTGIQASHPDLNVVGGASFVAGEAYNTDGNGHGTHVSGTVAALDNNTGVLGVAPSVSLYAVKVLNSSGSGSYSGIVSGIEWATTNGMDVINISLGGPSGSTAMKQAVDNAYARGVVVVAAAGNSGSSGNTNTIQYPAKYDSVIAVGAVDSNSQRASFSSVGAELEVMAPGVGVYSTYPTNTYATLSGTSMASPHVAGAAALILSKHPNLSASQVRNRLSSTATYLGPSFYYGKGLINVEAAAQ

SEQ ID NO: 59827 - protein, 274 aa, Bacillus licheniformis
AQTVPYGIPLIKADKVQAQGFKGANVKVAVLDTGIQASHPDLNVVGGASFVAGEAYNTDGNGHGTHVSGTVAALDNNTGVLGVAPSVSLYAVKVLNSSGSGSYSGIVSGIEWATTNGMDVINISLGSPSGSTAMKQAVDNAYARGVVVVAAAGNSGSSGNTNTIQYPAKYDSVIAVGAVDSNSQRASFSSVGAELEVMAPGVGVYSTYPTNTYATLSGTSMASPHVAGAAALILSKHPNLSASQVRNRLSSTATYLGPSFYYGKGLINVEAAAQ

SEQ ID NO: 59828 - protein, 274 aa, Bacillus licheniformis
AQVVPYGIPLIKADKVQAQGFKGANVKVAVLDTGIQASHPDLNVVGGASFVAGEAYNTDGNGHGTHVSGTVAALDNNTGVLGVAPSVSLYAVKVLNSSGSGSYSGIVSGIEWATTNGMDVINMSLGSPSGSTAMKQAVDNAYARGVVVVAAAGNSGSSGNTNTIQYPAKYDSVIAVGAVDSNSQRASFSSVGAELEVMAPGVGVYSTYPTNTYATLSGTSMASPHVAGAAALILSKHPNLSASQVRNRLSSTATYLGPSFYYGKGLINVEAAAQ

SEQ ID NO: 59829 - protein, 274 aa, Bacillus licheniformis
AQVVPYGIPLIKADKVQAQGFKGANVKVAVLDTGIQASHPDLNVVGGASFVAGEAYNTDGNGHGTHVSGTVAALDNNTGVLGVAPSVSLYAVKVLNSSQSGSYSGIVSGIEWATTNGMDVINMSLGGPSGSTAMKQAVDNAYARGVVVVAAAGNSGSSGNTNTIQYPAKYDSVIAVGAVDSNSQRASFSSVGAELEVMAPGVGVYSTYPTNTYATLSGTSMASPHVAGAAALILSKHPNLSASQVRNRLSSTATYLGPSFYYGKGLINVEAAAQ

SEQ ID NO: 59830 - protein, 274 aa, Bacillus licheniformis
AQVVPYGIPLIKADKVQAQGFKGANVKVAVLDTGIQASHPDLNVVGGASFVAGEAYNTDGNGHGTHVSGTVAALDNNTGVLGVAPSVSLYAVKVLNSSGSGSYSGIVSGIEWATTNGMDVINMSLGSPSGSTAMKQAVDNAYARGVVVVAAAGNSGSSGNTNTIQYPAKYDSVIAVGAVDSNSQRASFSSVGAELEVMAPGVGVYSTYPTNTYATLSGTSMASPHVAGAAALILSKHPNLSASQVRNRLSSTATYLGDSFYYGKGLINVEAAAQ

SEQ ID NO: 59831 - protein, 274 aa, Bacillus licheniformis
AQVVPYGIPLIKADKVQAQGFKGANVKVAVLDTGIQASHPDLNVVGGASFVAGEAYNTDGNGHGTHVSGTVAALDNETGVLGVAPSVSLYAVKVLNSSGSGSYSGIVSGIEWATTNGMDVINISLGTASGSTAMKQAVDNAYARGVVVVAAAGNSGSSGNTNTIEYPAKYDSVIAVGAVDSNSQRASFSSVGAELEVMAPGVGVYSTYPTNTYATLSGTSMASPHVAGAAALILSKHPNLSASQVRNRLSSTATYLGPSFYYGKGLINVEAAAQ

SEQ ID NO: 59832 - protein, 274 aa, Bacillus licheniformis
AQTVPYGIELIKADKVQAQGFKGANVKVAVLDTGIQASHPDLNVVGGASFVAGEAYNTDGNGHGTHVAGTVAALDNQTGVLGVAPSTSLYAVKVLNSSGSGSYSGIVSGIEWATTNGMDVINISLGGASGSTAMKRAVDNAYARGVVVVAAAGNSGSSGNTNTIQYPAKYDSVIAVGAVDSNSQRASFSSVGAELEVMAPGAGVYSTYPTNTYATLSGTSMASPHVAGAAALILSKHPSLSASQVRNRLSSTATYLGESFYYGKGLINVEAAAQ

SEQ ID NO: 59833 - protein, 274 aa, Bacillus licheniformis
AQVVPYGIPLIKADKVQAQGFKGANVKVAVLDTGIQASHPDLNVVGGASFVAGEAYNTDGNGHGTHVSGTVAALDNNTGVLGVAPSVSLYAVKVLNSSGSGSYSGIVSGIEWATTNGMDVINISLGGPSGSTAMKQAVDNAYARGVVVVAAAGNSGSSGNTNTIQYPAKYDSVIAVGAVDSNSQRAPFSSVGAELEVMAPGVGVYSTYPTNTYATLSGTSMASPHVAGAAALILSKHPNLSASQVRNRLSSTATYLGSSFYYGKGLINVEAAAQ

SEQ ID NO: 59834 - protein, 274 aa, Bacillus licheniformis
AQVVPYGIPLIKADKVQAQGFKGANVKVAVLDTGIQASHPDLNVVGGASFVAGEAYNTDGNGHGTHVSGTVAALDNNTGVLGVAPSVSLYAVKVLNSSGSGSYSGIVSGIEWATTNGMDVINISLGGRSGSTAMKQAVDNAYARGVVVVAAAGNSGSSGNTNTIQYPAKYDSVIAVGAVDSNSERASFSSVGAELEVMAPGVGVYSTYPTNTYATLSGTSMASPHVAGAAALILSKHPNLSASQVRNRLSSTATYLGDSFYYGKGLINVEAAAQ

SEQ ID NO: 59835 - protein, 274 aa, Bacillus licheniformis
AQVVPYGIPLIKADKVQAQGFKGANVKVAVLDTGIQASHPDLNVVGGASFVAGEAYNTDGNGHGTHVSGTVAALDNNTGVLGVAPSVSLYAVKVLNSSGSGSYSGIVSGIEWATTNGMDVINISLGSPSGSTAMKQAVDNAYARGVVVVAAAGNSGSSGNTNTIQYPAKYDSVIAVGAVDSNSQRASFSSVGAELEVMAPGVGVYSTYPTNTYATLNGTSMASPHVAGAAALILSKHPNLSASQVRNRLSSTATYLGPSFYYGKGLINVEAAAQ

SEQ ID NO: 59836 - protein, 274 aa, Bacillus licheniformis
AQVVPYGIPLIKADKVQAQGFKGANVKVAVLDTGIQASHPDLNVVGGASFVAGEAYNTDGNGHGTHVSGTVAALDNNTGVLGVAPSVSLYAVKVLNSSGSGSYSGIVSGIEWATTNGMDVINISLGGPHGSTAMKQAVDNAYARGVVVVAAAGNSGSSGNTNTIQYPAKYDSVIAVGAVDSNSQRASFSSVGAELEVMAPGVGVYSTYPTNTYATLSGTSMASPHVAGAAALILSKHPNLSASQVRNRLSSTATYLGSSFYYGKGLINVEAAAQ

SEQ ID NO: 59837 - protein, 274 aa, Bacillus licheniformis
AQVVPYGIPLIKADKVQAQGFKGANVKVAVLDTGIQASHPDLNVVGGASFVAGEAYNTDGNGHGTHVSGTVAALDNNTGVLGVAPSVSLYAVKVLNSSGSGSYSGIVSGIEWATTNGMDVINISLGSPSGSTAMKQAVDNAYARGVVVVAAAGNSGSSGNTNTIGYPAKYDSVIAVGAVDSNSQRASFSSVGAELEVMAPGVGVYSTYPTNTYATLSGTSMASPHVAGAAALILSKHPNLSASQVRNRLSSTATYLGPSFYYGKGLINVEAAAQ

SEQ ID NO: 59838 - protein, 273 aa, Bacillus licheniformis
AQTVPYGIPLINADKVQASQFKGANVKVAVLDHGIQASHPDLNVVGGASFVAGEAYNTDGNGMGTHVAGTVAALDNTTGVLGVAPSVSLYAVKVLNSSGSGSYSGIVSGIEWATTNGMDVINMSLGGASGSTAMKQAVDNAYAKRVVVVAVGNSGSSGNTNTIGYPAKYESVIAVGAVDSNSNRASFSSVGAELEVMAPGAGVYSTYPTSTYATLNGTSMASPHVAGAAALILSKHPNLSASQVRNRLSSTATYLGSSFYYGKGLINVEAAAQ

SEQ ID NO: 59839 - protein, 382 aa, Unidentified
VRSKKLWISLLFALTLIFTMAFSNMSAQAAEEAKEKYLIGFNEQEAVSEFVEQVEANDEVAILSEEEEVEIELLHEFETIPVLSVELSPEDVDALELDPAISYIEEDAEVTTMAQSVPWGISRVQAPAAHNRGLTGSGVKVAVLDTGISTHPDLNIRGGASFVPGEPSTQDGNGHGTHVAGTIAALNNSIGVLGVAPSAELYAVKVLGASGSGSVSSIAQGLEWAGNNGMHVANLSLGSPSPSATLEQAVNSATSRGVLVVAASGNSGAGSISYPARYANAMAVGATDQNNNRASFSQYGAGLDIVAPGVNVQSTYPGSTYASLNGTSMATPHVAGAAALVKQKNPSWSNVQIRNHLKNTATSLGSTNLYGSGLVNAEAATR

SEQ ID NO: 59840 - protein, 217 aa, Unidentified
AQSVPWGISRVQAPAAHNRGLTGSGVKVAVLDTGISTHPDLNIRGGASFVPGEPSTQDGNGHGTHVAGTIAALNNSIGVLGVAPSAELYAVKVLGASGSGSVSSIAQGLEWAGNNGMHVANLSLGSPSPSATLEQAVNSATSRGVLVVAASGNSGAGSISYPARYANAMAVGATDQNNNRASFSQYGAGLDIVAPGVNVQSTYPGCLAPGTKILTEH

SEQ ID NO: 59841 - protein, 217 aa, Unidentified
AQSVPWGISRVQAPAAHNRGLTGSGVKVAVLDTGISTHPDLNIRGGASFVPGEPSTQDGNGHGTHVAGTIAALNNSIGVLGVAPSAELYAVKVLGASGSGSVSSIAQGLEWAGNNGMHVANLSLGSPSPSATLEQAVNSATSRGVLVVAASGNSGAGSISYPARYANAMAVGATDQNNNRASFSQYGAGLDIVAPGVNVQSTYPGCLAPGTRVLTEH

SEQ ID NO: 59842 - protein, 380 aa, Unidentified
VRSKKLWIVASTALLISVAFSSSIASAAEEAKEKYLIGFNEQEAVSEFVEQVEANDEVAILSEEEEVEIELLHEFETIPVLSVELSPEDVDALELDPAISYIEEDAEVTTMAQSVPWGISRVQAPAAHNRGLTGSGVKVAVLDTGISTHPDLNIRGGASFVPGEPSTQDGNGHGTHVAGTIAALNNSIGVLGVAPSAELYAVKVLGASGSGSVSSIAQGLEWAGNNGMHVANLSLGSPSPSATLEQAVNSATSRGVLVVAASGNSGAGSISYPARYANAMAVGATDQNNNRASFSQYGAGLDIVAPGVNVQSTYPGSTYASLNGTSMATPHVAGAAALVKQKNPSWSNVQIRNHLKNTATSLGSTNLYGSGLVNAEAATR

SEQ ID NO: 59843 - protein, 217 aa, Unidentified
AQSVPWGISRVQAPAAHNRGLTGSGVKVAVLDTGISTHPDLNIRGGASFVPGEPSTQDGNGHGTHVAGTIAALNNSIGVLGVAPSAELYAVKVLGASGSGSVSSIAQGLEWAGNNGMHVANLSLGSPSPSATLEQAVNSATSRGVLVVAASGNSGAGSISYPARYANAMAVGATDQNNNRASFSQYGAGLDIVAPGVNVQSTYPGCLHGDSLIVTDH

SEQ ID NO: 59844 - protein, 269 aa, Unidentified
AQSMPWGISRVQAPAAHRRGLTGRGVKVAVLDTGISTHPDLNIRGGASFVPGEPSTQDGNGHGTHVAGTIAALDNSIGVLGVAPSAELYAVKVLGASGSGSVSSIAQGLEWAGANGMHVANLSLGSPSPSATLEQAVNSATSRGVLVVAASGNSGAGSISYPARYANAMAVGATDQNNNRASFSQYGAGLDLVAPGVNVQSTYPQSAYASLNGTSMATPHVAGAAALVKQKNPSWSNVQIRNRLKNTATSLGSTNLYGSGLVNAEAATR

SEQ ID NO: 59845 - protein, 269 aa, Unidentified
AQSVPWGISRVQAPAAHNRGLAGSGVKVAVLDTGISTHPDLNIRGGASFVPGEPSTQDGNGHGTHVAGTIAALNNSIGVLGVAPSAELYAVKVLGASGQGAISSIAQGLEWAGNNGMHVANVSLGASSPSATLEQAVNSATSRGVLVVAASGNSGAGSISYPARYANAMAVGATDQNNNRASFSQYGAGLDIVAPGVNVQSTYPGSTYASLNGTSMATPHVAGAAVLVKQKNPSWSNVRIRNHLKNTATSLGSTNLYGSGLVNAEAATR

SEQ ID NO: 59846 - protein, 269 aa, Unidentified
AQSVPWGISRVQAPAAHNRGLAGSGVKVAVLDSGISTHPDLNIRGGASFVPGEPSTQDGNGHGTHVAGTIAALNNSIGVLGVAPSAELYAVKVLGASGGGAISSIAQGLEWAGANGMHVANLSLGSPSPSATLEQAVNSATSRGVLVVAASGNSGAGSISYPARYANAMAVGATDQNNNRASFSQYGAGLDIVAPGVNVQSTVPGSAYASLNGTSMATPHVAGAAVLVKQKNPSWSNVQIRNHLKNTATSLGSTNLYGSGLVNAEAATR

SEQ ID NO: 59847 - protein, 269 aa, Unidentified
AQSVPWGISRVQAPAAHNRGLTGRGVKVAVLDTGISTHPDLDIRGGASFVPGEPSTQDGNGHGTHVAGTIAALDNSIGVLGVAPSAELYAVKVLGASGGGAISSIAQGLEWAGNNGMHVANLSLGSPSPSATLEQAVNSATSRGVLVVAASGNSGAGSISYPARYANAMAVGATDQNNNRASFSQYGAGLDIVAPGVNVQSTYPGSTYASLNGTSMATPHVAGAAVLVKQKNPSWSNVRIRNHLKNTATSLGSTNLYGSGLVRAEAATR

SEQ ID NO: 59848 - protein, 269 aa, Unidentified
AQSVPWGISRVQAPAAHNRGLAGSGVKVAVLDTGISTHPDLNIRGGASFVPGEPSTQDGNGHGTHVAGTIAALDNNIGVLGVAPSAELYAVKVLGASGGGAISSIAQGLEWAGNNGMHVANLSLGSPSPSATLEQAVNSATSRGVLVVAASGNSGAGSISYPARYANAMAVGATDQNNNRASFSQYGAGLDIVAPGVNVQSTYPGSTYASQNGTSMATPHVAGAAVLVKQKNPSWSNVRIRNHLKNTATSLGSTNLYGSGLVNAEAATR

SEQ ID NO: 59849 - protein, 269 aa, Unidentified
AQSVPWGISRVQAPAAHNRGLTGRGVKVAVLDTGISTHPDLNIRGGASFVPGEPSTQDGNGHGTHVAGTIAALNNDIGVLGVAPSAELYAVKVLGASGSGSVSSIAQGLEWAGNNDMHVANLSLGSESPSATLEQAVNSATSRGVLVVAASGNSGADSISYPARYANAMAVGATDQNNNRADFSQYGAGLDIVAPGVNVQSTYPGSTYASLNGTSMATPHVAGAAALVKQKNPSWSNVRIRDRLKNTATSLGSTNLYGSGLVNAEAATR

SEQ ID NO: 59850 - protein, 269 aa, Unidentified
AQSVPWGISRVQAPAAHNRKLTGGGVKVAVLDTGISTHPDLNIRGGASFVPGEPSTQDGEGHGTHVAGTIAALNNNIGVLGVAPSAELYAVKVLSASGQGSVSSIANGLEWAGLNGMHVANLSLGAPSPSATLEQAVNSATSRGVLVVAASGNSGAGSISYPARYANAMAVGATDQNNNRASFSQYGAGLDIVAPGVNVQSTYPGSTYASLNGTSMATPHVAGAAALVKQKNPSWSNVQIRNHLKNTATSLGSTNLYGSGLVNAEAATR

SEQ ID NO: 59851 - protein, 269 aa, Unidentified
AQSVPWGISRVQAPAAHNRGLAGSGVKVAVLDTGISTHPDLNIRGGASFVPGEPSTQDGNGHGTHVAGTIAALNNNIGVLGVAPSAELYAVKVLSASGQGAISSIAQGLEWAGNNGMHVANLSLGSPSPSATLEQAVNSATSRGVLVVAASGNSGAGSISYPARYANAMAVGATDQNNNRASFSQYGAGLDIVAPGVNVQSTYPGSTYASQNGTSMATPHVAGAAVLVKQKNPSWSNVRIRNHLKNTATSLGSTNLYGSGLVNAEAATR

SEQ ID NO: 59852 - protein, 269 aa, Unidentified
AQSVPWGISRVQAPAAHNRGLAGSGVKVAVLDTGISTHPDLNIRGGASFVPGEPSTQDGNGHGTHVAGTIAALNNSIGVLGVAPSAELYAVKVLSASGQGAISSIAQGLEWAGNNGMHVANLSLGAPSPSATLEQAVNSATSRGVLVVAASGNSGAGSISYPARYANAMAVGATDQNNNRASFSQYGAGLDIVAPGVNVQSTYPGSTYASQNGTSMATPHVAGAAVLVKQKNPSWSNVRIRNHLKNTATSLGSTNLYGSGLVNAEAATR

SEQ ID NO: 59853 - protein, 269 aa, Unidentified
AQSVPWGISRVQAPAAHRRGLWGRGVKVAVLDTGISTHPDLNIRGGASFVPGEPSTQDGNGHGTHVAGTIAALDNSIGVLGVAPSAELYAVKVLGASGSGSVSSIAQGLEWAGNNGMHVANLSLGSPSPSATLEQAVNSATSRGVLVVAASGNSGAGSISYPARYANAMAVGATDQDNNRASFSQYGAGLDLVAPGVNVQSTYPGSAYFSLNGTSMATPHVAGAAALVKQKNPSWSNVQIRNRLKNTATSLGSTNLYGSGLVNAEAATR

SEQ ID NO: 59854 - protein, 269 aa, Unidentified
AQSVPWGISRVQAPAAHNRGLTGSGVKTAVLDTGISTHPDLNIRGGASFVPGEPSTQDGNGHGTHVAGTIAALDNNIGVLGVAPRAELYAVKVLGASGSGSVSSIAQGLEWAGNNRMHVANLSLGLQAPSATLEQAVNSATSRGVLVVAASGNSGAGSISYPARYANAMAVGATDQNNNRASFSQYGAGLDIVAPGVNVLSTYPGSTYASLNGTSMATPHVAGAAALVKQKNPSWSNVQIRNHLKNTATSLGSTNLYGSGLVNAEAATR

SEQ ID NO: 59855 - protein, 269 aa, Unidentified
AQSVPWGISRVQAPAAHNRGLAGGGVKVAVLDTGISTHPDLNIRGGASFVPGEPSTQDGNGHGTHVAGTIAALDNSIGVLGVAPSAELYAVKVLGASGQGAISSIAQGLEWAGNNGMHVANLSLGAPSPSATLEQAVNSATSRGVLVVAASGNSGAGSISYPARYANAMAVGATDQNNNRASFSQYGAGLDIVAPGVNVQSTYPGSTYASLNGTSMATPHVAGAAVLVKQKNPSWSNVRIRNHLKNTATSLGSTNLYGSGLVNAEAATR

SEQ ID NO: 59856 - protein, 269 aa, Unidentified
AQSVPWGISRVQAPAAHNRGLTGSGVKVAVLDTGISTHPDLNIRGGASFVPGEPSTQDGNGHGTHAAGTIAALNNSIGVLGVAPSAELYAVKVLGASGSGAISSIAQGLEWAGNNGMHVANLSLGSPSPSATLEQAVNSATSRGVLVVAASGNSGADSISYPARYANAMAVGATDQNNNRASFSQYGAGLDIVAPGVNVQSTYPGSTYASLNGTSMATPHVAGAAVLVKHKNPSWSNVRIRDHLKKTATSLGSTNLYGSGLVNAEAATR

SEQ ID NO: 59857 - protein, 269 aa, Unidentified
AQSVPWGISRVQAPAAHNRRLTGRGVKVAVLDTGISTHPDLNIRGGASFVPGEPSTQDGNGHGTHVAGTIAALNNNIGVLGVAPSAELYAVKVLAASGNGSVSSIANGLEWAGLNGMHVANLSLGAPSPSATLEQAVNSATSRGVLVVAASGNSGAGSISYPARYANAMAVGATDQNNNRASFSQYGAGLDIVAPGVNVQSTYPGSTYASQNGTSMATPHVAGAAALVKQKNPSWSNVQIRNHLKNTATSLGSTNLYGSGLVNAEAATR

SEQ ID NO: 59858 - protein, 269 aa, Unidentified
AQSVPWGISRVQAPAAHRRRLTGRGVKVAVLDTGISTHPDLNIRGGASFVPGEPSTQDGNGHGTHVAGTIAALDNSIGVLGVAPSAELYAVKVLGASGAGSVSSIAQGLEWAGNNGMHVANLSLGSPSPSATLEQAVNSATSRGVLVVAASGNSGAGSISYPARYANAMAVGATDQNNNRASFSQYGAGLDIVAPGVNVQSTYPQSTYFSLNGTSMATPHVAGAAALVKQKNPSWSNVQIRNRLKNTATSLGSTNLYGSGLVDAEAATR

SEQ ID NO: 59859 - protein, 269 aa, Unidentified
AQSVPWGISRVQAPAAHRRGLTGSGVKVAVLDTGISTHPDLNIRGGASFVPGEPSTQDGNGHGTHVAGTIAALDNNIGVLGVAPRAELYAVKVLGASGSGSVSSIAQGLEWAGNNRMHVANLSLGLQAPSATLEQAVNSATSRGVLVVAASGNSGAGSISYPARYANAMAVGATDQNNNRASFSQYGAGLDIVAPGVNVLSTYPGSTYASLNGTSMATPHVAGAAALVKQKNPSWSNVQIRNHLKNTATSLGSTNLYGSGLVNAEAATR

SEQ ID NO: 59860 - protein, 269 aa, Unidentified
AQSVPWGISRVQAPAAHNRRLTGRGVKVAVLDTGISTHPDLNIRGGASFVPGEPSTQDGEGHGTHVAGTIAALNNGIGVLGVAPSAELYAVKVLGASGSGSVSSIAQGLEWAGNNSMHVANLSLGSESPSATLEQAVNSATSRGVLVVAASGNSGAGSISYPARYANAMAVGATDQNNNRADFSQYGAGLDIVAPGVNVQSTYPGSTYASLNGTSMATPHVAGAAALVKQKNPSWSNVQIRDRLKNTATSLGSTNLYGSGLVNAEAATR

SEQ ID NO: 59861 - protein, 269 aa, Unidentified
AQSVPWGISRVQAPAAHRRGLWGRGVKVAVLDTGISTHPDLNIRGGASFVPGEPSTQDGNGHGTHVAGTIAALDNSIGVLGVAPSAELYAVKVLGASGSGSVSSIAQGLEWAGANGMHVANLSLGSPSPSATLEQAVNSATSRGVLVVAASGNSGAGSISYPARYANAMAVGATDQNNNRASFSQYGAGLDIVAPGVNVQSTYPQSAYFSLNGTSMATPHVAGAAALVKQKNPSWSNVQIRNRLKNTATSLGSTNLYGSGLVNAEAATR

SEQ ID NO: 59862 - protein, 269 aa, Unidentified
AQSVPWGISRVQAPAAHNRRLTGRGVKVAVLDTGISTHPDLNIRGGASFVPGEPSTQDGNGHGTHVAGTIAALNNSIGVLGVAPSAELYAVKVLGASGGGAISSIAQGLEWAGNNGMHVANLSLGSPSPSATLEQAVNSATSRGVLVVAASGNSGAGSISYPARYANAMAVGATDQNNNRASFSQYGAGLDIVAPGVNVQSTYPGSTYASENGTSMATPHVAGAAVLVKQKNPSWSNVRIRNRLKNTATSLGSTNLYGSGLVNAEAATR

SEQ ID NO: 59863 - protein, 269 aa, Unidentified
AQSVPWGISRVQAPAAHRRGLTGSGVKVAVLDTGISTHPDLDITGGASFVPGEPSTQDGNGHGTHVAGTIAALNNSIGVLGVAPSAELYAVKVLGASGGGAISSIAQGLEWAGNNGMHVANLSLGSPSPSATLEQAVNSATSRGVLVVAASGNSGAGSISYPARYANAMAVGATDQNNNRASFSQYGAGLDIVAPGVNVQSTYPGSTYASLNGTSMATPHVAGAAVLVKQKNPSWSNVRIRNHLKNTATSLGSTNLYGSGLVRAEAATR

SEQ ID NO: 59864 - protein, 269 aa, Unidentified
AQSVPWGISRVQAPAAHNRGLAGSGVKVAVLDTGISTHPDLNIRGGASFVPGEPSTQDGNGHGTHVAGTIAALNNNIGVLGVAPSAELYAVKVLSASGGGAISSIAQGLEWAGNNGMHVANLSLGSPSPSATLEQAVNSATSRGVLVVAASGNSGAGSISYPARYANAMAVGATDQNNNRASFSQYGAGLDIVAPGVNVQSTYPGSTYASQNGTSMATPHVAGAAVLVKQKNPSWSNVRIRNHLKNTATSLGSTNLYGSGLVNAEAATR

SEQ ID NO: 59865 - protein, 269 aa, Unidentified
AQSVPWGISRVQAPAAHNRGLAGGGVKVAVLDTGISTHPDLNIRGGASFVPGEPSTQDGNGHGTHVAGTIAALNNSIGVLGVAPSAELYAVKVLAASGQGAISSIANGLEWAGNNGMHVANLSLGSPSPSATLEQAVNSATSRGVLVVAASGNSGAGSISYPARYANAMAVGATDQNNNRASFSQYGAGLDIVAPGVNVQSTYPGSTYASLNGTSMATPHVAGAAVLVKQKNPSWSNVRIRNHLKNTATSLGSTNLYGSGLVNAEAATR

SEQ ID NO: 59866 - protein, 269 aa, Unidentified
AQSVPWGISRVQAPAAHRRRLTGRGVKVAVLDTGISTHPDLNIRGGASFVPGEPSTQDGNGHGTHVAGTIAALDNSIGVLGVAPSAELYAVKVLGASGAGSVSSIAQGLEWAGNNGMHVANLSLGSPSPSATLEQAVNSATSRGVLVVAASGNSGAGSISYPARYANAMAVGATDQNNNRASFSQYGAGLDLVAPGVNVQSTYPGSAYFSLNGTSMATPHVAGAAALVKQKNPSWSNVQIRNRLKNTATSLGSTNLYGSGLVNAEAATR

SEQ ID NO: 59867 - protein, 269 aa, Unidentified
AQSVPWGISRVQAPAAHNRGLAGSGVKVAVLDTGISTHPDLNIRGGASFVPGEPSTQDGNGHGTHVAGTIAALDNSIGVLGVAPSAELYAVKVLAASGGGAISSIAQGLEWAGNNGMHVANLSLGSPSPSATLEQAVNSATSRGVLVVAASGNSGAGSISYPARYANAMAVGATDQNNNRASFSQYGAGLDIVAPGVNVQSTYPGSTYASQNGTSMATPHVAGAAVLVKQKNPSWSNVRIRNHLKNTATSLGSTNLYGSGLVNAEAATR

SEQ ID NO: 59868 - protein, 269 aa, Unidentified
AQSVPWGISRVQAPAAHNRGLTGSGVKVAVLDTGISTHPDLNIRGGASFVPGEPSTQDGNGHGTHAAGTIAALDNSIGVLGVAPSAELYAVKVLGASGSGAISSIAQGLEWAGNNGMHVANLSLGSPSPSATLEQAVNSATSRGVLVVAASGNSGADSISYPARYANAMAVGATDQNNNRASFSQYGIGLDIVAPGANVQSTYPGSTYASLNGTSMATPHVAGAAALVKHKNPSWSNVRIRNHLKNTATSLGSTNLYGSGLVNAEAATR

SEQ ID NO: 59869 - protein, 269 aa, Unidentified
AQSVPWGISRVQAPAAHNRGLAGSGVKVAVLDTGISTHPDLNIRGGASFVPGEPSTQDGNGHGTHVAGTIAALNNNIGVLGVAPSAELYAVKVLGASGGGAISSIAQGLEWAGNNGMHVANLSLGAPSPSATLEQAVNSATSRGVLVVAASGNSGAGSISYPARYANAMAVGATDQNNNRASFSQYGAGLDIVAPGVNVQSTYPGSTYASQNGTSMATPHVAGAAVLVKQKNPSWSNVRIRNHLKNTATSLGSTNLYGSGLVNAEAATR

SEQ ID NO: 59870 - protein, 269 aa, Unidentified
AQSVPWGISRVQAPAAHNRKLTGGGVKVAVLDTGISTHPDLNIRGGASFVPGEPSTQDGEGHGTHVAGTIAALNNSIGVLGVAPSAELYAVKVLSASGNGSVSSIANGLEWAGLNGMHVANLSLGAPSPSATLEQAVNSATSRGVLVVAASGNSGAGSISYPARYANAMAVGATDQNNNRASFSQYGAGLDIVAPGVNVQSTYPGSTYASQNGTSMATPHVAGAAALVKQKNPSWSNVQIRNHLKNTATSLGSTNLYGSGLVNAEAATR

SEQ ID NO: 59871 - protein, 269 aa, Unidentified
AQSVPWGISRVQAPAAHNRGLTGSGVKVAVLDSGISTHPDLNIRGGASFVPGEPSTQDGNGHGTHVAGTIAALNNSIGVLGVAPSAELYAVKVLGASGGGAISSIAQGLEWAGLNGMHVANLSLGNPSPSATLEQAVNSATSRGVLVVAASGNSGAGSISYPARYANAMAVGATDQNNNRASFSQYGAGLDIVAPGVNVQSTAPQSTYASLNGTSMATPHVAGAAVLVKQKNPSWSNVQIRNHLKNTATSLGSTNLYGSGLVNAEAATR

SEQ ID NO: 59872 - protein, 269 aa, Unidentified
AQSVPWGISRVQAPAAHNRGLAGSGVKVAVLDTGISTHPDLNIRGGASFVPGEPSTQDGNGHGTHVAGTIAALDNSIGVLGVAPSAELYAVKVLSASGNGAISSIAQGLEWAGNNGMHVANLSLGSPSPSATLEQAVNSATSRGVLVVAASGNSGAGSISYPARYANAMAVGATDQNNNRASFSQYGAGLDIVAPGVNVQSTYPGSTYASQNGTSMATPHVAGAAVLVKQKNPSWSNVRIRNHLKNTATSLGSTNLYGSGLVNAEAATR

SEQ ID NO: 59873 - protein, 269 aa, Unidentified
AQSVPWGISRVQAPAAHNRGLTGSGVKVAVLDTGISTHPDLNIRGGASFVPGEPSTQDGNGHGTHAAGTIAALDNSIGVLGVAPSAELYAVKVLGASGSGAISSIAQGLEWAGNNGMHVANLSLGSPSPSVTLEQAVNSATSRGVLVVAASGNSGADSISYPARYANAMAVGATDQNNNRASFSQYGAGLDIVAPGVNVQSTYPGSTYASLDGTSMATPHVAGAAALVKHKNPSWSNVRIRNHLKNTATSLGSTNLYGSGLVNAEAATR

SEQ ID NO: 59874 - protein, 269 aa, Unidentified
AQSVPWGISRVQAPAAHNRGLTGSGVKVAVLDTGISTHPDLNIRGGASFVPGEPSTQDGNGHGTHAAGTIAALDNSIGVLGVAPSAELYAVKVLGASGSGAISSIAQGLEWAGNNGMHVANLSLGSPSPSATLEQAVNSATSRGVLVVAASGNSGADSISYPARYANAMAVGATDQNNNRASFSQYGAGLDIVAPGVNVQSTWPGSTYASLNGTSMATPHVAGAAVLVKHKNPSWSNVRIRNHLKNTATSLGSTNLYGSGLVNAEAATR

SEQ ID NO: 59875 - protein, 269 aa, Unidentified
AQSVPWGISRVQAPAAHNRGLTGRGVKVAVLDTGISTHPDLNIRGGASFVPGEPSTQDGNGHGTHVAGTIAALNNSIGVLGVAPSAELYAVKVLGASGGGAISSIAQGLEWAGNNGMHVANLSLGSESPSATLEQAVNSATSRGVLVVAASGNSGAESISYPARYANAMAVGATDQNNNRASFSQYGAGLDIVAPGVNVQSTYPGSTYASLNGTSMATPHVAGAAVLVKQKNPSWSNVRIRDHLKNTATSLGSTNLYGSGLVNAEAATR

SEQ ID NO: 59876 - protein, 269 aa, Unidentified
AQTVPWGISRVQAPAAHNRGLTGSGVKVAVLDTGISTHPDLNIRGGASFVPGEPSTQDGNGHGTHVAGTIAALNNSIGVLGVAPSAELYAVKVLGADGXGAISSIAQGLEWAGNNGMHVANLSLGSPSPSATLEQAVNSATSRGVLVVAASGNSGASSISYPARYANAMAVGATDQNNNRASFSQYGPGLDIMAPGVNIQSTYPGSTYASLNGTSMATPHVAGAAALVKQKNPSWSNVQIRNHLKNTATSLGSTNLYGSGLVNAEAATR

SEQ ID NO: 59877 - protein, 269 aa, Unidentified
AQSVPWGISRVQAPAAHNRGLAGSGVKVAVLDTGISTHPDLNIRGGASFVPGEPSTQDGNGHGTHVAGTIAALNNSIGVLGVAPSAELYAVKVLGASGGGAISSIAQGLEWAGNNGMHVANLSLGSPSPSATLEQAVNSATSRGVLVVAASGNSGADSISYPARYANAMAVGATDQNNNRAEFSQYGAGLDIVAPGVNVQSTYPGSTYASLNGTSMATPHVAGAATLVKQKNPSWSNVRIREHLKNTATSLGSTNLYGSGLVNAEAATR

SEQ ID NO: 59878 - protein, 269 aa, Unidentified
AQSVPWGISRVQAPAAHNRGLAGRGVKVAVLDTGISTHPDLNIRGGASFVPGEPSTQDGNGHGTHVAGTIAALNNSIGVLGVAPSAELYAVKVLGASGDGSISSIAQGLEWAGNNGMHVANLSLGSPSPSATLEQAVNSATSRGVLVVAASGNSGADSISYPARYANAMAVGATDQNNNRADFSQYGAGLDIVAPGVNVQSTYPGSTYASLNGTSMATPHVAGAAVLVKQKNPSWSNVRIRDHLKNTATSLGSTNLYGSGLVNAEAATR

SEQ ID NO: 59879 - protein, 269 aa, Unidentified
AQSVPWGISRVQAPAAHNRRLTGRGVKVAVLDTGISTHPDLNIRGGASFVPGEPSTQDGEGHGTHVAGTIAALNNDIGVLGVAPSAELYAVKVLGASGSGSVSSIAQGLEWAGNNDMHVANLSLGSPSPSATLEQAVNSATSRGVLVVAASGNSGADSISYPARYANAMAVGATDQNNNRADFSQYGAGLDIVAPGVNVQSTYPGSTYASLNGTSMATPHVAGAAALVKQKNPSWSNVRIRNRLKNTATSLGSTNLYGSGLVNAEAATR

SEQ ID NO: 59880 - protein, 269 aa, Unidentified
AQSVPWGISRVQAPAAHNRGLTGSGVKVAVLDTGISTHPDLNIRGGASFVPGEPSTQDGNGHGTHAAGTIAALNNSIGVLGVAPSAELYAVKVLGASGSGAISSIAQGLEWAGNNGMHVANLSLGSPSPSATLEQAVNSATSRGVLVVAASGNSGADSISYPARYANAMAVGATDQNNNRASFSQYGAGLDIVAPGVNVQSTYPGSTYASLNGTSMAAPHVAGAAVLVKHKNPSWSNVRIRNHLKNTATSVGSTNLYGSGLVNAEAATR

SEQ ID NO: 59881 - protein, 269 aa, Unidentified
AQSVPWGISRVQAPAAHNRGLQGSGVKVAVLDTGISTHPDLNIRGGASFVPGEPSTQDGNGHGTHVAGTIAALNNSIGVLGVAPSAELYAVKVLGASGGGAISSIAQGLEWAGNNGMHVANLSLGSPSPSATLEQAVNSATSRGVLVVAASGNSGADSISYPARYANAMAVGATDQNNNRADFSQYGAGLDIVAPGVNVQSTYPGSTYASLNGTSMATPHVAGAALLVKQKNPSWSNVRIREHLKNTATSLGSTNLYGSGLVNAEAATR

SEQ ID NO: 59882 - protein, 269 aa, Unidentified
AQSVPWGISRVQAPAAHNRGLTGSGVKVAVLDTGISTHPDLNIRGGASFVPGEPSTQDGNGHGTHVAGTIAALNNSIGVLGVAPSAELYAVKVLGASGSGAISSIAQGLEWAGNNGMHVANLSLGSPSPSATLEQAVNSATSRGVLVVAASGNSGADSISYPARYANAMAVGATDQNNNRASFSQYGAGLDIVAPGVNIQSTWPGSTYASLNGTSMATPHVAGAAVLVKHKNPSWSNVRIRNHLKNTATSLGSANLYGSGLVNAEAATR

SEQ ID NO: 59883 - protein, 269 aa, Unidentified
AQSVPWGISRVQAPAAHRRRLTGRGVKVAVLDTGISTHPDLNIRGGASFVPGEPSTQDGNGHGTHVAGTIAALDNSIGVLGVAPSAELYAVKVLGASGAGSVSSIAQGLEWAGNNGMHVANLSLGSPSPSATLEQAVNSATSRGVLVVAASGNSGAGSISYPARYANAMAVGATDQDNNRASFSQYGAGLDIVAPGVNVQSTYPQSTYFSLNGTSMATPHVAGAAALVKQKNPSWSNVQIRNRLKNTATSLGSTNLYGSGLVNAEAATR

SEQ ID NO: 59884 - protein, 269 aa, Unidentified
AQSVPWGISRVQAPAAHNRGLTGSGVKVAVLDTGISTHPDLNIRGGASFVPGEPSTQDGNGHGTHVAGTIAALNNSIGVLGVAPSAELYAVKVLGASGSGAISSIAQGLEWAGNNGMHVANLSLGSPSPSATLEQAVNSATSRGVLVVAASGNSGADSIDYPARYANAMAVGATDQNNNRASFSQYGAGLDIVAPGVNVQSTYPGSTYASLNGTSMATPHVAGAAVLVKHKNPSWSNVRIRDHLKKTATSLGSTNLYGSGLVNAEAATR

SEQ ID NO: 59885 - protein, 269 aa, Unidentified
AQSVPWGISRVQAPAAHNRGLQGSGVKVAVLDTGISTHPDLNIRGGASFVPGEPSTQDGNGHGTHVAGTIAALNNSIGVLGVAPSAELYAVKVLGASGGGAISSIAQGLEWAGNNGMHVANLSLGSPSPSATLEQAVNSATSRGVLVVAASGNSGADSISYPARYANAMAVGATDQNNNRADFSQYGAGLDIVAPGVNVQSTYPGSTYASLNGTSMATPHVAGAASLVKQKNPSWSNVVIREHLKNTATSLGSTNLYGSGLVNAEAATR

SEQ ID NO: 59886 - protein, 269 aa, Unidentified
AQSVPWGISRVQAPAAHNRGLTGSGVNVAVLDTGISTHPDLNIRGGASFVPGEPSTQDGNGHGTHVAGTIAALNNSIGVLGVAPSAELYAVKVLGASGSGAISSIAQGLEWAGNNGMHVANLSLGSPSPSATLEQAVNSATSRGVLVVAASGNSGADSISYPARYANAMAVGATDQNNNRASFSQYGAGLDIVAPGVNVQSTYPGSTYASLNGTSMATPHVAGAAVLVKHKNPSWSNVRIRDHLKKTATSLGSTNLYGSGLVNAEAATR

SEQ ID NO: 59887 - protein, 269 aa, Unidentified
AQSVPWGISRVQAPAAHNRGLTGSGVKVAVLDTGISTHPDLNIRGGASFVPGEPSTQDGNGHGTHVAGTIAALNNSIGVLGVAPSAELYAVKVLGASGGGAISSIAQGLEWAGLNVMHVANLSLGSPSPSATLEQAVNSATSRGVLVVAASGNSGAGSISYPARYANAMAVGATDQNNNRASFSQYGAGLDIVAPGVNVQSTAPQSAYASLNGTSMATPHVAGAAVLVKQKNPSWSNVQIRNHLKNTATSLGSTNLYGSGLVNAEAATR

SEQ ID NO: 59888 - protein, 269 aa, Unidentified
AQSVPWGISRVQAPAAHNRGLAGGGVKVAVLDTGISTHPDLNIRGGASFVPGEPSTQDGNGHGTHVAGTIAALNNSIGVLGVAPSAELYAVKVLGASGQGAISSIANGLEWAGNNGMHVANLSLGAPSPSATLEQAVNSATSRGVLVVAASGNSGAGSISYPARYANAMAVGATDQNNNRASFSQYGAGLDIVAPGVNVQSTYPGSTYASLNGTSMATPHVAGAAVLVKQKNPSWSNVRIRNHLKNTATSLGSTNLYGSGLVNAEAATR

SEQ ID NO: 59889 - protein, 269 aa, Unidentified
AQSVPWGISRVQAPAAHNRGLTGSGVKVAVLDTGISTHPDLNIRGGASFVPGEPSTQDGNGHGTHVAGTIAALNNSIGVLGVAPSAELYAVKVLGASGSGAISEIAQGLEWAGNNGMHVANLSLGSPSPSATLEQAVNSATSRGVLVVAASGNSGADSISYPARYANAMAVGATDQNNNRASFSQYGAGLDIVAPGVNVQSTYPGSTYASLNGTSMATPHVAGAAVLVKHKNPSWSNVRIRDHLKKTATSLGSTNLYGSGLVNAEAATR

SEQ ID NO: 59890 - protein, 269 aa, Unidentified
AQSVPWGISRVQAPAAHNRGLTGSGVKVAVLDTGISTHPDLNIRGGASFVPGEPSTQDGNGHGTHVAGTIAALNNSIGVLGVAPSAELYAVKVLGASGSGAISSIAQGLEWAGNNGMHVANLSLGSPSPSATLEQAVNSATSRGVLVVAASGNSGADSISYPARYANAMAVGATDQNNNRASFSQYGAGLDIVAPGVNVQSTYPGSRYASLNGTSMATPHVAGAAVLVKHKNPSWSNVRIRDHLKKTATSLGSTNLYGSGLVNAEAATR

SEQ ID NO: 59891 - protein, 269 aa, Unidentified
AQSVPWGISRVQAPAAHRRRLTGRGVKVAVLDTGISTHPDLNIRGGASFVPGEPSTQDGNGHGTHVAGTIAALDNSIGVLGVAPSAELYAVKVLGASGAGSVSSIAQGLEWAGNNGMHVANLSLGSPSPSATLEQAVNSATSRGVLVVAASGNSGAGSISYPARYANAMAVGATDQDNNRASFSQYGAGLDIVAPGVNVQSTYPGSAYFSLNGTSMATPHVAGAAALVKQKNPSWSNVQIRNRLKNTATSLGSTNLYGSGLVNAEAATR

SEQ ID NO: 59892 - protein, 269 aa, Unidentified
AQSVPWGISRVQAPAAHDRGLTGSGVKVAVLDTGISTHPDLNIRGGASFVPGEPSTQDGNGHGTHVAGTIAALNNSIGVLGVAPSAELYAVKVLGASGGGAISSIAQGLEWAGANGMHVANLSLGSPSPSATLEQAVNSATSRGVLVVAASGNSGAGSISYPARYANAMAVGATDQNNNRASFSQYGAGLDIVAPGVNVQSTAPQSAYASLNGTSMATPHVAGAAVLVKQKNPSWSNVQIRNHLKNTATSLGSTNLYGSGLVNAEAATR

SEQ ID NO: 59893 - protein, 269 aa, Unidentified
AQSVPWGISRVQAPAAHNRGLTGSGVRVAVLDTGISTHPDLNIRGGASFVPGEPSTQDGNGHGTHAAGTIAALDNSIGVLGVAPSAELYAVKVLGASGSGAISSIAQGLEWAGNNGMHVANLSLGSPSPSATLEQAVNSATSRGVLVVAASGNSGADSISYPARYANAMAVGATDQNNNRASFSQYGAGLDIVAPGVNVQSTYPGSTYASLNGTSMATPHVAGAAVLVKHKNPSWSNVRIRNHLKNTATSLGSTNLYGSGLVNAEAATR

SEQ ID NO: 59894 - protein, 269 aa, Unidentified
AQSVPWGISRVQAPAAHNRGLQGSGVKVAVLDTGISTHPDLNIRGGASFVPGEPSTQDGNGHGTHVAGTIAALNNSIGVLGVAPSAELYAVKVLGASGGGAISSIAQGLEWAGNNGMHVANLSLGSPSPSATLEQAVNSATSRGVLVVAASGNSGADSISYPARYANAMAVGATDQNNNRADFSQYGAGLDIVAPGVNVQSTYPGSTYASLNGTSMATPHVAGAATLVKQKNPSWSNVTIREHLKNTATSLGSTNLYGSGLVNAEAATR

SEQ ID NO: 59895 - protein, 269 aa, Unidentified
AQSVPWGISRVQAPAAHNRGLAGSGVKVAVLDTGISTHPDLNIRGGASFVPGEPSTQDGNGHGTHVAGTIAALNNSIGVLGVAPSAELYAVKVLGASGSGAISSIAQGLEWAGNNGMHVANLSLGSPSPSATLEQAVNSATSRGVLVVAASGNSGADSISYPARYANAMAVGATDQNNNRADFSQYGAGLDIVAPGVNVQSTYPGSTYASLNGTSMATPHVAGAAVLVKQKNPSWSNVRIRDHLKNTATSLGSTNLYGSGLVNAFAATR

SEQ ID NO: 59896 - protein, 269 aa, Unidentified
AQSVPWGISRVQAPAAHNRGLTGSGVKVAVLDTGISTHPDLNIRGGASFVPGEPSTQDGNGHGTHVAGTIAALNNSIGVLGVAPSAELYAVKVLGASGSGAISSIARGLEWAGNNGMHVANLSLGSPSPSATLEQAVNSATSRGVLVVAASGNSGADSISYPARYANAMAVGATDQNNNRASFSQYGAGLDIVAPGVNVQSTYPGSTYASLNGTSMATPHVAGAAVLVKHKNPSWSNVRIRDHLKKTATSLGSTNLYGSGLVNAEAATR

SEQ ID NO: 59897 - protein, 269 aa, Unidentified
AQSVPWGISRVQAPAAHNRGLAGSGVKVAVLDTGISTHPDLNIRGGASFVPGEPSTQDGNGHGTHVAGTIAALNNSIGVLGVAPSAELYAVKVLGASGGGAISSIAQGLEWAGNNGMHVANLSLGSPSPSATLEQAVNSATSRGVLVVAASGNSGADSISYPARYANAMAVGATDQNNNRAEFSQYGAGLDIVAPGVNVQSTYPGSTYASLNGTSMATPHVAGAAVLVKQKNPSWSNVRIREHLKNTATSLGSTNLYGSGLVNAEAATR

SEQ ID NO: 59898 - protein, 269 aa, Unidentified
AQSVPWGISRVQAPAAHNRGLAGSGVKVAVLDTGISTHPDLNIRGGASFVPGEPSTQDGNGHGTHVAGTIVALDNNIGVLGVAPSAELYAVKVLGASGNGAISSIAQGLEWAGNNGMHVANLSLGSPSPSATLEQAVNSATSRGVLVVAASGNSGAGSISYPARYANAMAVGATDQNNNRASFSQYGAGLDIVAPGVNVQSTYPGSTYASLNGTSMATPHVAGAAVLVKQKNPSWSNVRIRNHLKNTATSLGSTNLYGSGLVNAEAATR

SEQ ID NO: 59899 - protein, 269 aa, Unidentified
AQSVPWGISRVQAPAAHNRGLRGSGVKVAVLDTGISTHPDLNIRGGASFVPGEPSTQDGNGHGTHVAGTIAALNNSIGVLGVAPSAELYAVKVLAASGNGAISSIAQGLEWAGLNGMHVANLSLGAPSPSATLEQAVNSATSRGVLVVAASGNSGAGSISYPARYANAMAVGATDQNNNRASFSQYGAGLDIVAPGVNVQSTYPGSTYASLNGTSMATPHVAGAAVLVKQKNPSWSNVRIRNHLKNTATSLGSTNLYGSGLVNAEAATR

SEQ ID NO: 59900 - protein, 269 aa, Unidentified
AQSVPWGISRVQAPAAHNRGLAGSGVKVAVLDTGISTHPDLNIRGGASFVPGEPSTQDGNGHGTHVAGTIAALNNSIGVLGVAPSAELYAVKVLGASGGGAISSIAQGLEWAGNNGMHVANLSLGSPSPSATLEQAVNSATSRGVLVVAASGNSGADSISYPARYANAMAVGATDQNNNRADFSQYGAGLDIVAPGVNVQSTYPGSTYASLNGTSMATPHVAGAAVLVKQKNPSWSNVRIREHLKNTATSLGSTNLYGSGLVNAEAATR

SEQ ID NO: 59901 - protein, 269 aa, Unidentified
AQSVPWGISRVQAPAAHRRGLTGRGVKVAVLDTGISTHPDLNIRGGASFVPGEPSTQDGNGHGTHVAGTIAALDNSIGVLGVAPSAELYAVKVLGASGAGSVSSIAQGLEWAGANGMHVANLSLGSPSPSATLEQAVNSATSRGVLVVAASGNSGAGSISYPARYANAMAVGATDQDNNRASFSQYGAGLDLVAPGVNVQSTYPQSTYASLNGTSMATPHVAGAAALVKQKNPSWSNVQIRNRLKNTATSLGSTNLYGSGLVNAEAATR

SEQ ID NO: 59902 - protein, 269 aa, Unidentified
AQSVPWGISRVQAPAAHNRGLTGSGVKVAVLDTGISTHPDLNIRGGASFVPGEPSTQDENGHGTHVAGTIAALNNSIGVLGVAPSAELYAVKVLGASGGGAISSIAQGLEWAGANGMHVANLSLGSPSPSATLEQAVNSATSRGVLVVAASGNSGAGSISYPARYANAMAVGATDQNNNRASFSQYGAGLDIVAPGVNVQSTVPQSAYASLNGTSMATPHVAGAAVLVKQKNPSWSNVQIRNHLKNTATSLGSTNLYGSGLVNAEAATR

SEQ ID NO: 59903 - protein, 269 aa, Unidentified
AQSVPWGISRVQAPAAHNRGLTGSGVKVAVLDSGISTHPDLNIRGGASFVPGEPSTQDGNGHGTHVAGTIAALNNSIGVLGVAPSAELYAVKVLGASGGGAISSIAQGLEWAGANGMHVANLSLGNPSPSATLEQAVNSATSRGVLVVAASGNSGAGSISYPARYANAMAVGATDQNNNRASFSQYGAGLDIVAPGVNVQSTAPGSAYASLNGTSMATPHVAGAAVLVKQKNPSWSNVQIRNHLKNTATSLGSTNLYGSGLVNAEAATR

SEQ ID NO: 59904 - protein, 269 aa, Unidentified
AQSVPWGISRVQAPAAHRRRLWGRGVKVAVLDTGISTHPDLNIRGGASFVPGEPSTQDGNGHGTHVAGTIAALDNSIGVLGVAPSAELYAVKVLGASGAGSVSSIAQGLEWAGNNGMHVANLSLGSPSPSATLEQAVNSATSRGVLVVAASGNSGAGSISYPARYANAMAVGATDQDNNRASFSQYGAGLDIVAPGVNVQSTYPGSTYFSLNGTSMATPHVAGAAALVKQKNPSWSNVQIRNRLKNTATSLGSTNLYGSGLVNAEAATR

SEQ ID NO: 59905 - protein, 269 aa, Unidentified
AQSVPWGISRVQAPAAHNRGLQGSGVKVAVLDTGISTHPDLNIRGGASFVPGEPSTQDGNGHGTHVAGTIAALNNSIGVLGVAPSAELYAVKVLGASGGGSISSIAQGLEWAGNNGMHVANLSLGSPSPSATLEQAVNSATSRGVLVVAASGNSGADSISYPARYANAMAVGATDQNNNRAEFSQYGAGLDIVAPGVNVQSTYPGSTYASLNGTSMATPHVAGAASLVKQKNPSWSNVVIREHLKNTATSLGSTNLYGSGLVNAHAATR

SEQ ID NO: 59906 - protein, 269 aa, Unidentified
AQSVPWGISRVQAPAAHNRGLTGRGVKVAVLDTGISTHPDLNIRGGASFVPGEPSTQDGEGHGTHVAGTIAALDNSIGVLGVAPSAELYAVKVLGASGAGAISSIAQGLEWAGNNGMHVANLSLGSPSPSATLEQAVNSATSRGVLVVAASGNSGAGSISYPARYANAMAVGATDQNNNRASFSQYGAGLDIVAPGVNVQSTYIGSTYASLNGTSMATPHVAGAAVLVKQKNPSWSNVRIRNHLKNTATSLGSTNLYGSGLVNAEAATR

SEQ ID NO: 59907 - protein, 269 aa, Unidentified
AQSVPWGISRVQAPAAHNRGLAGSGVKVAVLDTGISTHPDLNIRGGASFVPGEPSTQDGNGHGTHVAGTIAALNNSIGVLGVAPSAELYAVKVLSASGQGAISSIANGLEWAGNNGMHVANLSLGSPSPSATLEQAVNSATSRGVLVVAASGNSGAGSISYPARYANAMAVGATDQNNNRASFSQYGAGLDIVAPGVNVQSTYPGSTYASQNGTSMATPHVAGAAVLVKQKNPSWSNVRIRNHLKNTATSLGSTNLYGSGLVNAEAATR

SEQ ID NO: 59908 - protein, 269 aa, Bacillus clausii
AQSVPWGISRLQAPAAHNRGLTASAVKVAVLDTGVSTHPDLNIRGGASFVPGEPSTQDGNGHGTHVAGTIAALNNSIGVLGVAPSAELYAVKVLPASGHGSVSSIAQGLEWAGNNGMHVANLSLGSPSPSATLEQAVNSATSRGILVVAASGNSGAGSISYPARYANAMAVGATDQNNNRASFSQYGAGLDIVAPGVNVQSTYPGSTYASLSGTSMATPHVAGAAALVKQKNPSWSNVQIRNHLKNTATSLGSTNLYGSGLVNAEAGTR

SEQ ID NO: 59909 - protein, 269 aa, Unidentified
AQSVPWGISRVQAPAAHRRGLWGRGVKVAVLDTGISTHPDLNIRGGASFVPGEPSTQDGNGHGTHVAGTIAALDNSIGVLGVAPSAELYAVKVLGASGAGSVSSIAQGLEWAGANGMHVANLSLGSPSPSATLEQAVNSATSRGVLVVAASGNSGAGSISYPARYANAMAVGATDQDNNRASFSQYGAGLDIVAPGVNVQSTYPGSAYASLNGTSMATPHVAGAAALVKQKNPSWSNVQIRNRLKNTATSLGSTNLYGSGLVNAEAATR

SEQ ID NO: 59910 - protein, 269 aa, Unidentified
AQSVPWGISRVQAPAAHNRGLTGGGVKVAVLDTGISTHPDLNIRGGASFVPGEPSTQDGNGHGTHVAGTIAALNNNIGVLGVAPSAELYAVKVLSASGQGSVSSIAGGLEWAGNNGMHVANLSLGAPSPSATLEQAVNSATSRGVLVVAASGNSGAGSISYPARYANAMAVGATDQNNNRADFSQYGAGLDIVAPGVNVQSTYPGSTYASQNGTSMATPHAAGAAALVKQKNPSWSNVQIRNHLKNTATSLGSTNLYGSGLVNAEAATR

SEQ ID NO: 59911 - protein, 269 aa, Unidentified
AQSVPWGISRVQAPAAHNRGLQGSGVKVAVLDTGISTHPDLNIRGGASFVPGEPSTQDGNGHGTHVAGTIAALNNSIGVLGVAPSAELYAVKVLGASGGGAISSIAQGLEWAGNNGMHVANLSLGSPSPSATLEQAVNSATSRGVLVVAASGNSGADSISYPARYANAMAVGATDQNNNRAEFSQYGAGLDIVAPGVNVQSTYPGSTYASLNGTSMATPHVAGAAVLVKQKNPSWSNVVIREHLKNTATSLGSTNLYGSGLVNAEAATR

SEQ ID NO: 59912 - protein, 269 aa, Unidentified
AQSVPWGISRVQAPAAHNRGLTGSGVKVAVLDTGISTHPDLNIRGGASFVPGEPSTQDGNGHGTHVAGTIAALNNSIGVLGVAPSAELYAVKVLGASGSGAISSIAQGLEWAGNNGMHVANLSLGSPSPSATLEQAVNSATSRGVLVVAASGNSGADSISYPARYANAMAVGATDQNGNRASFSQYGAGLDIVAPGVNVQSTYPGSTYASLNGTSMATPHVAGAAVLVKHKNPSWSNVRIRDHLKKTATSLGSTNLYGSGLVNAEAATR

SEQ ID NO: 59913 - protein, 269 aa, Unidentified
AQSVPWGISRVQAPAAHNRGLAGGGVKVAVLDTGISTHPDLNIRGGASFVPGEPSTQDGNGHGTHVAGTIAALDNSIGVLGVAPSAELYAVKVLSASGQGAISSIAQGLEWAGNNGMHVANLSLGSPSPSATLEQAVNSATSRGVLVVAASGNSGAGSISYPARYANAMAVGATDQNNNRASFSQYGAGLDIVAPGVNVQSTYPGSTYASLNGTSMATPHVAGAAVLVKQKNPSWSNVRIRNHLKNTATSLGSTNLYGSGLVNAEAATR

SEQ ID NO: 59914 - protein, 269 aa, Unidentified
AQSVPWGISRVQAPAAHNRGLRGSGVKVAVLDTGISTHPDLNIRGGASFVPGEPSTQDGNGHGTHVAGTIAALNNNIGVLGVAPSAELYAVKVLAASGNGAISSIAQGLEWAGNNGMHVANLSLGAPSPSATLEQAVNSATSRGVLVVAASGNSGAGSISYPARYANAMAVGATDQNNNRASFSQYGAGLDIVAPGVNVQSTYPGSTYASLNGTSMATPHVAGAAVLVKQKNPSWSNVRIRNHLKNTATSLGSTNLYGSGLVNAEAATR

SEQ ID NO: 59915 - protein, 269 aa, Unidentified
AQSVPWGISRVQAPAAHRRGLTGSGVKVAVLDTGISTHPDLDIRGGASFVPGEPSTQDGNGHGTHVAGTIAALDNSIGVLGVAPSAELYAVKVLGASGGGAISSIAQGLEWAGNNGMHVANLSLGSPSPSATLEQAVNSATSRGVLVVAASGNSGAGSISYPARYANAMAVGATDQNNNRASFSQYGAGLDIVAPGVNVQSTYPGSTYASLNGTSMATPHVAGAAVLVKQKNPSWSNVRIRNHLKNTATSLGSTNLYGSGLVRAEAATR

SEQ ID NO: 59916 - protein, 269 aa, Unidentified
AQSVPWGISRVQAPAAHNRGLAGSGVKVAVLDTGISTHPDLNIRGGASFVPGEPSTQDGNGHGTHVAGTIAALNNSIGVLGVAPSAELYAVKVLGASGGGAISSIAQGLEWAGLNGMHVANLSLGNPSPSATLEQAVNSATSRGVLVVAASGNSGAGSISYPARYANAMAVGATDQNNNRASFSQYGAGLDIVAPGVNVQSTVPQSTYASLNGTSMATPHVAGAAVLVKQKNPSWSNVQIRNHLKNTATSLGSTNLYGSGLVNAEAATR

SEQ ID NO: 59917 - protein, 269 aa, Unidentified
AQSVPWGISRVQAPAAHNRGLAGFGVKVAVLDTGISTHPDLNIRGGASFVPGEPSTQDGNGHGTHVAGTIAALNNSIGVLGVAPSAELYAVKVLGASGGGAISSIAQGLEWAGLNVMHVANLSLGSPSPSATLEQAVNSATSRGVLVVAASGNSGAGSISYPARYANAMAVGATDQNNNRASFSQYGAGLDIVAPGVNVQSTAPGSTYASLNGTSMATPHVAGAAVLVKQKNPSWSNVQIRNHLKNTATSLGSTNLYGSGLVNAEAATR

SEQ ID NO: 59918 - protein, 269 aa, Unidentified
AQSVPWGISRVQAPAAHNRGLTGSGVKVAVLDTGISTHPDLNIRGGASFVPGEPSTQDGNGHGTHVAGTIAALNNSIGVLGVAPSAELYAVKVLGASGGGAISSIAQGLEWAGNNGMHVANLSLGNESPSATLEQAVNSATSRGVLVVAASGNSGAGSISYPARYANAMAVGATDQNNNRASFSQYGAGLDIVAPGVNVQSTYPGSTYASLNGTSMATPHVAGAAVLVKQKRPSWSNVRIRDHLKNTATSLGSTNLYGSGLVNAEAATR

SEQ ID NO: 59919 - protein, 269 aa, Unidentified
AQSVPWGISRVQAPAAHRRGLWGRGVKVAVLDTGISTHPDLNIRGGASFVPGEPSTQDGNGHGTHVAGTIAALDNSIGVLGVAPSAELYAVKVLGASGSGSVSSIAQGLEWAGANGMHVANLSLGSPSPSATLEQAVNSATSRGVLVVAASGNSGAGSISYPARYANAMAVGATDQNNNRASFSQYGAGLDLVAPGVNVQSTYPQSAYASLNGTSMATPHVAGAAALVKQKNPSWSNVQIRNRLKNTATSLGSTNLYGSGLVNAEAATR

SEQ ID NO: 59920 - protein, 269 aa, Bacillus clausii
AQSVPWGISRIQAPAAHNRGLTASAVKVAVLDTGVSTHPDLNIRGGASFVPGEPSTQDGNGHGTHVAGTIAALNNSIGVLGVAPSAELYAVKVLPASGHGSVSSIAQGLEWAGNNGMHVANLSLGSPSPSATLEQAVNSATSRGILVVAASGNSGAGSISYPARYANAMAVGATDQNNNRASFSQYGAGLDIVAPGVNVQSTYPGSTYASLSGTSMATPHVAGAAALVKQKNPSWSNVQIRNHLKNTATSLGSTNLYGSGLVNAEAPTR

SEQ ID NO: 59921 - protein, 269 aa, Unidentified
AQSVPWGISRVQAPAAHNRGLTGSGVKVAVLDTGISTHPDLDIRGGASFVPGEPSTQDGNGHGTHAAGTIAALNNSIGVLGVAPSAELYAVKVLGASGSGAISSIAQGLEWAGNNGMHVANLSLGSPSPSATLEQAVNSATSRGVLVVAASGNSGADSISYPARYANAMAVGATDQNNNRASFSQYGAGLDIVAPGVNVQSTYPGSTYASLNGTSMATPHVAGAAVLVKHKNPSWSNVRIRNHLKKTATSLGSTNLYGSGLVNAEAATR

SEQ ID NO: 59922 - protein, 269 aa, Unidentified
AQSVPWGISRVQAPAAHNRGLAGSGVKVAVLDTGISTHPDLNIRGGASFVPGEPSTQDGNGHGTHVAGTIAALNNSIGVLGVAPSAELYAVKVLGASGNGAISSIAQGLEWAGNNGMHVANLSLGASSPSATLEQAVNSATSRGVLVVAASGNSGAGSISYPARYANAMAVGATDQNNNRASFSQYGAGLDIVAPGVNVQSTYPGSTYASQNGTSMATPHVAGAAVLVKQKNPSWSNVRIRNHLKNTATSLGSTNLYGSGLVNAEAATR

SEQ ID NO: 59923 - protein, 269 aa, Unidentified
AQSVPWGISRVQAPASHNRGLTGSGVKVAVLDTGISTHPDLNIRGGASFVPGEPSTQDGNGHGTHVAGTIAALNNSIGVLGVAPSAELYAVKVLGASGGGAISSIAQGLEWAGLNGMHVANLSLGNPSPSATLEQAVNSATSRGVLVVAASGNSGAGSISYPARYANAMAVGATDQNNNRASFSQYGAGLDIVAPGVNVQSTVPQSTYASLNGTSMATPHVAGAAVLVKQKNPSWSNVQIRNHLKNTATSLGSTNLYGSGLVNAEAATR

SEQ ID NO: 59924 - protein, 269 aa, Unidentified
AQSVPWGISRVQAPAAHNRGLRGSGVKVAVLDTGISTHPDLNIRGGASFVPGEPSTQDGNGHGTHVAGTIAALNNSIGVLGVAPSAELYAVKVLAASGQGAISSIANGLEWAGNNGMHVANLSLGAPSPSATLEQAVNSATSRGVLVVAASGNSGAGSISYPARYANAMAVGATDQNNNRASFSQYGAGLDIVAPGVNVQSTYPGSTYASLNGTSMATPHVAGAAVLVKQKNPSWSNVRIRNHLKNTATSLGSTNLYGSGLVNAEAATR

SEQ ID NO: 59925 - protein, 269 aa, Unidentified
AQTIPWGISRVQAPAAHNRGLTGSGVKVAVLDTGISTHPDLNIRGGASFVPGEPSTQDGNGHGTHVAGTIAALNNSIGVLGVAPSAELYAVKVLGADGEGAISSIAQGLEWAGNNGMHVANLSLGSPSPSATLEQAVNSATSRGVLVVAASGNSGASSISYPARYANAMAVGATDQNNNRASFSQYGAGLDIVAPGVNIQSTYPDSTYASLNGTSMATPHVAGAAALVKQKNPSWSNVQIRNHLKNTATSLGSTNLYGSGLVNAEAATR

SEQ ID NO: 59926 - protein, 269 aa, Unidentified
AQSVPWGISRVQAPAAHNRGLAGSGVKVAVLDTGISTHPDLNIRGGASFVPGEPSTQDGNGHGTHVAGTIAALNNSIGVLGVAPSAELYAVKVLGASGGGAISSIAQGLEWAGNNGMHVANLSLGSPSPSATLEQAVNSATSRGVLVVAASGNSGADSISYPARYANAMAVGATDQNNNRAEFSQYGAGLDIVAPGVNVQSTYPGSTYASLNGTSMATPHVAGAALLVKQKNPSWSNVVIREHLKNTATSLGSTNLYGSGLVNAEAATR

SEQ ID NO: 59927 - protein, 269 aa, Unidentified
AQSVPWGISRVQAPAAHNRRLTGRGVKVAVLDTGISTHPDLNIRGGASFVPGEPSTQDGNGHGTHVAGTIAALNNGIGVLGVAPSAELYAVKVLGASGSGSVSSIAQGLEWAGNNSMHVANLSLGSESPSATLEQAVNSATSRGVLVVAASGNSGAGSISYPARYANAMAVGATDQNNNRADFSQYGAGLDIVAPGVNVQSTYPGSTYASLNGTSMATPHVAGAAALVKQKNPSWSNVRIRDRLKNTATSLGSTNLYGSGLVNAEAATR

SEQ ID NO: 59928 - protein, 269 aa, Unidentified
AQSVPWGISRVQAPAAHNRRLTGSGVKVAVLDTGISTHPDLNIRGGASFVPGEPSTQDGEGHGTHVAGTIAALNNDIGVLGVAPSAELYAVKVLGASGSGSVSSIAQGLEWAGNNSMHVANLSLGSESPSATLEQAVNSATSRGVLVVAASGNSGAGSISYPARYANAMAVGATDQNNNRADFSQYGAGLDIVAPGVNVQSTYPGSTYASLNGTSMATPHVAGAAALVKQKNPSWSNVRIRDRLKNTATSLGSTNLYGSGLVNAEAATR

SEQ ID NO: 59929 - protein, 269 aa, Unidentified
AQSVPWGISRVQAPAAHNRGLAGGGVKVAVLDTGISTHPDLNIRGGASFVPGEPSTQDGNGHGTHVAGTIAALDNSIGVLGVAPSAELYAVKVLSASGNGAISSIAQGLEWAGNNGMHVANLSLGSPSPSATLEQAVNSATSRGVLVVAASGNSGAGSISYPARYANAMAVGATDQNNNRASFSQYGAGLDIVAPGVNVQSTYPGSTYASLNGTSMATPHVAGAAVLVKQKNPSWSNVRIRNHLKNTATSLGSTNLYGSGLVNAEAATR

SEQ ID NO: 59930 - protein, 269 aa, Unidentified
AQSVPWGISRVQAPAAHNRGLQGSGVKVAVLDTGISTHPDLNIRGGASFVPGEPSTQDGNGHGTHVAGTIAALNNSIGVLGVAPSAELYAVKVLGASGGGAISSIAQGLEWAGNNGMHVANLSLGSPSPSATLEQAVNSATSRGVLVVAASGNSGADSISYPARYANAMAVGATDQNNNRAEFSQYGAGLDIVAPGVNVQSTYPGSTYASLNGTSMATPHVAGAATLVKQKNPSWSNVTIRHHLKNTATSLGSTNLYGSGLVNAEAATR

SEQ ID NO: 59931 - protein, 269 aa, Unidentified
AQSVPWGISRVQAPAAHNRGLAGGGVKVAVLDTGISTHPDLNIRGGASFVPGEPSTQDGNGHGTHVAGTIAALNNNIGVLGVAPSAELYAVKVLGASGNGAISSIAQGLEWAGNNGMHVANLSLGSPSPSATLEQAVNSATSRGVLVVAASGNSGAGSISYPARYANAMAVGATDQNNNRASFSQYGAGLDIVAPGVNVQSTYPGSTYASQNGTSMATPHVAGAAVLVKQKNPSWSNVRIRNHLKNTATSLGSTNLYGSGLVNAEAATR

SEQ ID NO: 59932 - protein, 269 aa, Unidentified
AQSVPWGISRVQAPAAHNRGLTGSGVKVAVLDTGISTHPDLNIRGGASFVPGEPSTQDGNGHGTHAAGTIAALNNSIGVLGVAPSAELYAVKVLGASGSGAISSIAQGLEWAGNNGMHVANLSLGSPSPSATLEQAVNSATSRGVLVVAASGNSGADSISYPARYANAMAVGATDQNNNRASFSQYGAGLDIVAPGVNVQSTYPGSTYASLNGTSMATPHVAGAAVLVKHKNPSWSNVRIRDHLKFTATSLGSTNLYGSGLVNAEAATR

SEQ ID NO: 59933 - protein, 269 aa, Unidentified
AQSVPWGISRVQAPAAHNRGLTGSGVKVAVLDTGISTHPDLNIRGGASFVPGEPSTQDGNGHGTHAAGTIAALDNSIGVLGVAPSAELYAVKVLGASGSGAISSIAQGLEWAGNNGMHVANLSLGSPSPSATLEQAVNNATSRGVLVVAASGNSGADSISYPARYANAMAVGATDQNNNRASFSQYGAGLDIVAPGVNVQSTYPGSTYASLNGTSMATPHVAGAAALVKHKNPSWSNVRIRNHLKNTASSLGSTNLYGSGLVNAEAATR

SEQ ID NO: 59934 - protein, 269 aa, Unidentified
AQSVPWGISRVQAPAAHNRGLAGSGVKVAVLDTGISTHPDLNIRGGASFVPGEPSTQDGNGHGTHVAGTIAALNNSIGVLGVAPSAELYAVKVLSASGQGAISSIAGGLEWAGNNGMHVANLSLGAPSPSATLEQAVNSATSRGVLVVAASGNSGAGSISYPARYANAMAVGATDQNNNRASFSQYGAGLDIVAPGVNVQSTYPGSTYASLNGTSMATPHVAGAAVLVKQKNPSWSNVRIRNHLKNTATSLGSTNLYGSGLVNAEAATR

SEQ ID NO: 59935 - protein, 269 aa, Unidentified
AQSVPWGISRVQAPAAHNRGLTGSGVKVAVLDTGISTHPDLNIRGGASFVPGEPSTQDGNGHGTHVAGTIAALNNSIGVLGVAPSAELYAVKVLGASGGGALSSIAQGLEWAGNNGMHVANLSLGSPSPSATLEQAVNSATSRGVLVVAASGNSGEGSISYPARYANAMAVGATDQNNNRADFSQYGAGLDIVAPGVNVQSTYPGSTYASLNGTSMATPHVAGAAVLVKQKNPSWSNVRIRDRLKNTATSLGSTNLYGSGLVNAEAATR

SEQ ID NO: 59936 - protein, 269 aa, Unidentified
AQSVPWGISRVQAPAAHNRGLTGSGVKVAVLDTGISTHPDLDIRGGASFVPGEPSTQDGNGHGTHVAGTIAALNNRIGVLGVAPSAELYAVKVLGASGGGAISSIAQGLEWAGNNGMHVANLSLGSPSPSATLEQAVNSATSRGVLVVAASGNSGAGSISYPARYANAMAVGATDQNNNRASFSQYGAGLDIVAPGVNVQSTYPGSTYASLNGTSMATPHVAGAAVLVKQKNPSWSNVRIRNHLKNTATSLGSTNLYGSGLVRAESATR

SEQ ID NO: 59937 - protein, 269 aa, Unidentified
AQSVPWGISRVQAPAAHNRGLTGSGVKVAVLDTGISTHPDLNIRGGASFVPGEPSTQDGNGHGTHAAGTIAALNNSIGVLGVAPSAELYAVKVLGASGSGAISSIAQGLEWAGNNGMHVANLSLGSPSPSATLEQAVNSATSRGVLVVAASGNSGADSISYPARYANAMAVGATDQNNNRASFSQYGAGLDIVAPGVNVQSTYPGSTYASLNGTSMATPHVAGAAVLVKHKNPSWSNVRIRDHLKLTATSLGSTNLYGSGLVNAEAATR

SEQ ID NO: 59938 - protein, 269 aa, Unidentified
AQSVPWGISRVQAPAAHNRGLTGRGVKVAVLDTGISTHPDLNIRGGASFVPGEPSTQDGNGHGTHVAGTIAALNNSIGVLGVAPSAELYAVKVLGASGGGAISSIAQGLEWAGNNGMHVANLSLGSPSPSATLEQAVNSATSRGVLVVAASGNSGEESISYPARYANAMAVGATDQNNNRASFSQYGAGLDIVAPGVNVQSTYPGSTYASLNGTSMATPHVAGAAVLVKQKNPSWSNVRIRDHLKNTATSLGSTNLYGSGLVNAEAATR

SEQ ID NO: 59939 - protein, 269 aa, Unidentified
AQSVPWGISRVQAPAAHNRKLTGSGVKVAVLDTGISTHPDLNIRGGASFVPGEPSTQDGEGHGTHVAGTIAALNNNIGVLGVAPSAELYAVKVLGASGQGSVSSIANGLEWAGLNGMHVANLSLGAPSPSATLEQAVNSATSRGVLVVAASGNSGAGSISYPARYANAMAVGATDQNNNRADFSQYGAGLDIVAPGVNVQSTYPGSTYASQNGTSMATPHVAGAAALVKQKNPSWSNVQIRNHLKNTATSLGSTNLYGSGLVNAEAATR

SEQ ID NO: 59940 - protein, 269 aa, Unidentified
AQSVPWGISRVQAPAAHNRGLAGGGVKVAVLDTGISTHPDLNIRGGASFVPGEPSTQDGNGHGTHVAGTIAALNNSIGVLGVAPSAELYAVKVLGASGNGAISSIANGLEWAGNNGMHVANLSLGAPSPSATLEQAVNSATSRGVLVVAASGNSGAGSISYPARYANAMAVGATDQNNNRASFSQYGAGLDIVAPGVNVQSTYPGSTYASLNGTSMATPHVAGAAVLVKQKNPSWSNVRIRNHLKNTATSLGSTNLYGSGLVNAEAATR

SEQ ID NO: 59941 - protein, 269 aa, Unidentified
AQSVPWGISRVQAPAAHNRGLTGSGVKVAVLDTGISTHPDLNIRGGASFVPGEPSTQDGEGHGTHVAGTIAALNNDIGVLGVAPSAELYAVKVLGASGSGSVSSIAQGLEWAGNNSMHVANLSLGSESPSATLEQAVNSATSRGVLVVAASGNSGADSISYPARYANAMAVGATDQNNNRADFSQYGAGLDIVAPGVNVQSTYPGSTYASLNGTSMATPHVAGAAALVKQKNPSWSNVRIRDRLKNTATSLGSTNLYGSGLVNAEAATR

SEQ ID NO: 59942 - protein, 269 aa, Unidentified
AQSVPWGISRVQAPAAHRRGLWGRGVKVAVLDTGISTHPDLNIRGGASFVPGEPSTQDGNGHGTHVAGTIAALDNSIGVLGVAPSAELYAVKVLGASGSGSVSSIAQGLEWAGNNGMHVANLSLGSPSPSATLEQAVNSATSRGVLVVAASGNSGAGSISYPARYANAMAVGATDQDNNRASFSQYGAGLDLVAPGVNVQSTYPQSAYASLNGTSMATPHVAGAAALVKQKNPSWSNVQIRNRLKNTATSLGSTNLYGSGLVNAEAATR

SEQ ID NO: 59943 - protein, 269 aa, Unidentified
AQSVPWGISRVQAPAAHRRGLWGRGVKVAVLDTGISTHPDLNIRGGASFVPGEPSTQDGNGHGTHVAGTIAALDNSIGVLGVAPSAELYAVKVLGASGAGSVSSIAQGLEWAGNNGMHVANLSLGSPSPSATLEQAVNSATSRGVLVVAASGNSGAGSISYPARYANAMAVGATDQNNNRASFSQYGAGLDLVAPGVNVQSTYPQSAYASLNGTSMATPHVAGAAALVKQKNPSWSNVQIRNRLKNTATSLGSTNLYGSGLVNAEAATR

SEQ ID NO: 59944 - protein, 269 aa, Unidentified
AQSVPWGISRVQAPAAHNRRLTGRGVKVAVLDTGISTHPDLNIRGGASFVPGEPSTQDGNGHGTHVAGTIAALNNNIGVLGVAPSAELYAVKVLSASGNGSVSSIAGGLEWAGLNGMHVANLSLGAPSPSATLEQAVNSATSRGVLVVAASGNSGAGSISYPARYANAMAVGATDQNNNRASFSQYGAGLDIVAPGVNVQSTYPGSTYASQNGTSMATPHVAGAAALVKQKNPSWSNVQIRNHLKNTATSLGSTNLYGSGLVNAEAATR

SEQ ID NO: 59945 - protein, 269 aa, Unidentified
AQSVPWGISRVQAPAAHNRGLAGSGVKVAVLDTGISTHPDLNIRGGASFVPGEPSTQDGNGHGTHVAGTIAALNNSIGVLGVAPSAELYAVKVLGASGGGAISSIAQGLEWAGNNGMHVANLSLGSPSPSATLEQAVNSATSRGVLVVAASGNSGADSISYPARYANAMAVGATDQNNNRADFSQYGAGLDIVAPGVNVQSTYPGSTYASLNGTSMATPHVAGAALLVKQKNPSWSNVVIRHHLKNTATSLGSTNLYGSGLVNAEAATR

SEQ ID NO: 59946 - protein, 269 aa, Unidentified
AQSVPWGISRVQAPAAHNRGLAGFGVKVAVLDTGISTHPDLNIRGGASFVPGEPSTQDGNGHGTHVAGTIAALNNSIGVLGVAPSAELYAVKVLGASGGGAISSIAQGLEWAGLNGMHVANLSLGSPSPSATLEQAVNSATSRGVLVVAASGNSGAGSISYPARYANAMAVGATDQNNNRASFSQYGAGLDIVAPGVNVQSTAPGSAYASLNGTSMATPHVAGAAVLVKQKNPSWSNVQIRNHLKNTATSLGSTNLYGSGLVNAEAATR

SEQ ID NO: 59947 - protein, 269 aa, Unidentified
AQTIPWGISRVQAPAAHNRGLTGSGVKVAVLDTGISTHPDLNIRGGASFVPGEPSTQDGNGHGTHVAGTIAALNNSIGVLGVAPSAELYAVKVLGADGEGAISSIAQGLEWAGNNGMHVANLSLGSPSPSATLEQAVNSATSRGVLVVAASGNSGASSISYPARYANAMAVGATDQNNNRASFSQYGPGLDIVAPGVNIQSTYPGSTYASLNGTSMATPHVAGAAALVKQKNPSWSNVQIRNHLKNTATSLGSTNLYGSGLVNAEAATR

SEQ ID NO: 59948 - protein, 269 aa, Unidentified
AQSVPWGISRVQAPASHNRGLTGSGVKVAVLDSGISTHPDLNIRGGASFVPGEPSTQDGNGHGTHVAGTIAALNNSIGVLGVAPSAELYAVKVLGASGGGAISSIAQGLEWAGANGMHVANLSLGNPSPSATLEQAVNSATSRGVLVVAASGNSGAGSISYPARYANAMAVGATDQNNNRASFSQYGAGLDIVAPGVNVQSTVPGSTYASLNGTSMATPHVAGAAVLVKQKNPSWSNVQIRNHLKNTATSLGSTNLYGSGLVNAEAATR

SEQ ID NO: 59949 - protein, 269 aa, Unidentified
AQSVPWGISRVQAPAAHRRGLTGRGVKVAVLDTGISTHPDLDIRGGASFVPGEPSTQDGNGHGTHVAGTIAALNNSIGVLGVAPSAELYAVKVLGASGGGAISSIAQGLEWAGNNGMHVANLSLGSPSPSATLEQAVNSATSRGVLVVAASGNSGAGSISYPARYANAMAVGATDQNNNRASFSQYGAGLDIVAPGVNVQSTYPGSTYASLNGTSMATPHVAGAAVLVKQKNPSWSNVRIRNHLKNTATSLGSTNLYGSGLVRAEAATR

SEQ ID NO: 59950 - protein, 269 aa, Unidentified
AQSVPWGISRVQAPAAHNRGLAGSGVKVAVLDTGISTHPDLNIRGGASFVPGEPSTQDGNGHGTHVAGTIAALNNNIGVLGVAPSAELYAVKVLAASGGGAISSIAQGLEWAGNNGMHVANLSLGAPSPSATLEQAVNSATSRGVLVVAASGNSGAGSISYPARYANAMAVGATDQNNNRASFSQYGAGLDIVAPGVNVQSTYPGSTYASLNGTSMATPHVAGAAVLVKQKNPSWSNVRIRNHLKNTATSLGSTNLYGSGLVNAEAATR

SEQ ID NO: 59951 - protein, 269 aa, Unidentified
AQSVPWGISRVQAPAAHNRRLWGSGVKVAVLDTGISTHPDLNIRGGASFVPGEPSTQDGNGHGTHVAGTIAALNNRIGVLGVAPSAELYAVKVLGASGGGAISSIAQGLEWAGANGMHVANLSLGSPSPSATLEQAVNSATSRGVLVVAASGNSGAGSISYPARYANAMAVGATDQNNNRASFSQYGAGLDIVAPGVNVQSTYPGSTYASLNGTSMATPHVAGAAVLVKQKNPSWSNVRIRNHLKNTATSLGSTNLYGSGLVNAEAATR

SEQ ID NO: 59952 - protein, 269 aa, Unidentified
AQSVPWGISRVQAPAAHNRGLTGFGVKVAVLDSGISTHPDLNIRGGASFVPGEPSTQDGNGHGTHVAGTIAALNNSIGVLGVAPSAELYAVKVLGASGGGAISSIAQGLEWAGLNGMHVANLSLGSPSPSATLEQAVNSATSRGVLVVAASGNSGAGSISYPARYANAMAVGATDQNNNRASFSQYGAGLDIVAPGVNVQSTVPGSAYASLNGTSMATPHVAGAAVLVKQKNPSWSNVQIRNHLKNTATSLGSTNLYGSGLVNAEAATR

SEQ ID NO: 59953 - protein, 269 aa, Unidentified
AQSVPWGISRVQAPASHNRGLTGSGVKVAVLDSGISTHPDLNIRGGASFVPGEPSTQDGNGHGTHVAGTIAALNNSIGVLGVAPSAELYAVKVLGASGGGAISSIAQGLEWAGANGMHVANLSLGSPSPSATLEQAVNSATSRGVLVVAASGNSGAGSISYPARYANAMAVGATDQNNNRASFSQYGAGLDIVAPGVNVQSTAPQSTYASLNGTSMATPHVAGAAVLVKQKNPSWSNVQIRNHLKNTATSLGSTNLYGSGLVNAEAATR

SEQ ID NO: 59954 - protein, 269 aa, Unidentified
AQSVPWGISRVQAPAAHNRGLAGFGVKVAVLDTGISTHPDLNIRGGASFVPGEPSTQDGNGHGTHVAGTIAALNNSIGVLGVAPSAELYAVKVLGASGGGAISSIAQGLEWAGLNGMHVANLSLGSPSPSATLEQAVNSATSRGVLVVAASGNSGAGSISYPARYANAMAVGATDQNNNRASFSQYGAGLDIVAPGVNVQSTVPGSAYASLNGTSMATPHVAGAAVLVKQKNPSWSNVQIRNHLKNTATSLGSTNLYGSGLVNAEAATR

SEQ ID NO: 59955 - protein, 269 aa, Unidentified
AQSVPWGISRVQAPAAHNRGLAGSGVKVAVLDTGISTHPDLNIRGGASFVPGEPSTQDGNGHGTHVAGTIAALDNSIGVLGVAPSAELYAVKVLGASGGGAISSIAQGLEWAGNNGMHVANLSLGSESPSATLEQAVNSATSRGVLVVAASGNSGADSISYPARYANAMAVGATDQNNNRADFSQYGAGLDIVAPGVNVQSTYPGSTYASLNGTSMATPHVAGAAVLVKQKNPSWSNVQIRNHLKNTATSLGSTNLYGSGLVNAEAATR

SEQ ID NO: 59956 - protein, 269 aa, Unidentified
AQSVPWGISRVQAPAAHNRGLAGSGVKVAVLDTGISTHPDLNIRGGASFVPGEPSTQDGNGHGTHVAGTIAALDNNIGVLGVAPSAELYAVKVLAASGGGAISSIAQGLEWAGNNGMHVANLSLGSPSPSATLEQAVNSATSRGVLVVAASGNSGAGSISYPARYANAMAVGATDQNNNRASFSQYGAGLDIVAPGVNVQSTYPGSTYASLNGTSMATPHVAGAAVLVKQKNPSWSNVRIRNHLKNTATSLGSTNLYGSGLVNAEAATR

SEQ ID NO: 59957 - protein, 269 aa, Unidentified
AQSVPWGISRVQAPAAHNRGLTGRGVKVAVLDTGISTHPDLNIRGGASFVPGEPSTQDGEGHGTHVAGTIAALNNGIGVLGVAPSAELYAVKVLGASGSGSVSSIAQGLEWAGNNSMHVANLSLGSESPSATLEQAVNSATSRGVLVVAASGNSGADSISYPARYANAMAVGATDQNNNRADFSQYGAGLDIVAPGVNVQSTYPGSTYASLNGTSMATPHVAGAAALVKQKNPSWSNVRIRDHLKNTATSLGSTNLYGSGLVNAEAATR

SEQ ID NO: 59958 - protein, 269 aa, Unidentified
AQSVPWGISRVQAPAAHNRGLAGSGVKVAVLDTGISTHPDLNIRGGASFVPGEPSTQDGNGHGTHVAGTIAALNNNIGVLGVAPSAELYAVKVLSASGNGAISSIAQGLEWAGNNGMHVANLSLGSPSPSATLEQAVNSATSRGVLVVAASGNSGAGSISYPARYANAMAVGATDQNNNRASFSQYGAGLDIVAPGVNVQSTYPGSTYASQNGTSMATPHVAGAAVLVKQKNPSWSNVRIRNHLKNTATSLGSTNLYGSGLVNAEAATR

SEQ ID NO: 59959 - protein, 269 aa, Unidentified
AQSVPWGISRVQAPAAHNRRLTGRGVKVAVLDTGISTHPDLNIRGGASFVPGEPSTQDGEGHGTHVAGTIAALNNDIGVLGVAPSAELYAVKVLGASGSGSVSSIAQGLEWAGNNSMHVANLSLGSESPSATLEQAVNSATSRGVLVVAASGNSGAGSISYPARYANAMAVGATDQNNNRASFSQYGAGLDIVAPGVNVQSTYPGSTYASLNGTSMATPHVAGAAALVKQKNPSWSNVRIRDRLKNTATSLGSTNLYGSGLVNAEAATR

SEQ ID NO: 59960 - protein, 269 aa, Unidentified
AQSVPWGISRVQAPAAHNRRLTGSGVKVAVLDTGISTHPDLNIRGGASFVPGEPSTQDGNGHGTHVAGTIAALNNSIGVLGVAPSAELYAVKVLGASGGGAISSIAQGLEWAGNNGMHVANLSLGSPSPSATLEQAVNSATSRGVLVVAASGNSGAGSISYPARYANAMAVGATDQNNNRASFSQYGAGLDIVAPGVNVQSTYPQSAYFSLNGTSMATPHVAGAAVLVKQKNPSWSNVRIRNHLKNTATSLGSTNLYGSGLVNAEAATR

SEQ ID NO: 59961 - protein, 269 aa, Unidentified
AQSVPWGISRVQAPAAHNRGLAGSGVKVAVLDTGISTHPDLNIRGGASFVPGEPSTQDGNGHGTHVAGTIAALNNSIGVLGVAPSAELYAVKVLGASGGGAISSIAQGLEWAGNNGMHVANLSLGSPSPSATLEQAVNSATSRGVLVVAASGNSGADSISYPARYANAMAVGATDQNNNRAEFSQYGAGLDIVAPGVNVQSTYPGSTYASLNGTSMATPHVAGAATLVKQKNPSWSNVTIRHHLKNTATSLGSTNLYGSGLVNAEAATR

SEQ ID NO: 59962 - protein, 269 aa, Unidentified
AQSVPWGISRVQAPAAHNRGLTGFGVKVAVLDTGISTHPDLNIRGGASFVPGEPSTQDGNGHGTHVAGTIAALNNSIGVLGVAPSAELYAVKVLGASGGGAISSIAQGLEWAGANGMHVANLSLGSPSPSATLEQAVNSATSRGVLVVAASGNSGAGSISYPARYANAMAVGATDQNNNRASFSQYGAGLDIVAPGVNVQSTAPQSAYASLNGTSMATPHVAGAAVLVKQKNPSWSNVQIRNHLKNTATSLGSTNLYGSGLVNAEAATR

SEQ ID NO: 59963 - protein, 269 aa, Unidentified
AQSVPWGISRVQAPAAHNRGLTGSGVKVAVLDTGISTHPDLNIRGGASFVPGEPSTQDGNGHGTHAAGTIAALDNSIGVLGVAPSAELYAVKVLGASGSGAISSIAQGLEWAGNNGMHVANLSLGSPSPSATLEQAVNSATSRGVLVVAASGNSGADSISYPARYANAMAVGATDQNNNRASFSQYGAGLDIVAPGVNVQSTYPGSTYASLNGTSMATPHVAGAAVLVKHKNPSWSNVRIRNHLKNTATSLGSTGLYGSGLVNAEAATR

SEQ ID NO: 59964 - protein, 269 aa, Unidentified
AQSVPWGISRVQAPAAHRRGLTGRGVKVAVLDTGISTHPDLNIRGGASFVPGEPSTQDGNGHGTHVAGTIAALDNSIGVLGVAPSAELYAVKVLGASGAGSVSSIAQGLEWAGNNGMHVANLSLGSPSPSATLEQAVNSATSRGVLVVAASGNSGAGSISYPARYANAMAVGATDQDNNRASFSQYGAGLDIVAPGVNVQSTYPQSAYFSLNGTSMATPHVAGAAALVKQKNPSWSNVQIRNRLKNTATSLGSTNLYGSGLVNAEAATR

SEQ ID NO: 59965 - protein, 269 aa, Unidentified
AQSVPWGISRVQAPAAHNRGLTGSGVKVAVLDTGISTHPDLNIRGGASFVPGEPSTQDGNGHGTHAAGTIAALDNSIGVLGVAPSAELYAVKVLGASGSGAISSIAQGLEWAGNNGMHVANLSLGSPSPSATLEQAVNSATSRGVLVVAASGNSGADSISYPARYANAMAVGATDQNNNRASFSQYGAGLDIVAPGVNVQSTYPGSTYASLNGTSMATPHVAGAAVLVKHKNPSWSNVRIRNHLKNTATSLGSTWLYGSGLVNAEAATR

SEQ ID NO: 59966 - protein, 269 aa, Unidentified
AQSVPWGISRVQAPAAHNRRLWGSGVKVAVLDTGISTHPDLNIRGGASFVPGEPSTQDGNGHGTHVAGTIAALNNSIGVLGVAPSAELYAVKVLGASGAGAISSIAQGLEWAGANGMHVANLSLGSPSPSATLEQAVNSATSRGVLVVAASGNSGAGSISYPARYANAMAVGATDQDNNRASFSQYGAGLDIVAPGVNVQSTYPGSTYASLNGTSMATPHVAGAAVLVKQKNPSWSNVRIRNHLKNTATSLGSTNLYGSGLVNAEAATR

SEQ ID NO: 59967 - protein, 269 aa, Unidentified
AQSVPWGISRVQAPAAHNRGLQGSGVKVAVLDTGISTHPDLNIRGGASFVPGEPSTQDGNGHGTHVAGTIAALNNSIGVLGVAPSAELYAVKVLGASGGGAISSIAQGLEWAGNNGMHVANLSLGSPSPSATLEQAVNSATSRGVLVVAASGNSGADSISYPARYANAMAVGATDQNNNRAEFSQYGAGLDIVAPGVNVQSTYPGSTYASLNGTSMATPHVAGAALLVKQKNPSWSNVRIRHHLKNTATSLGSTNLYGSGLVNAEAATR

SEQ ID NO: 59968 - protein, 269 aa, Unidentified
AQSVPWGISRVQAPAAHNRGLAGSGVKVAVLDTGISTHPDLNIRGGASFVPGEPSTQDGNGHGTHVAGTIAALNNSIGVLGVAPSAELYAVKVLGASGGGAISSIAQGLEWAGANVMHVANLSLGSPSPSATLEQAVNSATSRGVLVVAASGNSGAGSISYPARYANAMAVGATDQNNNRASFSQYGAGLDIVAPGVNVQSTAPGSAYASLNGTSMATPHVAGAAVLVKQKNPSWSNVQIRNHLKNTATSLGSTNLYGSGLVNAEAATR

SEQ ID NO: 59969 - protein, 269 aa, Unidentified
AQSVPWGISRVQAPAAHRRGLTGRGVKVAVLDTGISTHPDLNIRGGASFVPGEPSTQDGNGHGTHVAGTIAALDNSIGVLGVAPSAELYAVKVLGASGAGSVSSIAQGLEWAGANGMHVANLSLGSPSPSATLEQAVNSATSRGVLVVAASGNSGAGSISYPARYANAMAVGATDQNNNRASFSQYGAGLDLVAPGVNVQSTYPQSTYFSLNGTSMATPHVAGAAALVKQKNPSWSNVQIRNRLKNTATSLGSTNLYGSGLVNAEAATR

SEQ ID NO: 59970 - protein, 269 aa, Unidentified
AQSVPWGISRVQAPAAHNRGLAGSGVKVAVLDTGISTHPDLNIRGGASFVPGEPSTQDGNGHGTHVAGTIAALNNSIGVLGVAPSAELYAVKVLGASGGGAISSIAQGLEWAGNNGMHVANLSLGSPSPSATLEQAVNSATSRGVLVVAASGNSGADSISYPARYANAMAVGATDQNNNRADFSQYGAGLDIVAPGVNVQSTYPGSTYASLNGTSMATPHVAGAASLVKQKNPSWSNVVIREHLKNTATSLGSTNLYGSGLVNAEAATR

SEQ ID NO: 59971 - protein, 269 aa, Unidentified
AQSVPWGISRVQAPAAHNRGLAGGGAKVAVLDTGISTHPDLNIRGGASFVPGEPSTQDGNGHGTHVAGTIAALNNSIGVLGVAPSAELYAVKVLGASGGGAISSIAQGLEWAGNNGMHVANLSLGAPSPSATLEQAVNSATSRGVLVVAASGNSGAGSISYPARYANAMAVGATDQNNNRASFSQYGAGLDIVAPGVNVQSTYPGSTYASLNGTSMATPHVAGAAVLVKQKNPSWSNVRIRNHLKNTATSLGSTNLYGSGLVNAEAATR

SEQ ID NO: 59972 - protein, 269 aa, Unidentified
AQSVPWGISRVQAPAAHNRRLTGSGVKVAVLDTGISTHPDLRITGGASFVPGEPSTQDGNGHGTHVAGTIAALNNRIGVLGVAPSAELYAVKVLGASGGGAISSIAQGLEWAGNNGMHVANLSLGSPSPSATLEQAVNSATSRGVLVVAASGNSGAGSISYPARYANAMAVGATDQNNNRASFSQYGAGLDIVAPGVNVQSTYPGSTYASLNGTSMATPHVAGAAVLVKQKNPSWSNVRIRNHLKNTATSLGSTNLYGSGLVNAEAATR

SEQ ID NO: 59973 - protein, 269 aa, Unidentified
AQSVPWGISRVQAPASHNRGLTGFGVKVAVLDTGISTHPDLNIRGGASFVPGEPSTQDGNGHGTHVAGTIAALNNSIGVLGVAPSAELYAVKVLGASGGGAISSIAQGLEWAGLNGMHVANLSLGNPSPSATLEQAVNSATSRGVLVVAASGNSGAGSISYPARYANAMAVGATDQNNNRASFSQYGAGLDIVAPGVNVQSTVPGSTYASLNGTSMATPHVAGAAVLVKQKNPSWSNVQIRNHLKNTATSLGSTNLYGSGLVNAEAATR

SEQ ID NO: 59974 - protein, 269 aa, Unidentified
AQSVPWGISRVQAPAAHRRGLTGRGVKVAVLDTGISTHPDLNIRGGASFVPGEPSTQDGNGHGTHVAGTIAALDNSIGVLGVAPSAELYAVKVLGASGAGSVSSIAQGLEWAGANGMHVANLSLGSPSPSATLEQAVNSATSRGVLVVAASGNSGAGSISYPARYANAMAVGATDQDNNRASFSQYGAGLDIVAPGVNVQSTYPQSTYFSLNGTSMATPHVAGAAALVKQKNPSWSNVQIRNRLKNTATSLGSTNLYGSGLVNAEAATR

SEQ ID NO: 59975 - protein, 269 aa, Unidentified
AQSVPWGISRVQAPAAHNRGLAGSGVKVAVLDTGISTHPDLNIRGGASFVPGEPSTQDGNGHGTHVAGTIAALNNSIGVLGVAPSAELYAVKVLGASGGGAISSIAQGLEWAGNNGMHVANLSLGSPSPSATLEQAVNSATSRGVLVVAASGNSGADSISYPARYANAMAVGATDQNNNRAEFSQYGAGLDIVAPGVNVQSTYPGSTYASLNGTSMATPHVAGAASLVKQKNPSWSNVVIRHHLKNTATSLGSTNLYGSGLVNAEAATR

SEQ ID NO: 59976 - protein, 269 aa, Unidentified
AQSVPWGISRVQAPAAHNRGLTGSGVKVAVLDTGISTHPDLNIRGGASFVPGEPSTQDGNGHGTHAAGTIAALDNSIGVLGVAPSAELYAVKVLGASGSGAISSIAQGLEWAGNNGMHVANLSLGSPSPSATLEQAVNSATSRGVLVVAASGNSGADSISYPARYVNAMAVGATDQNNNRASFSQYGAGLDIVAPGVDVQSTYPGSTYASLNGTSMATPHVAGAAALVKHKNPSWSNVRIRNHLKNTATSLGSTNLYGSGLVNAEAATR

SEQ ID NO: 59977 - protein, 269 aa, Unidentified
AQSVPWGISRVQAPAAHRRRLTGRGVKVAVLDTGISTHPDLNIRGGASFVPGEPSTQDGNGHGTHVAGTIAALDNSIGVLGVAPSAELYAVKVLGASGSGSVSSIAQGLEWAGANGMHVANLSLGSPSPSATLEQAVNSATSRGVLVVAASGNSGAGSISYPARYANAMAVGATDQDNNRASFSQYGAGLDIVAPGVNVQSTYPQSTYFSLNGTSMATPHVAGAAALVKQKNPSWSNVQIRNRLKNTATSLGSTNLYGSGLVNAEAATR

SEQ ID NO: 59978 - protein, 269 aa, Unidentified
AQTIPWGISRVQAPAAHNRGLTGSGVKVAVLDTGISTHPDLNIRGGASFVPGEPSTQDGNGHGTHVAGTIAALNNSIGVLGVAPSAELYAVKVLGADGEGAISSIAQGLEWAGNNGMHVANLSLGSPSPSATLEQAVNSATSRGVLVVAASGNSGASSISYPARYANAMAVGATDQNNNRACFSQYGAGLDIVAPGVNIQSTYPGSTYASLNGTSMATPHVAGAAALVKQKNPSWSNVQIRNHLKNTATSLGSTNLYGSGLVNAEAATR

SEQ ID NO: 59979 - protein, 269 aa, Unidentified
AQSVPWGISRVQAPAAHNRRLWGSGVKVAVLDTGISTHPDLNIRGGASFVPGEPSTQDGNGHGTHVAGTIAALNNSIGVLGVAPSAELYAVKVLGASGGGAISSIAQGLEWAGANGMHVANLSLGSPSPSATLEQAVNSATSRGVLVVAASGNSGAGSISYPARYANAMAVGATDQDNNRASFSQYGAGLDIVAPGVNVQSTYPGSTYASLNGTSMATPHVAGAAVLVKQKNPSWSNVRIRNHLKNTATSLGSTNLYGSGLVNAEAATR

SEQ ID NO: 59980 - protein, 269 aa, Unidentified
AQSVPWGISRVQAPAAHRRRLTGSGVKVAVLDTGISTHPDLDIRGGASFVPGEPSTQDGNGHGTHVAGTIAALNNSIGVLGVAPSAELYAVKVLGASGGGAISSIAQGLEWAGNNGMHVANLSLGSPSPSATLEQAVNSATSRGVLVVAASGNSGAGSISYPARYANAMAVGATDQNNNRASFSQYGAGLDIVAPGVNVQSTYPGSTYASENGTSMATPHVAGAAVLVKQKNPSWSNVRIRNHLKNTATSLGSTNLYGSGLVNAEAATR

SEQ ID NO: 59981 - protein, 269 aa, Unidentified
AQSVPWGISRVQAPAAHNRKLTGGGVKVAVLDTGISTHPDLNIRGGASFVPGEPSTQDGEGHGTHVAGTIAALNNNIGVLGVAPSAELYAVKVLGASGNGSVSSIAQGLEWAGLNGMHVANLSLGAPSPSATLEQAVNSATSRGVLVVAASGNSGAGSISYPARYANAMAVGATDQNNNRADFSQYGAGLDIVAPGVNVQSTYPGSTYASQNGTSMATPHVAGAAALVKQKNPSWSNVQIRNHLKNTATSLGSTNLYGSGLVNAEAATR

SEQ ID NO: 59982 - protein, 269 aa, Unidentified
AQSVPWGISRVQAPAAHNRRLTGRGVKVAVLDTGISTHPDLNIRGGASFVPGEPSTQDGNGHGTHVAGTIAALNNDIGVLGVAPSAELYAVKVLGASGSGSVSSIAQGLEWAGNNSMHVANLSLGSESPSATLEQAVNSATSRGVLVVAASGNSGADSISYPARYANAMAVGATDQNNNRASFSQYGAGLDIVAPGVNVQSTYPGSTYASLNGTSMATPHVAGAAALVKQENPSWSNVQIRDRLKNTATSLGSTNLYGSGLVNAEAATR

SEQ ID NO: 59983 - protein, 269 aa, Unidentified
AQVVPWGISRVQAPAAHNRGLTGSGVKVAVLDTGISTHPDLNIRGGASFVPGEPSTQDGNGHGTHVAGTIAALDNSIGVLGVAPDAELYAVKVLGASGSGSVSSIAQGLEWAGNNRMHVANLSLGLQAPSATLEQAVNSATSRGVLVVAASGNSGAGSISYPARYANAMAVGATDQNNNRASFSQYGAGLDIVAPGVNVQSTYIGSTYASKNGTSMATPHVAGAAALVKQKNPSWSNVQIRNHLKNTATSLGSTNLYGSGLVNAEAATR

SEQ ID NO: 59984 - protein, 269 aa, Unidentified
AQSVPWGISRVQAPAAHRRGLWGRGVKVAVLDTGISTHPDLNIRGGASFVPGEPSTQDGNGHGTHVAGTIAALDNSIGVLGVAPSAELYAVKVLGASGAGSVSSIAQGLEWAGANGMHVANLSLGSPSPSATLEQAVNSATSRGVLVVAASGNSGAGSISYPARYANAMAVGATDQNNNRASFSQYGAGLDIVAPGVNVQSTYPGSAYFSLNGTSMATPHVAGAAALVKQKNPSWSNVQIRNRLKNTATSLGSTNLYGSGLVNAEAATR

SEQ ID NO: 59985 - protein, 269 aa, Unidentified
AQSVPWGISRVQAPAAHNRGLTGSGVKVAVLDTGISTHPDLNIRGGASFVPGEPSTQDGNGHGTHAAGTIAALNNSIGVLGVAPSAELYAVKVLGASGSGAISSIAQGLEWAGNNGMHVANLSLGSPSPSATLEQAVNSATSRGVLVVAASGNSGADSISYPARYANAMAVGATDQNNDRASFSQYGAGLDIVAPGVNVQSTYPGSTYASLNGTSMATPHVAGAAVLVKHKNPSWSNVRIRNHLKKTATSLGSTNLYGSGLVNAEAATR

SEQ ID NO: 59986 - protein, 269 aa, Unidentified
AQSVPWGISRVQAPAAHRRRLWGRGVKVAVLDTGISTHPDLNIRGGASFVPGEPSTQDGNGHGTHVAGTIAALDNSIGVLGVAPSAELYAVKVLGASGSGSVSSIAQGLEWAGANGMHVANLSLGSPSPSATLEQAVNSATSRGVLVVAASGNSGAGSISYPARYANAMAVGATDQNNNRASFSQYGAGLDIVAPGVNVQSTYPQSAYASLNGTSMATPHVAGAAALVKQKNPSWSNVQIRNRLKNTATSLGSTNLYGSGLVNAEAATR

SEQ ID NO: 59987 - protein, 269 aa, Unidentified
AQSVPWGISRVQAPAAHNRGLAGRGVKVAVLDTGISTHPDLNIRGGASFVPGEPSTQDGNGHGTHVAGTIAALDNSIGVLGVAPSAELYAVKVLGASGGGAISSIAQGLEWAGNNGMHVANLSLGSPSPSATLEQAVNSATSRGVLVVAASGNSGAGSISYPARYANAMAVGATDQNNNRASFSQYGAGLDIVAPGVNVQSTYPGSTYASLNGTSMATPHVAGAAVLVKQKNPSWSNVRIRNHLKNTATSLGSTNLYGSGLVNVEAATR

SEQ ID NO: 59988 - protein, 269 aa, Unidentified
AQSVPWGISRVQAPASHNRGLTGFGVKVAVLDTGISTHPDLNIRGGASFVPGEPSTQDGNGHGTHVAGTIAALNNSIGVLGVAPSAELYAVKVLGASGGGAISSIAQGLEWAGLNGMHVANLSLGSPSPSATLEQAVNSATSRGVLVVAASGNSGAGSISYPARYANAMAVGATDQNNNRASFSQYGAGLDIVAPGVNVQSTAPGSAYASLNGTSMATPHVAGAAVLVKQKNPSWSNVQIRNHLKNTATSLGSTNLYGSGLVNAEAATR

SEQ ID NO: 59989 - protein, 269 aa, Unidentified
AQSVPWGISRVQAPAAHNRGLTGSGVKVAVLDTGISTHPDLNIRGGASFVPGEPSTQDGNGHGTHVAGTIAALNNSIGVLGVAPSAELYAVKVLGASGGGAISSIAQGLEWAGNNGMHVANLSLGSPSPSATLEQAVNSATSRGVLVVAASGNSGEESISYPARYANAMAVGATDQNNNRASFSQYGAGLDIVAPGVNVQSTYPGSTYASLNGTSMATPHVAGAAVLVKQKNPSWSNVRIRDRLKNTATSLGSTNLYGSGLVNAEAATR

SEQ ID NO: 59990 - protein, 269 aa, Unidentified
AQSVPWGISRVQAPAAHNRGLAGRGVKVAVLDTGISTHPDLNIRGGASFVPGEPSTQDGNGHGTHVAGTIAALNNSIGVLGVAPSAELYAVKVLGASGSGAISSIAQGLEWAGNNGMHVANLSLGSPSPSATLEQAVNSATSRGVLVVAASGNSGADSISYPARYANAMAVGATDQNNNRADFSQYGAGLDIVAPGVNVQSTYPGSTYASDNGTSMATPHVAGAAVLVKQKNPSWSNVQIRDHLKNTATSLGSTNLYGSGLVNAEAATR

SEQ ID NO: 59991 - protein, 269 aa, Unidentified
AQSVPWGISRVQAPAAHNRGLTGSGVKVAVLDTGISTHPDLNIRGGASFVPGEPSTQDGNGHGTHVAGTIAALNNSIGVLGVAPSAELYAVKVLGASGSGAISSIAQGLEWAGNNGMHVANLSLGSPGPSATLEQAVNSATSRGVLVVAASGNSGADSISYPARYANAMAVGATDQNNNRASFSQYGAGLDIVAPGVNVQSTYPGSTYASLNGTSMATPHVAGAAVLVKHKNPSWSNVRIRDHLKKTATSLGSTNLYGSGLVNAEAATR

SEQ ID NO: 59992 - protein, 269 aa, Unidentified
AQSVPWGISRVQAPAAHRRGLTGSGVKVAVLDTGISTHPDLDIRGGASFVPGEPSTQDGNGHGTHVAGTIAALDNSIGVLGVAPSAELYAVKVLGASGGGAISSIAQGLEWAGNNGMHVANLSLGSPSPSATLEQAVNSATSRGVLVVAASGNSGAGSISYPARYANAMAVGATDQNNNRASFSQYGAGLDIVAPGVNVQSTYPGSTYASLNGTSMATPHVAGAAVLVKQKNPSWSNVRIRNRLKNTATSLGSTNLYGSGLVNAEAATR

SEQ ID NO: 59993 - protein, 269 aa, Unidentified
AQSVPWGISRVQAPAAHNRGLTGSGVKVAVLDTGISTHPDLNIRGGASFVPGEPSTQDGNGHGTHVAGTIAALNNSIGVLGVAPSAELYAVKVLGADGRGAISSIAQGLEWAGNNGMHVANLSLGSPSPSATLEQAVNSATSRGVLVVAASGNDGASSISYPARYANAMAVGATDQNNNRASFSQYGAGLDIVAPGVNVLSTWPGSTYASLNGTSMATPHVAGAAALVKQKNPSWSNVQIRNHLKNTATSLGSTNEYGSGLVNAEAATR

SEQ ID NO: 59994 - protein, 269 aa, Unidentified
AQSVPWGISRVQAPAAHRRGLTGRGVKVAVLDTGISTHPDLNIRGGASFVPGEPSTQDGNGHGTHVAGTIAALDNSIGVLGVAPSAELYAVKVLGASGAGSVSSIAQGLEWAGNNGMHVANLSLGSPSPSATLEQAVNSATSRGVLVVAASGNSGAGSISYPARYANAMAVGATDQDNNRASFSQYGAGLDLVAPGVNVQSTYPQSAYASLNGTSMATPHVAGAAALVKQKNPSWSNVQIRNRLKNTATSLGSTNLYGSGLVNAEAATR

SEQ ID NO: 59995 - protein, 269 aa, Unidentified
AQSVPWGISRVQAPAAHNRRLWGSGVKVAVLDTGISTHPDLNIRGGASFVPGEPSTQDGNGHGTHVAGTIAALNNRIGVLGVAPSAELYAVKVLGASGAGAISSIAQGLEWAGNNGMHVANLSLGSPSPSATLEQAVNSATSRGVLVVAASGNSGAGSISYPARYANAMAVGATDQNNNRASFSQYGAGLDLVAPGVNVQSTYPGSTYASLNGTSMATPHVAGAAVLVKQKNPSWSNVRIRNHLKNTATSLGSTNLYGSGLVNAEAATR

SEQ ID NO: 59996 - protein, 269 aa, Unidentified
AQSVPWGISRVQAPAAHNRGLTGSGVKVAVLDTGISTHPDLNIRGGASFVPGEPSTQDGNGHGTHVAGTIAALNNSIGVLGVAPSAELYAVKVLGASGAGALSSIAQGLEWAGNNGMHVANLSLGSPSPSATLEQAVNSATSRGVLVVAASGNSGEGSISYPARYANAMAVGATDQNNNRADFSQYGAGLDIVAPGVNVQSTYPGSTYASLNGTSMATPHVAGAAVLVKQKNPSWSNVRIRDRLKNTATSLGSTNLYGSGLVNAEAATR

SEQ ID NO: 59997 - protein, 269 aa, Unidentified
AQSVPWGISRVQAPASHNRGLTGSGVKVAVLDTGISTHPDLNIRGGASFVPGEPSTQDGNGHGTHVAGTIAALNNSIGVLGVAPSAELYAVKVLGASGGGAISSIAQGLEWAGLNGMHVANLSLGSPSPSATLEQAVNSATSRGVLVVAASGNSGAGSISYPARYANAMAVGATDQNNNRASFSQYGAGLDIVAPGVNVQSTVPQSAYASLNGTSMATPHVAGAAVLVKQKNPSWSNVQIRNHLKNTATSLGSTNLYGSGLVNAEAATR

SEQ ID NO: 59998 - protein, 269 aa, Unidentified
AQSVPWGISRVQAPAAHNRGLTGSGVKVAVLDTGISTHPDLNIRGGASFVPGEPSTQDGNGHGTHVAGTIAALNNSIGVLGVAPSAELYAVKVLGASGSGAISSIAQGLEWAGNNGMHVANLSLGSPSPSATLEQAVNSATSRGVLVVAASGNSGADSISYPARYANAMAVGATDQNNNRASFSQYGAGLDIVAPGVNVQSTYPGSTYASENGTSMATPHVAGAAVLVKHKNPSWSNVRIRDHLKKTATSLGSTNLYGSGLVNAEAATR

SEQ ID NO: 59999 - protein, 269 aa, Unidentified
AQSVPWGISRVQAPAAHNRGLQGSGVKVAVLDTGISTHPDLNIRGGASFVPGEPSTQDGNGHGTHVAGTIAALNNSIGVLGVAPSAELYAVKVLGASGGGAISSIAQGLEWAGNNGMHVANLSLGSPSPSATLEQAVNSATSRGVLVVAASGNSGADSISYPARYANAMAVGATDQNNNRAEFSQYGAGLDIVAPGVNVQSTYPGSTYASLNGTSMATPHVAGAALLVKQKNPSWSNVVIREHLKNTATSLGSTNLYGSGLVNAEAATR

SEQ ID NO: 60000 - protein, 269 aa, Unidentified
AQSVPWGISRVQAPAAHRRGLTGRGVKVAVLDTGISTHPDLNIRGGASFVPGEPSTQDGNGHGTHVAGTIAALDNNIGVLGVAPSAELYAVKVLGASGSGSVSSIAQGLEWAGNNGMHVANLSLGLQAPSATLEQAVNSATSRGVLVVAASGNSGAGSISYPARYANAMAVGATDQNNNRASFSQYGAGLDIVAPGVNVLSTYPGSTYASLNGTSMATPHVAGAAALVKQKNPSWSNVQIRNRLKNTATSLGSTNLYGSGLVNAEAATR

SEQ ID NO: 60001 - protein, 269 aa, Unidentified
AQSVPWGISRVQAPAAHNRGLTGSGVKVAVLDTGISTHPDLNIRGGASFVPGEPSTQDGNGHGTHVAGTIAALDNGIGVLGVAPDAELYAVKVLGASGSGSVSSIAQGLEWAGNNRMHVANLSLGSPSPSATLEQAVNSATSRGVLVVAASGNSGAGSISYPARYANAMAVGATDQNNNRASFSQYGAGLDIVAPGVNVQSTYIGSTYVSKNGTSMATPHVAGAAALVKQKNPSWSNVQIRNHLKNTATSLGSTIQYGSGLVNAEAATR

SEQ ID NO: 60002 - protein, 269 aa, Unidentified
AQSVPWGISRVQAPAAHNRGLTGSGVKVAVLDTGISTHPDLNIRGGASFVPGEPSTQDGNGHGTHAAGTIAALNNSIGVLGVAPSAELYAVKVLGASGSGAISSIAQGLEWAGNNGMHVANLSLGSPSPSATLEQAVNSATSRGVLVVAASGNSGADSISYPARYANAMAVGATDQNNNRASFSQYGAGLDIVAPGVNVQSTYPGSTYASLNGTSMATPHVAGAAVLVKHKNPSWSNVRIRGHLKKTATSLGSTNLYGSGLVNAEAATR

SEQ ID NO: 60003 - protein, 269 aa, Unidentified
AQSVPWGISRVQAPAAHNRGLTGRGVKVAVLDTGISTHPDLNIRGGASFVPGEPSTQDGEGHGTHVAGTIAALNNSIGVLGVAPSAELYAVKVLGASGAGAISSIAQGLEWAGNNGMHVANLSLGSPSPSATLEQAVNSATSRGVLVVAASGNSGAGSISYPARYANAMAVGATDQNNNRADFSQYGAGLDIVAPGVNVQSTYIGSTYASLNGTSMATPHVAGAAVLVKQKNPSWSNVRIRNHLKNTATSLGSTNLYGSGLVNAEAATR

SEQ ID NO: 60004 - protein, 269 aa, Unidentified
AQSVPWGISRVQAPAAHNRGLTGSGVKVAVLDTGISTHPDLDITGGASFVPGEPSTQDGNGHGTHVAGTIAALNNRIGVLGVAPSAELYAVKVLGASGGGAISSIAQGLEWAGNNGMHVANLSLGSPSPSATLEQAVNSATSRGVLVVAASGNSGAGSISYPARYANAMAVGATDQNNNRASFSQYGAGLDIVAPGVNVQSTYPGSTYASLNGTSMATPHVAGAAVLVKQKNPSWSNVRIRNHLKNTATSLGSTNLYGSGLVRAEAATR

SEQ ID NO: 60005 - protein, 269 aa, Unidentified
AQSVPWGISRVQAPAAHNRGLQGSGVKVAVLDTGISTHPDLNIRGGASFVPGEPSTQDGNGHGTHVAGTIAALNNSIGVLGVAPSAELYAVKVLGASGGGAISSIAQGLEWAGNNGMHVANLSLGSPSPSATLEQAVNSATSRGVLVVAASGNSGADSISYPARYANAMAVGATDQNNNRAEFSQYGAGLDIVAPGVNVQSTYPGSTYASLNGTSMATPHVAGAATLVKQKNPSWSNVTIREHLKNTATSLGSTNLYGSGLVNAEAATR

SEQ ID NO: 60006 - protein, 269 aa, Unidentified
AQSVPWGISRVQAPAAHNRGLAGGGVKVAVLDTGISTHPDLNIRGGASFVPGEPSTQDGNGHGTHVAGTIAALDNSIGVLGVAPSAELYAVKVLGASGNGAISSIAQGLEWAGNNGMHVANLSLGAPSPSATLEQAVNSATSRGVLVVAASGNSGAGSISYPARYANAMAVGATDQNNNRASFSQYGAGLDIVAPGVNVQSTYPGSTYASLNGTSMATPHVAGAAVLVKQKNPSWSNVRIRNHLKNTATSLGSTNLYGSGLVNAEAATR

SEQ ID NO: 60007 - protein, 269 aa, Unidentified
AQSVPWGISRVQAPAAHNRGLAGSGVKVAVLDTGISTHPDLNIRGGASFVPGEPSTQDGNGHGTHVAGTIAALNNSIGVLGVAPSAELYAVKVLAASGGGAISSIAQGLEWAGNNGMQVANLSLGAPSPSATLEQAVNSATSRGVLVVAASGNSGAGSISYPARYANAMAVGATDQNNNRASFSQYGAGLDIVAPGVNVQSTYPGSTYASLNGTSMATPHVAGAAVLVKQKNPSWSNVRIRNHLKNTATSLGSTNLYGSGLVNAEAATR

SEQ ID NO: 60008 - protein, 269 aa, Unidentified
AQSVPWGISRVQAPAAHNRGLRGGGVKVAVLDTGISTHPDLNIRGGASFVPGEPSTQDGNGHGTHVAGTIAALNNNIGVLGVAPSAELYAVKVLAASGQGAISSIAQGLEWAGNNGMHVANLSLGSPSPSATLEQAVNSATSRGVLVVAASGNSGAGSISYPARYANAMAVGATDQNNNRASFSQYGAGLDIVAPGVNVQSTYPGSTYASLNGTSMATPHVAGAAVLVKQKNPSWSNVRIRNHLKNTATSLGSTNLYGSGLVNAEAATR

SEQ ID NO: 60009 - protein, 269 aa, Unidentified
AQSVPWGISRVQAPAAHRRGLTGRGVKVAVLDTGISTHPDLNIRGGASFVPGEPSTQDGNGHGTHVAGTIAALDNSIGVLGVAPSAELYAVKVLGASGAGSVSSIAQGLEWAGNNGMHVANLSLGSPSPSATLEQAVNSATSRGVLVVAASGNSGAGSISYPARYANAMAVGATDQDNNRASFSQYGAGLDLVAPGVNVQSTYPGSAYFSLNGTSMATPHVAGAAALVKQKNPSWSNVQIRNRLKNTATSLGSTNLYGSGLVNAEAATR

SEQ ID NO: 60010 - protein, 269 aa, Unidentified
AQSVPWGISRVQAPAAHNRKLTGGGVKVAVLDTGISTHPDLNIRGGASFVPGEPSTQDGEGHGTHVAGTIAALNNNIGVLGVAPSAELYAVKVLSASGQGSVSSIANGLEWAGLNGMHVANLSLGAPSPSATLEQAVNSATSRGVLVVAASGNSGAGSISYPARYANAMAVGATDQNNNRASFSQYGAGLDIVAPGVNVQSTYPGSTYASQNGTSSATPHVAGAAALVKQKNPSWSNVQIRNHLKNTATSLGSTNLYGSGLVNAEAATR

SEQ ID NO: 60011 - protein, 269 aa, Unidentified
AQSVPWGISRVQAPAAHNRRLWGSGVKVAVLDTGISTHPDLNIRGGASFVPGEPSTQDGNGHGTHVAGTIAALNNSIGVLGVAPSAELYAVKVLGASGAGSVSSIAQGLEWAGANGMHVANLSLGSPSPSATLEQAVNSATSRGVLVVAASGNSGAGSISYPARYANAMAVGATDQNNNRASFSQYGAGLDLVAPGVNVQSTYPQSAYFSLNGTSMATPHVAGAAALVKQKNPSWSNVQIRNRLKNTATSLGSTNLYGSGLVNAEAATR

SEQ ID NO: 60012 - protein, 269 aa, Unidentified
AQSVPWGISRVQAPAAHRRRLTGRGVKVAVLDTGISTHPDLNIRGGASFVPGEPSTQDGNGHGTHVAGTIAALDNSIGVLGVAPSAELYAVKVLGASGAGSVSSIAQGLEWAGANGMHVANLSLGSPSPSATLEQAVNSATSRGVLVVAASGNSGAGSISYPARYANAMAVGATDQDNNRASFSQYGAGLDLVAPGVNVQSTYPGSTYASLNGTSMATPHVAGAAALVKQKNPSWSNVQIRNRLKNTATSLGSTNLYGSGLVNAEAATR

SEQ ID NO: 60013 - protein, 269 aa, Unidentified
AQSVPWGISRVQAPAAHRRGLWGRGVKVAVLDTGISTHPDLNIRGGASFVPGEPSTQDGNGHGTHVAGTIAALDNSIGVLGVAPSAELYAVKVLGASGAGSVSSIAQGLEWAGANGMHVANLSLGSPSPSATLEQAVNSATSRGVLVVAASGNSGAGSISYPARYANAMAVGATDQNNNRASFSQYGAGLDLVAPGVNVQSTYPQSTYASLNGTSMATPHVAGAAALVKQKNPSWSNVQIRNRLKNTATSLGSTNLYGSGLVNAEAATR

SEQ ID NO: 60014 - protein, 269 aa, Unidentified
AQSVPWGISRVQAPAAHNRGLQGSGVKVAVLDTGISTHPDLNIRGGASFVPGEPSTQDGNGHGTHVAGTIAALNNSIGVLGVAPSAELYAVKVLGASGGGAISSIAQGLEWAGNNGMHVANLSLGSPSPSATLEQAVNSATSRGVLVVAASGNSGADSISYPARYANAMAVGATDQNNNRADFSQYGAGLDIVAPGVNVQSTYPGSTYASLNGTSMATPHVAGAATLVKQKNPSWSNVVIREHLKNTATSLGSTNLYGSGLVNAEAATR

SEQ ID NO: 60015 - protein, 269 aa, Unidentified
AQSVPWGISRVQAPAAHNRGLRGSGVKVAVLDTGISTHPDLNIRGGASFVPGEPSTQDGNGHGTHVAGTIAALNNSIGVLGVAPSAELYAVKVLGASGNGAISSIANGLEWAGLNGMHVANLSLGAPSPSATLEQAVNSATSRGVLVVAASGNSGAGSISYPARYANAMAVGATDQNNNRASFSQYGAGLDIVAPGVNVQSTYPGSTYASLNGTSMATPHVAGAAVLVKQKNPSWSNVRIRNHLKNTATSLGSTNLYGSGLVNAEAATR

SEQ ID NO: 60016 - protein, 269 aa, Unidentified
AQSVPWGISRVQAPAAHNRRLTGRGVKVAVLDTGISTHPDLNITGGASFVPGEPSTQDGNGHGTHVAGTIAALDNSIGVLGVAPSAELYAVKVLGASGGGAISSIAQGLEWAGNNGMHVANLSLGSPSPSATLEQAVNSATSRGVLVVAASGNSGAGSISYPARYANAMAVGATDQNNNRASFSQYGAGLDIVAPGVNVQSTYPGSTYASLNGTSMATPHVAGAAVLVKQKNPSWSNVRIRNHLKNTATSLGSTNLYGSGLVNAEAATR

SEQ ID NO: 60017 - protein, 269 aa, Unidentified
AQSVPWGISRVQAPAAHNRGLAGSGVKVAVLDTGISTHPDLNIRGGASFVPGEPSTQDGNGHGTHVAGTIAALNNNIGVLGVAPSAELYAVKVLAASGQGAISSIANGLEWAGNNGMHVANLSLGSPSPSATLEQAVNSATSRGVLVVAASGNSGAGSISYPARYANAMAVGATDQNNNRASFSQYGAGLDIVAPGVNVQSTYPGSTYASLNGTSMATPHVAGAAVLVKQKNPSWSNVRIRNHLKNTATSLGSTNLYGSGLVNAEAATR

SEQ ID NO: 60018 - protein, 269 aa, Unidentified
AQSVPWGISRVQAPAAHNRGLAGGGVKVAVLDTGISTHPDLNIRGGASFVPGEPSTQDGNGHGTHVAGTIAALNNSIGVLGVAPSAELYAVKVLAASGNGAISSIAGGLEWAGNNGMHVANLSLGSPSPSATLEQAVNSATSRGVLVVAASGNSGAGSISYPARYANAMAVGATDQNNNRASFSQYGAGLDIVAPGVNVQSTYPGSTYASLNGTSMATPHVAGAAVLVKQKNPSWSNVRIRNHLKNTATSLGSTNLYGSGLVNAEAATR

SEQ ID NO: 60019 - protein, 269 aa, Unidentified
AQSVPWGISRVQAPAAHNRGLRGSGVKVAVLDTGISTHPDLNIRGGASFVPGEPSTQDGNGHGTHVAGTIAALNNNIGVLGVAPSAELYAVKVLSASGGGAISSIAQGLEWAGNNGMHVANLSLGAPSPSATLEQAVNSATSRGVLVVAASGNSGAGSISYPARYANAMAVGATDQNNNRASFSQYGAGLDIVAPGVNVQSTYPGSTYASLNGTSMATPHVAGAAVLVKQKNPSWSNVRIRNHLKNTATSLGSTNLYGSGLVNAEAATR

SEQ ID NO: 60020 - protein, 269 aa, Unidentified
AQSVPWGISRVQAPAAHNRGLAGSGVKVAVLDTGISTHPDLNIRGGASFVPGEPSTQDGNGHGTHVAGTIAALNNSIGVLGVAPSAELYAVKVLGASGGGAISSIAQGLEWAGNNGMHVANLSLGSPSPSATLEQAVNSATSRGVLVVAASGNSGAGSISYPARYANAMAVGATDQNNNRADFSQYGAGLDIVAPGVNVQSTYPGSTYASLNGTSMATPHVAGAAVLVKQKNPSWSNVRIRDHLKNTATSLGSTNLYGSGLVNAFAATR

SEQ ID NO: 60021 - protein, 269 aa, Unidentified
AQSVPWGISRVQAPAAHRRGLTGRGVKVAVLDTGISTHPDLNIRGGASFVPGEPSTQDGNGHGTHVAGTIAALDNSIGVLGVAPSAELYAVKVLGASGAGSVSSIAQGLEWAGANGMHVANLSLGSPSPSATLEQAVNSATSRGVLVVAASGNSGAGSISYPARYANAMAVGATDQNNNRASFSQYGAGLDLVAPGVNVQSTYPQSAYASLNGTSMATPHVAGAAALVKQKNPSWSNVQIRNRLKNTATSLGSTNLYGSGLVNAEAATR

SEQ ID NO: 60022 - protein, 269 aa, Unidentified
AQSVPWGISRVQAPAAHNRGLAGGGVKVAVLDTGISTHPDLNIRGGASFVPGEPSTQDGNGHGTHVAGTIAALDNNIGVLGVAPSAELYAVKVLGASGQGAISSIAQGLEWAGNNGMHVANLSLGSPSPSATLEQAVNSATSRGVLVVAASGNSGAGSISYPARYANAMAVGATDQNNNRASFSQYGAGLDIVAPGVNVQSTYPGSTYASLNGTSMATPHVAGAAVLVKQKNPSWSNVRIRNHLKNTATSLGSTNLYGSGLVNAEAATR

SEQ ID NO: 60023 - protein, 269 aa, Unidentified
AQSVPWGISRVQAPAAHRRGLWGRGVKVAVLDTGISTHPDLNIRGGASFVPGEPSTQDGNGHGTHVAGTIAALDNSIGVLGVAPSAELYAVKVLGASGSGSVSSIAQGLEWAGANGMHVANLSLGSPSPSATLEQAVNSATSRGVLVVAASGNSGAGSISYPARYANAMAVGATDQDNNRASFSQYGAGLDIVAPGVNVQSTYPQSAYASLNGTSMATPHVAGAAALVKQKNPSWSNVQIRNRLKNTATSLGSTNLYGSGLVNAEAATR

SEQ ID NO: 60024 - protein, 269 aa, Unidentified
AQSVPWGISRVQAPAAHNRGLTGSGVKVAVLDTGISTHPDLNIRGGASFVPGEPSTQDGNGHGTHAAGTIAALDNSIGVLGVAPSAELYAVKVLGASGSGAISSIAQGLEWVGNNGMHIANLSLGSPSPSATLEQAVNSATSRGVLVVAASGNSGADSISYPARYANAMAVGATDQNNNRASFSQYGAGLDIVAPGVNVQSTYPGSTYASLNGTSMATPHVAGAAALVKHKNPSWSNVRIRNHLKNTATSLGSTNLYGSGLVNAEAATR

SEQ ID NO: 60025 - protein, 269 aa, Unidentified
AQSVPWGISRVQAPAAHRRRLTGRGVKVAVLDTGISTHPDLNIRGGASFVPGEPSTQDGNGHGTHVAGTIAALDNSIGVLGVAPSAELYAVKVLGASGSGSVSSIAQGLEWAGANGMHVANLSLGSPSPSATLEQAVNSATSRGVLVVAASGNSGAGSISYPARYANAMAVGATDQDNNRASFSQYGAGLDLVAPGVNVQSTYPGSTYFSLNGTSMATPHVAGAAALVKQKNPSWSNVQIRNRLKNTATSLGSTNLYGSGLVNAEAATR

SEQ ID NO: 60026 - protein, 269 aa, Unidentified
AQSVPWGISRVQAPAAHRRGLTGSGVKVAVLDTGISTHPDLNITGGASFVPGEPSTQDGNGHGTHVAGTIAALDNRIGVLGVAPSAELYAVKVLGASGGGAISSIAQGLEWAGNNGMHVANLSLGSPSPSATLEQAVNSATSRGVLVVAASGNSGAGSISYPARYANAMAVGATDQNNNRASFSQYGAGLDIVAPGVNVQSTYPGSTYASLNGTSMATPHVAGAAVLVKQKNPSWSNVRIRNHLKNTATSLGSTNLYGSGLVNAEAATR

SEQ ID NO: 60027 - protein, 269 aa, Unidentified
AQSVPWGISRVQAPAAHNRGLAGSGVKVAVLDSGISTHPDLNIRGGASFVPGEPSTQDGNGHGTHVAGTIAALNNSIGVLGVAPSAELYAVKVLGASGGGAISSIAQGLEWAGLNGMHVANLSLGSPSPSATLEQAVNSATSRGVLVVAASGNSGAGSISYPARYANAMAVGATDQNNNRASFSQYGAGLDIVAPGVNVQSTVPGSAYASLNGTSMATPHVAGAAVLVKQKNPSWSNVQIRNHLKNTATSLGSTNLYGSGLVNAEAATR

SEQ ID NO: 60028 - protein, 269 aa, Unidentified
AQSVPWGISRVQAPAAHNRGLAGFGVKVAVLDSGISTHPDLNIRGGASFVPGEPSTQDGNGHGTHVAGTIAALNNSIGVLGVAPSAELYAVKVLGASGGGAISSIAQGLEWAGANGMHVANLSLGSPSPSATLEQAVNSATSRGVLVVAASGNSGAGSISYPARYANAMAVGATDQNNNRASFSQYGAGLDIVAPGVNVQSTAPGSTYASLNGTSMATPHVAGAAVLVKQKNPSWSNVQIRNHLKNTATSLGSTNLYGSGLVNAEAATR

SEQ ID NO: 60029 - protein, 269 aa, Unidentified
AQSVPWGISRVQAPAAHNRGLTGRGVKVAVLDTGISTHPDLNIRGGASFVPGEPSTQDGNGHGTHVAGTIAALDNRIGVLGVAPSAELYAVKVLGASGGGAISSIAQGLEWAGNNGMHVANLSLGSPSPSATLEQAVNSATSRGVLVVAASGNSGAGSISYPARYANAMAVGATDQNNNRASFSQYGAGLDIVAPGVNVQSTYPGSTYASLNGTSMATPHVAGAAVLVKQKNPSWSNVRIRNHLKNTATSLGSTNLYGSGLVRAEAATR

SEQ ID NO: 60030 - protein, 269 aa, Unidentified
AQSVPWGISRVQAPAAHNRGLTGSGVKVAVLDTGISTHPDLDITGGASFVPGEPSTQDGNGHGTHVAGTIAALDNRIGVLGVAPSAELYAVKVLGASGGGAISSIAQGLEWAGNNGMHVANLSLGSPSPSATLEQAVNSATSRGVLVVAASGNSGAGSISYPARYANAMAVGATDQNNNRASFSQYGAGLDIVAPGVNVQSTYPGSTYASLNGTSMATPHVAGAAVLVKQKNPSWSNVRIRNHLKNTATSLGSTNLYGSGLVNAEAATR

SEQ ID NO: 60031 - protein, 269 aa, Unidentified
AQSVPWGISRVQAPAAHRRGLWGRGVKVAVLDTGISTHPDLNIRGGASFVPGEPSTQDGNGHGTHVAGTIAALDNSIGVLGVAPSAELYAVKVLGASGSGSVSSIAQGLEWAGANGMHVANLSLGSPSPSATLEQAVNSATSRGVLVVAASGNSGAGSISYPARYANAMAVGATDQNNNRASFSQYGAGLDLVAPGVNVQSTYPGSAYFSLNGTSMATPHVAGAAALVKQKNPSWSNVQIRNRLKNTATSLGSTNLYGSGLVNAEAATR

SEQ ID NO: 60032 - protein, 269 aa, Unidentified
AQSVPWGISRVQAPAAHNRRLTGRGVKVAVLDTGISTHPDLNIRGGASFVPGEPSTQDGEGHGTHVAGTIAALNNGIGVLGVAPSAELYAVKVLGASGSGSVSSIAQGLEWAGNNDMHVANLSLGSESPSATLEQAVNSATSRGVLVVAASGNSGAGSISYPARYANAMAVGATDQNNNRADFSQYGAGLDIVAPGVNVQSTYPGSTYASLNGTSMATPHVAGAAALVKQKNPSWSNVRIRDHLKNTATSLGSTNLYGSGLVNAEAATR

SEQ ID NO: 60033 - protein, 269 aa, Unidentified
AQSVPWGISRVQAPAAHNRRLTGRGVKVAVLDTGISTHPDLNIRGGASFVPGEPSTQDGNGHGTHVAGTIAALNNGIGVLGVAPSAELYAVKVLGASGSGSVSSIAQGLEWAGNNSMHVANLSLGSPSPSATLEQAVNSATSRGVLVVAASGNSGADSISYPARYANAMAVGATDQNNNRADFSQYGAGLDIVAPGVNVQSTYPGSTYASLNGTSMATPHVAGAAALVKQKNPSWSNVRIRDRLKNTATSLGSTNLYGSGLVNAEAATR

SEQ ID NO: 60034 - protein, 269 aa, Unidentified
AQSVPWGISRVQAPAAHNRGLAGSGVKVAVLDTGISTHPDLNIRGGASFVPGEPSTQDGNGHGTHVAGTIAALNNSIGVLGVAPSAELYAVKVLGASGGGAISSIAQGLEWAGLNVMHVANLSLGSPSPSATLEQAVNSATSRGVLVVAASGNSGAGSISYPARYANAMAVGATDQNNNRASFSQYGAGLDIVAPGVNVQSTAPQSTYASLNGTSMATPHVAGAAVLVKQKNPSWSNVQIRNHLKNTATSLGSTNLYGSGLVNAEAATR

SEQ ID NO: 60035 - protein, 269 aa, Unidentified
AQSVPWGISRVQAPAAHNRGLTGSGVKVAVLDTGISTHPDLNIRGGASFVPGEPSTQDGNGHGTHVAGTIAALNNSIGVLGVAPSAELYAVKVLGASGSGAISSIAEGLEWAGNNGMHVANLSLGSPSPSATLEQAVNSATSRGVLVVAASGNSGADSISYPARYANAMAVGATDQNNNRASFSQYGAGLDIVAPGVNVQSTYPGSTYASLNGTSMATPHVAGAAVLVKHKNPSWSNVRIRDHLKKTATSLGSTNLYGSGLVNAEAATR

SEQ ID NO: 60036 - protein, 269 aa, Unidentified
AQSVPWGISRVQAPAAHNRGLAGSGVKVAVLDTGISTHPDLNIRGGASFVPGEPSTQDGNGHGTHVAGTIAALNNSIGVLGVAPSAELYAVKVLGASGGGAISSIAQGLEWAGNNGMHVANLSLGSPSPSATLEQAVNSATSRGVLVVAASGNSGADSISYPARYANAMAVGATDQNNNRADFSQYGAGLDIVAPGVNVQSTYPGSTYASLNGTSMATPHVAGAAALVKQKNPSWSNVRIRDHLKNTATSLGSTNLYGSGLVNAFAATR

SEQ ID NO: 60037 - protein, 269 aa, Unidentified
AQSVPWGISRVQAPAAHNRGLAGGGVKVAVLDTGISTHPDLNIRGGASFVPGEPSTQDGNGHGTHVAGTIAALNNNIGVLGVAPSAELYAVKVLGASGNGAISSIAQGLEWAGNNGMHVANLSLGAPSPSATLEQAVNSATSRGVLVVAASGNSGAGSISYPARYANAMAVGATDQNNNRASFSQYGAGLDIVAPGVNVQSTYPGSTYASLNGTSMATPHVAGAAVLVKQKNPSWSNVRIRNHLKNTATSLGSTNLYGSGLVNAEAATR

SEQ ID NO: 60038 - protein, 269 aa, Unidentified
AQSVPWGISRVQAPAAHNRGLAGSGVKVAVLDTGISTHPDLNIRGGASFVPGEPSTQDGNGHGTHVAGTIAALNNSIGVLGVAPSAELYAVKVLGASGGGAISSIAQGLEWAGNNGMHVANLSLGSPSPSATLEQAVNSATSRGVLVVAASGNSGADSISYPARYANAMAVGATDQNNNRAEFSQYGAGLDIVAPGVNVQSTYPGSTYASLNGTSMATPHVAGAALLVKQKNPSWSNVVIRHHLKNTATSLGSTNLYGSGLVNAEAATR

SEQ ID NO: 60039 - protein, 269 aa, Unidentified
AQSVPWGISRVQAPAAHNRGLAGSGVKVAVLDTGISTHPDLNIRGGASFVPGEPSTQDGNGHGTHVAGTIAALNNSIGVLGVAPSAELYAVKVLAASGGGAISSIAQGLEWAGNNGMHVANLSLGAPSPSATLEQAVNSATSRGVLVVAASGNSGAGSISYPARYANAMAVGATDQNNNRASFSQYGAGLDIVAPGVNVQSTYPGSTYASQNGTSMATPHVAGAAVLVKQKNPSWSNVRIRNHLKNTATSLGSTNLYGSGLVNAEAATR

SEQ ID NO: 60040 - protein, 269 aa, Unidentified
AQSVPWGISRVQAPAAHNRRLTGSGVKVAVLDTGISTHPDLNIRGGASFVPGEPSTQDGNGHGTHVAGTIAALNNRIGVLGVAPSAELYAVKVLGASGGGAISSIAQGLEWAGANGMHVANLSLGSPSPSATLEQAVNSATSRGVLVVAASGNSGAGSISYPARYANAMAVGATDQDNNRASFSQYGAGLDIVAPGVNVQSTYPGSTYASLNGTSMATPHVAGAAVLVKQKNPSWSNVRIRNHLKNTATSLGSTNLYGSGLVNAEAATR

SEQ ID NO: 60041 - protein, 269 aa, Unidentified
AQSVPWGISRVQAPAAHNRGLTGSGVKVAVLDTGISTHPDLNIRGGASFVPGEPSTQDGNGHGTHAAGTIAALDNSIGVLGVAPSAELYAVKVLGASGSGAISSIAQGLEWAGNNGMHVANLSLGSPSPSATLEQAVNSATSRGVLVVAASGNSGADSISYPARYANVMAVGATDQNNNRASFSQYGAGLDIVAPGVDVQSTYPGSTYASLNGTSMATPHVAGAAALVKHKNPSWSNVRIRNHLKNTATSLGSTNLYGSGLVNAEAATR

SEQ ID NO: 60042 - protein, 269 aa, Unidentified
AQSVPWGISRVQAPAAHNRGLAGSGVKVAVLDTGISTHPDLNIRGGASFVPGEPSTQDGNGHGTHVAGTIAALNNSIGVLGVAPSAELYAVKVLGASGGGAISSIAQGLEWAGNNGMHVANLSLGSPSPSATLEQAVNSATSRGVLVVAASGNSGADSISYPARYANAMAVGATDQNNNRAEFSQYGAGLDIVAPGVNVQSTYPGSTYASLNGTSMATPHVAGAALLVKQKNPSWSNVRIRHHLKNTATSLGSTNLYGSGLVNAEAATR

SEQ ID NO: 60043 - protein, 269 aa, Unidentified
AQSVPWGISRVQAPAAHNRGLAGGGVKVAVLDTGISTHPDLNIRGGASFVPGEPSTQDGNGHGTHVAGTIAALDNSIGVLGVAPSAELYAVKVLSASGGGAISSIAQGLEWAGNNGMHVANLSLGSPSPSATLEQAVNSATSRGVLVVAASGNSGAGSISYPARYANAMAVGATDQNNNRASFSQYGAGLDIVAPGVNVQSTYPGSTYASLNGTSMATPHVAGAAVLVKQKNPSWSNVRIRNHLKNTATSLGSTNLYGSGLVNAEAATR

SEQ ID NO: 60044 - protein, 269 aa, Unidentified
AQTIPWGISRVQAPAAHNRGLTGSGVKVAVLDTGISTHPDLNIRGGASFVPGEPSTQDGNGHGTHVAGTIAALNNSIGVLGVAPSAELYAVKVLGADGEGAISSIAQGLEWAGNNGMHVANLSLGSPSPSATLEQAVNSATSRGVLVVAASGNSGASSISYPARYANAMAVGATDQNNNRASFSQYGAGLDIVAPGVNIQSTYPGSTYASLSGTSMATPHVAGAAALVKQKNPSWSNVQIRNHLKNTATSLGSTNLYGSGLVNAEAATR

SEQ ID NO: 60045 - protein, 269 aa, Unidentified
AQSVPWGISRVQAPAAHRRRLTGSGVKVAVLDTGISTHPDLDIRGGASFVPGEPSTQDGNGHGTHVAGTIAALDNSIGVLGVAPSAELYAVKVLGASGGGAISSIAQGLEWAGNNGMHVANLSLGSPSPSATLEQAVNSATSRGVLVVAASGNSGAGSISYPARYANAMAVGATDQNNNRASFSQYGAGLDIVAPGVNVQSTYPGSTYASLNGTSMATPHVAGAAVLVKQKNPSWSNVRIRNHLKNTATSLGSTNLYGSGLVNAEAATR

SEQ ID NO: 60046 - protein, 269 aa, Synthetic construct
AQTIPWGISRVQAPAAHNRGLTGSGVKVAVLDTGISTHPDLNIRGGASFVPGEPSTQDGNGHGTHVAGTIAALNNSIGVLGVAPSAELYAVKVLGADGRGAISSIAQGLEWAGNNGMHVANLSLGSPSPSATLEQAVNSATSRGVLVVAASGNSGASSISYPARYANAMAVGATDQNNNRASFSQYGAGLDIVAPGVNIQSTYPGSTYASGNGTSMATPHVAGAAALVKQKNPSWSNVQIRNHLKNTATSLGSTNLYGSGLVNAEAATR

SEQ ID NO: 60047 - protein, 269 aa, Unidentified
AQSVPWGISRVQAPAAHNRGLTGRGVKVAVLDTGISTHPDLNIRGGASFVPGEPSTQDGNGHGTHVAGTIAALNNSIGVLGVAPSAELYAVKVLGASGGGAISSIAQGLEWAGNNGMHVANLSLGSESPSATLEQAVNSATSRGVLVVAASGNSGAGSISYPARYANAMAVGATDQNNNRADFSQYGAGLDIVAPGVNVQSTYPGSTYASLNGTSMATPHVAGAAVLVKQKNPSWSNVRIRDHLKNTATSLGSTNLYGSGLVNAEAATR

SEQ ID NO: 60048 - protein, 269 aa, Unidentified
AQSVPWGISRVQAPAAHNRGLAGFGVKVAVLDTGISTHPDLNIRGGASFVPGEPSTQDGNGHGTHVAGTIAALNNSIGVLGVAPSAELYAVKVLGASGGGAISSIAQGLEWAGANGMHVANLSLGNPSPSATLEQAVNSATSRGVLVVAASGNSGAGSISYPARYANAMAVGATDQNNNRASFSQYGAGLDIVAPGVNVQSTAPGSTYASLNGTSMATPHVAGAAVLVKQKNPSWSNVQIRNHLKNTATSLGSTNLYGSGLVNAEAATR

SEQ ID NO: 60049 - protein, 269 aa, Unidentified
AQSVPWGISRVQAPAAHRRGLTGRGVKVAVLDTGISTHPDLNIRGGASFVPGEPSTQDGNGHGTHVAGTIAALDNNIGVLGVAPRAELYAVKVLGASGSGSVSSIAQGLEWAGNNGMHVANLSLGLQAPSATLEQAVNSATSRGVLVVAASGNSGAGSISYPARYANAMAVGATDQNNNRASFSQYGAGLDIVAPGVNVLSTYPGSTYASLNGTSMATPHVAGAAALVKQKNPSWSNVQIRNHLKNTATSLGSTNLYGSGLVNAEAATR

SEQ ID NO: 60050 - protein, 269 aa, Unidentified
AQSVPWGISRVQAPAAHNRGLTGSGVKVAVLDTGISTHPDLNIRGGASFVPGEPSTQDGNGHGTHVAGTIAALDNNIGVLGVAPRAELYAVKVLGASGSGDVSSIAQGLEWAGNNRMHVANLSLGLQAPSATLEQAVNSATSRGVLVVAASGNSGAGSISYPARYANAMAVGATDQNNNRASFSQYGAGLDIVAPGVNVLSTYPGSTYASLNGTSMATPHVAGAAALVKQKNPSWSNVQIRNHLKNTATSLGSTNLYGSGLVNAEAATR

SEQ ID NO: 60051 - protein, 269 aa, Unidentified
AQSVPWGISRVQAPAAHRRRLTGSGVKVAVLDTGISTHPDLDIRGGASFVPGEPSTQDGNGHGTHVAGTIAALNNRIGVLGVAPSAELYAVKVLGASGGGAISSIAQGLEWAGNNGMHVANLSLGSPSPSATLEQAVNSATSRGVLVVAASGNSGAGSISYPARYANAMAVGATDQNNNRASFSQYGAGLDIVAPGVNVQSTYPGSTYASLNGTSMATPHVAGAAVLVKQKNPSWSNVRIRNHLKNTATSLGSTNLYGSGLVNAEAATR

SEQ ID NO: 60052 - protein, 269 aa, Unidentified
AQSVPWGISRVQAPAAHNRGLAGSGVKVAVLDTGISTHPDLNIRGGASFVPGEPSTQDGNGHGTHVAGTIAALNNSIGVLGVAPSAELYAVKVLGASGQGAISSIAQGLEWAGNNGMHVANLSLGASSPSATLEQAVNSATSRGVLVVAASGNSGAGSISYPARYANAMAVGATDQNNNRASFSQYGAGLDIVAPGVNVQSTYPGSTYASQNGTSMATPHVAGAAVLVKQKNPSWSNVRIRNHLKNTATSLGSTNLYGSGLVNAEAATR

SEQ ID NO: 60053 - protein, 269 aa, Unidentified
AQSVPWGISRVQAPAAHNRRLTGRGVKVAVLDTGISTHPDLNIRGGASFVPGEPSTQDGNGHGTHVAGTIAALNNGIGVLGVAPSAELYAVKVLGASGSGSVSSIAQGLEWAGNNDMHVANLSLGSESPSATLEQAVNSATSRGVLVVAASGNSGAGSISYPARYANAMAVGATDQNNNRADFSQYGAGLDIVAPGVNVQSTYPGSTYASLNGTSMATPHVAGAAALVKQKNPSWSNVRIRDRLKNTATSLGSTNLYGSGLVNAEAATR

SEQ ID NO: 60054 - protein, 269 aa, Unidentified
AQSVPWGISRVQAPAAHNRGLTGFGVKVAVLDTGISTHPDLNIRGGASFVPGEPSTQDGNGHGTHVAGTIAALNNSIGVLGVAPSAELYAVKVLGASGGGAISSIAQGLEWAGLNVMHVANLSLGSPSPSATLEQAVNSATSRGVLVVAASGNSGAGSISYPARYANAMAVGATDQNNNRASFSQYGAGLDIVAPGVNVQSTVPQSTYASLNGTSMATPHVAGAAVLVKQKNPSWSNVQIRNHLKNTATSLGSTNLYGSGLVNAEAATR

SEQ ID NO: 60055 - protein, 269 aa, Bacillus lentus
AQSVPWGISRVQAPAAHNRGLTGSGVKVAVLDTGISTHEDLNVRGGVSFVPGEPSYQDGNGHGTHVAGTIAALNNSIGVVGVAPSADLYAVKVLGASGRGSVSSIAQGLEWAGQNGMHVANLSLGSPSPSATLEQAVNSATSRGVLVVAASGNSGAGSISYPARYANAMAVGATDQNNNRASFSQYGAGLDIVAPGVNVQSTYPGSTYASLNGTSMATPHVAGAAALVKQKNPSWSNVQIRDHLKNTATSLGSTNLYGSGLVNAEAATR

SEQ ID NO: 60056 - protein, 269 aa, Unidentified
AQSVPWGISRVQAPAAHNRGLTGSGVKVAVLDTGISTHPDLNIRGGASFVPGEPSTQDGNGHGTHAAGTIAALNNSIGVLGVAPSAELYAVKVLGASGSGAISSIAQGLEWAGNNGMHVANLSLGSPSPSATLEQAVNSATSRGVLVVAASGNSGADSISYPARYANAMAVGATDQNNNRASFSQYGAGLDIVAPGVNVQSTYPGSTYASLNGTSMATPHVAGAAVLVKHKNPSWSNVVIRDHLKKTATSLGSTNLYGSGLVNAEAATR

SEQ ID NO: 60057 - protein, 269 aa, Unidentified
AQSVPWGISRVQAPAAHRRGLTGRGVKVAVLDTGISTHPDLNIRGGASFVPGEPSTQDGNGHGTHVAGTIAALDNSIGVLGVAPSAELYAVKVLGASGSGSVSSIAQGLEWAGANGMHVANLSLGSPSPSATLEQAVNSATSRGVLVVAASGNSGAGSISYPARYANAMAVGATDQDNNRASFSQYGAGLDIVAPGVNVQSTYPQSAYFSLNGTSMATPHVAGAAALVKQKNPSWSNVQIRNRLKNTATSLGSTNLYGSGLVNAEAATR

SEQ ID NO: 60058 - protein, 269 aa, Unidentified
AQSVPWGISRVQAPAAHNRGLQGSGVKVAVLDTGISTHPDLNIRGGASFVPGEPSTQDGNGHGTHVAGTIAALNNSIGVLGVAPSAELYAVKVLGASGGGAISSIAQGLEWAGNNGMHVANLSLGSPSPSATLEQAVNSATSRGVLVVAASGNSGADSISYPARYANAMAVGATDQNNNRADFSQYGAGLDIVAPGVNVQSTYPGSTYASLNGTSMATPHVAGAASLVKQKNPSWSNVTIREHLKNTATSLGSTNLYGSGLVNAEAATR

SEQ ID NO: 60059 - protein, 269 aa, Unidentified
AQSVPWGISRVQAPAAHNRGLTGRGVKVAVLDTGISTHPDLNITGGASFVPGEPSTQDGNGHGTHVAGTIAALDNSIGVLGVAPSAELYAVKVLGASGGGAISSIAQGLEWAGNNGMHVANLSLGSPSPSATLEQAVNSATSRGVLVVAASGNSGAGSISYPARYANAMAVGATDQNNNRASFSQYGAGLDIVAPGVNVQSTYPGSTYASLNGTSMATPHVAGAAVLVKQKNPSWSNVRIRNHLKNTATSLGSTNLYGSGLVRAEAATR

SEQ ID NO: 60060 - protein, 269 aa, Unidentified
AQTIPWGISRVQAPAAHNRGLTGSGVKVAVLDTGISTHPDLNIRGGASFVPGEPSTQDGNGHGTHVAGTIAALNNSIGVLGVAPSAELYAVKVLGADGEGAISSIAQGLEWAGNNGMHVANLSLGSPSPSATLEQAVNSATSRGVLVVAASGNSGASSISYPARYANAMAVGATDQNNNRASFSQYGAGLDIVAPGVNIQSTYPGSTYASLDGTSMATPHVAGAAALVKQKNPSWSNVQIRNHLKNTATSLGSTNLYGSGLVNAEAATR

SEQ ID NO: 60061 - protein, 269 aa, Unidentified
AQSVPWGISRVQAPAAHNRKLTGGGVKVAVLDTGISTHPDLNIRGGASFVPGEPSTQDGEGHGTHVAGTIAALNNSIGVLGVAPSAELYAVKVLSASGNGSVSSIAGGLEWAGLNGMHVANLSLGAPSPSATLEQAVNSATSRGVLVVAASGNSGAGSISYPARYANAMAVGATDQNNNRASFSQYGAGLDIVAPGVNVQSTYPGSTYASQNGTSMATPHVAGAAALVKQKNPSWSNVQIRNHLKNTATSLGSTNLYGSGLVNAEAATR

SEQ ID NO: 60062 - protein, 269 aa, Unidentified
AQSVPWGISRVQAPAAHNRGLTGFGVKVAVLDSGISTHPDLNIRGGASFVPGEPSTQDGNGHGTHVAGTIAALNNSIGVLGVAPSAELYAVKVLGASGGGAISSIAQGLEWAGANGMHVANLSLGSPSPSATLEQAVNSATSRGVLVVAASGNSGAGSISYPARYANAMAVGATDQNNNRASFSQYGAGLDIVAPGVNVQSTAPGSAYASLNGTSMATPHVAGAAVLVKQKNPSWSNVQIRNHLKNTATSLGSTNLYGSGLVNAEAATR

SEQ ID NO: 60063 - protein, 269 aa, Unidentified
AQSVPWGISRVQAPAAHNRRLWGSGVKVAVLDTGISTHPDLNIRGGASFVPGEPSTQDGNGHGTHVAGTIAALNNSIGVLGVAPSAELYAVKVLGASGAGAISSIAQGLEWAGNNGMHVANLSLGSPSPSATLEQAVNSATSRGVLVVAASGNSGAGSISYPARYANAMAVGATDQNNNRASFSQYGAGLDIVAPGVNVQSTYPQSTYFSLNGTSMATPHVAGAAVLVKQKNPSWSNVRIRNHLKNTATSLGSTNLYGSGLVNAEAATR

SEQ ID NO: 60064 - protein, 269 aa, Unidentified
AQSVPWGISRVQAPAAHNRRLWGSGVKVAVLDTGISTHPDLNIRGGASFVPGEPSTQDGNGHGTHVAGTIAALNNRIGVLGVAPSAELYAVKVLGASGAGAISSIAQGLEWAGANGMHVANLSLGSPSPSATLEQAVNSATSRGVLVVAASGNSGAGSISYPARYANAMAVGATDQDNNRASFSQYGAGLDIVAPGVNVQSTYPGSTYASLNGTSMATPHVAGAAVLVKQKNPSWSNVQIRNHLKNTATSLGSTNLYGSGLVNAEAATR

SEQ ID NO: 60065 - protein, 269 aa, Unidentified
AQSVPWGISRVQAPAAHNRGLAGSGVKVAVLDTGISTHPDLNIRGGASFVPGEPSTQDGNGHGTHVAGTIAALNNSIGVLGVAPSAELYAVKVLGASGGGAVSSIAQGLEWAGNNGMHVANLSLGSPSPSATLEQAVNSATSRGVLVVAASGNSGADSISYPARYANAMAVGATDQNNNRADFSQYGAGLDIVAPGVNVQSTYPGSTYASLNGTSMATPHVAGAAVLVKQKNPSWSNVRIRDHLKNTATSLGSTNLYGSGLVNAFAATR

SEQ ID NO: 60066 - protein, 269 aa, Unidentified
AQSVPWGISRVQAPAAHRRRLTGRGVKVAVLDTGISTHPDLNIRGGASFVPGEPSTQDGNGHGTHVAGTIAALDNSIGVLGVAPSAELYAVKVLGASGAGSVSSIAQGLEWAGNNGMHVANLSLGSPSPSATLEQAVNSATSRGVLVVAASGNSGAGSISYPARYANAMAVGATDQDNNRASFSQYGAGLDLVAPGVNVQSTYPGSAYASLNGTSMATPHVAGAAALVKQKNPSWSNVQIRNRLKNTATSLGSTNLYGSGLVNAEAATR

SEQ ID NO: 60067 - protein, 269 aa, Unidentified
AQSVPWGISRVQAPAAHNRGLAGSGVKVAVLDTGISTHPDLNIRGGASFVPGEPSTQDGNGHGTHVAGTIAALNNSIGVLGVAPSAELYAVKVLSASGGGAISSIAQGLEWAGNNGMHVANLSLGAPSPSATLEQAVNSATSRGVLVVAASGNSGAGSISYPARYANAMAVGATDQNNNRASFSQYGAGLDIVAPGVNVQSTYPGSTYASQNGTSMATPHVAGAAVLVKQKNPSWSNVRIRNHLKNTATSLGSTNLYGSGLVNAEAATR

SEQ ID NO: 60068 - protein, 269 aa, Unidentified
AQSVPWGISRVQAPASHNRGLTGFGVKVAVLDSGISTHPDLNIRGGASFVPGEPSTQDGNGHGTHVAGTIAALNNSIGVLGVAPSAELYAVKVLGASGGGAISSIAQGLEWAGLNGMHVANLSLGSPSPSATLEQAVNSATSRGVLVVAASGNSGAGSISYPARYANAMAVGATDQNNNRASFSQYGAGLDIVAPGVNVQSTVPGSTYASLNGTSMATPHVAGAAVLVKQKNPSWSNVQIRNHLKNTATSLGSTNLYGSGLVNAEAATR

SEQ ID NO: 60069 - protein, 269 aa, Unidentified
AQSVPWGISRVQAPAAHNRGLTGSGVKVAVLDTGISTHPDLRITGGASFVPGEPSTQDGNGHGTHVAGTIAALNNRIGVLGVAPSAELYAVKVLGASGGGAISSIAQGLEWAGNNGMHVANLSLGSPSPSATLEQAVNSATSRGVLVVAASGNSGAGSISYPARYANAMAVGATDQNNNRASFSQYGAGLDIVAPGVNVQSTYPGSTYASENGTSMATPHVAGAAVLVKQKNPSWSNVRIRNHLKNTATSLGSTNLYGSGLVNAEAATR

SEQ ID NO: 60070 - protein, 269 aa, Unidentified
AQSVPWGISRVQAPAAHRRGLWGRGVKVAVLDTGISTHPDLNIRGGASFVPGEPSTQDGNGHGTHVAGTIAALDNSIGVLGVAPSAELYAVKVLGASGAGSVSSIAQGLEWAGNNGMHVANLSLGSPSPSATLEQAVNSATSRGVLVVAASGNSGAGSISYPARYANAMAVGATDQDNNRASFSQYGAGLDLVAPGVNVQSTYPGSTYFSLNGTSMATPHVAGAAALVKQKNPSWSNVQIRNRLKNTATSLGSTNLYGSGLVNAEAATR

SEQ ID NO: 60071 - protein, 269 aa, Unidentified
AQSVPWGISRVQAPAAHNRKLTGGGVKVAVLDTGISTHPDLNIRGGASFVPGEPSTQDGEGHGTHVAGTIAALNNNIGVLGVAPSAELYAVKVLSASGNGSVSSIANGLEWAGLNGMHVANLSLGAPSPSATLEQAVNSATSRGVLVVAASGNSGAGSISYPARYANAMAVGATDQNNNRASFSQYGAGLDIVAPGVNVQSTYPGSTYASLNGTSMATPHVAGAAALVKQKNPSWSNVQIRNHLKNTATSLGSTNLYGSGLVNAEAATR

SEQ ID NO: 60072 - protein, 269 aa, Unidentified
AQSVPWGISRVQAPAAHNRGLTGRGVKVAVLDTGISTHPDLNIRGGASFVPGEPSTQDGEGHGTHVAGTIAALNNDIGVLGVAPSAELYAVKVLGASGSGSVSSIAQGLEWAGNNSMHVANLSLGSESPSATLEQAVNSATSRGVLVVAASGNSGADSISYPARYANAMAVGATDQNNNRASFSQYGAGLDIVAPGVNVQSTYPGSTYASLNGTSMATPHVAGAAALVKQKNPSWSNVRIRDRLKNTATSLGSTNLYGSGLVNAEAATR

SEQ ID NO: 60073 - protein, 269 aa, Bacillus clausii
AQSVPWGISRLQAPAAHNRGLTASAVKVAVLDTGVSTHPDLNIRGGASFVPGEPSTQDGNGHGTHVAGTIAALNNSIGVLGVAPSAELYAVKVLPASGHGSVSSIAQGLEWAGNNGMHVANLSLGSPSPSATLEQAVNSATSRGILVVAASGNSGAGSISYPARYANAMAVGATDQNNNRASFSQYGAGLDIVAPGVNVQSTYPGSTYASLSGTSMATPHVAGAAALVKQKNPSWSNVQIRNHLKNTATSLGSTNLYGSGLVNAEAPTR

SEQ ID NO: 60074 - protein, 269 aa, Unidentified
AQSVPWGISRVQAPAAHNRGLAGSGVKVAVLDTGISTHPDLNIRGGASFVPGEPSTQDGNGHGTHVAGTIAALNNSIGVLGVAPSAELYAVKVLGASGGGAISSIAQGLEWAGNNGMHVANLSLGSPSPSATLEQAVNSATSRGVLVVAASGNSGADSISYPARYANAMAVGATDQNNNRAEFSQYGAGLDIVAPGVNVQSTYPGSTYASLNGTSMATPHVAGAAVLVKQKNPSWSNVTIRHHLKNTATSLGSTNLYGSGLVNAEAATR

SEQ ID NO: 60075 - protein, 269 aa, Unidentified
AQSVPWGISRVQAPAAHRRRLWGRGVKVAVLDTGISTHPDLNIRGGASFVPGEPSTQDGNGHGTHVAGTIAALDNSIGVLGVAPSAELYAVKVLGASGAGSVSSIAQGLEWAGNNGMHVANLSLGSPSPSATLEQAVNSATSRGVLVVAASGNSGAGSISYPARYANAMAVGATDQNNNRASFSQYGAGLDIVAPGVNVQSTYPQSAYASLNGTSMATPHVAGAAALVKQKNPSWSNVQIRNRLKNTATSLGSTNLYGSGLVNAEAATR

SEQ ID NO: 60076 - protein, 269 aa, Unidentified
AQSVPWGISRVQAPAAHRRGLTGRGVKVAVLDTGISTHPDLNIRGGASFVPGEPSTQDGNGHGTHVAGTIAALDNSIGVLGVAPSAELYAVKVLGASGSGSVSSIAQGLEWAGANGMHVANLSLGSPSPSATLEQAVNSATSRGVLVVAASGNSGAGSISYPARYANAMAVGATDQDNNRASFSQYGAGLDLVAPGVNVQSTYPQSAYASLNGTSMATPHVAGAAALVKQKNPSWSNVQIRNRLKNTATSLGSTNLYGSGLVNAEAATR

SEQ ID NO: 60077 - protein, 269 aa, Unidentified
AQSVPWGISRVQAPAAHNRRLTGRGVKVAVLDTGISTHPDLNIRGGASFVPGEPSTQDGEGHGTHVAGTIAALNNDIGVLGVAPSAELYAVKVLGASGSGSVSSIAQGLEWAGNNDMHVANLSLGSESPSATLEQAVNSATSRGVLVVAASGNSGAGSISYPARYANAMAVGATDQNNNRASFSQYGAGLDIVAPGVNVQSTYPGSTYASLNGTSMATPHVAGAAALVKQKNPSWSNVRIRDRLKNTATSLGSTNLYGSGLVNAEAATR

SEQ ID NO: 60078 - protein, 269 aa, Unidentified
AQSVPWGISRVQAPAAHNRRLTGSGVKVAVLDTGISTHPDLDITGGASFVPGEPSTQDGNGHGTHVAGTIAALNNRIGVLGVAPSAELYAVKVLGASGGGAISSIAQGLEWAGNNGMHVANLSLGSPSPSATLEQAVNSATSRGVLVVAASGNSGAGSISYPARYANAMAVGATDQNNNRASFSQYGAGLDIVAPGVNVQSTYPGSTYASLNGTSMATPHVAGAAVLVKQKNPSWSNVRIRNHLKNTATSLGSTNLYGSGLVNAEAATR

SEQ ID NO: 60079 - protein, 269 aa, Unidentified
AQSVPWGISRVQAPAAHRRRLTGSGVKVAVLDTGISTHPDLNIRGGASFVPGEPSTQDGNGHGTHVAGTIAALDNSIGVLGVAPSAELYAVKVLGASGGGAISSIAQGLEWAGNNGMHVANLSLGSPSPSATLEQAVNSATSRGVLVVAASGNSGAGSISYPARYANAMAVGATDQNNNRASFSQYGAGLDIVAPGVNVQSTYPGSTYASLNGTSMATPHVAGAAVLVKQKNPSWSNVRIRNRLKNTATSLGSTNLYGSGLVNAEAATR

SEQ ID NO: 60080 - protein, 269 aa, Unidentified
AQTIPWGISRVQAPAAHNRGLTGSGVKVAVLDTGISTHPDLNIRGGASFVPGEPSTQDGNGHGTHVAGTIAALNNSIGVLGVAPSAELYAVKVLGADGEGAISSIAQGLEWAGNNGMHVANLSLGSPSPSATLEQAVNSATSRGVLVVAASGNSGASSISYPARYANAMAVGATDQNNNRASFSQYGAGLDIVAPGVNIQSTYPGSTYASLNGTSMATPHVAGAAALVKQKNPSWSNVQIRNHLKNTATSLGSTNLYGCGLVNAEAATR

SEQ ID NO: 60081 - protein, 269 aa, Unidentified
AQSVPWGISRVQAPAAHRRRLTGSGVKVAVLDTGISTHPDLNITGGASFVPGEPSTQDGNGHGTHVAGTIAALNNSIGVLGVAPSAELYAVKVLGASGGGAISSIAQGLEWAGNNGMHVANLSLGSPSPSATLEQAVNSATSRGVLVVAASGNSGAGSISYPARYANAMAVGATDQNNNRASFSQYGAGLDIVAPGVNVQSTYPGSTYASLNGTSMATPHVAGAAVLVKQKNPSWSNVRIRNRLKNTATSLGSTNLYGSGLVNAEAATR

SEQ ID NO: 60082 - protein, 269 aa, Unidentified
AQSVPWGISRVQAPAAHNRGLTGSGVKVAVLDTGISTHPDLNIRGGASFVPGEPSTQDGNGHGTHAAGTIAALDNSIGVLGVAPSAELYAVKVLGASGSGAISSIAQGLEWAGNNGMHVANLSLGSPSPSATLEQAVNSATSRGVLVVAASGNSGADSISYPARYANAMAVGATDQNNNRASFSQYGAGLDIVAPGVNVQSTYPVSTYASLNGTSMATPHVAGAAVLVKHKNPSWSNVRIRNHLKNTATSLGSTNLYGSGLVNAEAATR

SEQ ID NO: 60083 - protein, 269 aa, Unidentified
AQSVPWGISRVRAPAAHNRGLAGSGVKVAVLDTGISTHPDLNIRGGASFVPGEPSTQDGNGHGTHVAGTIAALNNSIGVLGVAPSAELYAVKVLGASGGGAISSIAQGLEWAGLNGMHVANLSLGSPSPSATLEQAVNSATSRGVLVVAASGNSGAGSISYPARYANAMAVGATDQNNNRASFSQYGAGLDIVAPGVNVQSTAPGSAYASLNGTSMATPHVAGAAVLVKQKNPSWSNVQIRNHLKNTATSLGSTNLYGSGLVNAEAATR

SEQ ID NO: 60084 - protein, 269 aa, Unidentified
AQSVPWGISRVQAPAAHNRGLAGSGVKVAVLDSGISTHPDLNIRGGASFVPGEPSTQDGNGHGTHVAGTIAALNNSIGVLGVAPSAELYAVKVLGASGGGAISSIAQGLEWAGANGMHVANLSLGSPSPSATLEQAVNSATSRGVLVVAASGNSGAGSISYPARYANAMAVGATDQNNNRASFSQYGAGLDIVAPGVNVQSTAPGSAYASLNGTSMATPHVAGAAVLVKQKNPSWSNVQIRNHLKNTATSLGSTNLYGSGLVNAEAATR

SEQ ID NO: 60085 - protein, 269 aa, Unidentified
AQSVPWGISRVQAPAAHNRGLTGRGVKVAVLDTGISTHPDLRITGGASFVPGEPSTQDGNGHGTHVAGTIAALDNSIGVLGVAPSAELYAVKVLGASGGGAISSIAQGLEWAGNNGMHVANLSLGSPSPSATLEQAVNSATSRGVLVVAASGNSGAGSISYPARYANAMAVGATDQNNNRASFSQYGAGLDIVAPGVNVQSTYPGSTYASLNGTSMATPHVAGAAVLVKQKNPSWSNVRIRNHLKNTATSLGSTNLYGSGLVNAEAATR

SEQ ID NO: 60086 - protein, 269 aa, Unidentified
AQSVPWGIERVQAPAAHNRGLTGSGVKVAVLDTGISTHPDLRIRGGASFVPGEPSTQDGNGHGTHVAGTIAALDNSIGVLGVAPSAELYAVKVLGASGSGSVSSIAQGLEWAGNNGMHVANLSLGSPSPSATLEQAVNSATSRGVLVVAASGNSGAGSISYPARYANAMAVGATDQNNNRASFSQYGAGLDIVAPGVNILSTWPGSTYASLNGTSMATPHVAGAAALVKQKNPSWSNVQIRNHLKNTATSLGDTWEYGSGLVNAEAATR

SEQ ID NO: 60087 - protein, 269 aa, Unidentified
AQSVPWGISRVQAPAAHRRGLWGRGVKVAVLDTGISTHPDLNIRGGASFVPGEPSTQDGNGHGTHVAGTIAALDNSIGVLGVAPSAELYAVKVLGASGSGSVSSIAQGLEWAGANGMHVANLSLGSPSPSATLEQAVNSATSRGVLVVAASGNSGAGSISYPARYANAMAVGATDQDNNRASFSQYGAGLDIVAPGVNVQSTYPQSTYFSLNGTSMATPHVAGAAALVKQKNPSWSNVQIRNRLKNTATSLGSTNLYGSGLVNAEAATR

SEQ ID NO: 60088 - protein, 269 aa, Unidentified
AQSVPWGISRVQAPAAHNRGLAGFGVKVAVLDTGISTHPDLNIRGGASFVPGEPSTQDGNGHGTHVAGTIAALNNSIGVLGVAPSAELYAVKVLGASGGGAISSIAQGLEWAGANGMHVANLSLGSPSPSATLEQAVNSATSRGVLVVAASGNSGAGSISYPARYANAMAVGATDQNNNRASFSQYGAGLDIVAPGVNVQSTAPGSAYASLNGTSMATPHVAGAAVLVKQKNPSWSNVQIRNHLKNTATSLGSTNLYGSGLVNAEAATR

SEQ ID NO: 60089 - protein, 269 aa, Unidentified
AQSVPWGISRVQAPASHNRGLTGFGVKVAVLDTGISTHPDLNIRGGASFVPGEPSTQDGNGHGTHVAGTIAALNNSIGVLGVAPSAELYAVKVLGASGGGAISSIAQGLEWAGLNGMHVANLSLGSPSPSATLEQAVNSATSRGVLVVAASGNSGAGSISYPARYANAMAVGATDQNNNRASFSQYGAGLDIVAPGVNVQSTVPQSTYASLNGTSMATPHVAGAAVLVKQKNPSWSNVQIRNHLKNTATSLGSTNLYGSGLVNAEAATR

SEQ ID NO: 60090 - protein, 269 aa, Unidentified
AQSVPWGISRVQAPAAHNRGLQGSGVKVAVLDTGISTHPDLNIRGGASFVPGEPSTQDGNGHGTHVAGTIAALNNSIGVLGVAPSAELYAVKVLGASGGGAISSIAQGLEWAGNNGMHVANLSLGSPSPSATLEQAVNSATSRGVLVVAASGNSGADSISYPARYANAMAVGATDQNNNRADFSQYGAGLDIVAPGVNVQSTYPGSTYASLNGTSMATPHVAGAALLVKQKNPSWSNVRIRHHLKNTATSLGSTNLYGSGLVNAEAATR

SEQ ID NO: 60091 - protein, 269 aa, Unidentified
AQSVPWGISRVQAPAAHNRRLWGSGVKVAVLDTGISTHPDLNIRGGASFVPGEPSTQDGNGHGTHVAGTIAALNNSIGVLGVAPSAELYAVKVLGASGAGAISSIAQGLEWAGANGMHVANLSLGSPSPSATLEQAVNSATSRGVLVVAASGNSGAGSISYPARYANAMAVGATDQNNNRASFSQYGAGLDIVAPGVNVQSTYPQSTYASLNGTSMATPHVAGAAVLVKQKNPSWSNVRIRNHLKNTATSLGSTNLYGSGLVNAEAATR

SEQ ID NO: 60092 - protein, 269 aa, Unidentified
AQSVPWGISRVQAPAAHNRGLTGRGVKVAVLDTGISTHPDLNIRGGASFVPGEPSTQDGNGHGTHVAGTIAALDNSIGVLGVAPSAELYAVKVLGASGAGAISSIAQGLEWAGNNGMHVANLSLGSPSPSATLEQAVNSATSRGVLVVAASGNSGAGSISYPARYANAMAVGATDQNNNRADFSQYGAGLDIVAPGVNVQSTYIGSTYASLNGTSMATPHVAGAAVLVKQKNPSWSNVRIRNHLKNTATSLGSTNLYGSGLVNAEAATR

SEQ ID NO: 60093 - protein, 269 aa, Unidentified
AQSVPWGISRVQAPAAHNRGLTGSGVKVAVLDTGISTHPDLNIRGGASFVPGEPSTQDGNGHGTHVAGTIAALNNSIGVLGVAPSAELYAVKVLGAEGSGAISSIAQGLEWAGNNGMHVANLSLGSPSPSATLEQAVNSATSRGVLVVAASGNSGADSISYPARYANAMAVGATDQNNNRASFSQYGAGLDIVAPGVNVQSTYPGSTYASLNGTSMATPHVAGAAVLVKHKNPSWSNVRIRDHLKKTATSLGSTNLYGSGLVNAEAATR

SEQ ID NO: 60094 - protein, 269 aa, Unidentified
AQSVPWGISRVQAPAAHNRGLTGSGVKVAVLDTGISTHPDLNIRGGASFVPGEPSTQDGNGHGTHVAGTIAALNNSIGVLGVAPSAELYAVKVLGASGSGAISSIAQGLEWAGNNGMHVANLSLGSPSPSATLEQAVNSATSRGVLVVAASGNSGADSISYPARYANAMAVGATDQNNNRASFSQYGAGLDIVAPGVNVQSTYPGSTYASLNGTSMATPHVAGAAVLVKHKNPSWSNVRIRDHLKKTATSLGSTRLYGSGLVNAEAATR

SEQ ID NO: 60095 - protein, 269 aa, Unidentified
AQSVPWGISRVQAPASHNRGLTGSGVKVAVLDTGISTHPDLNIRGGASFVPGEPSTQDGNGHGTHVAGTIAALNNSIGVLGVAPSAELYAVKVLGASGGGAISSIAQGLEWAGANGMHVANLSLGNPSPSATLEQAVNSATSRGVLVVAASGNSGAGSISYPARYANAMAVGATDQNNNRASFSQYGAGLDIVAPGVNVQSTVPGSAYASLNGTSMATPHVAGAAVLVKQKNPSWSNVQIRNHLKNTATSLGSTNLYGSGLVNAEAATR

SEQ ID NO: 60096 - protein, 269 aa, Unidentified
AQSVPWGISRVQAPAAHRRGLTGSGVKVAVLDTGISTHPDLDIRGGASFVPGEPSTQDGNGHGTHVAGTIAALNNRIGVLGVAPSAELYAVKVLGASGGGAISSIAQGLEWAGNNGMHVANLSLGSPSPSATLEQAVNSATSRGVLVVAASGNSGAGSISYPARYANAMAVGATDQNNNRASFSQYGAGLDIVAPGVNVQSTYPGSTYASENGTSMATPHVAGAAVLVKQKNPSWSNVRIRNHLKNTATSLGSTNLYGSGLVNAEAATR

SEQ ID NO: 60097 - protein, 269 aa, Unidentified
AQSVPWGISRVQAPAAHNRRLTGRGVKVAVLDTGISTHPDLDIRGGASFVPGEPSTQDGNGHGTHVAGTIAALNNRIGVLGVAPSAELYAVKVLGASGGGAISSIAQGLEWAGNNGMHVANLSLGSPSPSATLEQAVNSATSRGVLVVAASGNSGAGSISYPARYANAMAVGATDQNNNRASFSQYGAGLDIVAPGVNVQSTYPGSTYASLNGTSMATPHVAGAAVLVKQKNPSWSNVRIRNHLKNTATSLGSTNLYGSGLVNAEAATR

SEQ ID NO: 60098 - protein, 269 aa, Unidentified
AQSVPWGISRVQAPAAHNRGLAGSGVKVAVLDTGISTHPDLNIRGGASFVPGEPSTQDGNGHGTHVAGTIAALNNSIGVLGVAPSAELYAVKVLGASGGGAISSIAQGLEWAGNNGMHVANLSLGSPSPSATLEQAVNSATSRGVLVVAASGNSGADSISYPARYANAMAVGATDQNNNRADFSQYGAGLDIVAPGVNVQSTYPGSTYASLNGTSMATPHVAGAAVLVKQKNPSWSNVTIREHLKNTATSLGSTNLYGSGLVNAEAATR

SEQ ID NO: 60099 - protein, 269 aa, Unidentified
AQSVPWGISRVQAPAAHRRGLTGRGVKVAVLDTGISTHPDLNIRGGASFVPGEPSTQDGNGHGTHVAGTIAALDNSIGVLGVAPSAELYAVKVLGASGAGSVSSIAQGLEWAGANGMHVANLSLGSPSPSATLEQAVNSATSRGVLVVAASGNSGAGSISYPARYANAMAVGATDQDNNRASFSQYGAGLDLVAPGVNVQSTYPGSAYASLNGTSMATPHVAGAAALVKQKNPSWSNVQIRNRLKNTATSLGSTNLYGSGLVNAEAATR

SEQ ID NO: 60100 - protein, 269 aa, Unidentified
AQSVPWGISRVQAPAAHNRGLTGSGVKVAVLDTGISTHPDLNIRGGASFVPGEPSTQDGNGHGTHVAGTIAALDNNIGVLGVAPRAELYAVKVLGASGSGSVSSIAQGLEWAGMNRMHVANLSLGLQAPSATLEQAVNSATSRGVLVVAASGNSGAGSISYPARYANAMAVGATDQNNNRASFSQYGAGLDIVAPGVNVLSTYPGSTYASLNGTSMATPHVAGAAALVKQKNPSWSNVQIRNHLKNTATSLGSTNLYGSGLVNAEAATR

SEQ ID NO: 60101 - protein, 269 aa, Unidentified
AQSVPWGISRVQAPAAHNRGLTGSGVKVAVLDTGISTHPDLNIRGGASFVPGEPSTQDGNGHGTHVAGTIAALNNSIGVLGVAPSAELYAVKVLGASGEGAISSIAQGLEWAGNNGMHVANLSLGSPSPSATLEQAVNSATSRGVLVVAASGNSGADSISYPARYANAMAVGATDQNNNRASFSQYGAGLDIVAPGVNVQSTYPGSTYASLNGTSMATPHVAGAAVLVKHKNPSWSNVRIRDHLKKTATSLGSTNLYGSGLVNAEAATR

SEQ ID NO: 60102 - protein, 269 aa, Unidentified
AQSVPWGISRVQAPAAHNRGLTGRGVKVAVLDTGISTHPDLRIRGGASFVPGEPSTQDGNGHGTHVAGTIAALDNSIGVLGVAPSAELYAVKVLGASGGGAISSIAQGLEWAGNNGMHVANLSLGSPSPSATLEQAVNSATSRGVLVVAASGNSGAGSISYPARYANAMAVGATDQNNNRASFSQYGAGLDIVAPGVNVQSTYPGSTYASLNGTSMATPHVAGAAVLVKQKNPSWSNVRIRNHLKNTATSLGSTNLYGSGLVRAEAATR

SEQ ID NO: 60103 - protein, 269 aa, Unidentified
AQSVPWGISRVQAPAAHNRGLTGRGVKVAVLDTGISTHPDLNIRGGASFVPGEPSTQDGEGHGTHVAGTIAALNNDIGVLGVAPSAELYAVKVLGASGSGSVSSIAQGLEWAGNNDMHVANLSLGSESPSATLEQAVNSATSRGVLVVAASGNSGADSISYPARYANAMAVGATDQNNNRASFSQYGAGLDIVAPGVNVQSTYPGSTYASLNGTSMATPHVAGAAALVKQKNPSWSNVRIRDRLKNTATSLGSTNLYGSGLVNAEAATR

SEQ ID NO: 60104 - protein, 269 aa, Unidentified
AQSVPWGISRVQAPAAHNRGLTGSGVKVAVLDTGISTHPDLNIRGGASFVPGEPSTQDGNGHGTHVAGTIAALNNSIGVLGVAPSAELYAVKVLGASGGGAISSIAQGLEWAGNNGMHVANLSLGSPSPSATLEQAVNSATSRGVLVVAASGNSGADSISYPARYANAMAVGATDQNNNRASFSQYGAGLDIVAPGVNVQSTYPGSTYASLNGTSMATPHVAGAAVLVKHKNPSWSNVRIRDHLKKTATSLGSTNLYGSGLVNAEAATR

SEQ ID NO: 60105 - protein, 269 aa, Unidentified
AQSVPWGISRVQAPAAHNRGLTGSGVKVAVLDTGISTHPDLNITGGASFVPGEPSTQDGNGHGTHVAGTIAALDNRIGVLGVAPSAELYAVKVLGASGGGAISSIAQGLEWAGNNGMHVANLSLGSPSPSATLEQAVNSATSRGVLVVAASGNSGAGSISYPARYANAMAVGATDQNNNRASFSQYGAGLDIVAPGVNVQSTYPGSTYASLNGTSMATPHVAGAAVLVKQKNPSWSNVRIRNHLKNTATSLGSTNLYGSGLVRAEAATR

SEQ ID NO: 60106 - protein, 269 aa, Unidentified
AQSVPWGISRVQAPAAHNRGLTGSGVKVAVLDTGISTHPDLNIRGGASFVPGEPSTQDGNGHGTHAAGTIAALDNSIGVLGVAPSAELYAVKVLGASGSGAISSIAQGLEWAGNNGMHVANLSLGSPSPSATLEQAVNSATSRGVLVVAASGNSGADSISYPARYANAMAVGATDQNNNRASFSQYGAGLDIVAPGVNVQSTYPGSTYRSLNGTSMATPHVAGAAVLVKHKNPSWSNVRIRNHLKNTATSLGSTNLYGSGLVNAEAATR

SEQ ID NO: 60107 - protein, 269 aa, Unidentified
AQSVPWGISRVQAPAAHNRGLAGRGVKVAVLDTGISTHPDLNIRGGASFVPGEPSTQDGNGHGTHVAGTIAALNNSIGVLGVAPSAELYAVKVLGASGGGAISSIAQGLEWAGNNGMHVANLSLGSESPSATLEQAVNSATSRGVLVVAASGNSGAGSISYPARYANAMAVGATDQNNNRASFSQYGAGLDIVAPGVNVQSTYPGSTYASLNGTSMATPHVAGAAVLVKQKNPSWSNVRIRDHLKNTATSLGSTNLYGSGLVNAEAATR

SEQ ID NO: 60108 - protein, 269 aa, Unidentified
AQSVPWGISRVQAPAAHRRRLTGSGVKVAVLDTGISTHPDLRIRGGASFVPGEPSTQDGNGHGTHVAGTIAALNNSIGVLGVAPSAELYAVKVLGASGGGAISSIAQGLEWAGNNGMHVANLSLGSPSPSATLEQAVNSATSRGVLVVAASGNSGAGSISYPARYANAMAVGATDQNNNRASFSQYGAGLDIVAPGVNVQSTYPGSTYASENGTSMATPHVAGAAVLVKQKNPSWSNVRIRNHLKNTATSLGSTNLYGSGLVNAEAATR

SEQ ID NO: 60109 - protein, 269 aa, Unidentified
AQSVPWGISRVQAPAAHNRGLAGGGVKVAVLDTGISTHPDLNIRGGASFVPGEPSTQDGNGHGTHVAGTIAALNNSIGVLGVAPSAELYAVKVLAASGQGAISSIAGGLEWAGNNGMHVANLSLGSPSPSATLEQAVNSATSRGVLVVAASGNSGAGSISYPARYANAMAVGATDQNNNRASFSQYGAGLDIVAPGVNVQSTYPGSTYASLNGTSMATPHVAGAAVLVKQKNPSWSNVRIRNHLKNTATSLGSTNLYGSGLVNAEAATR

SEQ ID NO: 60110 - protein, 269 aa, Unidentified
AQVVPWGISRVQAPAAHNRGLTGSGVKVAVLDTGISTHPDLNIRGGASFVPGEPSTQDGNGHGTHVAGTIAALDNSIGVLGVAPRAHLYAVKVLGASGSGSVSSIAQGLEWAGNNRMHVANLSLGLQAPSATLEQAVNSATSRGVLVVAASGNSGAGSISYPARYANAMAVGATDQNNNRASFSQYGAGLDIVAPGVNVQSTYLGSTYASLNGTSMATPHVAGAAALVKQKNPSWSNVQIRNHLKNTATSLGSTNLYGSGLVNAEAATR

SEQ ID NO: 60111 - protein, 269 aa, Unidentified
AQSVPWGISRVQAPAAHNRRLTGSGVKVAVLDTGISTHPDLNIRGGASFVPGEPSTQDGEGHGTHVAGTIAALNNGIGVLGVAPSAELYAVKVLGASGSGSVSSIAQGLEWAGNNDMHVANLSLGSESPSATLEQAVNSATSRGVLVVAASGNSGADSISYPARYANAMAVGATDQNNNRADFSQYGAGLDIVAPGVNVQSTYPGSTYASLNGTSMATPHVAGAAALVKQKNPSWSNVRIRDHLKNTATSLGSTNLYGSGLVNAEAATR

SEQ ID NO: 60112 - protein, 269 aa, Unidentified
AQSVPWGISRVQAPAAHRRGLWGRGVKVAVLDTGISTHPDLNIRGGASFVPGEPSTQDGNGHGTHVAGTIAALDNSIGVLGVAPSAELYAVKVLGASGAGSVSSIAQGLEWAGANGMHVANLSLGSPSPSATLEQAVNSATSRGVLVVAASGNSGAGSISYPARYANAMAVGATDQDNNRASFSQYGAGLDIVAPGVNVQSTYPGSTYFSLNGTSMATPHVAGAAALVKQKNPSWSNVQIRNRLKNTATSLGSTNLYGSGLVNAEAATR

SEQ ID NO: 60113 - protein, 269 aa, Unidentified
AQSVPWGISRVQAPAAHRRGLTGSGVKVAVLDTGISTHPDLDIRGGASFVPGEPSTQDGNGHGTHVAGTIAALDNRIGVLGVAPSAELYAVKVLGASGGGAISSIAQGLEWAGNNGMHVANLSLGSPSPSATLEQAVNSATSRGVLVVAASGNSGAGSISYPARYANAMAVGATDQNNNRASFSQYGAGLDIVAPGVNVQSTYPGSTYASLNGTSMATPHVAGAAVLVKQKNPSWSNVRIRNHLKNTATSLGSTNLYGSGLVNAEAATR

SEQ ID NO: 60114 - protein, 269 aa, Unidentified
AQSVPWGISRVQAPAAHNRGLTGRGVKVAVLDTGISTHPDLNIRGGASFVPGEPSTQDGNGHGTHVAGTIAALNNSIGVLGVAPSAELYAVKVLGASGGGAISSIAQGLEWAGNNGMHVANLSLGNESPSATLEQAVNSATSRGVLVVAASGNSGAGSISYPARYANAMAVGATDQNNNRASFSQYGAGLDIVAPGVNVQSTYPGSTYASLNGTSMATPHVAGAAVLVKQKNPSWSNVRIRDHLKNTATSLGSTNLYGSGLVNAEAATR

SEQ ID NO: 60115 - protein, 269 aa, Unidentified
AQSVPWGISRVQAPAAHNRKLTGSGVKVAVLDTGISTHPDLNIRGGASFVPGEPSTQDGEGHGTHVAGTIAALNNNIGVLGVAPSAELYAVKVLAASGNGSVSSIAQGLEWAGLNGMHVANLSLGAPSPSATLEQAVNSATSRGVLVVAASGNSGAGSISYPARYANAMAVGATDQNNNRADFSQYGAGLDIVAPGVNVQSTYPGSTYASQNGTSMATPHVAGAAALVKQKNPSWSNVQIRNHLKNTATSLGSTNLYGSGLVNAEAATR

SEQ ID NO: 60116 - protein, 269 aa, Unidentified
AQSVPWGISRVQAPAAHNRGLAGSGVKVAVLDTGISTHPDLNIRGGASFVPGEPSTQDGNGHGTHVAGTIAALDNNIGVLGVAPSAELYAVKVLSASGQGAISSIAQGLEWAGNNGMHVANLSLGSPSPSATLEQAVNSATSRGVLVVAASGNSGAGSISYPARYANAMAVGATDQNNNRASFSQYGAGLDIVAPGVNVQSTYPGSTYASLNGTSMATPHVAGAAVLVKQKNPSWSNVRIRNHLKNTATSLGSTNLYGSGLVNAEAATR

SEQ ID NO: 60117 - protein, 269 aa, Unidentified
AQSVPWGISRVQAPAAHNRRLTGSGVKVAVLDTGISTHPDLNIRGGASFVPGEPSTQDGNGHGTHVAGTIAALNNRIGVLGVAPSAELYAVKVLGASGAGAISSIAQGLEWAGNNGMHVANLSLGSPSPSATLEQAVNSATSRGVLVVAASGNSGAGSISYPARYANAMAVGATDQDNNRASFSQYGAGLDIVAPGVNVQSTYPGSTYFSLNGTSMATPHVAGAAVLVKQKNPSWSNVRIRNHLKNTATSLGSTNLYGSGLVNAEAATR

SEQ ID NO: 60118 - protein, 269 aa, Unidentified
AQSVPWGISRVQAPAAHNRGLAGSGVKVAVLDTGISTHPDLNIRGGASFVPGEPSTQDGNGHGTHVAGTIAALNNSIGVLGVAPSAELYAVKVLGASGGGAISSIAQGLEWAGNNGMHVANLSLGSPSPSATLEQAVNSATSRGVLVVAASGNSGADSISYPARYANAMAVGATDQNNNRADFSQYGAGLDIVAPGVNVQSTYPGSTYASLNGTSSATPHVAGAAVLVKQKNPSWSNVRIRDHLKNTATSLGSTNLYGSGLVNAFAATR

SEQ ID NO: 60119 - protein, 269 aa, Unidentified
AQSVPWGISRVQAPAAHNRGLQGSGVKVAVLDTGISTHPDLNIRGGASFVPGEPSTQDGNGHGTHVAGTIAALNNSIGVLGVAPSAELYAVKVLGASGGGAISSIAQGLEWAGNNGMHVANLSLGSPSPSATLEQAVNSATSRGVLVVAASGNSGADSISYPARYANAMAVGATDQNNNRADFSQYGAGLDIVAPGVNVQSTYPGSTYASLNGTSMATPHVAGAATLVKQKNPSWSNVTIRHHLKNTATSLGSTNLYGSGLVNAEAATR

SEQ ID NO: 60120 - protein, 269 aa, Unidentified
AQSVPWGISRVQAPAAHNRGLTGSGVKVAVLDTGISTHPDLNIRGGASFVPGEPSTQDGNGHGTHVAGTIAALDNNIGVLGVAPRAELYAVKVLGASGSGSVSSIAQGLEWAGNNRMHVANLSLGLQAPSATLEQAVNSATSRGVLVVAASGNSGAGSISYPARYANAMAVGATDQNNNRASFSQYGAGLDIVAPGVNVQSTYIGSTYASLNGTSMATPHVAGAAALVKQKNPSWSNVQIRNHLKNTATSLGSTNQYGSGLVNAEAATR

SEQ ID NO: 60121 - protein, 269 aa, Unidentified
AQSVPWGISRVQAPAAHRRGLTGRGVKVAVLDTGISTHPDLNIRGGASFVPGEPSTQDGNGHGTHVAGTIAALDNSIGVLGVAPSAELYAVKVLGASGAGSVSSIAQGLEWAGANGMHVANLSLGSPSPSATLEQAVNSATSRGVLVVAASGNSGAGSISYPARYANAMAVGATDQNNNRASFSQYGAGLDIVAPGVNVQSTYPQSAYASLNGTSMATPHVAGAAALVKQDNPSWSNVQIRNRLKNTATSLGSTNLYGSGLVNAEAATR

SEQ ID NO: 60122 - protein, 269 aa, Unidentified
AQSVPWGISRVQAPAAHNRGLTGSGVKVAVLDTGISTHPDLRIRGGASFVPGEPSTQDGNGHGTHVAGTIAALDNSIGVLGVAPSAELYAVKVLGASGGGTISSIAQGLEWAGNNGMHVANLSLGSPSPSATLEQAVNSATSRGVLVVAASGNSGAGSISYPARYANAMAVGATDQNNNRASFSQYGAGLDIVAPGVNVQSTYPGSTYASLNGTSMATPHVAGAAVLVKQKNPSWSNVRIRNRLKNTATSLGSTNLYGSGLVRAEAATR

SEQ ID NO: 60123 - protein, 269 aa, Unidentified
AQSVPWGISRVQAPAAHRRRLTGRGVKVAVLDTGISTHPDLNIRGGASFVPGEPSTQDGNGHGTHVAGTIAALDNSIGVLGVAPSAELYAVKVLGASGSGSVSSIAQGLEWAGNNGMHVANLSLGSPSPSATLEQAVNSATSRGVLVVAASGNSGAGSISYPARYANAMAVGATDQDNNRASFSQYGAGLDLVAPGVNVQSTYPQSTYFSLNGTSMATPHVAGAAALVKQKNPSWSNVQIRNRLKNTATSLGSTNLYGSGLVNAEAATR

SEQ ID NO: 60124 - protein, 269 aa, Unidentified
AQSVPWGISRVQAPAAHRRGLWGRGVKVAVLDTGISTHPDLNIRGGASFVPGEPSTQDGNGHGTHVAGTIAALDNSIGVLGVAPSAELYAVKVLGASGSGSVSSIAQGLEWAGNNGMHVANLSLGSPSPSATLEQAVNSATSRGVLVVAASGNSGAGSISYPARYANAMAVGATDQDNNRASFSQYGAGLDIVAPGVNVQSTYPQSAYFSLNGTSMATPHVAGAAALVKQKNPSWSNVQIRNRLKNTATSLGSTNLYGSGLVNAEAATR

SEQ ID NO: 60125 - protein, 269 aa, Unidentified
AQSVPWGISRVQAPAAHNRGLTGRGVKVAVLDTGISTHPDLNIRGGASFVPGEPSTQDGEGHGTHVAGTIAALNNDIGVLGVAPSAELYAVKVLGASGSGSVSSIAQGLEWAGNNSMHVANLSLGSESPSATLEQAVNSATSRGVLVVAASGNSGADSISYPARYANAMAVGATDQNNNRADFSQYGAGLDIVAPGVNVQSTYPGSTYASLNGTSMATPHVAGAAALVKQKNPSWSNVQIRDRLKNTATSLGSTNLYGSGLVNAEAATR

SEQ ID NO: 60126 - protein, 269 aa, Unidentified
AQSVPWGISRVQAPAAHNRGLTGSGVKVAVLDTGISTHPDLNIRGGASFVPGEPSTQDGNGHGTHVAGTIAALNNSIGVLGVAPSAELYAVKVLGASGGGAISSIAQGLEWAGNNGMHVANLSLGSPSPSATLEQAVNSATSRGVLVVAASGNSGEGSISYPARYANAMAVGATDQNNNRADFSQYGAGLDIVAPGVNVQSTYPGSTYASLNGTSQATPHVAGAAVLVKQKNPSWSNVRIRDRLKNTATSLGSTNLYGSGLVNAEAATR

SEQ ID NO: 60127 - protein, 269 aa, Unidentified
AQSVPWGISRVQAPASHNRGLTGSGVKVAVLDTGISTHPDLNIRGGASFVPGEPSTQDGNGHGTHVAGTIAALNNSIGVLGVAPSAELYAVKVLGASGGGAISSIAQGLEWAGANGMHVANLSLGNPSPSATLEQAVNSATSRGVLVVAASGNSGAGSISYPARYANAMAVGATDQNNNRASFSQYGAGLDIVAPGVNVQSTVPQSTYASLNGTSMATPHVAGAAVLVKQKNPSWSNVQIRNHLKNTATSLGSTNLYGSGLVNAEAATR

SEQ ID NO: 60128 - protein, 269 aa, Unidentified
AQSVPWGISRVQAPAAHNRGLTGSGVKVAVLDTGISTHPDLNIRGGASFVPGEPSTQDGNGHGTHVAGTIAALNNSIGVLGVAPSAELYAVKVLGASGGGAISSIAQGLEWAGNNGMHVANLSLGSESPSATLEQAVNSATSRGVLVVAASGNSGAGSISYPARYANAMAVGATDQNNNRADFSQYGAGLDIVAPGVNVQSTYPGSTYASLNGTSMATPHVAGAAVLVKQKNPSWSNVRIRDRLKNTATSLGSTNLYGSGLVNAEAATR

SEQ ID NO: 60129 - protein, 269 aa, Unidentified
AQSVPWGISRVQAPAAHNRGLTGSGVRVAVLDTGISTHPDLRITGGASFVPGEPSTQDGNGHGTHVAGTIAALDNSIGVLGVAPSAELYAVKVLGASGGGAISSIAQGLEWAGNNGMHVANLSLGSPSPSATLEQAVNSATSRGVLVVAASGNSGAGSISYPARYANAMAVGATDQNNNRASFSQYGAGLDIVAPGVNVQSTYPGSTYASLNGTSMATPHVAGAAVLVKQKNPSWSNVRIRNHLKNTATSLGSTNLYGSGLVNAEAATR

SEQ ID NO: 60130 - protein, 269 aa, Unidentified
AQSVPWGISRVQAPAAHNRGLAGGGVKVAVLDTGISTHPDLNIRGGASFVPGEPSTQDGNGHGTHVAGTIAALNNNIGVLGVAPSAELYAVKVLGASGGGAISSIAQGLEWAGNNGMHVANLSLGSPSPSATLEQAVNSATSRGVLVVAASGNSGAGSISYPARYANAMAVGATDQNNNRASFSQYGAGLDIVAPGVNVQSTYPGSTYASQNGTSMATPHVAGAAVLVKQKNPSWSNVRIRNHLKNTATSLGSTNLYGSGLVNAEAATR

SEQ ID NO: 60131 - protein, 269 aa, Unidentified
AQSVPWGISRVQAPASHNRGLTGSGVKVAVLDTGISTHPDLNIRGGASFVPGEPSTQDGNGHGTHVAGTIAALNNSIGVLGVAPSAELYAVKVLGASGGGAISSIAQGLEWAGLNVMHVANLSLGSPSPSATLEQAVNSATSRGVLVVAASGNSGAGSISYPARYANAMAVGATDQNNNRASFSQYGAGLDIVAPGVNVQSTAPQSTYASLNGTSMATPHVAGAAVLVKQKNPSWSNVQIRNHLKNTATSLGSTNLYGSGLVNAEAATR

SEQ ID NO: 60132 - protein, 269 aa, Unidentified
AQSVPWGISRVQAPAAHNRGLAGGGVKVAVLDTGISTHPDLNIRGGASFVPGEPSTQDGNGHGTHVAGTIAALNNSIGVLGVAPSAELYAVKVLSASGGGAISSIAQGLEWAGNNGMHVANLSLGSPSPSATLEQAVNSATSRGVLVVAASGNSGAGSISYPARYANAMAVGATDQNNNRASFSQYGAGLDIVAPGVNVQSTYPGSTYASQNGTSMATPHVAGAAVLVKQKNPSWSNVRIRNHLKNTATSLGSTNLYGSGLVNAEAATR

SEQ ID NO: 60133 - protein, 269 aa, Unidentified
AQSVPWGISRVQAPAAHNRGLAGGGVKVAVLDTGISTHPDLNIRGGASFVPGEPSTQDGNGHGTHVAGTIAALNNSIGVLGVAPSAELYAVKVLAASGGGAISSIAQGLEWAGNNGMHVANLSLGSPSPSATLEQAVNSATSRGVLVVAASGNSGAGSISYPARYANAMAVGATDQNNNRASFSQYGAGLDIVAPGVNVQSTYPGSTYASQNGTSMATPHVAGAAVLVKQKNPSWSNVRIRNHLKNTATSLGSTNLYGSGLVNAEAATR

SEQ ID NO: 60134 - protein, 269 aa, Unidentified
AQSVPWGISRVQAPAAHNRGLTGSGVKVAVLDTGISTHPDLDIRGGASFVPGEPSTQDGNGHGTHVAGTIAALDNRIGVLGVAPSAELYAVKVLGASGGGAISSIAQGLEWAGNNGMHVANLSLGSPSPSATLEQAVNSATSRGVLVVAASGNSGAGSISYPARYANAMAVGATDQNNNRASFSQYGAGLDIVAPGVNVQSTYPGSTYASLNGTSMATPHVAGAAVLVKQKNPSWSNVRIRNHLKNTATSLGSTNLYGSGLVRAEAATR

SEQ ID NO: 60135 - protein, 269 aa, Unidentified
AQSVPWGISRVQAPAAHNRRLTGSGVKVAVLDTGISTHPDLNIRGGASFVPGEPSTQDGNGHGTHVAGTIAALNNGIGVLGVAPSAELYAVKVLGASGSGSVSSIAQGLEWAGNNSMHVANLSLGSESPSATLEQAVNSATSRGVLVVAASGNSGADSISYPARYANAMAVGATDQNNNRADFSQYGAGLDIVAPGVNVQSTYPGSTYASLNGTSMATPHVAGAAALVKQKNPSWSNVRIRDRLKNTATSLGSTNLYGSGLVNAEAATR

SEQ ID NO: 60136 - protein, 269 aa, Unidentified
AQSVPWGISRVQAPAAHRRGLRGRGVKVAVLDTGISTHPDLNIRGGASFVPGEPSTQDGNGHGTHVAGTIAALDNSIGVLGVAPSAELYAVKVLGASGAGSVSSIAQGLEWAGANGMHVANLSLGSPSPSATLEQAVNSATSRGVLVVAASGNSGAGSISYPARYANAMAVGATDQDNNRASFSQYGAGLDIVAPGVNVQSTYPQSTYASLNGTSMATPHVAGAAALVKQKNPSWSNVQIRNRLKNTATSLGSTNLYGSGLVNAEAATR

SEQ ID NO: 60137 - protein, 269 aa, Unidentified
AQSVPWGISRVQAPAAHNRGLQGSGVKVAVLDTGISTHPDLNIRGGASFVPGEPSTQDGNGHGTHVAGTIAALNNSIGVLGVAPSAELYAVKVLGASGGGAISSIAQGLEWAGNNGMHVANLSLGSPSPSATLEQAVNSATSRGVLVVAASGNSGADSISYPARYANAMAVGATDQNNNRAEFSQYGAGLDIVAPGVNVQSTYPGSTYASLNGTSMATPHVAGAASLVKQKNPSWSNVVIRDHLKNTATSLGSTNLYGSGLVNAEAATR

SEQ ID NO: 60138 - protein, 269 aa, Unidentified
AQSVPWGISRVQAPAAHRRGLWGRGVKVAVLDTGISTHPDLNIRGGASFVPGEPSTQDGNGHGTHVAGTIAALDNSIGVLGVAPSAELYAVKVLGASGSGSVSSIAQGLEWAGANGMHVANLSLGSPSPSATLEQAVNSATSRGVLVVAASGNSGAGSISYPARYANAMAVGATDQDNNRASFSQYGAGLDIVAPGVNVQSTYPQSAYASLNGTSMATPHVAGAAALVKQKNPSWSNVRIRNHLKNTATSLGSTNLYGSGLVNAEAATR

SEQ ID NO: 60139 - protein, 269 aa, Unidentified
AQSVPWGISRVQAPAAHNRRLWGSGVKVAVLDTGISTHPDLNIRGGASFVPGEPSTQDGNGHGTHVAGTIAALNNSIGVLGVAPSAELYAVKVLGASGAGAISSIAQGLEWAGNNGMHVANLSLGSPSPSATLEQAVNSATSRGVLVVAASGNSGAGSISYPARYANAMAVGATDQNNNRASFSQYGAGLDIVAPGVNVQSTYPQSAYASLNGTSMATPHVAGAAVLVKQKNPSWSNVRIRNHLKNTATSLGSTNLYGSGLVNAEAATR

SEQ ID NO: 60140 - protein, 269 aa, Unidentified
AQSVPWGISRVQAPAAHNRGLQGSGVKVAVLDTGISTHPDLNIRGGASFVPGEPSTQDGNGHGTHVAGTIAALNNSIGVLGVAPSAELYAVKVLGASGGGAISSIAQGLEWAGNNGMHVANLSLGSPSPSATLEQAVNSATSRGVLVVAASGNSGADSISYPARYANAMAVGATDQNNNRAEFSQYGAGLDIVAPGVNVQSTYPGSTYASLNGTSMATPHVAGAAVLVKQKNPSWSNVTIRDHLKNTATSLGSTNLYGSGLVNAEAATR

SEQ ID NO: 60141 - protein, 269 aa, Unidentified
AQSVPWGISRVQAPAAHNRGLTGRGVKVAVLDTGISTHPDLNITGGASFVPGEPSTQDGNGHGTHVAGTIAALNNSIGVLGVAPSAELYAVKVLGASGAGSVSSVAQGLEWTGLNGMHVANLSLGSPSPSATLEQAVNSATSRGVLVVAASGNSGAGSISYPARYANAMAVGATDQNNNRASFSQYGAGLDIVAPGVNVQSTYIQSAYASLNGTSMATPHVAGAAALVKQKNPSWSNVQIRNHLKNTATSLGSTNLYGSGLVNAEAATR

SEQ ID NO: 60142 - protein, 269 aa, Unidentified
AQSVPWGISRVQAPAAHNRGLTGSGVKVAVLDTGISTHPDLNIRGGASFVPGEPSTQDGNGHGTHAAGTIAALNNSIGVLGVAPSAELYAVKVLGASGSGAISSIAQGLEWAGNNGMHVANLSLGSPSPSATLEQAVNSATSRGVLVVAASGNSGADSISYPARYANAMAVGATDQNNNRASFSQYGAGLDIVAPGVNVQSTYPGSRYASLNGTSMATPHVAGAAVLVKHKNPSWSNVRIRNHLKNTATSLGSANLYGSGLVNAEAATR

SEQ ID NO: 60143 - protein, 269 aa, Unidentified
AQSVPWGISRVQAPAAHNRKLTGGGVKVAVLDTGISTHPDLNIRGGASFVPGEPSTQDGEGHGTHVAGTIAALNNSIGVLGVAPSAELYAVKVLSASGNGSVSSIANGLEWAGLNGMHVANLSLGAPSPSATLEQAVNSATSRGVLVVAASGNSGAGSISYPARYANAMAVGATDQNNNRADFSQYGAGLDIVAPGVNVQSTYPGSTYASQNGTSSATPHVAGAAALVKQKNPSWSNVQIRNHLKNTATSLGSTNLYGSGLVNAEAATR

SEQ ID NO: 60144 - protein, 269 aa, Unidentified
AQSVPWGISRVQAPAAHNRGLAGSGVKVAVLDTGISTHPDLNIRGGASFVPGEPSTQDGNGHGTHVAGTIAALDNSIGVLGVAPSAELYAVKVLGASGGGAISSIAQGLEWAGNNGMHVANLSLGSPSPSATLEQAVNSATSRGVLVVAASGNSGAGSISYPARYANAMAVGATDQNNNRASFSQYGAGLDIVAPGVNVQSTYPGSTYASLNGTSMATPHVAGAAVLVKQKYPSWSNVRIRNHLKNTATSLGSTNLYGSGLVNAEVATR

SEQ ID NO: 60145 - protein, 269 aa, Unidentified
AQSVPWGISRVQAPAAHNRGLAGGGVKVAVLDTGISTHPDLNIRGGASFVPGEPSTQDGNGHGTHVAGTIAALDNSIGVLGVAPSAELYAVKVLAASGNGAISSIAQGLEWAGNNGMHVANLSLGSPSPSATLEQAVNSATSRGVLVVAASGNSGAGSISYPARYANAMAVGATDQNNNRASFSQYGAGLDIVAPGVNVQSTYPGSTYASLNGTSMATPHVAGAAVLVKQKNPSWSNVRIRNHLKNTATSLGSTNLYGSGLVNAEAATR

SEQ ID NO: 60146 - protein, 269 aa, Unidentified
AQSVPWGISRVQAPAAHNRGLQGSGVKVAVLDTGISTHPDLNIRGGASFVPGEPSTQDGNGHGTHVAGTIAALNNSIGVLGVAPSAELYAVKVLGASGGGAISSIAQGLEWAGNNGMHVANLSLGSPSPSATLEQAVNSATSRGVLVVAASGNSGADSISYPARYANAMAVGATDQNNNRAEFSQYGAGLDIVAPGVNVQSTYPGSTYASLNGTSMATPHVAGAASLVKQKNPSWSNVVIREHLKNTATSLGSTNLYGSGLVNAEAATR

SEQ ID NO: 60147 - protein, 269 aa, Unidentified
AQSVPWGISRVQAPAAHNRGLAGSGVKVAVLDTGISTHPDLNIRGGASFVPGEPSTQDGNGHGTHVAGTIAALNNNIGVLGVAPSAELYAVKVLGASGQGAISSIAQGLEWAGNNGMHVANLSLGAPSPSATLEQAVNSATSRGVLVVAASGNSGAGSISYPARYANAMAVGATDQNNNRASFSQYGAGLDIVAPGVNVQSTYPGSTYASQNGTSMATPHVAGAAVLVKQKNPSWSNVRIRNHLKNTATSLGSTNLYGSGLVNAEAATR

SEQ ID NO: 60148 - protein, 269 aa, Unidentified
AQSVPWGISRVQAPAAHRRGLWGRGVKVAVLDTGISTHPDLNIRGGASFVPGEPSTQDGNGHGTHVAGTIAALDNSIGVLGVAPSAELYAVKVLGASGSGSVSSIAQGLEWAGANGMHVANLSLGSPSPSATLEQAVNSATSRGVLVVAASGNSGAGSISYPARYANAMAVGATDQNNNRASFSQYGAGLDLVAPGVNVQSTYPQSTYFSLNGTSMATPHVAGAAALVKQKNPSWSNVQIRNRLKNTATSLGSTNLYGSGLVNAEAATR

SEQ ID NO: 60149 - protein, 269 aa, Unidentified
AQSVSWGISRVQAPAAHRRGLWGRGVKVAVLDTGISTHPDLNIRGGASFVPGEPSTQDGNGHGTHVAGTIAALDNSIGVLGVAPSAELYAVKVLGASGAGSVSSIAQGLEWAGNNGMHVANLSLGSPSPSATLEQAVNSATSRGVLVVAASGNSGAGSISYPARYANAMAVGATDQNNNRASFSQYGAGLDIVAPGVNVQSTYPGSAYFSLNGTSMATPHVAGAAALVKQKNPSWSNVQIRNRLKNTATSLGSTNLYGSGLVNAEAATR

SEQ ID NO: 60150 - protein, 269 aa, Unidentified
AQSVPWGISRVQAPAAHNRGLAGSGVKVAVLDTGISTHPDLNIRGGASFVPGEPSTQDGNGHGTHVAGTIAALDNNIGVLGVAPSAELYAVKVLGASGNGAISSIAQGLEWAGNNGMHVANLSLGAPSPSATLEQAVNSATSRGVLVVAASGNSGAGSISYPARYANAMAVGATDQNNNRASFSQYGAGLDIVAPGVNVQSTYPGSTYASLNGTSMATPHVAGAAVLVKQKNPSWSNVRIRNHLKNTATSLGSTNLYGSGLVNAEAATR

SEQ ID NO: 60151 - protein, 269 aa, Unidentified
AQSVPWGISRVQAPAAHRRRLWGRGVKVAVLDTGISTHPDLNIRGGASFVPGEPSTQDGNGHGTHVAGTIAALDNSIGVLGVAPSAELYAVKVLGASGSGSVSSIAQGLEWAGANGMHVANLSLGSPSPSATLEQAVNSATSRGVLVVAASGNSGAGSISYPARYANAMAVGATDQDNNRASFSQYGAGLDIVAPGVNVQSTYPGSAYASLNGTSMATPHVAGAAALVKQKNPSWSNVQIRNRLKNTATSLGSTNLYGSGLVNAEAATR

SEQ ID NO: 60152 - protein, 269 aa, Bacillus Lentus
AQVVPWGIRRVQAPTAHNRGLTGSGVKVAVLDTGISTHPDLNIRGGASFVPGEPSTQDENGHGTHAAGTIAALNNSIGVLGVAPSAELYAVKVLGASGSGSVSSIAQGLEWAGNNGMHVANLSLGSPSPSATLEQAVNSATSRGVLVVAASGNSGAGSISYPARYANAMAVGATDQNNNRASFSQYGPGLDIVAPGVNIQSTYPGSTYASLNGTSMATPHVAGAAALVKQKNPSWSNVRIRNHLKNTATSLGSTDLYGSGLVNAEAATR

SEQ ID NO: 60153 - protein, 269 aa, Unidentified
AQSVPWGISRVQAPAAHNRGLTGSGVKVAVLDTGISTHPDLNIRGGASFVPGEPSTQDGNGHGTHVAGTIAALNNSIGVLGVAPRAELYAVKVLGASGGGAISSIARGLEWAGNNGMHVANLSLGSPSPSATLEQAVNSATSRGVLVVAASGNSGAGSISYPARYANAMAVGATDQNNNRASFSQYGAGLDIVAPGVNVQSTYPGPTYASLNGTSMATPHVAGAAVLVKQKNPSWSNVRIRNHLKNTATSLGSTNLYGSGLVNAVAATR

SEQ ID NO: 60154 - protein, 269 aa, Unidentified
AQSVPWGISRVQAPAAHRRGLTGSGVKVAVLDTGISTHPDLDITGGASFVPGEPSTQDGNGHGTHVAGTIAALDNSIGVLGVAPSAELYAVKVLGASGGGAISSIAQGLEWAGNNGMHVANLSLGSPSPSATLEQAVNSATSRGVLVVAASGNSGAGSISYPARYANAMAVGATDQNNNRASFSQYGAGLDIVAPGVNVQSTYPGSTYASLNGTSMATPHVAGAAVLVKQKNPSWSNVRIRNHLKNTATSLGSTNLYGSGLVNAEAATR

SEQ ID NO: 60155 - protein, 269 aa, Unidentified
AQSVPWGISRVQAPAAHRRRLWGRGVKVAVLDTGISTHPDLNIRGGASFVPGEPSTQDGNGHGTHVAGTIAALDNSIGVLGVAPSAELYAVKVLGASGAGSVSSIAQGLEWAGNNGMHVANLSLGSPSPSATLEQAVNSATSRGVLVVAASGNSGAGSISYPARYANAMAVGATDQNNNRASFSQYGAGLDLVAPGVNVQSTYPGSTYFSLNGTSMATPHVAGAAALVKQKNPSWSNVQIRNRLKNTATSLGSTNLYGSGLVNAEAATR

SEQ ID NO: 60156 - protein, 269 aa, Unidentified
AQSVPWGISRVQAPAAHNRGLTGSGVKVAVLDTGISTHPDLNIRGGASFVPGEPSTQDGNGHGTHVAGTIAALNNSIGVLGVAPSAELYAVKVLGASGSGAISSIAQGLEWAGNNGMHVANLSLGSPSPSATLEQAVNSATSRGVLVVAASGNSGADSISYPARYANAMAVGATDQNNNRASFSQYGAGLDIVAPGVNVQSTYPGSTYASLNGTSMATPHVAGAAVLVKHKNPSWSNTRIRDHLKKTATSLGSTNLYGSGLVNAEAATR

SEQ ID NO: 60157 - protein, 269 aa, Unidentified
AQSVPWGISRVQAPAAHRRRLTGSGVKVAVLDTGISTHPDLDIRGGASFVPGEPSTQDGNGHGTHVAGTIAALNNSIGVLGVAPSAELYAVKVLGASGGGAISSIAQGLEWAGNNGMHVANLSLGSPSPSATLEQAVNSATSRGVLVVAASGNSGAGSISYPARYANAMAVGATDQNNNRASFSQYGAGLDIVAPGVNVQSTYPGSTYASLNGTSMATPHVAGAAVLVKQKNPSWSNVRIRNHLKNTATSLGSTNLYGSGLVRAEAATR

SEQ ID NO: 60158 - protein, 269 aa, Unidentified
AQSVPWGISRVQAPAAHNRGLAGGGVKVAVLDTGISTHPDLNIRGGASFVPGEPSTQDGNGHGTHVAGTIAALNNSIGVLGVAPSAELYAVKVLSASGQGAISSIAQGLEWAGNNGMHVANLSLGSPSPSATLEQAVNSATSRGVLVVAASGNSGAGSISYPARYANAMAVGATDQNNNRASFSQYGAGLDIVAPGVNVQSTYPGSTYASQNGTSMATPHVAGAAVLVKQKNPSWSNVRIRNHLKNTATSLGSTNLYGSGLVNAEAATR

SEQ ID NO: 60159 - protein, 269 aa, Unidentified
AQSVPWGISRVQAPAAHNRGLQGSGVKVAVLDTGISTHPDLNIRGGASFVPGEPSTQDGNGHGTHVAGTIAALNNSIGVLGVAPSAELYAVKVLGASGGGAISSIAQGLEWAGNNGMHVANLSLGSPSPSATLEQAVNSATSRGVLVVAASGNSGADSISYPARYANAMAVGATDQNNNRADFSQYGAGLDIVAPGVNVQSTYPGSTYASLNGTSMATPHVAGAATLVKQKNPSWSNVTIRDHLKNTATSLGSTNLYGSGLVNAEAATR

SEQ ID NO: 60160 - protein, 269 aa, Unidentified
AQSVPWGISRVQAPAAHNRGLQGSGVKVAVLDTGISTHPDLNIRGGASFVPGEPSTQDGNGHGTHVAGTIAALNNSIGVLGVAPSAELYAVKVLGASGGGAISSIAQGLEWAGNNGMHVANLSLGSPSPSATLEQAVNSATSRGVLVVAASGNSGADSISYPARYANAMAVGATDQNNNRADFSQYGAGLDIVAPGVNVQSTYPGSTYASLNGTSMATPHVAGAASLVKQKNPSWSNVVIRHHLKNTATSLGSTNLYGSGLVNAEAATR

SEQ ID NO: 60161 - protein, 269 aa, Unidentified
AQSVPWGISRVQAPAAHNRRLTGSGVKVAVLDTGISTHPDLNIRGGASFVPGEPSTQDGNGHGTHVAGTIAALNNSIGVLGVAPSAELYAVKVLGASGAGAISSIAQGLEWAGANGMHVANLSLGSPSPSATLEQAVNSATSRGVLVVAASGNSGAGSISYPARYANAMAVGATDQDNNRASFSQYGAGLDIVAPGVNVQSTYPGSTYFSLNGTSMATPHVAGAAVLVKQKNPSWSNVRIRNHLKNTATSLGSTNLYGSGLVNAEAATR

SEQ ID NO: 60162 - protein, 269 aa, Unidentified
AQSVPWGISRVQAPAAHNRGLAGSGVKVAVLDTGISTHPDLNIRGGASFVPGEPSTQDGNGHGTHVAGTIAALNNSIGVLGVAPSAELYAVKVLGASGGGAISSIAQGLEWAGNNGMHVANLSLGSPSPSATLEQAVNSATSRGVLVVAASGNSGADSISYPARYANAMAVGATDQNNNRADFSQYGAGLDIVAPGVNVQSTYPGSTYASLNGTSMATPHVAGAAVLVKQKNPSWSNVRIRDHLKNTATSLGSTNLYGSGLVNAEAATR

SEQ ID NO: 60163 - protein, 269 aa, Unidentified
AQSVPWGISRVQAPAAHNRKLTGGGVKVAVLDTGISTHPDLNIRGGASFVPGEPSTQDGEGHGTHVAGTIAALNNNIGVLGVAPSAELYAVKVLGASGNGSVSSIANGLEWAGLNGMHVANLSLGAPSPSATLEQAVNSATSRGVLVVAASGNSGAGSISYPARYANAMAVGATDQNNNRADFSQYGAGLDIVAPGVNVQSTYPGSTYASLNGTSMATPHVAGAAALVKQKNPSWSNVQIRNHLKNTATSLGSTNLYGSGLVNAEAATR

SEQ ID NO: 60164 - protein, 269 aa, Unidentified
AQSVPWGISRVQAPAAHNRRLTGRGVKVAVLDTGISTHPDLNIRGGASFVPGEPSTQDGNGHGTHVAGTIAALNNDIGVLGVAPSAELYAVKVLGASGSGSVSSIAQGLEWAGNNSMHVANLSLGSPSPSATLEQAVNSATSRGVLVVAASGNSGADSISYPARYANAMAVGATDQNNNRADFSQYGAGLDIVAPGVNVQSTYPGSTYASLNGTSMATPHVAGAAALVKQKNPSWSNVRIRDRLKNTATSLGSTNLYGSGLVNAEAATR

SEQ ID NO: 60165 - protein, 269 aa, Unidentified
AQSVPWGISRVQAPAAHRRGLTGRGVKVAVLDTGISTHPDLNIRGGASFVPGEPSTQDGNGHGTHVAGTIAALDNSIGVLGVAPSAELYAVKVLGASGAGSVSSIAQGLEWAGANGMHVANLSLGSPSPSATLEQAVNSATSRGVLVVAASGNSGAGSISYPARYANAMAVGATDQDNNRASFSQYGAGLDLVAPGVNVQSTYPGSTYFSLNGTSMATPHVAGAAALVKQKNPSWSNVQIRNRLKNTATSLGSTNLYGSGLVNAEAATR

SEQ ID NO: 60166 - protein, 269 aa, Unidentified
AQSVPWGISRVQAPAAHNRGLAGSGVKVAVLDTGISTHPDLNIRGGASFVPGEPSTQDGNGHGTHVAGTIAALNNSIGVLGVAPSAELYAVKVLGASGGGSISSIAQGLEWAGNNGMHVANLSLGSPSPSATLEQAVNSATSRGVLVVAASGNSGADSISYPARYANAMAVGATDQNNNRADFSQYGAGLDIVAPGVNVQSTYPGSTYASLNGTSMATPHVAGAAVLVKQKNPSWSNVRIRDHLKNTATSLGSTNLYGSGLVNAFAATR

SEQ ID NO: 60167 - protein, 269 aa, Unidentified
AQSVPWGISRVQAPAAHNRRLWGSGVKVAVLDTGISTHPDLNIRGGASFVPGEPSTQDGNGHGTHVAGTIAALNNSIGVLGVAPSAELYAVKVLGASGGGAISSIAQGLEWAGNNGMHVANLSLGSPSPSATLEQAVNSATSRGVLVVAASGNSGAGSISYPARYANAMAVGATDQDNNRASFSQYGAGLDIVAPGVNVQSTYPGSTYFSLNGTSMATPHVAGAAVLVKQKNPSWSNVRIRNHLKNTATSLGSTNLYGSGLVNAEAATR

SEQ ID NO: 60168 - protein, 269 aa, Unidentified
AQSVPWGISRVQAPAAHRRGLWGRGVKVAVLDTGISTHPDLNIRGGASFVPGEPSTQDGNGHGTHVAGTIAALDNSIGVLGVAPSAELYAVKVLGASGAGSVSSIAQGLEWAGANGMHVANLSLGSPSPSATLEQAVNSATSRGVLVVAASGNSGAGSISYPARYANAMAVGATDQNNNRASFSQYGAGLDLVAPGVNVQSTYPGSAYASLNGTSMATPHVAGAAALVKQKNPSWSNVQIRNRLKNTATSLGSTNLYGSGLVNAEAATR

SEQ ID NO: 60169 - protein, 269 aa, Unidentified
AQSVPWGISRVQAPAAHRRGLTGRGVKVAVLDTGISTHPDLNIRGGASFVPGEPSTQDGNGHGTHVAGTIAALDNSIGVLGVAPSAELYAVKVLGASGSGSVSSIAQGLEWAGANGMHVANLSLGSPSPSATLEQAVNSATSRGVLVVAASGNSGAGSISYPARYANAMAVGATDQDNNRASFSQYGAGLDLVAPGVNVQSTYPGSAYFSLNGTSMATPHVAGAAALVKQKNPSWSNVQIRNRLKNTATSLGSTNLYGSGLVNAEAATR

SEQ ID NO: 60170 - protein, 269 aa, Unidentified
AQSVPWGISRVQAPAAHNRGLTGSGVKVAVLDTGISTHPDLNIRGGASFVPGEPSTQDGNGHGTHVAGTIAALNNSIGVLGVAPSAELYAVKVLGASGAGAISSIAQGLEWAGNNGMHVANLSLGSPSPSATLEQAVNSATSRGVLVVAASGNSGEGSISYPARYANAMAVGATDQNNNRADFSQYGAGLDIVAPGVNVQSTYPGSTYASLNGTSMATPHVAGAAVLVKQKNPSWSNVRIRDRLKNTATSLGSTNLYGSGLVNAEAATR

SEQ ID NO: 60171 - protein, 269 aa, Unidentified
AQSVPWGISRVQAPASHNRGLAGFGVKVAVLDTGISTHPDLNIRGGASFVPGEPSTQDGNGHGTHVAGTIAALNNSIGVLGVAPSAELYAVKVLGASGGGAISSIAQGLEWAGANGMHVANLSLGSPSPSATLEQAVNSATSRGVLVVAASGNSGAGSISYPARYANAMAVGATDQNNNRASFSQYGAGLDIVAPGVNVQSTAPGSTYASLNGTSMATPHVAGAAVLVKQKNPSWSNVQIRNHLKNTATSLGSTNLYGSGLVNAEAATR

SEQ ID NO: 60172 - protein, 269 aa, Unidentified
AQSVPWGISRVQAPAAHRRRLWGRGVKVAVLDTGISTHPDLNIRGGASFVPGEPSTQDGNGHGTHVAGTIAALDNSIGVLGVAPSAELYAVKVLGASGAGSVSSIAQGLEWAGANGMHVANLSLGSPSPSATLEQAVNSATSRGVLVVAASGNSGAGSISYPARYANAMAVGATDQNNNRASFSQYGAGLDIVAPGVNVQSTYPGSAYASLNGTSMATPHVAGAAALVKQKNPSWSNVQIRNRLKNTATSLGSTNLYGSGLVNAEAATR

SEQ ID NO: 60173 - protein, 269 aa, Unidentified
AQSVPWGISRVQAPAAHNRGLAGSGVKVAVLDTGISTHPDLNIRGGASFVPGEPSTQDGNGHGTHVAGTIAALNNSIGVLGVAPSAELYAVKVLGASGGGAISSIAQGLEWAGNNGMHVANLSLGSPSPSATLEQAVNSATSRGVLVVAASGNSGADSISYPARYANAMAVGATDQNNNRADFSQYGAGLDIVAPGVNVQSTYPGSTYASLNGTSMATPHVAGAAVLVKQKNPSWSNVQIRDHLKNTATSLGSTNLYGSGLVNAFAATR

SEQ ID NO: 60174 - protein, 269 aa, Unidentified
AQSVPWGISRVQAPAAHNRGLAGSGVKVAVLDTGISTHPDLNIRGGASFVPGEPSTQDGNGHGTHVAGTIAALNNSIGVLGVAPSAGLYAVKVLAASGNGAISSIAQGLEWAGNNGMHVANLSLGAPSPSATLEQAVNSATSRGVLVVAASGNSGAGSISYPARYANAMAVGATDQNNNRASFSQYGAGLDIVAPGVNVQSTYPGSTYASLNGTSMATPHVAGAAVLVKQKNPSWSNVRIRNHLKNTATSLGSTNLYGSGLVNAEAATR

SEQ ID NO: 60175 - protein, 269 aa, Unidentified
AQSVPWGISRVQAPAAHNRGLTGSGVKVAVLDTGISTHPDLRITGGASFVPGEPSTQDGNGHGTHVAGTIAALDNRIGVLGVAPSAELYAVKVLGASGGGAISSIAQGLEWAGNNGMHVANLSLGSPSPSATLEQAVNSATSRGVLVVAASGNSGAGSISYPARYANAMAVGATDQNNNRASFSQYGAGLDIVAPGVNVQSTYPGSTYASLNGTSMATPHVAGAAVLVKQKNPSWSNVRIRNHLKNTATSLGSTNLYGSGLVNAEAATR

SEQ ID NO: 60176 - protein, 269 aa, Unidentified
AQSVPWGISRVQAPAAHNRGLTGSGVKVAVLDTGISGHPDLNIRGGASFVPGEPSTQDGNGHGTHVAGTIAALNNSIGVLGVAPSAELYAVKVLGASGSGAISSIAQGLEWAGNNGMHVANLSLGSPSPSATLEQAVNSATSRGVLVVAASGNSGADSISYPARYANAMAVGATDQNNNRASFSQYGAGLDIVAPGVNVQSTYPGSTYASLNGTSMATPHVAGAAVLVKHKNPSWSNVRIRDHLKKTATSLGSTNLYGSGLVNAEAATR

SEQ ID NO: 60177 - protein, 269 aa, Unidentified
AQSVPWGISRVQAPAAHRRRLWGRGVKVAVLDTGISTHPDLNIRGGASFVPGEPSTQDGNGHGTHVAGTIAALDNSIGVLGVAPSAELYAVKVLGASGAGSVSSIAQGLEWAGNNGMHVANLSLGSPSPSATLEQAVNSATSRGVLVVAASGNSGAGSISYPARYANAMAVGATDQNNNRASFSQYGAGLDIVAPGVNVQSTYPQSTYFSLNGTSMATPHVAGAAALVKQKNPSWSNVQIRNRLKNTATSLGSTNLYGSGLVNAEAATR

SEQ ID NO: 60178 - protein, 269 aa, Unidentified
AQSVPWGISRVQAPAAHRRGLWGRGVKVAVLDTGISTHPDLNIRGGASFVPGEPSTQDGNGHGTHVAGTIAALDNSIGVLGVAPSAELYAVKVLGASGSGSVSSIAQGLEWAGANGMHVANLSLGSPSPSATLEQAVNSATSRGVLVVAASGNSGAGSISYPARYANAMAVGATDQDNNRASFSQYGAGLDIVAPGVNVQSTYPGSAYFSLNGTSMATPHVAGAAALVKQKNPSWSNVQIRNRLKNTATSLGSTNLYGSGLVNAEAATR

SEQ ID NO: 60179 - protein, 269 aa, Unidentified
AQSVPWGISRVQAPAAHRRGLWGRGVKVAVLDTGISTHPDLNIRGGASFVPGEPSTQDGNGHGTHVAGTIAALDNSIGVLGVAPSAELYAVKVLGASGAGSVSSIAQGLEWAGANGMHVANLSLGSPSPSATLEQAVNSATSRGVLVVAASGNSGAGSISYPARYANAMAVGATDQNNNRASFSQYGAGLDIVAPGVNVQSTYPQSAYASLNGTSMATPHVAGAAALVKQKNPSWSNVQIRNRLKNTATSLGSTNLYGSGLVNAEAATR

SEQ ID NO: 60180 - protein, 269 aa, Unidentified
AQSVPWGISRVQAPAAHRRGLTGRGVKVAVLDTGISTHPDLNIRGGASFVPGEPSTQDGNGHGTHVAGTIAALDNSIGVLGVAVSAELYAVKVLGASGAGSVSSIAQGLEWAGNNGMHVANLSLGSPSPSATLEQAVNSATSRGVLVVAASGNSGAGSISYPARYANAMAVGATDQDNNRASFSQYGAGLDLVAPGVNVQSTYPQSTYASLNGTSMATPHVAGAAALVKQKNPSWSNVQIRNRLKNTATSLGSTNLYGSGLVNAEAATR

SEQ ID NO: 60181 - protein, 269 aa, Unidentified
AQSVPWGISRVQAPAAHNRGLAGSGVKVAVLDTGISTHPDLNIRGGASFVPGEPSTQDGNGHGTHVAGTIAALNNSIGVLGVAPSAELYAVKVLGASGGGAISSIAQGLEWAGNNGMHVANLSLGSPSPSATLEQAVNSATSRGVLVVAASGNSGADSISYPARYANAMAVGATDQNNNRASFSQYGAGLDIVAPGVNVQSTYPGSTYASLNGTSMATPHVAGAAVLVKQKNPSWSNVRIRDHLKNTATSLGSTNLYGSGLVNAFAATR

SEQ ID NO: 60182 - protein, 269 aa, Unidentified
AQSVPWGISRVQAPAAHNRGLAGSGVKVAVLDTGISTHPDLNIRGGASFVPGEPSTQDGNGHGTHVAGTIAALNNNIGVLGVAPSAELYAVKVLGASGQGAISSIANGLEWAGNNGMHVANLSLGSPSPSATLEQAVNSATSRGVLVVAASGNSGAGSISYPARYANAMAVGATDQNNNRASFSQYGAGLDIVAPGVNVQSTYPGSTYASQNGTSMATPHVAGAAVLVKQKNPSWSNVRIRNHLKNTATSLGSTNLYGSGLVNAEAATR

SEQ ID NO: 60183 - protein, 269 aa, Unidentified
AQSVPWGISRVQAPAAHNRGLTGRGVKVAVLDTGISTHPDLNIRGGASFVPGEPSTQDGEGHGTHVAGTIAALDNSIGVLGVAPSAELYAVKVLGASGAGAISSIAQGLEWAGNNGMHVANLSLGSPSPSATLEQAVNSATSRGVLVVAASGNSGAGSISYPARYANAMAVGATDQNNNRADFSQYGAGLDIVAPGVNVQSTYPGSTYASLNGTSMATPHVAGAAVLVKQKNPSWSNVRIRNHLKNTATSLGSTNLYGSGLVNAEAATR

SEQ ID NO: 60184 - protein, 269 aa, Unidentified
AQSVPWGISRVQAPAAHNRGLTGSGVKVAVLDTGISTHPDLNIRGGASFVPGEPSTQDGNGHGTHVAGTIAALNNSIGVLGVAPSAELYAVKVLGASGGGAISSIAQGLEWAGNNGMHVANLSLGSESPSATLEQAVNSATSRGVLVVAASGNSGAESISYPARYANAMAVGATDQNNNRASFSQYGAGLDIVAPGVNVQSTYPGSTYASLNGTSMATPHVAGAAVLVKQKNPSWSNVRIRDRLKNTATSLGSTNLYGSGLVNAEAATR

SEQ ID NO: 60185 - protein, 269 aa, Unidentified
AQSVPWGISRVQAPAAHNRGLTGSGVKVAVLDTGISTHPDLNIRGGASFVPGEPSTQDGNGHGTHVAGTIAALNNSIGVLGVAPSAELYAVKVLGASGGGAISSIAQGLEWAGLNGMHVANLSLGNPSPSATLEQAVNSATSRGVLVVAASGNSGAGSISYPARYANAMAVGATDQNNNRASFSQYGAGLDIVAPGVNVQSTAPQSAYASLNGTSMATPHVAGAAVLVKQKNPSWSNVQIRNHLKNTATSLGSTNLYGSGLVNAEAATR

SEQ ID NO: 60186 - protein, 269 aa, Unidentified
AQSVPWGISRVQAPAAHNRRLTGSGVKVAVLDTGISTHPDLNIRGGASFVPGEPSTQDGNGHGTHVAGTIAALNNRIGVLGVAPSAELYAVKVLGASGAGAISSIAQGLEWAGANGMHVANLSLGSPSPSATLEQAVNSATSRGVLVVAASGNSGAGSISYPARYANAMAVGATDQDNNRASFSQYGAGLDIVAPGVNVQSTYPGSTYASLNGTSMATPHVAGAAVLVKQKNPSWSNVRIRNHLKNTATSLGSTNLYGSGLVNAEAATR

SEQ ID NO: 60187 - protein, 269 aa, Unidentified
AQSVPWGISRVQAPAAHNRGLAGSGVKVAVLDTGISTHPDLNIRGGASFVPGEPSTQDGNGHGTHVAGTIAALNNSIGVLGVAPSAELYAVKVLGASGGGAISSIAQGLEWAGLNGMHVANLSLGSPSPSATLEQAVNSATSRGVLVVAASGNSGAGSISYPARYANAMAVGATDQNNNRASFSQYGAGLDIVAPGVNVQSTAPQSAYASLNGTSMATPHVAGAAVLVKQKNPSWSNVQIRNHLKNTATSLGSTNLYGSGLVNAEAATR

SEQ ID NO: 60188 - protein, 269 aa, Unidentified
AQSVPWGISRVQAPAAHNRGLAGSGVKVAVLDTGISTHPDLNIRGGASFVPGEPSTQDGNGHGTHVAGTIAALNNSIGVLGVAPSAELYAVKVLGASGGGAISSIAQGLEWAGNNGMHVANLSLGSPSPSATLEQAVNSATSRGVLVVAASGNSGADSISYPARYANAMAVGATDQNNNRAEFSQYGAGLDIVAPGVNVQSTYPGSTYASLNGTSMATPHVAGAAVLVKQKNPSWSNVRIRDHLKNTATSLGSTNLYGSGLVNAEAATR

SEQ ID NO: 60189 - protein, 269 aa, Unidentified
AQSVPWGISRVQAPAAHNRGLAGSGVKVAVLDSGISTHPDLNIRGGASFVPGEPSTQDGNGHGTHVAGTIAALNNSIGVLGVAPSAELYAVKVLGASGGGAISSIAQGLEWAGLNGMHVANLSLGSPSPSATLEQAVNSATSRGVLVVAASGNSGAGSISYPARYANAMAVGATDQNNNRASFSQYGAGLDIVAPGVNVQSTAPGSAYASLNGTSMATPHVAGAAVLVKQKNPSWSNVQIRNHLKNTATSLGSTNLYGSGLVNAEAATR

SEQ ID NO: 60190 - protein, 269 aa, Unidentified
AQSVPWGISRVQAPAAHNRGLAGSGVKVAVLDTGISTHPDLNIRGGASFVPGEPSTQDGNGHGTHVAGTIAALNNSIGVLGVAPSAELYAVKVLGASGGGAISSIAQGLEWAGNNGMHVANLSLGSPSPSATLEQAVNSATSRGVLVVAASGNSGADSISYPARYANAMAVGATDQNNNRAEFSQYGAGLDIVAPGVNVQSTYPGSTYASLNGTSMATPHVAGAAVLVKQKNPSWSNVTIRDHLKNTATSLGSTNLYGSGLVNAEAATR

SEQ ID NO: 60191 - protein, 269 aa, Unidentified
AQSVPWGISRVQAPAAHNRGLQGSGVKVAVLDTGISTHPDLNIRGGASFVPGEPSTQDGNGHGTHVAGTIAALNNSIGVLGVAPSAELYAVKVLGASGGGAISSIAQGLEWAGNNGMHVANLSLGSPSPSATLEQAVNSATSRGVLVVAASGNSGADSISYPARYANAMAVGATDQNNNRAEFSQYGAGLDIVAPGVNVQSTYPGSTYASLNGTSMATPHVAGAAVLVKQKNPSWSNVVIRDHLKNTATSLGSTNLYGSGLVNAEAATR

SEQ ID NO: 60192 - protein, 269 aa, Unidentified
AQSVPWGISRVQAPAAHRRRLTGRGVKVAVLDTGISTHPDLNIRGGASFVPGEPSTQDGNGHGTHVAGTIAALDNSIGVLGVAPSAELYAVKVLGASGAGSVSSIAQGLEWAGANGMHVANLSLGSPSPSATLEQAVNSATSRGVLVVAASGNSGAGSISYPARYANAMAVGATDQDNNRASFSQYGAGLDIVAPGVNVQSTYPGSAYASLNGTSMATPHVAGAAALVKQKNPSWSNVQIRNRLKNTATSLGSTNLYGSGLVNAEAATR

SEQ ID NO: 60193 - protein, 269 aa, Unidentified
AQSVPWGISRVQAPAAHRRGLWGRGVKVAVLDTGISTHPDLNIRGGASFVPGEPSTQDGNGHGTHVAGTIAALDNSIGVLGVAPSAELYAVKVLGASGSGSVSSIAQGLEWAGNNGMHVANLSLGSPSPSATLEQAVNSATSRGVLVVAASGNSGAGSISYPARYANAMAVGATDQDNNRASFSQYGAGLDLVAPGVNVQSTYPQSTYFSLNGTSMATPHVAGAAALVKQKNPSWSNVQIRNRLKNTATSLGSTNLYGSGLVNAEAATR

SEQ ID NO: 60194 - protein, 269 aa, Unidentified
AQSVPWGISRVQAPAAHNRGLTGSGVKVAVLDTGISTHPDLNIRGGASFVPGEPSTQDGNGHGTHVAGTIAALDNNIGVLGVAPRAELYAVKVLGASGSGSVSSIAQGLEWAGNNRMHVANLSLGLQAPSATLEQAVNSATSRGVLVVAASGNSGAGSISYPARYANAMAVGATDQNNNRASFSQYGDGLDIVAPGVNVLSTYPGSTYASLNGTSMATPHVAGAAALVKQKNPSWSNVQIRNHLKNTATSLGSTNLYGSGLVNAEAATR

SEQ ID NO: 60195 - protein, 269 aa, Unidentified
AQSVPWGISRVQAPAAHNRRLTGRGVKVAVLDTGISTHPDLNIRGGASFVPGEPSTQDGEGHGTHVAGTIAALNNGIGVLGVAPSAELYAVKVLGASGSGSVSSIAQGLEWAGNNSMHVANLSLGSESPSATLEQAVNSATSRGVLVVAASGNSGAGSISYPARYANAMAVGATDQNNNRASFSQYGAGLDIVAPGVNVQSTYPGSTYASLNGTSMATPHVAGAAALVKQKNPSWSNVRIRDRLKNTATSLGSTNLYGSGLVNAEAATR

SEQ ID NO: 60196 - protein, 269 aa, Unidentified
AQSVPWGISRVQAPAAHNRGLTGRGVKVAVLDTGISTHPDLNIRGGASFVPGEPSTQDGNGHGTHVAGTIAALDNNIGVLGVAPRAELYAVKVLGASGSGSVSSIAQGLEWAGNNRMHVANLSLGLQAPSATLEQAVNSATSRGVLVVAASGNSGAGSISYPARYANAMAVGATDQNNNRASFSQYGAGLDIVAPGVNVLSTYPGSTYASLNGTSMATPHVAGAAALVKQKNPSWSNVQIRNHLKNTATSLGSTNLYGSGLVNAEAATR

SEQ ID NO: 60197 - protein, 269 aa, Unidentified
AQSVPWGISRVQAPASHNRGLAGSGVKVAVLDTGISTHPDLNIRGGASFVPGEPSTQDGNGHGTHVAGTIAALNNSIGVLGVAPSAELYAVKVLGASGGGAISSIAQGLEWAGANGMHVANLSLGSPSPSATLEQAVNSATSRGVLVVAASGNSGAGSISYPARYANAMAVGATDQNNNRASFSQYGAGLDIVAPGVNVQSTVPQSTYASLNGTSMATPHVAGAAVLVKQKNPSWSNVQIRNHLKNTATSLGSTNLYGSGLVNAEAATR

SEQ ID NO: 60198 - protein, 269 aa, Unidentified
AQTIPWGISRVQAPAAHNRGLTGSGVKVAVLDTGISTHPDLNIRGGASFVPGEPSTQDGNGHGTHVAGTIAALNNSIGVLGVAPSAELYAVKVLGADGEGAISSIAQGLEWAGNNGMHVANLSLGSPSPSATLEQAVNSATSRGVLVVAASGNSGASSISYPARYANAMAVGATDQNNNRASFSQYGAGLDIVAPGVNIQSTYLGSTYASLNGTSMATPHVAGAAALVKQKNPSWSNVQIRNHLKNTATSLGSTNLYGSGLVNAEAATR

SEQ ID NO: 60199 - protein, 269 aa, Unidentified
AQSVPWGISRVQAPASHNRGLAGSGVKVAVLDTGISTHPDLNIRGGASFVPGEPSTQDGNGHGTHVAGTIAALNNSIGVLGVAPSAELYAVKVLGASGGGAISSIAQGLEWAGANGMHVANLSLGNPSPSATLEQAVNSATSRGVLVVAASGNSGAGSISYPARYANAMAVGATDQNNNRASFSQYGAGLDIVAPGVNVQSTAPGSTYASLNGTSMATPHVAGAAVLVKQKNPSWSNVQIRNHLKNTATSLGSTNLYGSGLVNAEAATR

SEQ ID NO: 60200 - protein, 269 aa, Unidentified
AQTVPWGISRVQAPAAHNRGLTGSGVKVAVLDTGISTHPDLNIRGGASFVPGEPSTQDGNGHGTHVAGTIAALDNNIGVLGVAPRAELYAVKVLGASGSGSVSSIAQGLEWAGNNRMHVANLSLGLQAPSATLEQAVNSATSRGVLVVAASGNSGAGSISYPARYANAMAVGATDQNNNRASFSQYGAGLDIVAPGVNVLSTYPGSTYASLNGTSMATPHVAGAAALVKQKNPSWSNVQIRNHLKNTATSLGSTNLYGSGLVNAEAATR

SEQ ID NO: 60201 - protein, 269 aa, Unidentified
AQSVPWGISRVQAPAAHRRGLWGRGVKVAVLDTGISTHPDLNIRGGASFVPGEPSTQDGNGHGTHVAGTIAALDNSIGVLGVAPSAELYAVKVLGASGAGSVSSIAQGLEWAGNNGMHVANLSLGSPSPSATLEQAVNSATSRGVLVVAASGNSGAGSISYPARYANAMAVGATDQDNNRASFSQYGAGLDLVAPGVNVQSTYPQSTYASLNGTSMATPHVAGAAALVKQKNPSWSNVQIRNRLKNTATSLGSTNLYGSGLVNAEAATR

SEQ ID NO: 60202 - protein, 269 aa, Unidentified
AQSVPWGISRVQAPAAHRRGLTGRGVKVAVLDTGISTHPDLNIRGGASFVPGEPSTQDGNGHGTHVAGTIAALDNSIGVLGVAPSAELYAVKVLGASGSGSVSSIAQGLEWAGANGMHVANLSLGSPSPSATLEQAVNSATSRGVLVVAASGNSGAGSISYPARYANAMAVGATDQNNNRASFSQYGAGLDLVAPGVNVQSTYPQSAYFSLNGTSMATPHVAGAAALVKQKNPSWSNVQIRNRLKNTATSLGSTNLYGSGLVNAEAATR

SEQ ID NO: 60203 - protein, 269 aa, Unidentified
AQSVPWGISRVQAPAAHNRGLTGSGVKVAVLDTGISTHPDLRIRGGASFVPGEPSTQDGNGHGTHVAGTIAALDNRIGVLGVAPSAELYAVKVLGASGGGAISSIAQGLEWAGNNGMHVANLSLGSPSPSATLEQAVNSATSRGVLVVAASGNSGAGSISYPARYANAMAVGATDQNNNRASFSQYGAGLDIVAPGVNVQSTYPGSTYASENGTSMATPHVAGAAVLVKQKNPSWSNVRIRNHLKNTATSLGSTNLYGSGLVNAEAATR

SEQ ID NO: 60204 - protein, 269 aa, Unidentified
AQSVPWGISRVQAPAAHRRGLTGSGVKVAVLDTGISTHPDLRIRGGASFVPGEPSTQDGNGHGTHVAGTIAALDNSIGVLGVAPSAELYAVKVLGASGGGAISSIAQGLEWAGNNGMHVANLSLGSPSPSATLEQAVNSATSRGVLVVAASGNSGAGSISYPARYANAMAVGATDQNNNRASFSQYGAGLDIVAPGVNVQSTYPGSTYASLNGTSMATPHVAGAAVLVKQKNPSWSNVRIRNHLKNTATSLGSTNLYGSGLVRAEAATR

SEQ ID NO: 60205 - protein, 269 aa, Unidentified
AQVVPWGISRVQAPAAHNRGLTGSGVKVAVLDTGISTHEDLNIRGGASFVPGEPSTQDGNGHGTHVAGTIAALDNSIGVLGVAPSAELYAVKVLGASGSGSVSSIAQGLEWAGNNRMHVANLSLGSPSPSATLEQAVNSATSRGVLVVAASGNSGAGSISYPARYANAMAVGATDQNNNRASFSQYGAGLDIVAPGVNVLSTYIPSTYKSLNGTSMATPHVAGAAALVKQKNPSWSNVQIRNHLKNTATSLGSTILYGSGLVNAEAATR

SEQ ID NO: 60206 - protein, 269 aa, Unidentified
AQSVPWGISRVQAPAAHNRKLTGSGVKVAVLDTGISTHPDLNIRGGASFVPGEPSTQDGEGHGTHVAGTIAALNNSIGVLGVAPSAELYAVKVLSASGQGSVSSIAGGLEWAGLNGMHVANLSLGAPSPSATLEQAVNSATSRGVLVVAASGNSGAGSISYPARYANAMAVGATDQNNNRADFSQYGAGLDIVAPGVNVQSTYPGSTYASQNGTSMATPHVAGAAALVKQKNPSWSNVQIRNHLKNTATSLGSTNLYGSGLVNAEAATR

SEQ ID NO: 60207 - protein, 269 aa, Unidentified
AQSVPWGISRVQAPAAHNRGLTGSGVKVAVLDTGISTHPDLNIRGGASFVPGEPSTQDGNGHGTHVAGTIAALDNNIGVLGVAPRAELYAVKVLGASGSGSVSSIAQGLEWAGNNRMHVANLSLGLQAPSATLEQAVNSATSRGVLVTAASGNSGAGSISYPARYANAMAVGATDQNNNRASFSQYGAGLDIVAPGVNVLSTYPGSTYASLNGTSMATPHVAGAAALVKQKNPSWSNVQIRNHLKNTATSLGSTNLYGSGLVNAEAATR

SEQ ID NO: 60208 - protein, 269 aa, Unidentified
AQSVPWGISRVQAPAAHRRGLWGRGVKVAVLDTGISTHPDLNIRGGASFVPGEPSTQDGNGHGTHVAGTIAALDNSIGVLGVAPSAELYAVKVLGASGSGSVSSIAQGLEWAGANGMHVANLSLGSPSPSATLEQAVNSATSRGVLVVAASGNSGAGSISYPARYANAMAVGATDQNNNRASFSQYGAGLDLVAPGVNVQSTYPGSTYFSLNGTSMATPHVAGAAALVKQKNPSWSNVQIRNRLKNTATSLGSTNLYGSGLVHAEAATR

SEQ ID NO: 60209 - protein, 269 aa, Unidentified
AQSVPWGISRVQAPASHNRGLTGSGVKVAVLDTGISTHPDLNIRGGASFVPGEPSTQDGNGHGTHVAGTIAALNNSIGVLGVAPSAELYAVKVLGASGGGAISSIAQGLEWAGANGMHVANLSLGNPSPSATLEQAVNSATSRGVLVVAASGNSGAGSISYPARYANAMAVGATDQNNNRASFSQYGAGLDIVAPGVNVQSTAPGSAYASLNGTSMATPHVAGAAVLVKQKNPSWSNVQIRNHLKNTATSLGSTNLYGSGLVNAEAATR

SEQ ID NO: 60210 - protein, 269 aa, Unidentified
AQSVPWGISRVQAPASHNRGLTGSGVKVAVLDSGISTHPDLNIRGGASFVPGEPSTQDGNGHGTHVAGTIAALNNSIGVLGVAPSAELYAVKVLGASGGGAISSIAQGLEWAGLNGMHVANLSLGNPSPSATLEQAVNSATSRGVLVVAASGNSGAGSISYPARYANAMAVGATDQNNNRASFSQYGAGLDIVAPGVNVQSTVPGSTYASLNGTSMATPHVAGAAVLVKQKNPSWSNVQIRNHLKNTATSLGSTNLYGSGLVNAEAATR

SEQ ID NO: 60211 - protein, 269 aa, Unidentified
AQSVPWGISRVQAPAAHNRGLAGSGVKVAVLDTGISTHPDLNIRGGASFVPGEPSTQDGNGHGTHVAGTIAALNNSIGVLGVAPSAELYAVKVLGASGGGAISSIAQGLEWAGNNGMHVANLSLGSPSPSATLEQAVNSATSRGVLVVAASGNSGADSISYPARYANAMAVGATDQNNNRADFSQYGAGLDIVAPGVNVQSTYPGSTYASLNGTSMATPHVAGAAVLVKQKNPSWSNVVIREHLKNTATSLGSTNLYGSGLVNAEAATR

SEQ ID NO: 60212 - protein, 269 aa, Unidentified
AQSVPWGISRVQAPAAHNRRLTGSGVKVAVLDTGISTHPDLDIRGGASFVPGEPSTQDGNGHGTHVAGTIAALNNRIGVLGVAPSAELYAVKVLGASGGGAISSIAQGLEWAGNNGMHVANLSLGSPSPSATLEQAVNSATSRGVLVVAASGNSGAGSISYPARYANAMAVGATDQNNNRASFSQYGAGLDIVAPGVNVQSTYPGSTYASLNGTSMATPHVAGAAVLVKQKNPSWSNVRIRNRLKNTATSLGSTNLYGSGLVNAEAATR

SEQ ID NO: 60213 - protein, 269 aa, Unidentified
AQSVPWGISRVQAPAAHNRGLTGSGVKVAVLDTGISTHPDLNIRGGASFVPGEPSTQDGNGHGTHVAGTIAALNNSIGVLGVAPSAELYAVKVLGASGGGSIASIAQGLEWAGNNGMHVANLSLGSESPSATLEQAVNSATSRGVLVVAASGNSGAESISYPARYANAMAVGATDQNNNRASFSQYGAGLDIVAPGVNVQSTYPGSTYASLNGTSMATPHVAGAAVLVKQKNPSWSNVRIRDRLKNTATSLGSTNLYGSGLVNAEAATR

SEQ ID NO: 60214 - protein, 269 aa, Unidentified
AQSVPWGISRVQAPAAHNRGLTGSGVKVAVLDTGISTHPDLNIRGGASFVPGEPSTQDGNGHGTHAAGTIAALDNSIGVLGVAPSAELYAVKVLGASGSGAISSIAQGLEWAGNNGMHVANLSLGSPSPSATLEQAVNSATSRGVLVVAASGNSGADSISYPARYANAMAVGATDQNNNRASFSQYGAGLDIVAPGVNVQSTYPGSTYASLNGTSMATPHVAGAAVLVKHKNPSWSNVRIRNHLKNTATSVGSTNLYGSGLVNAEAATR

SEQ ID NO: 60215 - protein, 269 aa, Unidentified
AQVVPWGISRVQAPAAHNRGLTGSGVKVAVLDTGISTHPDLNIRGGASFVPGEPSTQDGNGHGTHVAGTIAALDNGIGVLGVAPRAELYAVKVLGASGSGSVSSIAQGLEWAGNNRMHVANLSLGLQAPSATLEQAVNSATSRGVLVVAASGNSGAGSISYPARYANAMAVGATDQNNNRASFSQYGAGLDIVAPGVNVYSTYPGSTYASLNGTSMATPHVAGAAALVKQKNPSWSNVQIRNHLKNTATSLGSTNLYGSGLVNAEAATR

SEQ ID NO: 60216 - protein, 269 aa, Unidentified
AQSVPWGISRVQAPAAHNRGLTGSGVKVAVLDTGISTHPDLNIRGGASFVPGEPSTQDGNGHGTHVAGTIAALDNNIGVLGVAPRAELYAVKVLGASGSGSVSSIAQGLEWAGNNRMHVANLSLGLQAPSATLEQAVNSATSRGVLVVAASGNSGAGSISYPARYANAMAVGATDQNNNRASFSQYGAGLDIVAPGVNVQSTWPGSTYASLNGTSMATPHVAGAAALVKQKNPSWSNVQIRNHLKNTATSLGSTNQYGSGLVNAEAATR

SEQ ID NO: 60217 - protein, 269 aa, Unidentified
AQSVPWGISRVQAPAAHNRGLAGSGVKVAVLDTGISTHPDLNIRGGASFVPGEPSTQDGNGHGTHVAGTIAALNNSIGVLGVAPSAELYAVKVLGASGGGAISSIAQGLEWAGLNGMHVANLSLGNPSPSATLEQAVNSATSRGVLVVAASGNSGAGSISYPARYANAMAVGATDQNNNRASFSQYGAGLDIVAPGVNVQSTVPGSAYASLNGTSMATPHVAGAAVLVKQKNPSWSNVQIRNHLKNTATSLGSTNLYGSGLVNAEAATR

SEQ ID NO: 60218 - protein, 269 aa, Unidentified
AQSVPWGISRVQAPAAHNRGLAGSGVKVAVLDTGISTHPDLNIRGGASFVPGEPSTQDGNGHGTHVAGTIAALNNSIGVLGVAPSAELYAVKVLGASGGGAISSIAQGLEWAGNNGMHVANLSLGSPSPSATLEQAVNSATSRGVLVVAASGNSGADSISYPARYANAMAVGATDQNNNRADFSQYGAGLDIVAPGVNVQSTYPGSTYASLNGTSMATPHVAGAALLVKQKNPSWSNVRIRDHLKNTATSLGSTNLYGSGLVNAEAATR

SEQ ID NO: 60219 - protein, 269 aa, Unidentified
AQSVPWGISRVQAPAAHNRGLTGSGVKVAVLDTGISTHPDLRITGGASFVPGEPSTQDGNGHGTHVAGTIAALNNRIGVLGVAPSAELYAVKVLGASGGGAISSIAQGLEWAGNNGMHVANLSLGSPSPSATLEQAVNSATSRGVLVVAASGNSGAGSISYPARYANAMAVGATDQNNNRASFSQYGAGLDIVAPGVNVQSTYPGSTYASLSGTSMATPHVAGAAVLVKQKNPSWSNVRIRNHLKNTATSLGSTNLYGSGLVNAEAATR

SEQ ID NO: 60220 - protein, 269 aa, Bacillus clausii
AQSVPWGISRLQAPAAHNRGLTASPVKVAVLDTGVSTHPDLNIRGGASFVPGEPSTQDGNGHGTHVAGTIAALNNSIGVLGVAPSAELYAVKVLPASGHGSVSSIAQGLEWAGNNGMHVANLSLGSPSPSATLEQAVNSATSRGILVVAASGNSGAGSISYPARYANAMAVGATDQNNNRASFSQYGAGLDIVAPGVNVQSTYPGSTYASLSGTSMATPHVAGAAALVKQKNPSWSNVQIRNHLKNTATSLGSTNLYGSGLVNAEAGTR

SEQ ID NO: 60221 - protein, 269 aa, Unidentified
AQSVPWGISRVQAPASHNRGLTGSGVKVAVLDTGISTHPDLNIRGGASFVPGEPSTQDGNGHGTHVAGTIAALNNSIGVLGVAPSAELYAVKVLGASGGGAISSIAQGLEWAGLNGVHVANLSLGSPSPSATLEQAVNSATSRGVLVVAASGNSGAGSISYPARYANAMAVGATDQNNNRASFSQYGAGLDIVAPGVNVQSTVPQSTYASLNGTSMATPHVAGAAVLVKQKNPSWSNVQIRNHLKNTATSLGSTNLYGSGLVNAEAATR

SEQ ID NO: 60222 - protein, 269 aa, Unidentified
AQSVPWGISRVQAPAAHNRGLAGSGVKVAVLDTGISTHPDLNIRGGASFVPGEPSTQDGNGHGTHVAGTIAALNNSIGVLGVAPSAELYAVKVLGASGGGAISSIAQGLEWAGNNGMHVANLSLGSPSPSATLEQAVNSATSRGVLVVAASGNSGEGSISYPARYANAMAVGATDQNNNRADFSQYGAGLDIVAPGVNVQSTYPGSTYASLNGTSMATPHVAGAAVLVKQKNPSWSNVRIRDHLKNTATSLGSTNLYGSGLVNAEAATR

SEQ ID NO: 60223 - protein, 269 aa, Unidentified
AQSVPWGISRVQAPAAHNRGLAGGGVKVAVLDTGISTHPDLNIRGGASFVPGEPSTQDGNGHGTHVAGTIAALNNSIGVLGVAPSAELYAVKVLSASGGGAISSIAQGLEWAGNNGMHVANLSLGAPSPSATLEQAVNSATSRGVLVVAASGNSGAGSISYPARYANAMAVGATDQNNNRASFSQYGAGLDIVAPGVNVQSTYPGSTYASLNGTSMATPHVAGAAVLVKQKNPSWSNVRIRNHLKNTATSLGSTNLYGSGLVNAEAATR

SEQ ID NO: 60224 - protein, 269 aa, Unidentified
AQSVPWGISRVQAPAAHNRGLTGSGVKVAVLDTGISTHPDLNIRGGASFVPGEPSTQDGNGHGTHVAGTIAALDNSIGVLGVAPSAELYAVKVLGADGRGAISSIAQGLEWAGNNGMHVANLSLGSPSPSATLEQAVNSATSRGVLVVAASGNDGASSISYPARYANAMAVGATDQNNNRASFSQYGAGLDIVAPGVNVLSTYPGSTYASLNGTSMATPHVAGAAALVKQKNPSWSNVQIRNHLKNTATSLGSTNEYGSGLVNAEAATR

SEQ ID NO: 60225 - protein, 269 aa, Unidentified
AQSVPWGISRVQAPAAHNRGLAGSGVKVAVLDTGISTHPDLNIRGGASFVPGEPSTQDGNGHGTHVAGTIAALNNSIGVLGVAPSAELYAVKVLGASGGGAISSIAQGLEWAGNNGMHVANLSLGSPSPSATLEQAVNSATSRGVLVVAASGNSGADSISYPARYANAMAVGATDQNNNRADFSQYGAGLDIVAPGVNVQSTYPGSTYASLNGTSMATPHVAGAAVLVKQKNPSWSNVVIRDHLKNTATSLGSTNLYGSGLVNAEAATR

SEQ ID NO: 60226 - protein, 269 aa, Unidentified
AQSVPWGISRVQAPAAHRRGLTGRGVKVAVLDTGISTHPDLNIRGGASFVPGEPSTQDGNGHGTHVAGTIAALDNSIGVLGVAPSAELYAVKVLGASGAGSVSSIAQGLEWAGANGMHVANLSLGSPSPSATLEQAVNSATSRGVLVVAASGNSGAGSISYPARYANAMAVGATDQDNNRASFSQYGAGLDIVAPGVNVQSTYPGSAYFSLNGTSMATPHVAGAAALVKQKNPSWSNVQIRNRLKNTATSLGSTNLYGSGLVNAEAATR

SEQ ID NO: 60227 - protein, 269 aa, Unidentified
AQVVPWGVSRVQAPAAHNRGLTGSGVKVAVLDTGISTHPDLNIRGGASFVPGEPSTQDGNGHGTHVAGTIAALDNGIGVLGVAPDAELYAVKVLGASGSGSVSSIAQGLEWAGNNRMHVANLSLGSPSPSATLEQAVNSATSRGVLVVAASGNSGAGSISYPARYANAMAVGATDQNNNRASFSQYGAGLDIVAPGVNVQSTYIGSTYKSLNGTSMATPHVAGAAALVKQKNPSWSNVQIRNHLKITATSLGSTNLYGSGLVNAEAATR

SEQ ID NO: 60228 - protein, 269 aa, Unidentified
AQSVPWGISRVQAPAAHNRGLTGFGVKVAVLDSGISTHPDLNIRGGASFVPGEPSTQDGNGHGTHVAGTIAALNNSIGVLGVAPSAELYAVKVLGASGGGAISSIAQGLEWAGLNGMHVANLSLGNPSPSATLEQAVNSATSRGVLVVAASGNSGAGSISYPARYANAMAVGATDQNNNRASFSQYGAGLDIVAPGVNVQSTAPGSTYASLNGTSMATPHVAGAAVLVKQKNPSWSNVQIRNHLKNTATSLGSTNLYGSGLVNAEAATR

SEQ ID NO: 60229 - protein, 269 aa, Unidentified
AQSVPWGISRVQAPAAHNRGLTGLGVKVAVLDTGISTHPDLNIRGGASFVPGEPSTQDGNGHGTHVAGTIAALDNNIGVLGVAPDSELYAVKVLGASGSGSVSSIAQGLEWAGNNRMHVANLSLGSPSPSATLEQAVNSATSRGVLVVAASGNSGAGSISYPARYANAMAVGATDQNNNRASFSQYGAGLDIVAPGVNVYSTWPGSTYASLNGTSMATPHVAGAAALVKQKNPSWSNVQIRNRLKNTATSLGSTNLYGSGLVNAEAATR

SEQ ID NO: 60230 - protein, 269 aa, Bacillus lentus
AQSVPWGIRRVQAPTAHNRGLTGSGVKVAVLDTGISTHPDLNIRGGASFVPGEPSTQDENGHGTHAAGTIAALNNSIGVLGVAPSAELYAVKVLGASGSGSVSSIAQGLEWAGNNGMHVANLSLGSPSPSATLEQAVNSATSRGVLVVAASGNSGAGSISYPARYANAMAVGATDQNNNRASFSQYGPGLDIVAPGVNIQSTYPGSTYASLNGTSMATPHVAGAAALVKQKNPSWSNVRIRNHLKNTATSLGDTDLYGSGLVNAEAATR

SEQ ID NO: 60231 - protein, 269 aa, Unidentified
AQSVPWGISRVQAPAAHNRGLTGSGVKVAVLDTGISTHPDLNIRGGASFVPGEPSTQDGNGHGTHAAGTIAALNNSIGVLGVAPSAELYAVKVLGASGSGAISSIAQGLEWAGNNGMHVANLSLGSPSPSATLEQAVNSATSRGVLVVAASGNSGADSISYPARYANAMAVGATDQNNNRASFSQYGAGLDIVAPGVNVQSTYPGSTYASLNGTSMATPHVAGAAVLVKHKNPSWSNVRIRNHLKNTATSVGSTWLYGSGLVNAEAATR

SEQ ID NO: 60232 - protein, 269 aa, Unidentified
AQSVPWGISRVQAPAAHNRRLTGRGVKVAVLDTGISTHPDLNIRGGASFVPGEPSTQDGNGHGTHVAGTIAALNNDIGVLGVAPSAELYAVKVLGASGSGSVSSIAQGLEWAGNNSMHVANLSLGSESPSATLEQAVNSATSRGVLVVAASGNSGADSISYPARYANAMAVGATDQNNNRADFSQYGAGLDIVAPGVNVQSTYPGSTYASLNGTSMATPHVAGAAALVKQKNPSWSNVRIRNRLKNTATSLGSTNLYGSGLVNAEAATR

SEQ ID NO: 60233 - protein, 269 aa, Unidentified
AQSVPWGISRVQAPAAHNRGLAGGGVKVAVLDTGISTHPDLNIRGGASFVPGEPSTQDGNGHGTHVAGTIAALNNSIGVLGVAPSAELYAVKVLSASGNGAISSIAQGLEWAGNNGMHVANLSLGAPSPSATLEQAVNSATSRGVLVVAASGNSGAGSISYPARYANAMAVGATDQNNNRASFSQYGAGLDIVAPGVNVQSTYPGSTYASLNGTSMATPHVAGAAVLVKQKNPSWSNVRIRNHLKNTATSLGSTNLYGSGLVNAEAATR

SEQ ID NO: 60234 - protein, 269 aa, Unidentified
AQSVPWGISRVQAPAAHNRKLTGGGVKVAVLDTGISTHPDLNIRGGASFVPGEPSTQDGEGHGTHVAGTIAALNNSIGVLGVAPSAELYAVKVLSASGQGSVSSIANGLEWAGLNGMHVANLSLGAPSPSATLEQAVNSATSRGVLVVAASGNSGAGSISYPARYANAMAVGATDQNNNRASFSQYGAGLDIVAPGVNVQSTYPGSTYASQNGTSMATPHVAGAAALVKQKNPSWSNVQIRNHLKNTATSLGSTNLYGSGLVNAEAATR

SEQ ID NO: 60235 - protein, 269 aa, Unidentified
AQSVPWGISRVQAPAAHNRGLTGSGVKVAVLDTGISTHPDLNIRGGASFVPGEPSTQDGNGHGTHAAGTIAALDNSIGVLGVAPSAELYAVKVLGASGSGAISSIAQGLEWAGNNGMHVANLSLGSPSPSATLEQAVNSATSRGVLVVAASGNSGADSISYPARYANAMAVGATDQNNNRASFSQYGAGLDIVAPGVNVQSTYLGSTYASLNGTSMATPHVAGAAVLVKHKNPSWSNVRIRNHLKNTATSLGSTNLYGSGLVNAEAATR

SEQ ID NO: 60236 - protein, 269 aa, Synthetic construct
AQSVPWGISRVQAPAAHNRGLTGSGVKVAVLDTGISTHPDLNIRGGASFVPGEPSTQDGNGHGTHVAGTIAALNNSIGVLGVAPSAELYAVKVLGASGSGSVSSIAQGLEWAGNNGMHVANLSLGSPSPSATLEQAVNSATSRGVLVVAASGNSGAGSISYPARYANAMAVGATDQNNNRASFSQYGAGLDIVAPGHNASSTYSGSTYEELQPSSMATPHVAGAAALVKQKNPSWSNVQIRNHLKNTATSLGSTNLYGSGLVNAEAATR

SEQ ID NO: 60237 - protein, 269 aa, Unidentified
AQSVPWGISRVQAPAAHNRRLTGRGVKVAVLDTGISTHPDLNIRGGASFVPGEPSTQDGNGHGTHVAGTIAALNNGIGVLGVAPSAELYAVKVLGASGSGSVSSIAQGLEWAGNNDMHVANLSLGSESPSATLEQAVNSATSRGVLVVAASGNSGADSISYPARYANAMAVGATDQNNNRADFSQYGAGLDIVAPGVNVQSTYPGSTYASLNGTSMATPHVAGAAALVKQKNPSWSNVQIRDRLKNTATSLGSTNLYGSGLVNAEAATR

SEQ ID NO: 60238 - protein, 269 aa, Unidentified
AQSVPWGISRVQAPAAHRRRLTGSGVKVAVLDTGISTHPDLDIRGGASFVPGEPSTQDGNGHGTHVAGTIAALNNSIGVLGVAPSAELYAVKVLGASGGGAISSIAQGLEWAGNNGMHVANLSLGSPSPSATLEQAVNSATSRGVLVVAASGNSGAGSISYPARYANAMAVGATDQNNNRASFSQYGAGLDIVAPGVNVQSTYPGSTYASLNGTSMATPHVAGAAVLVKQKNPSWSNVRIRNRLKNTATSLGSTNLYGSGLVNAEAATR

SEQ ID NO: 60239 - protein, 269 aa, Unidentified
AQSVPWGISRVQAPAAHNRGLAGSGVKVAVLDTGISTHPDLNIRGGASFVPGEPSTQDGNGHGTHVAGTIAALNNNIGVLGVAPSAELYAVKVLGASGNGAISSIAGGLEWAGNNGMHVANLSLGSPSPSATLEQAVNSATSRGVLVVAASGNSGAGSISYPARYANAMAVGATDQNNNRASFSQYGAGLDIVAPGVNVQSTYPGSTYASQNGTSMATPHVAGAAVLVKQKNPSWSNVRIRNHLKNTATSLGSTNLYGSGLVNAEAATR

SEQ ID NO: 60240 - protein, 269 aa, Unidentified
AQSVPWGISRVQAPAAHNRGLTGSGVKVAVLDTGISTHPDLNIRGGASFVPGEPSTQDGNGHGTHVAGTIAALNNSIGVLGVAPSAELYAVKVLGASGSGAISSIAQGLEWAGNNGMHVANLSLGSPSPSATLEQAVNSATSRGVLVVAASGNSGADSISYPARYANAMAVGATDQNNNRASFSQYGAGLDIVAPGVNVQSTYPGSTYASLNGTSMATPHVAGAAVLVKHKNPSWSNHRIRDHLKKTATSLGSTNLYGSGLVNAEAATR

SEQ ID NO: 60241 - protein, 269 aa, Unidentified
AQTIPWGISRVQAPAAHNRGLTGSGVKVAVLDTGISTHPDLNIRGGASFVPGEPSTQDGNGHGTHVAGTIAALNNSIGVLGVAPSAELYAVKVLGADGEGAISSIAQGLEWAGNNGMHVANLSLGSPSPSATLEQAVNSATSRGVLVVAASGNSGASSISYPARYANAMAVGATDQNNNRASFSQYGAGLDIMAPGVNIQSTYPGSTYASLNGTSMATPHVAGAAALVKQKNPSWSNVQIRNHLKNTATSLGSTNLYGSGLVNAEAATR

SEQ ID NO: 60242 - protein, 269 aa, Unidentified
AQSVPWGISRVQAPAAHRRGLTGRGVKVAVLDTGISTHPDLNIRGGASFVPGEPSTQDGNGHGTHVAGTIAALDNSIGVLGVAPRAELYAVKVLGASGSGSVSSIAQGLEWAGNNRMHVANLSLGLQAPSATLEQAVNSATSRGVLVVAASGNSGAGSISYPARYANAMAVGATDQNNNRASFSQYGAGLDIVAPGVNVQSTYPGSTYASLNGTSMATPHVAGAAALVKQKNPSWSNVQIRNRLKNTATSLGSTNLYGSGLVNAEAATR

SEQ ID NO: 60243 - protein, 269 aa, Unidentified
AQTIPWGISRVQAPAAHNRGLTGSGVKVAVLDTGISTHPDLHIRGGASFVPGEPSTQDGNGHGTHVAGTIAALNNSIGVLGVAPSAELYAVKVLGADGEGAISSIAQGLEWAGNNGMHVANLSLGSPSPSATLEQAVNSATSRGVLVVAASGNSGASSISYPARYANAMAVGATDQNNNRASFSQYGAGLDIVAPGVNIQSTYPGSTYASLNGTSMATPHVAGAAALVKQKNPSWSNVQIRNHLKNTATSLGSTNLYGSGLVNAEAATR

SEQ ID NO: 60244 - protein, 269 aa, Unidentified
AQSVPWGISRVQAPAAHNRKLTGGGVKVAVLDTGISTHPDLNIRGGASFVPGEPSTQDGEGHGTHVAGAIAALNNNIGVLGVAPSAELYAVKVLSASGGGSVSSIAQGLEWAGLNGMHVANLSLGSPSPSATLEQAVNSATSRGVLVVAASGNSGAGSISYPARYANAMAVGATDQNNNRASFSQYGAGLDIVAPGVNVQSTYPGSTYASQNGTSMATPHVAGAAALVKQKNPSWSNVQIRNHLKNTATSLGSTNLYGSGLVNAEAATR

SEQ ID NO: 60245 - protein, 269 aa, Unidentified
AQSVPWGISRVQAPAAHNRGLAGGGVKVAVLDTGISTHPDLNIRGGASFVPGEPSTQDGNGHGTHVAGTIAALNNNIGVLGVAPSAELYAVKVLGASGQGAISSIAQGLEWAGNNGMHVANLSLGSPSPSATLEQAVNSATSRGVLVVAASGNSGAGSISYPARYANAMAVGATDQNNNRASFSQYGAGLDIVAPGVNVQSTYPGSTYASQNGTSMATPHVAGAAVLVKQKNPSWSNVRIRNHLKNTATSLGSTNLYGSGLVNAEAATR

SEQ ID NO: 60246 - protein, 269 aa, Unidentified
AQSVPWGISRVQAPAAHNRGLTGSGVKVAVLDTGISTHPDLNIRGGASFVPGEPSTQDGNGHGTHAAGTIAALNNSIGVLGVAPSAELYAVKVLGASGSGAISSIAQGLEWAGNNGMHVANLSLGSPSPSATLEQAVNSATSRGVLVVAASGNSGADSISYPARYANVMAVGATDQNNNRASFSQYGAGLDIVAPGVNVLSTYPGSTYASLNGTSMATPHVAGAAVLVKHKNPSWSNVRIRNHLKNTATSLGSTNLYGSGLVNAEAATR

SEQ ID NO: 60247 - protein, 269 aa, Unidentified
AQSVPWGISRVQAPAAHNRGLTGSGVKVAVLDTGISTHPDLNIRGGASFVPGEPSTQDGNGHGTHVAGTIAALNNSIGVLGVAPSAELYAVKVLGVSGSGAISSIAQGLEWAGNNGMHVANLSLGSPSPSATLEQAVNSATSRGVLVVAASGNSGADSISYPARYANAMAVGATDQNNNRASFSQYGAGLDIVAPGVNVQSTYPGSTYASLNGTSMATPHVAGAAVLVKHKNPSWSNVRIRDHLKKTATSLGSTNLYGSGLVNAEAATR

SEQ ID NO: 60248 - protein, 269 aa, Unidentified
AQTIPWGISRVQAPAAHNRGLTGSGVKVAVLDTGISTHPDLSIRGGASFVPGEPSTQDGNGHGTHVAGTIAALNNSIGVLGVAPSAELYAVKVLGADGEGAISSIAQGLEWAGNNGMHVANLSLGSPSPSATLEQAVNSATSRGVLVVAASGNSGASSISYPARYANAMAVGATDQNNNRASFSQYGAGLDIVAPGVNIQSTYPGSTYASLNGTSMATPHVAGAAALVKQKNPSWSNVQIRNHLKNTATSLGSTNLYGSGLVNAEAATR

SEQ ID NO: 60249 - protein, 269 aa, Unidentified
AQSVPWGISRVQAPAAHNRGLQGSGVKVAVLDTGISTHPDLNIRGGASFVPGEPSTQDGNGHGTHVAGTIAALNNSIGVLGVAPSAELYAVKVLGASGGGAISSIAQGLEWAGNNGMHVANLSLGSPSPSATLEQAVNSATSRGVLVVAASGNSGADSISYPARYANAMAVGATDQNNNRADFSQYGAGLDIVAPGVNVQSTYPGSTYASLNGTSMATPHVAGAASLVKQKNPSWSNVRIRDHLKNTATSLGSTNLYGSGLVNAEAATR

SEQ ID NO: 60250 - protein, 269 aa, Unidentified
AQSVPWGISRVQAPAAHNRRLTGSGVKVAVLDTGISTHPDLNIRGGASFVPGEPSTQDGNGHGTHVAGTIAALNNSIGVLGVAPSAELYAVKVLGASGAGAISSIAQGLEWAGANGMHVANLSLGSPSPSATLEQAVNSATSRGVLVVAASGNSGAGSISYPARYANAMAVGATDQDNNRASFSQYGAGLDIVAPGVNVQSTYPGSAYASLNGTSMATPHVAGAAVLVKQKNPSWSNVRIRNHLKNTATSLGSTNLYGSGLVNAEAATR

SEQ ID NO: 60251 - protein, 269 aa, Unidentified
AQTIPWGISRVQAPAAHNRGLTGSGVKVAVLDTGISTHPDLNIRGGASFVPGEPSTQDGNGHGTHVAGTIAALNNSIGVLGVAPSAELYAVKVLGADGEGAISSIAQGLEWAGNNGMHVANLSLGSPSPSATLEQAINSATSRGVLVVAASGNSGASSISYPARYANAMAVGATDQNNNRASFSQYGAGLDIVAPGVNIQSTYPGSTYASLNGTSMATPHVAGAAALVKQKNPSWSNVQIRNHLKNTATSLGSTNLYGSGLVNAEAATR

SEQ ID NO: 60252 - protein, 269 aa, Unidentified
AQSVPWGISRVQAPAAHNRRLTGRGVKVAVLDTGISTHPDLNIRGGASFVPGEPSTQDGEGHGTHVAGTIAALNNDIGVLGVAPSAELYAVKVLGASGSGSVSSIAQGLEWAGNNSMHVANLSLGSESPSATLEQAVNSATSRGVLVVAASGNSGADSISYPARYANAMAVGATDQNNNRASFSQYGAGLDIVAPGVNVQSTYPGSTYASLNGTSMATPHVAGAAALVKQKNPSWSNVQIRDRLKNTATSLGSTNLYGSGLVNAEAATR

SEQ ID NO: 60253 - protein, 269 aa, Unidentified
AQSVPWGISRVQAPAAHNRGLAGGGVKVAVLDTGISTHPDLNIRGGASFVPGEPSTQDGNGHGTHVAGTIAALNNSIGVLGVAPSAELYAVKVLGASGNGAISSIANGLEWAGNNGMHVANLSLGSPSPSATLEQAVNSATSRGVLVVAASGNSGAGSISYPARYANAMAVGATDQNNNRASFSQYGAGLDIVAPGVNVQSTYPGSTYASQNGTSMATPHVAGAAVLVKQKNPSWSNVRIRNHLKNTATSLGSTNLYGSGLVNAEAATR

SEQ ID NO: 60254 - protein, 269 aa, Unidentified
AQSVPWGISRVQAPAAHNRGLTGSGVKVAVLDTGISTHPDLNIRGGASFVPGEPSTQDGNGHGTHVAGTIAALNNSIGVLGVAPSAELYAVKVLGASGGGAISSIAQGLEWAGNNGMHVANLSLGSESPSATLEQAVNSATSRGVLVVAASGNSGAGSISYPARYANAMAVGATDQNNNRADFSQYGAGLDIVAPGVNVQSTYPGSTYASLNGTSMATPHVAGAAVLVKQKRPSWSNVRIRDHLKNTATSLGSTNLYGSGLVNAEAATR

SEQ ID NO: 60255 - protein, 269 aa, Unidentified
AQSVPWGISRVQAPAAHNRGLAGSGVKVAVLDTGISTHPDLNIRGGASFVPGEPSTQDGNGHGTHVAGTIAALDNNIGVLGVAPSAELYAVKVLGASGNGAISSIAQGLEWAGNNGMHVANLSLGSPSPSATLEQAVNSATSRGVLVVAASGNSGAGSISYPARYANAMAVGATDQNNNRASFSQYGAGLDIVAPGVNVQSTYPGSTYASLNGTSMATPHVAGAAVLVKQKNPSWSNVRIRNHLKNTATSLGSTNLYGSGLVNAEAAAR

SEQ ID NO: 60256 - protein, 269 aa, Unidentified
AQTIPWGISRVQAPAAHNRGLTGSGVKVAVLDTGISTHPDLNIRGGASFVPGEPSTQDGNGHGTHVAGTIAALNNSIGVLGVAPSAELYAVKVLGADGEGAISSVAQGLEWAGNNGMHVANLSLGSPSPSATLEQAVNSATSRGVLVVAASGNSGASSISYPARYANAMAVGATDQNNNRASFSQYGAGLDIVAPGVNIQSTYPGSTYASLNGTSMATPHVAGAAALVKQKNPSWSNVQIRNHLKNTATSLGSTNLYGSGLVNAEAATR

SEQ ID NO: 60257 - protein, 269 aa, Unidentified
AQSVPWGISRVRAPAAHNRGLTGSGVKVAVLDTGISTHPDLNIRGGASFVPGEPSTQDGNGHGTHAAGTIAALDNSIGVLGVAPSAELYAVKVLGASGSGAISSIAQGLEWAGNNGMHVANLSLGSPSPSATLEQAVNSATSRGVLVVAASGNSGADSISYPARYANAMAVGATDQNNNRASFSQYGAGLDIVAPGVNVQSTYPGSTYASLNGTSMATPHVAGAAVLVKHKNPSWSNVRIRNHLKNTATSLGSTNLYGSGLVNAEAATR

SEQ ID NO: 60258 - protein, 269 aa, Unidentified
AQSVPWGISRVQAPAAHRRGLTGSGVKVAVLDTGISTHPDLNIRGGASFVPGEPSTQDGNGHGTHVAGTIAALDNRIGVLGVAPSAELYAVKVLGASGGGAISSIAQGLEWAGNNGMHVANLSLGSPSPSATLEQAVNSATSRGVLVVAASGNSGAGSISYPARYANAMAVGATDQNNNRASFSQYGAGLDIVAPGVNVQSTYPGSTYASENGTSMATPHVAGAAVLVKQKNPSWSNVRIRNHLKNTATSLGSTNLYGSGLVNAEAATR

SEQ ID NO: 60259 - protein, 269 aa, Unidentified
AQSVPWGISRVQAPAAHNRGLAGSGVKVAVLDTGISTHPDLNIRGGASFVPGEPSTQDGNGHGTHVAGTIAALNNSIGVLGVAPSAELYAVKVLGASGGGAISSIAQGLEWAGNNGMHVANLSLGSPSPSATLEQAVNSATSRGVLVVAASGNSGADSISYPARYANAMAVGATDQNNNRAEFSQYGAGLDIVAPGVNVQSTYPGSTYASLNGTSMATPHVAGAAVLVKQKNPSWSNVTIREHLKNTATSLGSTNLYGSGLVNAEAATR

SEQ ID NO: 60260 - protein, 269 aa, Unidentified
AQSVPWGISRVQAPAAHNRGLTGSGVKVAVLDTGISTHPDLNIRGGASFVPGEPSTQDGNGHGTHVAGTIAALNNSIGVLGVAPSAELYAVKVLGASGGGSIASIAQGLEWAGNNGMHVANLSLGSESPSATLEQAVNSATSRGVLVVAASGNSGAGSISYPARYANAMAVGATDQNNNRADFSQYGAGLDIVAPGVNVQSTYPGSTYASLNGTSMATPHVAGAAVLVKQKNPSWSNVRIRDRLKNTATSLGSTNLYGSGLVNAEAATR

SEQ ID NO: 60261 - protein, 269 aa, Unidentified
AQSVPWGISRVQAPASHNRGLAGSGVKVAVLDSGISTHPDLNIRGGASFVPGEPSTQDGNGHGTHVAGTIAALNNSIGVLGVAPSAELYAVKVLGASGGGAISSIAQGLEWAGANGMHVANLSLGSPSPSATLEQAVNSATSRGVLVVAASGNSGAGSISYPARYANAMAVGATDQNNNRASFSQYGAGLDIVAPGVNVQSTAPGSTYASLNGTSMATPHVAGAAVLVKQKNPSWSNVQIRNHLKNTATSLGSTNLYGSGLVNAEAATR

SEQ ID NO: 60262 - protein, 269 aa, Unidentified
AQSVPWGISRVQAPAAHNRRLTGSGVKVAVLDTGISTHPDLNIRGGASFVPGEPSTQDGNGHGTHVAGTIAALNNRIGVLGVAPSAELYAVKVLGASGAGAISSIAQGLEWAGNNGMHVANLSLGSPSPSATLEQAVNSATSRGVLVVAASGNSGAGSISYPARYANAMAVGATDQNNNRASFSQYGAGLDIVAPGVNVQSTYPQSAYASLNGTSMATPHVAGAAVLVKQKNPSWSNVRIRNHLKNTATSLGSTNLYGSGLVNAEAATR

SEQ ID NO: 60263 - protein, 269 aa, Unidentified
AQSVPWGISRVQAPAAHRRGLTGRGVKVAVLDTGISTHPDLNIRGGASFVPGEPSTQDGNGHGTHVAGTIAALDNSIGVLGVAPSAELYAVKVLGASGSGSVSSIAQGLEWAGNNGMHVANLSLGSPSPSATLEQAVNSATSRGVLVVAASGNSGAGSISYPARYANAMAVGATDQDNNRASFSQYGAGLDLVAPGVNVQSTYPQSAYFSLNGTSMATPHVAGAAALVKQKNPSWSNVQIRNRLKNTATSLGSTNLYGSGLVNAEAATR

SEQ ID NO: 60264 - protein, 269 aa, Unidentified
AQSVPWGISRVQAPAAHRRGLTGRGVKVAVLDTGISTHPDLNIRGGASFVPGEPSTQDGNGHGTHVAGTIAALDNSIGVLGVAPSAELYAVKVLGASGAGSVSSIAQGLEWAGANGMHVANLSLGSPSPSATLEQAVNSATSRGVLVVAASGNSGAGSISYPARYANAMAVGATDQNNNRASFSQYGAGLDIVAPGVNVQSTYPQSAYFSLNGTSMATPHVAGAAALVKQKNPSWSNVQIRNRLKNTATSLGSTNLYGSGLVNAEAATR

SEQ ID NO: 60265 - protein, 269 aa, Unidentified
AQTIPWGISRVQAPAAHNRGLTGSGVKVAVLDTGISTHPDLNIRGGASFVPGEPSTQDGNGHGTHVAGTIAALNNSIGVLGVAPSAELYAVKVLGADGSGAISSIAQGLEWAGNNGMHVANLSLGSPSPSATLEQAVNSATSRGVLVVAASGNSGASSISYPARYANAMAVGATDQNNNRASFSQYGPGLDIMAPGVNIQSTYPGSTYASLNGTSMATPHVAGAAALVKQKNPSWSNVQIRNHLKNTATSLGSTNLYGSGLVNAEAATR

SEQ ID NO: 60266 - protein, 269 aa, Unidentified
AQSVPWGISRVQAPAAHNRGLTGSGVKVAVLDTGISTHPDLNIRGGASFVPGEPSTQDGNGHGTHAAGTIAALNNSIGVLGVAPSAELYAVKVLGASGSGAISSIAQGLEWAGNNGMHVANLSLGSPSPSATLEQAVNSATSRGVLVVAASGNSGADSISYPARYANVMAVGATDQNNNRASFSQYGAGLDIVAPGVNVQSTYPGSTYASLNGTSMATPHVAGAAVLVKHKNPSWSNVRIRNHLKNTATSVGSTNLYGSGLVNAEAATR

SEQ ID NO: 60267 - protein, 269 aa, Unidentified
AQSVPWGISRVQAPAAHNRGLAGGGVKVAVLDTGISTHPDLNIRGGASFVPGEPSTQDGNGHGTHVAGTIAALDNSIGVLGVAPSAELYAVKVLGASGNGAISSIANGLEWAGNNGMHVANLSLGSPSPSATLEQAVNSATSRGVLVVAASGNSGAGSISYPARYANAMAVGATDQNNNRASFSQYGAGLDIVAPGVNVQSTYPGSTYASLNGTSMATPHVAGAAVLVKQKNPSWSNVRIRNHLKNTATSLGSTNLYGSGLVNAEAATR

SEQ ID NO: 60268 - protein, 269 aa, Unidentified
AQSVPWGISRVQAPAAHRRRLTGRGVKVAVLDTGISTHPDLNIRGGASFVPGEPSTQDGNGHGTHVAGTIAALDNSIGVLGVAPSAELYAVKVLGASGAGSVSSIAQGLEWAGNNGMHVANLSLGSPSPSATLEQAVNSATSRGVLVVAASGNSGAGSISYPARYANAMAVGATDQDNNRASFSQYGAGLDLVAPGVNVQSTYPQSTYASLNGTSMATPHVAGAAALVKQKNPSWSNVQIRNRLKNTATSLGSTNLYGSGLVNAEAATR

SEQ ID NO: 60269 - protein, 269 aa, Unidentified
AQSVPWGISRVQAPAAHRRGLTGSGVKVAVLDTGISTHPDLNIRGGASFVPGEPSTQDGNGHGTHVAGTIAALDNNIGVLGVAPRAELYAVKVLGASGSGSVSSIAQGLEWAGNNGMHVANLSLGLQAPSATLEQAVNSATSRGVLVVAASGNSGAGSISYPARYANAMAVGATDQNNNRASFSQYGAGLDIVAPGVNVLSTYPGSTYASLNGTSMATPHVAGAAALVKQKNPSWSNVQIRNRLKNTATSLGSTNLYGSGLVNAEAATR

SEQ ID NO: 60270 - protein, 269 aa, Unidentified
AQSVPWGISRVQAPAAHNRGLAGSGVKVAVLDTGISTHPDLNIRGGASFVPGEPSTQDGNGHGTHVAGTIAALNNSIGVLGVAPSAELYAVKVLGASGGGAISSIAQGLEWAGNNGMHVANLSLGSPSPSATLEQAVNSATSRGVLVVAASGNSGADSISYPARYANAMAVGATDQNNNRADFSQYGAGLDIVAPGVNVQSTYPGSTYASLNGTSMATPHVAGAASLVKQKNPSWSNVVIRHHLKNTATSLGSTNLYGSGLVNAEAATR

SEQ ID NO: 60271 - protein, 269 aa, Unidentified
AQSVPWGISRVQAPAAHNRGLTGSGVKVAVLDTGISTHPDLNIRGGASFVPGEPSTQDGNGHGTHVAGTIAALNNSIGVLGVAPSAELYAVKVLGASGSGAISSIAQGLEWAGNNGMHVANLSLGSPSPSATLEQAVNSATSRGVLVVAASGNSGADSISYPARYANAMAVGATDQNNNRASFSQYGAGLDIVAPGVNIQSTWIGSTYASLNGTSMATPHVAGAAVLVKHKNPSWSNVRIRNHLKNTATSLGSTNLYGSGLVNAEAATR

SEQ ID NO: 60272 - protein, 269 aa, Unidentified
AQSVPWGISRVQAPAAHNRKLTGGGVKVAVLDTGISTHPDLNIRGGASFVPGEPSTQDGEGHGTHVAGTIAALNNNIGVLGVAPSAELYAVKVLSASGQGSVSSIAQGLEWAGLNGMHVANLSLGAPSPSATLEQAVNSATSRGVLVVAASGNSGAGSISYPARYANAMAVGATDQNNNRASFSQYGAGLDIVAPGVNVQSTYPGSTYASQNGTSMATPHVAGAAALVKQKNPSWSNVQIRNHLKNTATSLGSTNLYGSGLVNAEAATR

SEQ ID NO: 60273 - protein, 269 aa, Unidentified
AQSVPWGISRVQAPAAHNRGLAGGGVKVAVLDTGISTHPDLNIRGGASFVPGEPSTQDGNGHGTHVAGTIAALNNSIGVLGVAPSAELYAVKVLSASGNGAISSIAQGLEWAGNNGMHVANLSLGSPSPSATLEQAVNSATSRGVLVVAASGNSGAGSISYPARYANAMAVGATDQNNNRASFSQYGAGLDIVAPGVNVQSTYPGSTYASQNGTSMATPHVAGAAVLVKQKNPSWSNVRIRNHLKNTATSLGSTNLYGSGLVNAEAATR

SEQ ID NO: 60274 - protein, 269 aa, Unidentified
AQSVPWGISRVQAPAAHNRGLTGSGVKVAVLDTGISTHPDLNIRGGASFVPGEPSTQDGEGHGTHVAGTIAALDNSIGVLGVAPSAELYAVKVLGASGAGAISSIAQGLEWAGNNGMHVANLSLGSPSPSATLEQAVNSATSRGVLVVAASGNSGAGSISYPARYANAMAVGATDQNNNRADFSQYGAGLDIVAPGVNVQSTYIGSTYASLNGTSMATPHVAGAAVLVKQKNPSWSNVRIRNHLKNTATSLGSTNLYGSGLVNAEAATR

SEQ ID NO: 60275 - protein, 269 aa, Unidentified
AQSVPWGISRVQAPAAHRRGLTGRGVKVAVLDTGISTHPDLNIRGGASFVPGEPSTQDGNGHGTHVAGTIAALDNSIGVLGVAPSAELYAVKVLGASGSGSVSSIAQGLEWAGANGMHVANLSLGSPSPSATLEQAVNSATSRGVLVVAASGNSGAGSISYPARYANAMAVGATDQDNNRASFSQYGAGLDLVAPGVNVQSTYPQSTYFSLNGTSMATPHVAGAAALVKQKNPSWSNVQIRNRLKNTATSLGSTNLYGSGLVNAEAATR

SEQ ID NO: 60276 - protein, 269 aa, Unidentified
AQSVPWGISRVQAPAAHRRGLWGRGVKVAVLDTGISTHPDLNIRGGASFVPGEPSTQDGNGHGTHVAGTIAALDNSIGVLGVAPSAELYAVKVLGASGAGSVSSIAQGLEWAGNNGMHVANLSLGSPSPSATLEQAVNSATSRGVLVVAASGNSGAGSISYPARYANAMAVGATDQDNNRASFSQYGAGLDIVAPGVNVQSTYPQSTYFSLNGTSMATPHVAGAAALVKQKNPSWSNVQIRNRLKNTATSLGSTNLYGSGLVNAEAATR

SEQ ID NO: 60277 - protein, 269 aa, Unidentified
AQSVPWGISRVQAPAAHNRGLAGGGVKVAVLDTGISTHPDLNIRGGASFVPGEPSTQDGNGHGTHVAGTIAALNNSIGVLGVAPSAELYAVKVLGASGNGAISSIAQGLEWAGNNGMHVANLSLGAPSPSATLEQAVNSATSRGVLVVAASGNSGAGSISYPARYANAMAVGATDQNNNRASFSQYGAGLDIVAPGVNVQSTYPGSTYASQNGTSMATPHVAGAAVLVKQKNPSWSNVRIRNHLKNTATSLGSTNLYGSGLVNAEAATR

SEQ ID NO: 60278 - protein, 269 aa, Unidentified
AQSVPWGISRVQAPAAHRRRLTGRGVKVAVLDTGISTHPDLNIRGGASFVPGEPSTQDGNGHGTHVAGTIAALDNSIGVLGVAPSAELYAVKVLGASGSGSVSSIAQGLEWAGANGMHVANLSLGSPSPSATLEQAVNSATSRGVLVVAASGNSGAGSISYPARYANAMAVGATDQDNNRASFSQYGAGLDIVAPGVNVQSTYPGSAYFSLNGTSMATPHVAGAAALVKQKNPSWSNVQIRNRLKNTATSLGSTNLYGSGLVNAEAATR

SEQ ID NO: 60279 - protein, 269 aa, Unidentified
AQSVPWGISRVQAPAAHNRKLTGGGVKVAVLDTGISTHPDLNIRGGASFVPGEPSTQDGEGHGTHVAGTIAALNNNIGVLGVAPSAELYAVKVLSASGGGSVSSIAGGLEWAGLNGMHVANLSLGSPSPSATLEQAVNSATSRGVLVVAASGNSGAGSISYPARYANAMAVGATDQNNNRASFSQYGAGLDIVAPGVNVQSTYPGSTYASQNGTSMATPHVAGAAALVKQKNPSWSNVQIRNHLKNTATSLGSTNLYGSGLVNAEAATR

SEQ ID NO: 60280 - protein, 269 aa, Bacillus clausii
AQSVPWGISRIQAPAAHNRGLTASAVKVAVLDTGVSTHPDLNIRGGASFVPGEPSTQDGNGHGTHVAGTIAALNNSIGVLGVAPSAELYAVKVLPASGHGSVSSIAQGLEWAGNNGMHVANLSLGSPSPSATLEQAVNSATSRGILVVAASGNSGAGSISYPARYANAMAVGATDQNNNRASFSQYGAGLDIVAPGVNVQSTYPGSTYASLSGTSMATPHVAGAAALVKQKNPSWSNVQIRNHLKNTATSLGSTNLYGSGLVNAEAGTR

SEQ ID NO: 60281 - protein, 269 aa, Unidentified
AQSVPWGISRVQAPAAHNRGLAGSGVKVAVLDTGISTHPDLNIRGGASFVPGEPSTQDGNGHGTHVAGTIAALNNSIGVLGVAPSAELYAVKVLGASGGGAISSIAQGLEWAGNNGMHVANLSLGSPSPSATLEQAVNSATSRGVLVVAASGNSGADSISYPARYANAMAVGATDQNNNRADFSQYGAGLDIVAPGVNVQSTYPGSTYASLNGTSMATPHVAGAASLVKQKNPSWSNVTIRHHLKNTATSLGSTNLYGSGLVNAEAATR

SEQ ID NO: 60282 - protein, 269 aa, Unidentified
AQSVPWGISRVQAPAAHNRGLTGSGVKVAVLDTGISTHPDLNIRGGASFVPGEPSTQDGNGHGTHAAGTIAALDNSIGVLGVAPSAELYAVKVLGASGSGAISSIAQGLEWAGNNGMHVANLSLGSPSPSATLEQAVNSATSRGVLVVAASGNSGADSISYPARYANAMAVGATDQNNNRASFSQYGAGLDIVAPGVNVRSTYPGSTYASLNGTSMATPHVAGAAVLVKHKNPSWSNVRIRNHLKNTATSLGSTNLYGSGLVNAEAATR

SEQ ID NO: 60283 - protein, 269 aa, Unidentified
AQSVPWGISRVQAPAAHNRGLTGSGVKVAVLDSGISTHPDLNIRGGASFVPGEPSTQDGNGHGTHVAGTIAALNNSIGVLGVAPSAELYAVKVLGASGGGAISSIAQGLEWAGLNGMHVANLSLGNPSPSATLEQAVNSATSRGVLVVAASGNSGAGSISYPARYANAMAVGATDQNNNRASFSQYGAGLDIVAPGVNVQSTAPGSAYASLNGTSMATPHVAGAAVLVKQKNPSWSNVQIRNHLKNTATSLGSTNLYGSGLVNAEAATR

SEQ ID NO: 60284 - protein, 269 aa, Unidentified
AQSVPWGISRVQAPAAHNRGLAGSGVKVAVLDTGISTHPDLNIRGGASFVPGEPSTQDGNGHGTHVAGTIAALNNNIGVLGVAPSAELYAVKVLAASGQGAISSIAQGLEWAGNNGMHVANLSLGSPSPSATLEQAVNSATSRGVLVVAASGNSGAGSISYPARYANAMAVGATDQNNNRASFSQYGAGLDIVAPGVNVQSTYPGSTYASQNGTSMATPHVAGAAVLVKQKNPSWSNVRIRNHLKNTATSLGSTNLYGSGLVNAEAATR

SEQ ID NO: 60285 - protein, 269 aa, Unidentified
AQSVPWGISRVQAPAAHRRRLTGRGVKVAVLDTGISTHPDLNIRGGASFVPGEPSTQDGNGHGTHVAGTIAALDNSIGVLGVAPSAELYAVKVLGASGSGSVSSIAQGLEWAGANGMHVANLSLGSPSPSATLEQAVNSATSRGVLVVAASGNSGAGSISYPARYANAMAVGATDQDNNRASFSQYGAGLDIVAPGVNVQSTYPQSAYASLNGTSMATPHVAGAAALVKQKNPSWSNVQIRNRLKNTATSLGSTNLYGSGLVNAEAATR

SEQ ID NO: 60286 - protein, 269 aa, Unidentified
AQSVPWGISRVQAPAAHNRGLTGRGVKVAVLDTGISTHPDLNIRGGASFVPGEPSTQDGNGHGTHVAGTIAALNNSIGVLGVAPSAELYAVKVLGASGGGAISSIAQGLEWAGNNGMHVANLSLGNPSPSATLEQAVNSATSRGVLVVAASGNSGEGSISYPARYANAMAVGATDQNNNRASFSQYGAGLDIVAPGVNVQSTYPGSTYASLNGTSMATPHVAGAAVLVKQKNPSWSNVRIRDHLKNTATSLGSTNLYGSGLVNAEAATR

SEQ ID NO: 60287 - protein, 269 aa, Unidentified
AQSVPWGISRVQAPAAHNRGLAGSGVKVAVLDTGISTHPDLNIRGGASFVPGEPSTQDGNGHGTHVAGTIAALNNSIGVLGVAPSAELYAVKVLGASGGGAISSIAQGLEWAGNNGMHVANLSLGSPSPSATLEQAVNSATSRGVLVVAASGNSGADSISYPARYANAMAVGATDQNNNRADFSQYGAGLDIVAPGVNVQSTYPGSTYASLNGTSMATPHVAGAASLVKQKNPSWSNVRIRDHLKNTATSLGSTNLYGSGLVNAEAATR

SEQ ID NO: 60288 - protein, 269 aa, Unidentified
AQSVPWGISRVQAPAAHNRGLTGRGVKVAVLDTGISTHPDLRIRGGASFVPGEPSTQDGNGHGTHVAGTIAALNNRIGVLGVAPSAELYAVKVLGASGGGAISSIAQGLEWAGNNGMHVANLSLGSPSPSATLEQAVNSATSRGVLVVAASGNSGAGSISYPARYANAMAVGATDQNNNRASFSQYGAGLDIVAPGVNVQSTYPGSTYASENGTSMATPHVAGAAVLVKQKNPSWSNVRIRNHLKNTATSLGSTNLYGSGLVNAEAATR

SEQ ID NO: 60289 - protein, 269 aa, Unidentified
AQSVPWGISRVQAPAAHNRGLTGSGVKVAVLDTGISTHPDLNIRGGASFVPGEPSTQDGNGHGTHVAGTIAALNNSIGVLGVAPSAELYAVKVLGASGSGAISSIAQGLEWAGNNGMHVANLSLGSPSPSATLEQAVNSATSRGVLVVAASGNSGADSISYPARYANAMAVGATDQNDNRASFSQYGAGLDIVAPGVNVQSTYPGSTYASLNGTSMATPHVAGAAVLVKHKNPSWSNVRIRDHLKKTATSLGSTNLYGSGLVNAEAATR

SEQ ID NO: 60290 - protein, 269 aa, Unidentified
AQSVPWGISRVQAPAAHRRRLWGRGVKVAVLDTGISTHPDLNIRGGASFVPGEPSTQDGNGHGTHVAGTIAALDNSIGVLGVAPSAELYAVKVLGASGSGSVSSIAQGLEWAGANGMHVANLSLGSPSPSATLEQAVNSATSRGVLVVAASGNSGAGSISYPARYANAMAVGATDQDNNRASFSQYGAGLDIVAPGVNVQSTYPQSTYASLNGTSMATPHVAGAAALVKQKNPSWSNVQIRNRLKNTATSLGSTNLYGSGLVNAEAATR

SEQ ID NO: 60291 - protein, 269 aa, Unidentified
AQSVPWGISRVQAPAAHNRRLTGSGVKVAVLDTGISTHPDLNITGGASFVPGEPSTQDGNGHGTHVAGTIAALDNSIGVLGVAPSAELYAVKVLGASGGGAISSIAQGLEWAGNNGMHVANLSLGSPSPSATLEQAVNSATSRGVLVVAASGNSGAGSISYPARYANAMAVGATDQNNNRASFSQYGAGLDIVAPGVNVQSTYPGSTYASLNGTSMATPHVAGAAVLVKQKNPSWSNVRIRNRLKNTATSLGSTNLYGSGLVNAEAATR

SEQ ID NO: 60292 - protein, 269 aa, Unidentified
AQSVPWGISRVQAPAAHNRGLAGSGVKVAVLDTGISTHPDLNIRGGASFVPGEPSTQDGNGHGTHVAGTIAALNNSIGVLGVAPSAELYAVKVLAASGQGAISSIAGGLEWAGNNGMHVANLSLGAPSPSATLEQAVNSATSRGVLVVAASGNSGAGSISYPARYANAMAVGATDQNNNRASFSQYGAGLDIVAPGVNVQSTYPGSTYASLNGTSMATPHVAGAAVLVKQKNPSWSNVRIRNHLKNTATSLGSTNLYGSGLVNAEAATR

SEQ ID NO: 60293 - protein, 269 aa, Unidentified
AQSVPWGISRVQAPAAHNRGLTGSGVKVAVLDTGISTHEDLNIRGGASFVPGEPSTQDGNGHGTHVAGTIAALNNSIGVLGVAPSAELYAVKVLGADGEGAISSIAQGLEWAGNNGMHVANLSLGSPSPSATLEQAVNSATSRGVLVVAASGNSGASSIGYPARYANAMAVGATDQNNNRASFSRYGAGLDIVAPGVNVQSTYPGSTYASLNGTSMATPHVAGAAALVKQKNPSWSNVQIRNHLKNTATSLGDTNLYGSGLVNAEAATR

SEQ ID NO: 60294 - protein, 269 aa, Unidentified
AQSVPWGISRVQAPAAHNRGLRGSGVKVAVLDTGISTHPDLNIRGGASFVPGEPSTQDGNGHGTHVAGTIAALNNSIGVLGVAPSAELYAVKVLAASGQGAISSIAQGLEWAGLNGMHVANLSLGAPSPSATLEQAVNSATSRGVLVVAASGNSGAGSISYPARYANAMAVGATDQNNNRASFSQYGAGLDIVAPGVNVQSTYPGSTYASLNGTSMATPHVAGAAVLVKQKNPSWSNVRIRNHLKNTATSLGSTNLYGSGLVNAEAATR

SEQ ID NO: 60295 - protein, 269 aa, Unidentified
AQTIPWGISRVQAPAAHNRGLTGSGVKVAVLDTGISTHPDLNIRGGASFVPGEPSTQDGNGHGTHVAGTIAALNNSIGVLGVAPSAELYAVKVLGADGEGAISSIAQGLEWAGNNGMHVANLSLGSPSPSATLEQAVNSATSRGVLVVAASGNSGASSISYPARYANAMAVGATDQDNNRASFSQYGAGLDIVAPGVNIQSTYPGSTYASLNGTSMATPHVAGAAALVKQKNPSWSNVQIRNHLKNTATSLGSTNLYGSGLVNAEAATR

SEQ ID NO: 60296 - protein, 269 aa, Unidentified
AQSVPWGISRVQAPAAHNRRLTGSGVKVAVLDTGISTHPDLRIRGGASFVPGEPSTQDGNGHGTHVAGTIAALDNSIGVLGVAPSAELYAVKVLGASGGGAISSIAQGLEWAGNNGMHVANLSLGSPSPSATLEQAVNSATSRGVLVVAASGNSGAGSISYPARYANAMAVGATDQNNNRASFSQYGAGLDIVAPGVNVQSTYPGSTYASLNGTSMATPHVAGAAVLVKQKNPSWSNVRIRNHLKNTATSLGSTNLYGSGLVRAEAATR

SEQ ID NO: 60297 - protein, 269 aa, Unidentified
AQSVPWGISRVQAPAAHNRRLTGSGVKVAVLDTGISTHPDLNIRGGASFVPGEPSTQDGNGHGTHVAGTIAALNNSIGVLGVAPSAELYAVKVLGASGGGAISSIAQGLEWAGANGMHVANLSLGSPSPSATLEQAVNSATSRGVLVVAASGNSGAGSISYPARYANAMAVGATDQDNNRASFSQYGAGLDIVAPGVNVQSTYPQSTYASLNGTSMATPHVAGAAVLVKQKNPSWSNVRIRNHLKNTATSLGSTNLYGSGLVNAEAATR

SEQ ID NO: 60298 - protein, 269 aa, Unidentified
AQVVPWGISRVQAPAAHNRGLTGSGVKVAVLDTGISTHPDLNIRGGASFVPGEPSTQDGNGHGTHVAGTIAALDNNIGVLGVAPRAELYAVKVLGASGSGSVSSIAQGLEWAGNNRMHVANLSLGLQAPSATLEQAVNSATSRGVLVVAASGNSGAGSISYPARYANAMAVGATDQNNNRASFSQYGAGLDIVAPGVNVFSTYPGSTYASLNGTSMATPHVAGAAALVKQKNPSWSNVQIRNHLKNTATSLGSTNLYGSGLVNAEAATR

SEQ ID NO: 60299 - protein, 269 aa, Unidentified
AQSVPWGISRVQAPAAHRRRLTGRGVKVAVLDTGISTHPDLNIRGGASFVPGEPSTQDGNGHGTHVAGTIAALDNSIGVLGVAPSAELYAVKVLGASGAGSVSSIAQGLEWAGNNGMHVANLSLGSPSPSATLEQAVNSATSRGVLVVAASGNSGAGSISYPARYANAMAVGATDQDNNRASFSQYGAGLDLVAPGVNVQSTYPGSTYFSLNGTSMATPHVAGAAALVKQKNPSWSNVQIRNRLKNTATSLGSTNLYGSGLVNAEAATR

SEQ ID NO: 60300 - protein, 269 aa, Unidentified
AQSVPWGISRVQAPAAHRRRLWGRGVKVAVLDTGISTHPDLNIRGGASFVPGEPSTQDGNGHGTHVAGTIAALDNSIGVLGVAPSAELYAVKVLGASGSGSVSSIAQGLEWAGNNGMHVANLSLGSPSPSATLEQAVNSATSRGVLVVAASGNSGAGSISYPARYANAMAVGATDQDNNRASFSQYGAGLDLVAPGVNVQSTYPGSTYFSLNGTSMATPHVAGAAALVKQKNPSWSNVQIRNRLKNTATSLGSTNLYGSGLVNAEAATR

SEQ ID NO: 60301 - protein, 269 aa, Unidentified
AQSVPWGISRVQAPAAHNRGLAGRGVKVAVLDTGISTHPDLNIRGGASFVPGEPSTQDGNGHGTHVAGTIAALNNSIGVLGVAPSAELYAVKVLGASGSGAISSIAQGLEWAGNNGMHVANLSLGIPSPSATLEQAVNSATSRGVLVVAASGNSGADSISYPARYANAMAVGATDQNNNRADFSQYGAGLDIVAPGVNVQSTYPGSTYASLNGTSMATPHVAGAAVLVKQKNPSWSNVQIRDHLKNTATSLGSTNLYGSGLVNAEAATR

SEQ ID NO: 60302 - protein, 269 aa, Unidentified
AQSVPWGISRVQAPAAHRRGLTGRGVKVAVLDTGISTHPDLNIRGGASFVPGEPSTQDGNGHGTHVAGTIAALNNSIGVLGVAPSAELYAVKVLGASGSGSVSSIAQGLEWAGNNRMHVANLSLGLQAPSATLEQAVNSATSRGVLVVAASGNSGAGSIDYPARYANAMAVGATDQNNNRASFSQYGAGLDIVAPGVNVQSTWPGSAYASLNGTSMATPHVAGAAALVKQKNPSWSNVQIRNHLKNTATSLGSTNLYGSGLVNAEAATR

SEQ ID NO: 60303 - protein, 269 aa, Unidentified
AQSVPWGISRVQAPAAHNRGLTGSGVKVAVLDTGISTHPDLNIRGGASFVPGEPSTQDGDGHGTHVAGTIAALNNSIGVLGVAPSAELYAVKVLGASGSGAISSIAQGLEWAGNNGMHVANLSLGSPSPSATLEQAVNSATSRGVLVVAASGNSGADSISYPARYANAMAVGATDQNNNRASFSQYGAGLDIVAPGVNVQSTYPGSTYASLNGTSMATPHVAGAAVLVKHKNPSWSNVRIRDHLKKTATSLGSTNLYGSGLVNAEAATR

SEQ ID NO: 60304 - protein, 269 aa, Unidentified
AQSVPWGISRVQAPAAHRRGLTGRGVKVAVLDTGISTHPDLNIRGGASFVPGEPSTQDGNGHGTHVAGTIAALDNSIGVLGVAPSAELYAVKVLGASGAGSVSSIAQGLEWAGANGMHVANLSLGSPSPSATLEQAVNSATSRGVLVVAASGNSGAGSISYPARYANAMAVGATDQNNNRASFSQYGAGLDLVAPGVNVQSTYPGSAYFSLNGTSMATPHVAGAAALVKQKNPSWSNVQIRNRLKNTATSLGSTNLYGSGLVNAEAATR

SEQ ID NO: 60305 - protein, 269 aa, Unidentified
AQSVPWGISRVQAPAAHNRGLAGSGVKVAVLDTGISTHPDLNIRGGASFVPGEPSTQDGNGHGTHVAGTIAALNNSIGVLGVAPSAELYAVKVLGASGGGAISSIAQGLEWAGNNGMHVANLSLGSPSPSATLEQAVNSATSRGVLVVAASGNSGADSISYPARYANAMAVGATDQNNNRAEFSQYGAGLDIVAPGVNVQSTYPGSTYASLNGTSMATPHVAGAAVLVKQKNPSWSNVVIRHHLKNTATSLGSTNLYGSGLVNAEAATR

SEQ ID NO: 60306 - protein, 269 aa, Unidentified
AQSVPWGISRVQAPAAHRRRLTGRGVKVAVLDTGISTHPDLNIRGGASFVPGEPSTQDGNGHGTHVAGTIAALDNSIGVLGVAPSAELYAVKVLGASGAGSVSSIAQGLEWAGANGMHVANLSLGSPSPSATLEQAVNSATSRGVLVVAASGNSGAGSISYPARYANAMAVGATDQNNNRASFSQYGAGLDIVAPGVNVQSTYPQSAYASLNGTSMATPHVAGAAALVKQKNPSWSNVQIRNRLKNTATSLGSTNLYGSGLVNAEAATR

SEQ ID NO: 60307 - protein, 269 aa, Unidentified
AQSVPWGISRVQAPAAHNRGLAGSGVKVAVLDTGISTHPDLNIRGGASFVPGEPSTQDGNGHGTHVAGTIAALNNNIGVLGVAPSAELYAVKVLAASGNGAISSIAQGLEWAGNNGMHVANLSLGSPSPSATLEQAVNSATSRGVLVVAASGNSGAGSISYPARYANAMAVGATDQNNNRASFSQYGAGLDIVAPGVNVQSTYPGSTYASQNGTSMATPHVAGAAVLVKQKNPSWSNVRIRNHLKNTATSLGSTNLYGSGLVNAEAATR

SEQ ID NO: 60308 - protein, 269 aa, Unidentified
AQSVPWGISRVQAPAAHNRGLQGSGVKVAVLDTGISTHPDLNIRGGASFVPGEPSTQDGNGHGTHVAGTIAALNNSIGVLGVAPSAELYAVKVLGASGGGAISSIAQGLEWAGNNGMHVANLSLGSPSPSATLEQAVNSATSRGVLVVAASGNSGADSISYPARYANAMAVGATDQNNNRAEFSQYGAGLDIVAPGVNVQSTYPGSTYASLNGTSMATPHVAGAAVLVKQKNPSWSNVRIRHHLKNTATSLGSTNLYGSGLVNAEAATR

SEQ ID NO: 60309 - protein, 269 aa, Lederbergia lentus
AQTIPWGISRVQAPAAHNRGLTGSGVKVAVLDTGISTHPDLNIRGGASFVPGEPSTQDGNGHGTHVAGTIAALDNSIGVLGVAPSAELYAVKVLGADGEGAISSIAQGLEWAGNNGMHVANLSLGSPSPSATLEQAVNSATSRGVLVVAASGNSGASSISYPARYANAMAVGATDQNNNRASFSQYGAGLDIVAPGVNIQSTYPGSTYASLNGTSMATPHVAGAAALVKQKNPSWSNVQIRNHLKNTATSLGSTNLYGSGLVNAEAATR

SEQ ID NO: 60310 - protein, 269 aa, Unidentified
AQSVPWGISRVQAPAAHRRGLWGRGVKVAVLDTGISTHPDLNIRGGASFVPGEPSTQDGNGHGTHVAGTIAALDNSIGVLGVAPSAELYAVKVLGASGAGSVSSIAQGLEWAGNNGMHVANLSLGSPSPSATLEQAVNSATSRGVLVVAASGNSGAGSISYPARYANAMAVGATDQDNNRASFSQYGAGLDLVAPGVNVQSTYPGSAYASLNGTSMATPHVAGAAALVKQKNPSWSNVQIRNRLKNTATSLGSTNLYGSGLVNAEAATR

SEQ ID NO: 60311 - protein, 269 aa, Unidentified
AQSVPWGISRVQAPAAHNRGLRGSGVKVAVLDTGISTHPDLNIRGGASFVPGEPSTQDGNGHGTHVAGTIAALNNSIGVLGVAPSAELYAVKVLSASGQGAISSIAQGLEWAGNNGMHVANLSLGAPSPSATLEQAVNSATSRGVLVVAASGNSGAGSISYPARYANAMAVGATDQNNNRASFSQYGAGLDIVAPGVNVQSTYPGSTYASQNGTSMATPHVAGAAVLVKQKNPSWSNVRIRNHLKNTATSLGSTNLYGSGLVNAEAATR

SEQ ID NO: 60312 - protein, 269 aa, Unidentified
AQSVPWGISRVQAPAAHRRGLWGRGVKVAVLDTGISTHPDLNIRGGASFVPGEPSTQDGNGHGTHVAGTIAALDNSIGVLGVAPSAELYAVKVLGASGAGSVSSIAQGLEWAGANGMHVANLSLGSPSPSATLEQAVNSATSRGVLVVAASGNSGAGSISYPARYANAMAVGATDQDNNRASFSQYGAGLDIVAPGVNVQSTYPQSTYASLNGTSMATPHVAGAAALVKQKNPSWSNVQIRNRLKNTATSLGSTNLYGSGLVNAEAATR

SEQ ID NO: 60313 - protein, 269 aa, Unidentified
AQSVPWGISRVQAPAAHNRGLTGRGVKVAVLDTGISTHPDLNIRGGASFVPGEPSTQDGNGHGTHVAGTIAALDNRIGVLGVAPSAELYAVKVLGASGGGAISSIAQGLEWAGNNGMHVANLSLGSPSPSATLEQAVNSATSRGVLVVAASGNSGAGSISYPARYANAMAVGATDQNNNRASFSQYGAGLDIVAPGVNVQSTYPGSTYASLNGTSMATPHVAGAAVLVKQKNPSWSNVRIRNRLKNTATSLGSTNLYGSGLVNAEAATR

SEQ ID NO: 60314 - protein, 269 aa, Unidentified
AQSIPWGISRVQAPAAHNRGLTGSGVKVAVLDTGISTHPDLNIRGGASFVPGEPSTQDGNGHGTHVAGTIAALNNSIGVLGVAPSAELYAVKVLGADGRGAISSIAQGLEWAGNNGMHVANLSLGSPSPSATLEQAVNSATSRGVLVVAASGNSGASSISYPARYANAMAVGATDQNNNRASFSQYGPGVDIMAPGVNVQSTYPGSTYASLNGTSMATPHVAGAAALVKQKNPSWSNVQIRNHLKNTATSLGSTNLYGSGLVNAEAATR

SEQ ID NO: 60315 - protein, 269 aa, Unidentified
AQSVPWGISRVQAPAAHRRGLWGRGVKVAVLDTGISTHPDLNIRGGASFVPGEPSTQDGNGHGTHVAGTIAALDNSIGVLGVAPSAELYAVKVLGASGAGSVSSIAQGLEWAGANGMHVANLSLGSPSPSATLEQAVNSATSRGVLVVAASGNSGAGSISYPARYANAMAVGATDQDNNRASFSQYGAGLDLVAPGVNVQSTYPGSTYFSLNGTSMATPHVAGAAALVKQKNPSWSNVQIRNHLKNTATSLGSTNLYGSGLVNAEAATR

SEQ ID NO: 60316 - protein, 269 aa, Unidentified
AQSVPWGISRVQAPAAHNRGLTGSGVKVAVLDTGISTHPDLNIRGGASFVPGEPSTQDGNGHGTHVAGTIAALNNSIGVLGVAPSAELYAVKVLGASGGGAISSIAQGLEWAGNNGMHVANLSLGSPSPSATLEQAVNSATSRGVLVVAASGNSGEGSISYPARYANAMAVGATDQNNNRADFSQYGAGLDIVAPGVNVQSTYPGSTYASLNGTSMATPHVAGAAVLVKQKNPSWSNVRIRDRLKNTATSLGSTNLYGSGLVNAEAATR

SEQ ID NO: 60317 - protein, 269 aa, Unidentified
AQSVPWGISRVQAPAAHRRGLWGRGVKVAVLDTGISTHPDLNIRGGASFVPGEPSTQDGNGHGTHVAGTIAALDNSIGVLGVAPSAELYAVKVLGASGAGSVSSIAQGLEWAGNNGMHVANLSLGSPSPSATLEQAVNSATSRGVLVVAASGNSGAGSISYPARYANAMAVGATDQDNNRASFSQYGAGLDIVAPGVNVQSTYPQSAYASLNGTSMATPHVAGAAALVKQKNPSWSNVQIRNRLKNTATSLGSTNLYGSGLVNAEAATR

SEQ ID NO: 60318 - protein, 269 aa, Unidentified
AQSVPWGISRVQAPAAHNRGLAGGGVKVAVLDTGISTHPDLNIRGGASFVPGEPSTQDGNGHGTHVAGTIAALNNSIGVLGVAPSAELYAVKVLGASGQGAISSIAQGLEWAGNNGMHVANLSLGAPSPSATLEQAVNSATSRGVLVVAASGNSGAGSISYPARYANAMAVGATDQNNNRASFSQYGAGLDIVAPGVNVQSTYPGSTYASQNGTSMATPHVAGAAVLVKQKNPSWSNVRIRNHLKNTATSLGSTNLYGSGLVNAEAATR

SEQ ID NO: 60319 - protein, 269 aa, Unidentified
AQSVPWGISRVQAPAAHRRRLWGRGVKVAVLDTGISTHPDLNIRGGASFVPGEPSTQDGNGHGTHVAGTIAALDNSIGVLGVAPSAELYAVKVLGASGSGSVSSIAQGLEWAGANGMHVANLSLGSPSPSATLEQAVNSATSRGVLVVAASGNSGAGSISYPARYANAMAVGATDQDNNRASFSQYGAGLDIVAPGVNVQSTYPGSTYFSLNGTSMATPHVAGAAALVKQKNPSWSNVQIRNRLKNTATSLGSTNLYGSGLVNAEAATR

SEQ ID NO: 60320 - protein, 269 aa, Unidentified
AQSVPWGISRVQAPAAHRRRLTGRGVKVAVLDTGISTHPDLNIRGGASFVPGEPSTQDGNGHGTHVAGTIAALDNSIGVLGVAPSAELYAVKVLGASGGGSVSSIAQGLEWAGNNGMHVANLSLGSPSPSATLEQAVNSATSRGVLVVAASGNSGAGSISYPARYANAMAVGATDQDNNRASFSQYGAGLDIVAPGVNVQSTYPQSTYFSLNGTSMATPHVAGAAALVKQKNPSWSNVQIRNRLKNTATSLGSTNLYGSGLVNAEAATR

SEQ ID NO: 60321 - protein, 269 aa, Unidentified
AQSVPWGISRVQAPAAHNRRLTGRGVKVAVLDTGISTHPDLNIRGGASFVPGEPSTQDGEGHGTHVAGTIAALNNDIGVLGVAPSAELYAVKVLGASGSGSVSSIAQGLEWAGNNSMHVANLSLGSESPSATLEQAVNSATSRGVLVVAASGNSGADSISYPARYANAMAVGATDQNNNRASFSQYGAGLDIVAPGVNVQSTYPGSTYASLNGTSMATPHVAGAAALVKQKNPSWSNVRIRDHLKNTATSLGSTNLYGSGLVNAEAATR

SEQ ID NO: 60322 - protein, 269 aa, Unidentified
AQSVPWGISRVQAPAAHNRRLTGRGVKVAVLDTGISTHPDLNIRGGASFVPGEPSTQDGEGHGTHVAGTIAALNNDIGVLGVAPSAELYAVKVLGASGSGSVSSIAQGLEWAGNNDMHVANLSLGSPSPSATLEQAVNSATSRGVLVVAASGNSGAGSISYPARYANAMAVGATDQNNNRADFSQYGAGLDIVAPGVNVQSTYPGSTYASLNGTSMATPHVAGAAALVKQKNPSWSNVRIRDRLKNTATSLGSTNLYGSGLVNAEAATR

SEQ ID NO: 60323 - protein, 269 aa, Unidentified
AQSVPWGISRVQAPAAHNRGLAGSGVKVAVLDSGISTHPDLNIRGGASFVPGEPSTQDGNGHGTHVAGTIAALNNSIGVLGVAPSAELYAVKVLGASGGGAISSIAQGLEWAGLNGMHVANLSLGSPSPSATLEQAVNSATSRGVLVVAASGNSGAGSISYPARYANAMAVGATDQNNNRASFSQYGAGLDIVAPGVNVQSTAPQSTYASLNGTSMATPHVAGAAVLVKQKNPSWSNVQIRNHLKNTATSLGSTNLYGSGLVNAEAATR

SEQ ID NO: 60324 - protein, 269 aa, Unidentified
AQSVPWGISRVQAPAAHNRGLRGGGVKVAVLDTGISTHPDLNIRGGASFVPGEPSTQDGNGHGTHVAGTIAALNNSIGVLGVAPSAELYAVKVLSASGQGAISSIAQGLEWAGNNGMHVANLSLGAPSPSATLEQAVNSATSRGVLVVAASGNSGAGSISYPARYANAMAVGATDQNNNRASFSQYGAGLDIVAPGVNVQSTYPGSTYASLNGTSMATPHVAGAAVLVKQKNPSWSNVRIRNHLKNTATSLGSTNLYGSGLVNAEAATR

SEQ ID NO: 60325 - protein, 269 aa, Unidentified
AQSVPWGISRVQAPAAHRRGLWGRGVKVAVLDTGISTHPDLNIRGGASFVPGEPSTQDGNGHGTHVAGTIAALDNSIGVLGVAPSAELYAVKVLGASGAGSVSSIAQGLEWAGNNGMHVANLSLGSPSPSATLEQAVNSATSRGVLVVAASGNSGAGSISYPARYANAMAVGATDQNNNRASFSQYGAGLDLVAPGVNVQSTYPGSAYFSLNGTSMATPHVAGAAALVKQKNPSWSNVQIRNRLKNTATSLGSTNLYGSGLVNAEAATR

SEQ ID NO: 60326 - protein, 269 aa, Unidentified
AQSVPWGISRVQAPAAHNRGLAGSGVKVAVLDTGISTHPDLNIRGGASFVPGEPSTQDGNGHGTHVAGTIAALNNSIGVLGVAPSAELYAVKVLGASGGGAISSIAQGLEWAGNNGMHVANLSLGSPSPSATLEQAVNSATSRGVLVVAASGNSGADSISYPARYANAMAVGATDQNNNRADFSQYGAGLDIVAPGVNVQSTYPGSTYASLNGTSMATPHVAGAATLVKQKNPSWSNVRIREHLKNTATSLGSTNLYGSGLVNAEAATR

SEQ ID NO: 60327 - protein, 269 aa, Unidentified
AQSVPWGISRVQAPAAHNRGLAGSGVKVAVLDTGISTHPDLNIRGGASFVPGEPSTQDGNGHGTHVAGTIAALNNSIGVLGVAPSAELYAVKVLGASGGGAISSIAQGLEWAGNNGMHVANLSLGNPSPSATLEQAVNSATSRGVLVVAASGNSGAESISYPARYANAMAVGATDQNNNRASFSQYGAGLDIVAPGVNVQSTYPGSTYASLNGTSMATPHVAGAAVLVKQKNPSWSNVRIRDHLKNTATSLGSTNLYGSGLVNAEAATR

SEQ ID NO: 60328 - protein, 269 aa, Unidentified
AQSVPWGISRVQAPAAHNRKLTGGGVKVAVLDTGISTHPDLNIRGGASFVPGEPSTQDGEGHGTHVAGTIAALNNNIGVLGVAPSAELYAVKVLAASGNGSVSSIAQGLEWAGLNGMHVANLSLGAPSPSATLEQAVNSATSRGVLVVAASGNSGAGSISYPARYANAMAVGATDQNNNRASFSQYGAGLDIVAPGVNVQSTYPGSTYASQNGTSMATPHVAGAAALVKQKNPSWSNVQIRNHLKNTATSLGSTNLYGSGLVNAEAATR

SEQ ID NO: 60329 - protein, 269 aa, Unidentified
AQSVPWGISRVQAPAAHNRGLAGSGVKVAVLDTGISTHPDLNIRGGASFVPGEPSTQDGNGHGTHVAGTIAALNNSIGVLGVAPSAELYAVKVLGASGGGAISSIAQGLEWAGNNGMHVANLSLGSPSPSATLEQAVNSATSRGVLVVAASGNSGADSISYPARYANAMAVGATDQNNNRAEFSQYGAGLDIVAPGVNVQSTYPGSTYASLNGTSMATPHVAGAASLVKQKNPSWSNVTIREHLKNTATSLGSTNLYGSGLVNAEAATR

SEQ ID NO: 60330 - protein, 269 aa, Unidentified
AQSVPWGISRVQAPAAHNRGLAGRGVKVAVLDTGISTHPDLNIRGGASFVPGEPSTQDGNGHGTHVAGTIAALNNSIGVLGVAPSAELYAVKVLGASGGGAISSIAQGLEWAGNNGMHVANLSLGSESPSATLEQAVNSATSRGVLVVAASGNSGAGSISYPARYANAMAVGATDQNNNRASFSQYGAGLDIVAPGVNVQSTYPGSTYASLNGTSMATPHVAGAAVLVKQKNPSWSNVRIRNHLKNTATSLGSTNLYGSGLVNVEAATR

SEQ ID NO: 60331 - protein, 269 aa, Unidentified
AQSVPWGISRVQAPAAHRRGLWGRGVKVAVLDTGISTHPDLNIRGGASFVPGEPSTQDGNGHGTHVAGTIAALDNSIGVLGVAPSAELYAVKVLGASGAGSVSSIAQGLEWAGANGMHVANLSLGSPSPSATLEQAVNSATSRGVLVVAASGNSGAGSISYPARYANAMAVGATDQNNNRASFSQYGAGLDLVAPGVNVQSTYPGSTYFSLNGTSMATPHVAGAAALVKQKNPSWSNVQIRNRLKNTATSLGSTNLYGSGLVNAEAATR

SEQ ID NO: 60332 - protein, 269 aa, Unidentified
AQSVPWGISRVQAPAAHNRGLTGRGVKVAVLDTGISTHPDLNIRGGASFVPGEPSTQDGNGHGTHVAGTIAALNNSIGVLGVAPSAELYAVKVLGASGGGAISSIAQGLEWAGNNGMHVANLSLGSPSPSATLEQAVNSATSRGVIVVAASGNSGEGSISYPARYANAMAVGATDQNNNRASFSQYGAGLDIVAPGVNVQSTYPGSTYASLNGTSMATPHVAGAAVLVKQKNPSWSNVRIRDHLKNTATSLGSTNLYGSGLVNAEAATR

SEQ ID NO: 60333 - protein, 269 aa, Unidentified
AQSVPWGISRVQAPAAHNRGLAGSGVKVAVLDTGISTHPDLNIRGGASFVPGEPSTQDGNGHGTHVAGTIAALNNSIGVLGVAPSAELYAVKVLSASGNGAISSIAQGLEWAGNNGMHVANLSLGAPSPSATLEQAVNSATSRGVLVVAASGNSGAGSISYPARYANAMAVGATDQNNNRASFSQYGAGLDIVAPGVNVQSTYPGSTYASQNGTSMATPHVAGAAVLVKQKNPSWSNVRIRNHLKNTATSLGSTNLYGSGLVNAEAATR

SEQ ID NO: 60334 - protein, 269 aa, Unidentified
AQSVPWGISRVQAPAAHNRGLAGSGVKVAVLDTGISTHPDLNIRGGASFVPGEPSTQDGNGHGTHVAGTIAALNNSIGVLGVAPSAELYAVKVLGASGGGAISSIAQGLEWAGNNGMHVANLSLGSPSPSATLEQAVNSATSRGVLVVAASGNSGADSISYPARYANAMAVGATDQNNNRASFSQYGAGLDIVAPGVNVQSTYPGSTYASLNGTSMATPHVAGAAVLVKQKNPSWSNVRIRDRLKNTATSLGSTNLYGSGLVNAEAATR

SEQ ID NO: 60335 - protein, 269 aa, Unidentified
AQSVPWGISRVQAPAAHRRRLTGRGVKVAVLDTGISTHPDLNIRGGASFVPGEPSTQDGNGHGTHVAGTIAALDNSIGVLGVAPSAELYAVKVLGASGAGSVSSIAQGLEWAGANGMHVANLSLGSPSPSATLEQAVNSATSRGVLVVAASGNSGAGSISYPARYANAMAVGATDQNNNRASFSQYGAGLDIVAPGVNVQSTYPGSAYFSLNGTSMATPHVAGAAALVKQKNPSWSNVQIRNRLKNTATSLGSTNLYGSGLVNAEAATR

SEQ ID NO: 60336 - protein, 269 aa, Unidentified
AQSVPWGISRVQAPAAHNRGLTGSGVKVAVLDTGISTHPDLNIRGGASFVPGEPSTQDGNGHGTHVAGTIAALNNSIGVLGVAPSAELYAVKVLGASGSGAISSIAQGLEWAGNNGMHVANLSLGSPSPSATLEQAVNSATSRGVLVVAASGNSGADSISYPARYANAMAVGATDQNSNRASFSQYGAGLDIVAPGVNVQSTYPGSTYASLNGTSMATPHVAGAAVLVKHKNPSWSNVRIRDHLKKTATSLGSTNLYGSGLVNAEAATR

SEQ ID NO: 60337 - protein, 269 aa, Unidentified
AQSVPWGISRVQAPAAHNRGLAGSGVKVAVLDTGISTHPDLNIRGGASFVPGEPSTQDGNGHGTHVAGTIAALNNSIGVLGVAPSAELYAVKVLGASGGGAISSIAQGLEWAGNNGMHVANLSLGSPSPSATLEQAVNSATSRGVLVVAASGNSGADSISYPARYANAMAVGATDQNNNRADFSQYGAGLDIVAPGVNVQSTYPGSTYASLNGTSMATPHVAGAAVLVKQKNPSWSNVTIRDHLKNTATSLGSTNLYGSGLVNAEAATR

SEQ ID NO: 60338 - protein, 269 aa, Unidentified
AQSVPWGISRVQAPAAHNRGLTGSGVKVAVLDTGISTHPDLNIRGGASFVPGEPSTQDGNGHGTHVAGTIAALDNNIGVLGVAPRAELYAVKVLGASGSGSVSSISQGLEWAGNNRMHVANLSLGLQAPSATLEQAVNSATSRGVLVVAASGNSGAGSISYPARYANAMAVGATDQNNNRASFSQYGAGLDIVAPGVNVLSTYPGSTYASLNGTSMATPHVAGAAALVKQKNPSWSNVQIRNHLKNTATSLGSTNLYGSGLVNAEAATR

SEQ ID NO: 60339 - protein, 269 aa, Unidentified
AQSVPWGISRVQAPAAHNRGLTGSGVKVAVLDTGISTHPDLNIRGGASFVPGEPSTQDGNGHGTHVAGTIAALNNSIGVLGVAPSAELYAVKVLGDSGSGAISSIAQGLEWAGNNGMHVANLSLGSPSPSATLEQAVNSATSRGVLVVAASGNSGADSISYPARYANAMAVGATDQNNNRASFSQYGAGLDIVAPGVNVQSTYPGSTYASLNGTSMATPHVAGAAVLVKHKNPSWSNVRIRDHLKKTATSLGSTNLYGSGLVNAEAATR

SEQ ID NO: 60340 - protein, 269 aa, Unidentified
AQSVPWGISRVQAPAAHNRGLTGSGVKVAVLDTGISTHPDLRIRGGASFVPGEPSTQDGNGHGTHVAGTIAALDNRIGVLGVAPSAELYAVKVLGASGGGAISSIAQGLEWAGNNGMHVANLSLGSPSPSATLEQAVNSATSRGVLVVAASGNSGAGSISYPARYANAMAVGATDQNNNRASFSQYGAGLDIVAPGVNVQSTYPGSTYASLNGTSMATPHVAGAAVLVKQKNPSWSNVRIRNRLKNTATSLGSTNLYGSGLVNAEAATR

SEQ ID NO: 60341 - protein, 269 aa, Unidentified
AQSVPWGISRVQAPAAHRRRLWGRGVKVAVLDTGISTHPDLNIRGGASFVPGEPSTQDGNGHGTHVAGTIAALDNSIGVLGVAPSAELYAVKVLGASGSGSVSSIAQGLEWAGNNGMHVANLSLGSPSPSATLEQAVNSATSRGVLVVAASGNSGAGSISYPARYANAMAVGATDQDNNRASFSQYGAGLDIVAPGVNVQSTYPQSAYASLNGTSMATPHVAGAAALVKQKNPSWSNVQIRNRLKNTATSLGSTNLYGSGLVNAEAATR

SEQ ID NO: 60342 - protein, 269 aa, Unidentified
AQSVPWGISRVQAPAAHRRGLWGRGVKVAVLDTGISTHPDLNIRGGASFVPGEPSTQDGNGHGTHVAGTIAALDNSIGVLGVAPSAELYAVKVLGASGAGSVSSIAQGLEWAGANGMHVANLSLGSPSPSATLEQAVNSATSRGVLVVAASGNSGAGSISYPARYANAMAVGATDQDNNRASFSQYGAGLDLVAPGVNVQSTYPGSTYASLNGTSMATPHVAGAAALVKQKNPSWSNVQIRNRLKNTATSLGSTNLYGSGLVNAEAATR

SEQ ID NO: 60343 - protein, 269 aa, Unidentified
AQSVPWGISRVQAPAAHNRGLTGSGVKVAVLDTGISTHEDLNVRGGVSFVPGEPSYQDGNGHGTHVAGTIAALNNSIGVVGVAPSADLYAVKVLGASGSGSVSSIAQGLEWAGQNGMHVANLSLGSPEPSATLEQAVNSATSRGVLVVAASGNSGAGSISYPARYANAMAVGATDQNNNRASFSQYGAGLDIVAPGVNVQSTYPGSTYASLNGTSMATPHVAGAAALVKQKNPSWSNVQIRDHLKNTATSLGSTNLYGSGLVNAEAATR

SEQ ID NO: 60344 - protein, 269 aa, Unidentified
AQSVPWGISRVQAPAAHNRRLTGRGVKVAVLDTGISTHPDLNIRGGASFVPGEPSTQDGNGHGTHVAGTIAALNNDIGVLGVAPSAELYAVKVLGASGSGSVSSIAQGLEWAGNNDMHVANLSLGSESPSATLEQAVNSATSRGVLVVAASGNSGADSISYPARYANAMAVGATDQNNNRASFSQYGAGLDIVAPGVNVQSTYPGSTYASLNGTSMATPHVAGAAALVKQKNPSWSNVRIRDRLKNTATSLGSTNLYGSGLVNAEAATR

SEQ ID NO: 60345 - protein, 269 aa, Unidentified
AQSVPWGISRVQAPAAHNRRLTGRGVKVAVLDTGISTHPDLNIRGGASFVPGEPSTQDGNGHGTHVAGTIAALNNGIGVLGVAPSAELYAVKVLGASGSGSVSSIAQGLEWAGNNDMHVANLSLGSESPSATLEQAVNSATSRGVLVVAASGNSGADSISYPARYANAMAVGATDQNNNRADFSQYGAGLDIVAPGVNVQSTYPGSTYASLNGTSMATPHVAGAAALVKQKNPSWSNVRIRDHLKNTATSLGSTNLYGSGLVNAEAATR

SEQ ID NO: 60346 - protein, 269 aa, Unidentified
AQSVPWGISRVQAPAAHNRGLAGSGVKVAVLDTGISTHPDLNIRGGASFVPGEPSTQDGNGHGTHVAGTIAALNNSIGVLGVAPSAELYAVKVLGASGGGAISSIAQGLEWAGNNGMHVANLSLGSPSPSATLEQAVNSATSRGVLVVAASGNSGADSISYPARYANAMAVGATDQNNNRADFSQYGAGLDIVAPGVNVQSTYPGSTYASLNGTSMATPHVAGAAVLVKQKNPSWSNVRIRHHLKNTATSLGSTNLYGSGLVNAEAATR

SEQ ID NO: 60347 - protein, 269 aa, Unidentified
AQVVPWGISRVQAPAAHNRGLTGSGVKVAVLDTGISTHPDLNIRGGASFVPGEPSTQDGNGHGTHVAGTIAALDNGIGVLGVAPRAELYAVKVLGASGSGSVSSIAQGLEWAGNNRMHVANLSLGLQAPSATLEQAVNSATSRGVLVVAASGNSGAGSISYPARYANAMAVGATDQNNNRASFSQYGAGLDIVAPGVNVFSTYPGSTYASLNGTSMATPHVAGAAALVKQKNPSWSNVQIRNHLKNTATSLGSTNLYGSGLVNAEAATR

SEQ ID NO: 60348 - protein, 269 aa, Unidentified
AQSVPWGISRVQAPAAHNRGLTGSGVKVAVLDTGISTHPDLNIRGGASFVPGEPSTQDGNGHGTHVAGTIAALNNSIGVLGVAPSAELYAVKVLGASGGGAISSIAQGLEWAGNNGMHVANLSLGSESPSATLEQAVNSATSRGVLVVAASGNSGAESISYPARYANAMAVGATDQNNNRASFSQYGAGLDIVAPGVNVQSTYPGSTYASLNGTSMATPHVAGAAVLVKQKRPSWSNVRIRDHLKNTATSLGSTNLYGSGLVNAEAATR

SEQ ID NO: 60349 - protein, 269 aa, Unidentified
AQSVPWGISRVQAPAAHNRGLAGRGVKVAVLDTGISTHPDLNIRGGASFVPGEPSTQDGNGHGTHVAGTIAALNNSIGVLGVAPSAELYAVKVLGASGGGAISSIAQGLEWAGNNGMHVANLSLGSESPSATLEQAVNSATSRGVLVVAASGNSGAGSISYPARYANAMAVGATDQNNNRASFSQYGAGLDIVAPGVNVQSTYPGSTYASLNGTSMATPHVAGAAVLVKQKNPSWSNVRIRNHLKNTATSLGSTNLYGSGLVNAEVATR

SEQ ID NO: 60350 - protein, 269 aa, Unidentified
AQSVPWGISRVQAPAAHNRGLTGRGVKVAVLDTGISTHPDLNIRGGASFVPGEPSTQDGNGHGTHVAGTIAALNNSIGVLGVAPSAELYAVKVLGASGGGAISSIAQGLEWAGNNGMHVANLSLGSPSPSATLEQAVNSATSRGVLVVAASGNSGEGSISYPARYANAMAVGATDQNNNRASFSQYGAGLDIVAPGVNVQSTYPGSTYASLNGTSMATPHVAGAAVLVKQKNPSWSNVRIRDRLKNTATSLGSTNLYGSGLVNAEAATR

SEQ ID NO: 60351 - protein, 269 aa, Unidentified
AQSVPWGISRVQAPAAHRRRLWGRGVKVAVLDTGISTHPDLNIRGGASFVPGEPSTQDGNGHGTHVAGTIAALDNSIGVLGVAPSAELYAVKVLGASGSGSVSSIAQGLEWAGNNGMHVANLSLGSPSPSATLEQAVNSATSRGVLVVAASGNSGAGSISYPARYANAMAVGATDQDNNRASFSQYGAGLDLVAPGVNVQSTYPQSTYASLNGTSMATPHVAGAAALVKQKNPSWSNVQIRNRLKNTATSLGSTNLYGSGLVNAEAATR

SEQ ID NO: 60352 - protein, 269 aa, Unidentified
AQSVPWGISRVQAPAAHNRGLAGSGVKVAVLDTGISTHPDLNIRGGASFVPGEPSTQDGNGHGTHVAGTIAALNNSIGVLGVAPSAELYAVKVLAASGQGAISSIAQGLEWAGNNGMHVANLSLGAPSPSATLEQAVNSATSRGVLVVAASGNSGAGSISYPARYANAMAVGATDQNNNRASFSQYGAGLDIVAPGVNVQSTYPGSTYASQNGTSMATPHVAGAAVLVKQKNPSWSNVRIRNHLKNTATSLGSTNLYGSGLVNAEAATR

SEQ ID NO: 60353 - protein, 269 aa, Bacillus clausii
AQSVPWGISRIQAPAAHNRGLTASPVKVAVLDTGVSTHPDLNIRGGASFVPGEPSTQDGNGHGTHVAGTIAALNNSIGVLGVAPSAELYAVKVLPASGHGSVSSIAQGLEWAGNNGMHVANLSLGSPSPSATLEQAVNSATSRGILVVAASGNSGAGSISYPARYANAMAVGATDQNNNRASFSQYGAGLDIVAPGVNVQSTYPGSTYASLSGTSMATPHVAGAAALVKQKNPSWSNVQIRNHLKNTATSLGSTNLYGSGLVNAEAGTR

SEQ ID NO: 60354 - protein, 269 aa, Unidentified
AQSVPWGISRVQAPAAHNRRLTGRGVKVAVLDTGISTHPDLNIRGGASFVPGEPSTQDGEGHGTHVAGTIAALNNDIGVLGVAPSAELYAVKVLGASGSGSVSSIAQGLEWAGNNSMHVANLSLGSPSPSATLEQAVNSATSRGVLVVAASGNSGADSISYPARYANAMAVGATDQNNNRADFSQYGAGLDIVAPGVNVQSTYPGSTYASLNGTSMATPHVAGAAALVKQKNPSWSNVRIRDHLKNTATSLGSTNLYGSGLVNAEAATR

SEQ ID NO: 60355 - protein, 269 aa, Unidentified
AQSVPWGISRVQAPAAHRRRLTGRGVKVAVLDTGISTHPDLNIRGGASFVPGEPSTQDGNGHGTHVAGTIAALDNSIGVLGVAPSAELYAVKVLGASGSGSVSSIAQGLEWAGANGMHVANLSLGSPSPSATLEQAVNSATSRGVLVVAASGNSGAGSISYPARYANAMAVGATDQNNNRASFSQYGAGLDLVAPGVNVQSTYPQSTYFSLNGTSMATPHVAGAAALVKQKNPSWSNVRIRNHLKNTATSLGSTNLYGSGLVNAEAATR

SEQ ID NO: 60356 - protein, 269 aa, Unidentified
AQSVPWGISRVQAPAAHNRGLWGRGVKVAVLDTGISTHPDLRITGGASFVPGEPSTQDGNGHGTHVAGTIAALNNSIGVLGVAPSAELYAVKVLGASGAGSVSSIAQGLEWAGNNGMHVANLSLGSPSPSATLEQAVNSATSRGILVVAASGNSGAGSISYPARYANAMAVGATDQNNNRASFSQYGAGLDIVAPGVNVQSTYIQSAYASLNGTSMATPHVAGAAALVKQKNPSWSNVQIRNHLKNTATSLGSTNLYGSGLVNAEAATR

SEQ ID NO: 60357 - protein, 269 aa, Unidentified
AQSVPWGISRVQAPAAHNRGLTGSGVKVAVLDTGISTHPDLNIRGGASFVPGEPSTQDGNGHGTHAAGTIAALDNSNGVLGVAPSAELYAVKVLGASGSGAISSIAQGLEWAGNNGMHVANLSLGSPSPSATLEQAVNSATSRGVLVVAASGNSGADSISYPARYANAMAVGATDQNNNRASFSQYGAGLDIVAPGVNVQSTYPGSTYASLNGTSMATPHVAGAAVLVKHKNPSWSNVRIRNHLKNTATSLGSTNLYGSGLVNAEAATR

SEQ ID NO: 60358 - protein, 269 aa, Unidentified
AQSVPWGISRVQAPAAHRRRLTGRGVKVAVLDTGISTHPDLNIRGGASFVPGEPSTQDGNGHGTHVAGTIAALDNSIGVLGVAPSAELYAVKVLGASGSGSVSSIAQGLEWAGANGMHVANLSLGSPSPSATLEQAVNSATSRGVLVVAASGNSGAGSISYPARYANAMAVGATDQNNNRASFSQYGAGLDIVAPGVNVQSTYPQSAYFSLNGTSMATPHVAGAAALVKQKNPSWSNVQIRNRLKNTATSLGSTNLYGSGLVNAEAATR

SEQ ID NO: 60359 - protein, 269 aa, Unidentified
AQSVPWGISRVQAPAAHNRGLAGGGVKVAVLDTGISTHPDLNIRGGASFVPGEPSTQDGNGHGTHVAGTIAALDNSIGVLGVAPSAELYAVKVLGASGQGAISSIANGLEWAGNNGMHVANLSLGSPSPSATLEQAVNSATSRGVLVVAASGNSGAGSISYPARYANAMAVGATDQNNNRASFSQYGAGLDIVAPGVNVQSTYPGSTYASLNGTSMATPHVAGAAVLVKQKNPSWSNVRIRNHLKNTATSLGSTNLYGSGLVNAEAATR

SEQ ID NO: 60360 - protein, 269 aa, Unidentified
AQSVPWGISRVQAPAAHRRGLTGRGVKVAVLDTGISTHPDLNIRGGASFVPGEPSTQDGNGHGTHVAGTIAALDNSIGVLGVAPSAELYAVKVLGASGAGSVSSIAQGLEWAGNNGMHVANLSLGSPSPSATLEQAVNSATSRGVLVVAASGNSGAGSISYPARYANAMAVGATDQDNNRASFSQYGAGLDLVAPGVNVQSTYPQSTYFSLNGTSMATPHVAGAAALVKQKNPSWSNVQIRNRLKNTATSLGSTNLYGSGLVNAEAATR

SEQ ID NO: 60361 - protein, 269 aa, Unidentified
AQSVPWGISRVQAPAAHNRRLTGRGVKVAVLDTGISTHPDLNIRGGASFVPGEPSTQDGNGHGTHVAGTIAALNNDIGVLGVAPSAELYAVKVLGASGSGSVSSIAQGLEWAGNNDMHVANLSLGSESPSATLEQAVNSATSRGVLVVAASGNSGADSISYPARYANAMAVGATDQNNNRADFSQYGAGLDIVAPGVNVQSTYPGSTYASLNGTSMATPHVAGAAALVKQKNPSWSNVRIRDHLKNTATSLGSTNLYGSGLVNAEAATR

SEQ ID NO: 60362 - protein, 269 aa, Unidentified
AQSVPWGISRVQAPAAHRRRLWGRGVKVAVLDTGISTHPDLNIRGGASFVPGEPSTQDGNGHGTHVAGTIAALDNSIGVLGVAPSAELYAVKVLGASGAGSVSSIAQGLEWAGANGMHVANLSLGSPSPSATLEQAVNSATSRGVLVVAASGNSGAGSISYPARYANAMAVGATDQNNNRASFSQYGAGLDLVAPGVNVQSTYPGSTYASLNGTSMATPHVAGAAALVKQKNPSWSNVQIRNRLKNTATSLGSTNLYGSGLVNAEAATR

SEQ ID NO: 60363 - protein, 269 aa, Unidentified
AQSVPWGISRVQAPAAHNRGLTGSGVKVAVLDTGISTHPDLNIRGGASFVPGEPSTQDGNGHGTHVAGTIAALNNSIGVLGVAPSAELYAVKVLGASGGGAISSIAQGLEWAGNNGMHVANLSLGSESPSATLEQAVNSATSRGVIVVAASGNSGAGSISYPARYANAMAVGATDQNNNRADFSQYGAGLDIVAPGVNVQSTYPGSTYASLNGTSMATPHVAGAAVLVKQKNPSWSNVRIRDHLKNTATSLGSTNLYGSGLVNAEAATR

SEQ ID NO: 60364 - protein, 269 aa, Unidentified
AQSVPWGISRVQAPAAHRRRLWGRGVKVAVLDTGISTHPDLNIRGGASFVPGEPSTQDGNGHGTHVAGTIAALDNSIGVLGVAPSAELYAVKVLGASGAGSVSSIAQGLEWAGANGMHVANLSLGSPSPSATLEQAVNSATSRGVLVVAASGNSGAGSISYPARYANAMAVGATDQNNNRASFSQYGAGLDIVAPGVNVQSTYPQSTYASLNGTSMATPHVAGAAALVKQKNPSWSNVQIRNRLKNTATSLGSTNLYGSGLVNAEAATR

SEQ ID NO: 60365 - protein, 269 aa, Unidentified
AQSVPWGISRVQAPAAHNRRLTGRGVKVAVLDTGISTHPDLNIRGGASFVPGEPSTQDGEGHGTHVAGTIAALNNGIGVLGVAPSAELYAVKVLGASGSGSVSSIAQGLEWAGNNDMHVANLSLGSESPSATLEQAVNSATSRGVLVVAASGNSGADSISYPARYANAMAVGATDQNNNRASFSQYGAGLDIVAPGVNVQSTYPGSTYASLNGTSMATPHVAGAAALVKQKNPSWSNVQIRDRLKNTATSLGSTNLYGSGLVNAEAATR

SEQ ID NO: 60366 - protein, 269 aa, Unidentified
AQSVPWGISRVQAPAAHNRGLAGFGVKVAVLDTGISTHPDLNIRGGASFVPGEPSTQDGNGHGTHVAGTIAALNNSIGVLGVAPSAELYAVKVLGASGGGAISSIAQGLEWAGLNGMHVANLSLGNPSPSATLEQAVNSATSRGVLVVAASGNSGAGSISYPARYANAMAVGATDQNNNRASFSQYGAGLDIVAPGVNVQSTVPGSTYASLNGTSMATPHVAGAAVLVKQKNPSWSNVQIRNHLKNTATSLGSTNLYGSGLVNAEAATR

SEQ ID NO: 60367 - protein, 269 aa, Unidentified
AQSVPWGVSRVQAPAAHNRGLTGSGVKVAVLDTGISTHEDLNIRGGASFVPGEPSTQDGNGHGTHVAGTIAALDNGIGVLGVAPSAELYAVKVLGASGSGSVSSIAQGLEWAGNNRMHVANLSLGSPSPSATLEQAVNSATSRGVLVVAASGNSGAGSISYPARYANAMAVGATDQNNNRASFSQYGAGLDIVAPGVNVQSTYPPSTYASKNGTSMATPHVAGAAALVKQKNPSWSNVQIRNHLKITATSLGSTILYGSGLVNAEAATR

SEQ ID NO: 60368 - protein, 269 aa, Unidentified
AQSVPWGISRVQAPASHNRGLAGSGVKVAVLDTGISTHPDLNIRGGASFVPGEPSTQDGNGHGTHVAGTIAALNNSIGVLGVAPSAELYAVKVLGASGGGAISSIAQGLEWAGLNGMHVANLSLGNPSPSATLEQAVNSATSRGVLVVAASGNSGAGSISYPARYANAMAVGATDQNNNRASFSQYGAGLDIVAPGVNVQSTVPGSTYASLNGTSMATPHVAGAAVLVKQKNPSWSNVQIRNHLKNTATSLGSTNLYGSGLVNAEAATR

SEQ ID NO: 60369 - protein, 269 aa, Unidentified
AQSVPWGISRVQAPAAHNRGLAGRGVKVAVLDSGISTHPDLNIRGGASFVPGEPSTQDGEGHGTHVAGTIAALNNSIGVLGVAPSAELYAVKVLGASGSGSVSSIAQGLEWAGLNRMHVANLSLGIPSPSATLEQAVNSATSRGVLVVAASGNSGEGSISYPARYANAMAVGATDQNNNRADFSQYGAGLDIVAPGVNVQSTYPGSTYASLNGTSMATPHVAGAAALVKQKNPSWSNVQIRNHLKNTATSLGSTNLYGSGLVNAEAATR

SEQ ID NO: 60370 - protein, 269 aa, Unidentified
AQSVPWGISRVQAPAAHNRGLTGSGVKVAVLDTGISTHPDLRITGGASFVPGEPSTQDGNGHGTHVAGTIAALDNSIGVLGVAPSAELYAVKVLGASGGGAISSIAQGLEWAGNNGMHVANLSLGSPSPSATLEQAVNSATSRGVLVVAASGNSGAGSISYPARYANAMAVGATDQNNNRASFSQYGAGLDIVAPGVNVQSTYPGSTYASLNGTSMATPHVAGAAVLVKQKNPSWSNVRIRNHLKNTATSLGSTNLYGSGLVRAEAATR

SEQ ID NO: 60371 - protein, 269 aa, Unidentified
AQSVPWGISRVQAPAAHRRGLWGRGVKVAVLDTGISTHPDLNIRGGASFVPGEPSTQDGNGHGTHVAGTIAALDNSIGVLGVAPSAELYAVKVLGASGAGSVSSIAQGLEWAGNNGMHVANLSLGSPSPSATLEQAVNSATSRGVLVVAASGNSGAGSISYPARYANAMAVGATDQDNNRASFSQYGAGLDIVAPGVNVQSTYPGSAYFSLNGTSMATPHVAGAAALVKQKNPSWSNVQIRNRLKNTATSLGSTNLYGSGLVNAEAATR

SEQ ID NO: 60372 - protein, 269 aa, Unidentified
AQTIPWGISRVQAPAAHNRGLTGSGVKVAVLDTGISTHPDLNIRGGASFVPGEPSTQDGNGHGTHVAGTIAALNNSIGVLGVAPSAELYAVKVLGADGEGAISSIAQGLEWVGNNGMHVANLSLGSPSPSATLEQAVNSATSRGVLVVAASGNSGASSISYPARYANAMAVGATDQNNNRASFSQYGAGLDIVAPGVNIQSTYPGSTYASLNGTSMATPHVAGAAALVKQKNPSWSNVQIRNHLKNTATSLGSTNLYGSGLVNAEAATR

SEQ ID NO: 60373 - protein, 269 aa, Unidentified
AQVVPWGISRVQAPAAHNRGLTGSGVKVAVLDTGISTHEDLNIRGGASFVPGEPSTQDGNGHGTHVAGTIAALDNSIGVLGVAPSAELYAVKVLGASGSGSVSSIAQGLEWAGNNRMHVANLSLGSPSPSATLEQAVNSATSRGVLVVAASGNSGAGSISYPARYANAMAVGATDQNNNRASFSQYGAGLDIVAPGVNVYSTYIPSTYKSLNGTSMATPHVAGAAALVKQKNPSWSNVQIRNHLKNTATSLGSTILYGSGLVNAEAATR

SEQ ID NO: 60374 - protein, 269 aa, Unidentified
AQSVPWGISRVQAPAAHNRGLTGSGVKVAVLDTGISTHPDLRIRGGASFVPGEPSTQDGNGHGTHVAGTIAALDNRIGVLGVAPSAELYAVKVLGASGGGAISSIAQGLEWAGNNGMHVANLSLGSPSPSATLEQAVNSATSRGVLVVAASGNSGAGSISYPARYANAMAVGATDQNNNRASFSQYGAGLDIVAPGVNVQSTYPGSTYASLNGTSMATPHVAGAAVLVKQKNPSWSNVRIRNHLKNTATSLGSTNLYGSGLVRAEAATR

SEQ ID NO: 60375 - protein, 269 aa, Unidentified
AQSVPWGISRVQAPAAHNRGLRGGGVKVAVLDTGISTHPDLNIRGGASFVPGEPSTQDGNGHGTHVAGTIAALNNNIGVLGVAPSAELYAVKVLGASGNGAISSIAQGLEWAGNNGMHVANLSLGAPSPSATLEQAVNSATSRGVLVVAASGNSGAGSISYPARYANAMAVGATDQNNNRASFSQYGAGLDIVAPGVNVQSTYPGSTYASLNGTSMATPHVAGAAVLVKQKNPSWSNVRIRNHLKNTATSLGSTNLYGSGLVNAEAATR

SEQ ID NO: 60376 - protein, 269 aa, Unidentified
AQSVPWGISRVQAPAAHNRGLAGRGVKVAVLDTGISTHPDLNIRGGASFVPGEPSTQDGNGHGTHVAGTIAALDNSIGVLGVAPSAELYAVKVLGASGGGAISSIAQGLEWAGNNGMHVANLSLGSPSPSATLEQAVNSATSRGVLVVAASGNSGAGSISYPARYANAMAVGATDQNNNRASFSQYGAGLDIVAPGVNVQSTYPGSTYASLNGTSMATPHVAGAAVLVKQKYPSWSNVRIRNHLKNTATSLGSTNLYGSGLVNAEAATR

SEQ ID NO: 60377 - protein, 269 aa, Unidentified
AQSVPWGISRVQAPAAHNRGLAGGGVKVAVLDTGISTHPDLNIRGGASFVPGEPSTQDGNGHGTHVAGTIAALNNSIGVLGVAPSAELYAVKVLAASGQGAISSIAQGLEWAGNNGMHVANLSLGAPSPSATLEQAVNSATSRGVLVVAASGNSGAGSISYPARYANAMAVGATDQNNNRASFSQYGAGLDIVAPGVNVQSTYPGSTYASLNGTSMATPHVAGAAVLVKQKNPSWSNVRIRNHLKNTATSLGSTNLYGSGLVNAEAATR

SEQ ID NO: 60378 - protein, 269 aa, Unidentified
AQSVPWGISRVQAPAAHNRRLTGRGVKVAVLDTGISTHPDLNIRGGASFVPGEPSTQDGEGHGTHVAGTIAALNNDIGVLGVAPSAELYAVKVLGASGSGSVSSIAQGLEWAGNNSMHVANLSLGSPSPSATLEQAVNSATSRGVLVVAASGNSGADSISYPARYANAMAVGATDQNNNRADFSQYGAGLDIVAPGVNVQSTYPGSTYASLNGTSMATPHVAGAAALVKQKNPSWSNVRIRNRLKNTATSLGSTNLYGSGLVNAEAATR

SEQ ID NO: 60379 - protein, 269 aa, Unidentified
AQSVPWGISRVQAPASHNRGLTGFGVKVAVLDTGISTHPDLNIRGGASFVPGEPSTQDGNGHGTHVAGTIAALNNSIGVLGVAPSAELYAVKVLGASGGGAISSIAQGLEWAGLNGMHVANLSLGSPSPSATLEQAVNSATSRGVLVVAASGNSGAGSISYPARYANAMAVGATDQNNNRASFSQYGAGLDIVAPGVNVQSTAPGSTYASSNGTSMATPHVAGAAVLVKQKNPSWSNVQIRNHLKNTATSLGSTNLYGSGLVNAEAATR

SEQ ID NO: 60380 - protein, 269 aa, Unidentified
AQSVPWGISRVQAPAAHRRGLTGSGVKVAVLDTGISTHPDLRITGGASFVPGEPSTQDGNGHGTHVAGTIAALDNSIGVLGVAPSAELYAVKVLGASGGGAISSIAQGLEWAGNNGMHVANLSLGSPSPSATLEQAVNSATSRGVLVVAASGNSGAGSISYPARYANAMAVGATDQNNNRASFSQYGAGLDIVAPGVNVQSTYPGSTYASLNGTSMATPHVAGAAVLVKQKNPSWSNVRIRNHLKNTATSLGSTNLYGSGLVNAEAATR

SEQ ID NO: 60381 - protein, 269 aa, Unidentified
AQSVPWGISRVQAPAAHRRGLTGSGVKVAVLDTGISTHPDLDITGGASFVPGEPSTQDGNGHGTHVAGTIAALNNRIGVLGVAPSAELYAVKVLGASGGGAISSIAQGLEWAGNNGMHVANLSLGSPSPSATLEQAVNSATSRGVLVVAASGNSGAGSISYPARYANAMAVGATDQNNNRASFSQYGAGLDIVAPGVNVQSTYPGSTYASLNGTSMATPHVAGAAVLVKQKNPSWSNVRIRNHLKNTATSLGSTNLYGSGLVNAEAATR

SEQ ID NO: 60382 - protein, 269 aa, Unidentified
AQSVPWGISRVQAPAAHNRKLTGGGVKVAVLDTGISTHPDLNIRGGASFVPGEPSTQDGEGHGTHVAGTIAALNNNIGVLGVAPSAELYAVKVLSASGNGSVSSIAGGLEWAGLNGMHVANLSLGSPSPSATLEQAVNSATSRGVLVVAASGNSGAGSISYPARYANAMAVGATDQNNNRADFSQYGAGLDIVAPGVNVQSTYPGSTYASLNGTSMATPHVAGAAALVKQKNPSWSNVQIRNHLKNTATSLGSTNLYGSGLVNAEAATR

SEQ ID NO: 60383 - protein, 269 aa, Unidentified
AQSVPWGISRVQAPAAHNRKLTGGGVKVAVLDTGISTHPDLNIRGGASFVPGEPSTQDGEGHGTHVAGTIAALNNNIGVLGVAPSDELYAVKVLSASGNGSVSSIANGLEWAGLNGMHVANLSLGSPSPSATLEQAVNSATSRGVLVVAASGNSGAGSISYPARYANAMAVGATDQNNNRASFSQYGAGLDIVAPGVNVQSTYPGSTYASQNGTSSATPHVAGAAALVKQKNPSWSNVQIRNHLKNTATSLGSTNLYGSGLVNAEAATR

SEQ ID NO: 60384 - protein, 269 aa, Unidentified
AQSVPWGISRVQAPAAHNRGLTGSGVKVAVLDTGISTHPDLDIRGGASFVPGEPSTQDGNGHGTHVAGTIAALNNRIGVLGVAPSAELYAVKVLGASGGGAISSIAQGLEWAGNNGMHVANLSLGSPSPSATLEQAVNSATSRGVLVVAASGNSGAGSISYPARYANAMAVGATDQNNNRASFSQYGAGLDIVAPGVNVQSTYPGSTYASLNGTSMATPHVAGAAVLVKQKNPSWSNVRIRNHLKNTATSLGSTNLYGSGLVRAEVATR

SEQ ID NO: 60385 - protein, 269 aa, Unidentified
AQSVPWGISRVQAPAAHNRRLTGRGVKVAVLDTGISTHPDLNIRGGASFVPGEPSTQDGNGHGTHVAGTIAALNNDIGVLGVAPSAELYAVKVLGASGSGSVSSIAQGLEWAGNNSMHVANLSLGSESPSATLEQAVNSATSRGVLVVAASGNSGADSISYPARYANAMAVGATDQNNNRADFSQYGAGLDIVAPGVNVQSTYPGSTYASLNGTSMATPHVAGAAALVKQKNPSWSNVRIRDHLKNTATSLGSTNLYGSGLVNAEAATR

SEQ ID NO: 60386 - protein, 269 aa, Unidentified
AQSVPWGISRVQAPAAHRRRLTGRGVKVAVLDTGISTHPDLNIRGGASFVPGEPSTQDGNGHGTHVAGTIAALDNSIGVLGVAPSAELYAVKVLGASGAGSVSSIAQGLEWAGANGMHVANLSLGSPSPSATLEQAVNSATSRGVLVVAASGNSGAGSISYPARYANAMAVGATDQDNNRASFSQYGAGLDIVAPGVNVQSTYPQSTYASLNGTSMATPHVAGAAALVKQKNPSWSNVQIRNRLKNTATSLGSTNLYGSGLVNAEAATR

SEQ ID NO: 60387 - protein, 269 aa, Unidentified
AQSVPWGISRVQAPAAHNRGLAGGGVKVAVLDTGISTHPDLNIRGGASFVPGEPSTQDGNGHGTHVAGTIAALNNSIGVLGVAPSAELYAVKVLAASGNGAISSIAQGLEWAGNNGMHVANLSLGAPSPSATLEQAVNSATSRGVLVVAASGNSGAGSISYPARYANAMAVGATDQNNNRASFSQYGAGLDIVAPGVNVQSTYPGSTYASLNGTSMATPHVAGAAVLVKQKNPSWSNVRIRNHLKNTATSLGSTNLYGSGLVNAEAATR

SEQ ID NO: 60388 - protein, 269 aa, Unidentified
AQSVPWGISRVQAPAAHNRGLTGSGVKVAVLDTGISTHPDLNITGGASFVPGEPSTQDGNGHGTHVAGTIAALDNRIGVLGVAPSAELYAVKVLGASGGGAISSIAQGLEWAGNNGMHVANLSLGSPSPSATLEQAVNSATSRGVLVVAASGNSGAGSISYPARYANAMAVGATDQNNNRASFSQYGAGLDIVAPGVNVQSTYPGSTYASLNGTSMATPHVAGAAVLVKQKNPSWSNVRIRNRLKNTATSLGSTNLYGSGLVNAEAATR

SEQ ID NO: 60389 - protein, 269 aa, Unidentified
AQSVPWGISRVQAPASHNRGLTGFGVKVAVLDSGISTHPDLNIRGGASFVPGEPSTQDGNGHGTHVAGTIAALNNSIGVLGVAPSAELYAVKVLGASGGGAISSIAQGLEWAGLNGMHVANLSLGSPSPSATLEQAVNSATSRGVLVVAASGNSGAGSISYPARYANAMAVGATDQNNNRASFSQYGAGLDIVAPGVNVQSTAPGSTYASLNGTSMATPHVAGAAVLVKQKNPSWSNVQIRNHLKNTATSLGSTNLYGSGLVNAEAATR

SEQ ID NO: 60390 - protein, 269 aa, Unidentified
AQSVPWGISRVQAPAAHRRGLTGRGVKVAVLDTGISTHPDLNIRGGASFVPGEPSTQDGNGHGTHVAGTIAALDNNIGVLGVAPRAELYAVKVLGASGSGSVSSIAQGLEWAGNNRMHVANLSLTSPSPSATLEQAVNSATSRGVLVVAASGNSGAGSISYPARYANAMAVGATDQNNNRASFSQYGAGLDIVAPGVNVQSTWPGSAYASLNGTSMATPHVAGAAALVKQKNPSWSNVQIRNHLKNTATSLGSTNLYGSGLVNAEAATR

SEQ ID NO: 60391 - protein, 269 aa, Unidentified
AQSVPWGISRVQAPAAHNRGLAGGGVKVAVLDTGISTHPDLNIRGGASFVPGEPSTQDGNGHGTHVAGTIAALNNNIGVLGVAPSAELYAVKVLSASGGGAISSIAQGLEWAGNNGMHVANLSLGSPSPSATLEQAVNSATSRGVLVVAASGNSGAGSISYPARYANAMAVGATDQNNNRASFSQYGAGLDIVAPGVNVQSTYPGSTYASLNGTSMATPHVAGAAVLVKQKNPSWSNVRIRNHLKNTATSLGSTNLYGSGLVNAEAATR

SEQ ID NO: 60392 - protein, 269 aa, Unidentified
AQSVPWGISRVQAPAAHNRKLTGGGVKVAVLDTGISTHPDLNIRGGASFVPGEPSTQDGEGHGTHVAGTIAALNNSIGVLGVAPSAELYAVKVLAASGGGSVSSIAQGLEWAGLNGMHVANLSLGAPSPSATLEQAVNSATSRGVLVVAASGNSGAGSISYPARYANAMAVGATDQNNNRADFSQYGAGLDIVAPGVNVQSTYPGSTYASQNGTSMATPHVAGAAALVKQKNPSWSNVQIRNHLKNTATSLGSTNLYGSGLVNAEAATR

SEQ ID NO: 60393 - protein, 269 aa, Unidentified
AQSVPWGISRVQAPAAHRRRLWGRGVKVAVLDTGISTHPDLNIRGGASFVPGEPSTQDGNGHGTHVAGTIAALDNSIGVLGVAPSAELYAVKVLGASGAGSVSSIAQGLEWAGANGMHVANLSLGSPSPSATLEQAVNSATSRGVLVVAASGNSGAGSISYPARYANAMAVGATDQDNNRASFSQYGAGLDIVAPGVNVQSTYPGSTYASLNGTSMATPHVAGAAALVKQKNPSWSNVQIRNRLKNTATSLGSTNLYGSGLVNAEAATR

SEQ ID NO: 60394 - protein, 269 aa, Unidentified
AQSVPWGISRVQAPAAHNRGLTGSGVKVAVLDTGISTHPDLNIRGGASFVPGEPSTQDGNGHGTHAAGTIAALDNSIGVLGVAPSAELYAVKVLGASGSGAISSIAQGLEWAGNNGMHVANLSLGSPSPSATLEQAVNSATSRGVLVVAASGNSGADSISYPARYANAMAVGATDQNNNRASFSQYGAGLDIVAPGVNVQSTYPRSTYASLNGTSMATPHVAGAAVLVKHKNPSWSNVRIRNHLKNTATSLGSTNLYGSGLVNAEAATR

SEQ ID NO: 60395 - protein, 269 aa, Unidentified
AQSVPWGISRVQAPAAHNRGLAGSGVKVAVLDTGISTHPDLNIRGGASFVPGEPSTQDGNGHGTHVAGTIAALNNNIGVLGVAPSAELYAVKVLGASGNGAISSIANGLEWAGNNGMHVANLSLGAPSPSATLEQAVNSATSRGVLVVAASGNSGAGSISYPARYANAMAVGATDQNNNRASFSQYGAGLDIVAPGVNVQSTYPGSTYASLNGTSMATPHVAGAAVLVKQKNPSWSNVRIRNHLKNTATSLGSTNLYGSGLVNAEAATR

SEQ ID NO: 60396 - protein, 269 aa, Unidentified
AQSVPWGISRVQAPAAHNRGLTGSGVKVAVLDTGISTHPDLNIRGGASFVPGEPSTQDGNGHGTHVAGTIAALDNSIGVLGVAPSAELYAVKVLGADGEGAISSIAQGLEWAGNNGMHVANLSLGSPSPSATLEQAVNSATSRGVLVVAASGNSGASSIGYPARYANAMAVGATDQNNNRASFSRYGAGLDIVAPGVNVQSTYPGSTYASLNGTSMATPHVAGAAALVKQKNPSWSNVQIRNHLKNTATSLGDTNLYGSGLVNAEAATR

SEQ ID NO: 60397 - protein, 269 aa, Unidentified
AQSVPWGISRVQAPAAHNRGLAGGGVKVAVLDTGISTHPDLNIRGGASFVPGEPSTQDGNGHGTHVAGTIAALNNSIGVLGVAPSAELYAVKVLGASGGGAISSIAQGLEWAGNNGMHVANLSLGAPSPSATLEQAVNSATSRGVLVVAASGNSGAGSISYPARYANAMAVGATDQNNNRASFSQYGAGLDIVAPGVNVQSTYPGSTYASQNGTSMATPHVAGAAVLVKQKNPSWSNVRIRNHLKNTATSLGSTNLYGSGLVNAEAATR

SEQ ID NO: 60398 - protein, 269 aa, Unidentified
AQSVPWGISRVQAPAAHNRGLAGSGVKVAVLDTGISTHPDLNIRGGASFVPGEPSTQDGNGHGTHVAGTIAALNNSIGVLGVAPSAELYAVKVLAASGNGAISSIAQGLEWAGNNGMHVANLSIGSSSPSATLEQAVNSATSRGVLVVAASGNSGAGSISYPARYANAMAVGATDQNNNRASFSQYGAGLDIVAPGVNVQSTYPGSTYASLNGTSMATPHVAGAAVLVKQKNPSWSNVRIRNHLKNTATSLGSTNLYGSGLVNAEAATR

SEQ ID NO: 60399 - protein, 269 aa, Unidentified
AQSVPWGISRVQAPAAHNRGLAGSGVKVAVLDTGISTHPDLNIRGGASFVPGEPSTQDGNGHGTHVAGTIAALNNSIGVLGVAPSAELYAVKVLGASGGGAISSIAQGLEWAGNNGMHVANLSLGASSPSATLEQAVNSATSRGVLVVAASGNSGAGSISYPARYANAMAVGATDQNNNRASFSQYGAGLDIVAPGVNVQSTYPGSTYASQNGTSMATPHVAGAAVLVKQKNPSWSNVRIRNHLKNTATSLGSTNLYGSGLVNAEAATR

SEQ ID NO: 60400 - protein, 269 aa, Unidentified
AQSVPWGISRVQAPAAHNRGLAGRGVKVAVLDTGISTHPDLNIRGGASFVPGEPSTQDGNGHGTHVAGTIAALNNSIGVLGVAPSAELYAVKVLGASGGGAISSIAQGLEWAGNNGMHVANLSLGSESPSATLEQAVNSATSRGVLVVAASGNSGAGSISYPARYANAMAVGATDQNNNRASFSQYGAGLDIVAPGVNVQSTYPGSTYASLNGTSMATPHVAGAAVLVKQKYPSWSNVRIRNHLKNTATSLGSTNLYGSGLVNAEAATR

SEQ ID NO: 60401 - protein, 269 aa, Unidentified
AQSVPWGISRVQAPAAHRRGLWGRGVKVAVLDTGISTHPDLNIRGGASFVPGEPSTQDGNGHGTHVAGTIAALDNSIGVLGVAPSAELYAVKVLGASGSGSVSSIAQGLEWAGANGMHVANLSLGSPSPSATLEQAVNSATSRGVLVVAASGNSGAGSISYPARYANAMAVGATDQDNNRASFSQYGAGLDLVAPGVNVQSTYPQSTYASLNGTSMATPHVAGAAALVKQKNPSWSNVQIRNRLKNTATSLGSTNLYGSGLVNAEAATR

SEQ ID NO: 60402 - protein, 269 aa, Unidentified
AQSVPWGISRVQAPAAHRRGLWGRGVKVAVLDTGISTHPDLNIRGGASFVPGEPSTQDGNGHGTHVAGTIAALDNSIGVLGVAPSAELYAVKVLGASGAGSVSSIAQGLEWAGTNGMHVANLSLGSPSPSATLEQAVNSATSRGVLVVAASGNSGAGSISYPARYANAMAVGATDQNNNRASFSQYGAGLDLVAPGVNVQSTYPGSTYFSLNGTSMATPHVAGAAALVKQKNPSWSNVQIRNRLKNTATSLGSTNLYGSGLVNAEAATR

SEQ ID NO: 60403 - protein, 269 aa, Unidentified
AQVVPWGISRVQAPAAHNRGLTGSGVKVAVLDTGISTHPDLNIRGGASFVPGEPSTQDGNGHGTHVAGTIAALDNNIGVLGVAPRAELYAVKVLGASGSGSVSSIAQGLEWAGNNRMHVANLSLGLQAPSATLEQAVNSATSRGVLVVAASGNSGAGSISYPARYANAMAVGATDQNNNRASFSQYGAGLDIVAPGVNVYSTYPGSTYASLNGTSMATPHVAGAAALVKQKNPSWSNVQIRNHLKNTATSLGSTNLYGSGLVNAEAATR

SEQ ID NO: 60404 - protein, 269 aa, Bacillus clausii
AQSVPWGISRLQAPAAHNRGLTASPVKVAVLDTGVSTHPDLNIRGGASFVPGEPSTQDGNGHGTHVAGTIAALNNSIGVLGVAPSAELYAVKVLPASGHGSVSSIAQGLEWAGNNGMHVANLSLGSPSPSATLEQAVNSATSRGILVVAASGNSGAGSISYPARYANAMAVGATDQNNNRASFSQYGAGLDIVAPGVNVQSTYPGSTYASLSGTSMATPHVAGAAALVKQKNPSWSNVQIRNHLKNTATSLGSTNLYGSGLVNAEAPTR

SEQ ID NO: 60405 - protein, 269 aa, Unidentified
AQSVPWGISRVQAPAAHRRGLTGSGVKVAVLDTGISTHPDLDIRGGASFVPGEPSTQDGNGHGTHVAGTIAALNNRIGVLGVAPSAELYAVKVLGASGGGAISSIAQGLEWAGNNGMHVANLSLGSPSPSATLEQAVNSATSRGVLVVAASGNSGAGSISYPARYANAMAVGATDQNNNRASFSQYGAGLDIVAPGVNVQSTYPGSTYASLNGTSMATPHVAGAAVLVKQKNPSWSNVRIRNRLKNTATSLGSTNLYGSGLVNAEAATR

SEQ ID NO: 60406 - protein, 269 aa, Unidentified
AQSVPWGISRVQAPAAHNRGLTGRGVKVAVLDTGISTHPDLNITGGASFVPGEPSTQDGNGHGTHVAGTIAALDNSIGVLGVAPSAELYAVKVLGASGGGAISSIAQGLEWAGNNGMHVANLSLGSPSPSATLEQAVNSATSRGVLVVAASGNSGAGSISYPARYANAMAVGATDQNNNRASFSQYGAGLDIVAPGVNVQSTYPGSTYASLNGTSMATPHVAGAAVLVKQKNPSWSNVRIRNRLKNTATSLGSTNLYGSGLVNAEAATR

SEQ ID NO: 60407 - protein, 269 aa, Unidentified
AQSVPWGISRVQAPAAHNRGLQGSGVKVAVLDTGISTHPDLNIRGGASFVPGEPSTQDGNGHGTHVAGTIAALNNSIGVLGVAPSAELYAVKVLGASGGGAISSIAQGLEWAGNNGMHVANLSLGSPSPSATLEQAVNSATSRGVLVVAASGNSGADSISYPARYANAMAVGATDQNNNRADFSQYGAGLDIVAPGVNVQSTYPGSTYASLNGTSMATPHVAGAAVLVKQKNPSWSNVTIREHLKNTATSLGSTNLYGSGLVNAEAATR

SEQ ID NO: 60408 - protein, 269 aa, Unidentified
AQSVPWGISRVQAPAAHNRRLTGRGVKVAVLDTGISTHPDLNIRGGASFVPGEPSTQDGEGHGTHVAGTIAALNNGIGVLGVAPSAELYAVKVLGASGSGSVSSIAQGLEWAGNNDMHVANLSLGSESPSATLEQAVNSATSRGVLVVAASGNSGADSISYPARYANAMAVGATDQNNNRADFSQYGAGLDIVAPGVNVQSTYPGSTYASLNGTSMATPHVAGAAALVKQKNPSWSNVQIRDHLKNTATSLGSTNLYGSGLVNAEAATR

SEQ ID NO: 60409 - protein, 269 aa, Unidentified
AQSVPWGISRVQAPAAHNRGLTGSGVKVAVLDTGISTHPDLNIRGGASFVPGEPSTQDGNGHGTHVAGTIAALNNSIGVLGVAPSAELYAVKVLGASGGGSIASIAQGLEWAGNNGMHVANLSLGSESPSATLEQAVNSATSRGVLVVAASGNSGAESISYPARYANAMAVGATDQNNNRASFSQYGAGLDIVAPGVNVQSTYPGSTYASLNGTSMATPHVAGAAVLVKQKRPSWSNVRIRDHLKNTATSLGSTNLYGSGLVNAEAATR

SEQ ID NO: 60410 - protein, 269 aa, Unidentified
AQSVPWGISRVQAPAAHNRRLTGSGVKVAVLDTGISTHPDLNIRGGASFVPGEPSTQDGNGHGTHVAGTIAALNNSIGVLGVAPSAELYAVKVLGASGAGAISSIAQGLEWAGANGMHVANLSLGSPSPSATLEQAVNSATSRGVLVVAASGNSGAGSISYPARYANAMAVGATDQDNNRASFSQYGAGLDIVAPGVNVQSTYPQSTYASLNGTSMATPHVAGAAVLVKQKNPSWSNVRIRNHLKNTATSLGSTNLYGSGLVNAEAATR

SEQ ID NO: 60411 - protein, 269 aa, Unidentified
AQSVPWGISRVQAPAAHRRRLTGRGVKVAVLDTGISTHPDLNIRGGASFVPGEPSTQDGNGHGTHVAGTIAALDNSIGVLGVAPSAELYAVKVLGASGSGSVSSIAQGLEWAGANGMHVANLSLGSPSPSATLEQAVNSATSRGVLVVAASGNSGAGSISYPARYANAMAVGATDQDNNRASFSQYGAGLDLVAPGVNVQSTYPQSTYASLNGTSMATPHVAGAAALVKQKNPSWSNVQIRNRLKNTATSLGSTNLYGSGLVNAEAATR

SEQ ID NO: 60412 - protein, 269 aa, Unidentified
AQSVPWGISRVQAPAAHRRGLTGRGVKVAVLDTGISTHPDLNIRGGASFVPGEPSTQDGNGHGTHVAGTIAALDNSIGVLGVAPSAELYAVKVLGASGAGSVSSIAQGLEWAGNNGMHVANLSLGSPSPSATLEQAVNSATSRGVLVVAASGNSGAGSISYPARYANAMAVGATDQNNNRASFSQYGAGLDIVAPGVNVQSTYPQSAYFSLNGTSMATPHVAGAAALVKQKNPSWSNVQIRNRLKNTATSLGSTNLYGSGLVNVEAATR

SEQ ID NO: 60413 - protein, 269 aa, Unidentified
AQSVPWGISRVQAPAAHNRGLTGSGVKVAVLDSGISTHPDLNIRGGASFVPGEPSTQDGNGHGTHVAGTIAALNNSIGVLGVAPSAELYAVKVLGASGGGAISSIAQGLEWAGLNGMHVANLSLGNPSPSATLEQAVNSATSRGVLVVAASGNSGAGSISYPARYANAMAVGATDQNNNRASFSQYGAGLDIVAPGVNVQSTVPGSAYASLNGTSMATPHVAGAAVLVKQKNPSWSNVQIRNHLKNTATSLGSTNLYGSGLVNAEAATR

SEQ ID NO: 60414 - protein, 269 aa, Unidentified
AQSVPWGISRVQAPAAHNRRLTGSGVKVAVLDTGISTHPDLNIRGGASFVPGEPSTQDGEGHGTHVAGTIAALNNDIGVLGVAPSAELYAVKVLGASGSGSVSSIAQGLEWAGNNSMHVANLSLGSESPSATLEQAVNSATSRGVLVVAASGNSGADSISYPARYANAMAVGATDQNNNRADFSQYGAGLDIVAPGVNVQSTYPGSTYASLNGTSMATPHVAGAAALVKQKNPSWSNVRIRDHLKNTATSLGSTNLYGSGLVNAEAATR

SEQ ID NO: 60415 - protein, 269 aa, Unidentified
AQSVPWGISRVQAPAAHNRGLAGSGVKVAVLDTGISTHPDLNIRGGASFVPGEPSTQDGNGHGTHVAGTIAALNNNIGVLGVAPSAELYAVKVLSASGNGAISSIAQGLEWAGNNGMHVANLSLGAPSPSATLEQAVNSATSRGVLVVAASGNSGAGSISYPARYANAMAVGATDQNNNRASFSQYGAGLDIVAPGVNVQSTYPGSTYASLNGTSMATPHVAGAAVLVKQKNPSWSNVRIRNHLKNTATSLGSTNLYGSGLVNAEAATR

SEQ ID NO: 60416 - protein, 269 aa, Unidentified
AQSVPWGISRVQAPAAHNRGLTGSGVKVAVLDTGISTHPDLNIRGGASFVPGEPSTQDGNGHGTHVAGTIAALDNNIGVLGVAPRAELYAVKVLGASGVGSVSSIAQGLEWAGNNRMHVANLSLGLQAPSATLEQAVNSATSRGVLVVAASGNSGAGSISYPARYANAMAVGATDQNNNRASFSQYGAGLDIVAPGVNVLSTYPGSTYASLNGTSMATPHVAGAAALVKQKNPSWSNVQIRNHLKNTATSLGSTNLYGSGLVNAEAATR

SEQ ID NO: 60417 - protein, 269 aa, Unidentified
AQSVPWGISRVQAPAAHNRRLTGRGVKVAVLDTGISTHPDLNIRGGASFVPGEPSTQDGEGHGTHVAGTIAALNNGIGVLGVAPSAELYAVKVLGASGSGSVSSIAQGLEWAGNNDMHVANLSLGSESPSATLEQAVNSATSRGVLVVAASGNSGAGSISYPARYANAMAVGATDQNNNRASFSQYGAGLDIVAPGVNVQSTYPGSTYASLNGTSMATPHVAGAAALVKRKNPSWSNVRIRDHLKNTATSLGSTNLYGSGLVNAEAATR

SEQ ID NO: 60418 - protein, 269 aa, Unidentified
AQVVPWGISRVQAPAAHNRGLTGSGVKVAVLDTGISTHEDLNIRGGASFVPGEPSTQDGNGHGTHVAGTIAALDNSIGVLGVAPDAELYAVKVLGASGSGSVSSIAQGLEWAGNNRMHVANLSLGRPSPSATLEQAVNSATSRGVLVVAASGNSGAGSISYPARYANAMAVGATDQNNNRASFSQYGAGLDIVAPGVNVQSTYIGSTYASKNGTSMATPHVAGAAALVKQKNPSWSNVQIRNHLKNTATSLGSTILYGSGLVNAEAATR

SEQ ID NO: 60419 - protein, 269 aa, Unidentified
AQSVPWGISRVQAPAAHNRGLTGGGVKVAVLDTGISTHPDLNIRGGASFVPGEPSTQDGNGHGTHVAGTIAALNNNIGVLGVAPSAELYAVKVLGASGNGSVSSIAGGLEWAGTNGMHVANLSLGAPSPSATLEQAVNSATSRGVLVVAASGNSGAGSISYPARYANAMAVGATDQNNNRASFSQYGAGLDIVAPGVNVQSTYPGSTYASQNGTSMATPHVAGAAALVKQKNPSWSVVQIRNHLKNTATRLGSTNLYGSGLVNAEAATR

SEQ ID NO: 60420 - protein, 269 aa, Unidentified
AQSVPWGISRVQAPAAHNRGLTGSGVKVAVLDTGISTHPDLNIRGGASFVPGEPSTQDGNGHGTHVAGTIAALNNSIGVLGVAPSAELYAVKVLGASGSGAISSIAQGLEWAGNNGMHVANLSLGSPSPSATLEQAVNSATSRGVLVVAASGNSGADSISYPARYANAMAVGATDQNNNRASFSQYGAGLDIVAPGVNVQSTYPGSTYASLNGTSMATPHVAGAAVLVKHKNPSWSNARIRDHLKKTATSLGSTNLYGSGLVNAEAATR

SEQ ID NO: 60421 - protein, 269 aa, Unidentified
AQSVPWGISRVQAPAAHNRGLTGSGVKVAVLDTGISTHPDLRITGGASFVPGEPSTQDGNGHGTHVAGTIAALNNRIGVLGVAPSAELYAVKVLGASGGGAISSIAQGLEWAGNNGMHVANLSLGSPSPSATLEQAVNSATSRGVLVVAASGNSGAGSISYPARYANAMAVGATDQNNNRASFSQYGAGLDIVAPGVNVQSTYPGSTYASLNGTSMATPHVAGAAVLVKQKNPSWSNVRIRNHLKNTATSLGSTNLYGSGLVRAEAATR

SEQ ID NO: 60422 - protein, 269 aa, Unidentified
AQSVPWGISRVQAPAAHRRGLTGRGVKVAVLDTGISTHPDLDIRGGASFVPGEPSTQDGNGHGTHVAGTIAALDNSIGVLGVAPSAELYAVKVLGASGGGAISSIAQGLEWAGNNGMHVANLSLGSPSPSATLEQAVNSATSRGVLVVAASGNSGAGSISYPARYANAMAVGATDQNNNRASFSQYGAGLDIVAPGVNVQSTYPGSTYASLNGTSMATPHVAGAAVLVKQKNPSWSNVRIRNHLKNTATSLGSTNLYGSGLVNAEAATR

SEQ ID NO: 60423 - protein, 269 aa, Unidentified
AQSVPWGISRVQAPAAHRRRLTGRGVKVAVLDTGISTHPDLNIRGGASFVPGEPSTQDGNGHGTHVAGTIAALDNSIGVLGVAPSAELYAVKVLGASGSGSVSSIAQGLEWAGNNGMHVANLSLGSPSPSATLEQAVNSATSRGVLVVAASGNSGAGSISYPARYANAMAVGATDQDNNRASFSQYGAGLDIVAPGVNVQSTYPQSAYFSLNGTSMATPHVAGAAALVKQKNPSWSNVQIRNRLKNTATSLGSTNLYGSGLVNAEAATR

SEQ ID NO: 60424 - protein, 269 aa, Unidentified
AQSVPWGISRVQAPAAHNRRLTGSGVKVAVLDTGISTHPDLNIRGGASFVPGEPSTQDGEGHGTHVAGTIAALNNGIGVLGVAPSAELYAVKVLGASGSGSVSSIAQGLEWAGNNSMHVANLSLGSESPSATLEQAVNSATSRGVLVVAASGNSGADSISYPARYANAMAVGATDQNNNRADFSQYGAGLDIVAPGVNVQSTYPGSTYASLNGTSMATPHVAGAAALVKQKNPSWSNVRIRNRLKNTATSLGSTNLYGSGLVNAEAATR

SEQ ID NO: 60425 - protein, 269 aa, Unidentified
AQSVPWGISRVQAPAAHNRGLAGSGVKVAVLDTGISTHPDLNIRGGASFVPGEPSTQDGNGHGTHVAGTIAALNNSIGVLGVAPSAELYAVKVLGASGGGAISSIAQGLEWAGNNGMHVANLSLGSESPSATLEQAVNSATSRGVLVVAASGNSGAGSISYPARYANAMAVGATDQNNNRASFSQYGAGLDIVAPGVNVQSTYPGSTYASLNGTSMATPHVAGAAVLVKQKRPSWSNVRIRDHLKNTATSLGSTNLYGSGLVNAEAATR

SEQ ID NO: 60426 - protein, 269 aa, Unidentified
AQSVPWGISRVQAPAAHNRGLAGSGVKVAVLDTGISTHPDLNIRGGASFVPGEPSTQDGNGHGTHVAGTIAALNNSIGVLGVAPSAELYAVKVLGASGGGAISSIAQGLEWAGNNGMHVANLSLGSPSPSATLEQAVNSATSRGVLVVAASGNSGADSISYPARYANAMAVGATDQNNNRADFSQYGAGLDIVAPGVNVQSTYPGSTYASLNGTSMATPHVAGAALLVKQKNPSWSNVRIREHLKNTATSLGSTNLYGSGLVNAEAATR

SEQ ID NO: 60427 - protein, 269 aa, Unidentified
AQVVPWGISRVQAPAAHNRGLTGSGVKVAVLDTGISTHPDLNIRGGASFVPGEPSTQDGNGHGTHVAGTIAALDNNIGVLGVAPRAELYAVKVLGASGSGSVSSIAQGLEWAGNNRMHVANLSLGLQAPSATLEQAVNSATSRGVLVVAASGNSGAGSISYPARYANAMAVGATDQNNNRASFSQYGAGLDIVAPGVNVMSTYPGSTYASLNGTSMATPHVAGAAALVKQKNPSWSNVQIRNHLKNTATSLGSTNLYGSGLVNAEAATR

SEQ ID NO: 60428 - protein, 269 aa, Unidentified
AQSVPWGISRVQAPAAHNRRLTGSGVKVAVLDTGISTHPDLNIRGGASFVPGEPSTQDGNGHGTHVAGTIAALNNSIGVLGVAPSAELYAVKVLGASGGGAISSIAQGLEWAGANGMHVANLSLGSPSPSATLEQAVNSATSRGVLVVAASGNSGAGSISYPARYANAMAVGATDQDNNRASFSQYGAGLDIVAPGVNVQSTYPGSAYASLNGTSMATPHVAGAAVLVKQKNPSWSNVRIRNHLKNTATSLGSTNLYGSGLVNAEAATR

SEQ ID NO: 60429 - protein, 269 aa, Unidentified
AQSVPWGISRVQAPAAHNRGLTGSGVKVAVLDTGISTHPDLNIRGGASFVPGEPSTQDGNGHGTHVAGTIAALNNSIGVLGVAPSAELYAVKVLGASGGGSIASIAQGLEWAGNNGMHVANLSLGSESPSATLEQAVNSATSRGVIVVAASGNSGAGSISYPARYANAMAVGATDQNNNRADFSQYGAGLDIVAPGVNVQSTYPGSTYASLNGTSMATPHVAGAAVLVKQKNPSWSNVRIRDHLKNTATSLGSTNLYGSGLVNAEAATR

SEQ ID NO: 60430 - protein, 269 aa, Unidentified
AQSVPWGISRVQAPAAHNRGLTGRGVKVAVLDTGISTHPDLNIRGGASFVPGEPSTQDGEGHGTHVAGTIAALNNDIGVLGVAPSAELYAVKVLGASGSGSVSSIAQGLEWAGNNSMHVANLSLGSESPSATLEQAVNSATSRGVLVVAASGNSGADSISYPARYANAMAVGATDQNNNRADFSQYGAGLDIVAPGVNVQSTYPGSTYASLNGTSMATPHVAGAAALVKQKNPSWSNVRIRDHLKNTATSLGSTNLYGSGLVNAEAATR

SEQ ID NO: 60431 - protein, 269 aa, Unidentified
AQSVPWGISRVQAPAAHNRGLAGSGVKVAVLDTGISTHPDLNIRGGASFVPGEPSTQDGNGHGTHVAGTIAALDNNIGVLGVAPSAELYAVKVLAASGNGAISSIAQGLEWAGNNGMHVANLSLGSPSPSATLEQAVNSATSRGVLVVAASGNSGAGSISYPARYANAMAVGATDQNNNRASFSQYGAGLDIVAPGVNVQSTYPGSTYASLNGTSMATPHVAGAAVLVKQKNPSWSNVRIRNHLKNTATSLGSTNLYGSGLVNAEAATR

SEQ ID NO: 60432 - protein, 269 aa, Unidentified
AQSVPWGISRVQAPAAHNRGLTGSGVKVAVLDTGISTHPDLNIRGGASFVPGEPSTQDGNGHGTHVAGTIAALNNSIGVLGVAPSAELYAVKVLGASGGGGISSIAQGLEWAGNNGMHVANLSLGSPSPSATLEQAVNSATSRGVLVVAASGNSGEGSISYPARYANAMAVGATDQNNNRADFSQYGAGLDIVAPGVNVQSTYPGSTYASLNGTSMATPHVAGAAVLVKQKNPSWSNVRIRDRLKNTATSLGSTNLYGSGLVNAEAATR

SEQ ID NO: 60433 - protein, 269 aa, Unidentified
AQSVPWGISRVQAPAAHNRGLAGSGVKVAVLDTGISTHPDLNIRGGASFVPGEPSTQDGNGHGTHVAGTIAALNNSIGVLGVAPSAELYAVKVLGASGGGAISSIAQGLEWAGANVMHVANLSLGSPSPSATLEQAVNSATSRGVLVVAASGNSGAGSISYPARYANAMAVGATDQNNNRASFSQYGAGLDIVAPGVNVQSTVPGSAYASLNGTSMATPHVAGAAVLVKQKNPSWSNVQIRNHLKNTATSLGSTNLYGSGLVNAEAATR

SEQ ID NO: 60434 - protein, 269 aa, Unidentified
AQSVPWGISRVQAPASHNRGLTGFGVKVAVLDTGISTHPDLNIRGGASFVPGEPSTQDGNGHGTHVAGTIAALNNSIGVLGVAPSAELYAVKVLGASGGGAISSIAQGLEWAGLNVMHVANLSLGSPSPSATLEQAVNSATSRGVLVVAASGNSGAGSISYPARYANAMAVGATDQNNNRASFSQYGAGLDIVAPGVNVQSTAPGSTYASLNGTSMATPHVAGAAVLVKQKNPSWSNVQIRNHLKNTATSLGSTNLYGSGLVNAEAATR

SEQ ID NO: 60435 - protein, 269 aa, Unidentified
AQSVPWGISRVQAPAAHNRGLTGSGVKVAVLDTGISTHPDLNIRGGASFVPGEPSTQDGNGHGTHVAGTIAALDNNIGVLGVAPRAELYAVKVLGASGSGSVSSIAQGLEWAGNNRMHVANLSLGLQAPSATLEQAVNSATSRGVLVVAASGNSGAGSISYPARYANAMAVGATDQNNNRASFSQYGAGLDIVAPGVNVLSTYPGDTYASLNGTSMATPHVAGAAALVKQKNPSWSNVQIRNHLKNTATSLGSTNLYGSGLVNAEAATR

SEQ ID NO: 60436 - protein, 269 aa, Unidentified
AQSVPWGISRVQAPAAHNRRLTGRGVKVAVLDTGISTHPDLNIRGGASFVPGEPSTQDGEGHGTHVAGTIAALNNDIGVLGVAPSAELYAVKVLGASGSGSVSSIAQGLEWAGNNDMHVANLSLGSPSPSATLEQAVNSATSRGVLVVAASGNSGADSISYPARYANAMAVGATDQNNNRADFSQYGAGLDIVAPGVNVQSTYPGSTYASLNGTSMATPHVAGAAALVKQKNPSWSNVRIRDHLKNTATSLGSTNLYGSGLVNAEAATR

SEQ ID NO: 60437 - protein, 269 aa, Unidentified
AQSVPWGISRVQAPAAHNRGLTGSGVKVAVLDTGISTHPDLNIRGGASFVPGEPSTQDGEGHGTHVAGTIAALNNSIGVLGVAPSAELYAVKVLGASGGGAISSIAQGLEWAGNNGMHVANLSLGSPSPSATLEQAVNSATSRGVLVVAASGNSGADSISYPARYANAMAVGATDQNNNRASFSQYGAGLDIVAPGVNVQSTYPGSTYASLNGTSMATPHVAGAAVLVKQKNPSWSNVRIRDRLKNTATSLGSTNLYGSGLVNAEAATR

SEQ ID NO: 60438 - protein, 269 aa, Unidentified
AQSVPWGISRVQAPAAHNRGLAGGGVKVAVLDTGISTHPDLNIRGGASFVPGEPSTQDGNGHGTHVAGTIAALNNSIGVLGVAPSAELYAVKVLAASGNGAISSIAQGLEWAGNNGMHVANLSLGSPSPSATLEQAVNSATSRGVLVVAASGNSGAGSISYPARYANAMAVGATDQNNNRASFSQYGAGLDIVAPGVNVQSTYPGSTYASQNGTSMATPHVAGAAVLVKQKNPSWSNVRIRNHLKNTATSLGSTNLYGSGLVNAEAATR

SEQ ID NO: 60439 - protein, 269 aa, Unidentified
AQSVPWGISRVQAPAAHNRGLAGFGVKVAVLDSGISTHPDLNIRGGASFVPGEPSTQDGNGHGTHVAGTIAALNNSIGVLGVAPSAELYAVKVLGASGGGAISSIAQGLEWAGLNGMHVANLSLGSPSPSATLEQAVNSATSRGVLVVAASGNSGAGSISYPARYANAMAVGATDQNNNRASFSQYGAGLDIVAPGVNVQSTAPGSTYASLNGTSMATPHVAGAAVLVKQKNPSWSNVQIRNHLKNTATSLGSTNLYGSGLVNAEAATR

SEQ ID NO: 60440 - protein, 269 aa, Unidentified
AQSVPWGISRVQAPAAHNRRLTGSGVKVAVLDTGISTHPDLNIRGGASFVPGEPSTQDGNGHGTHVAGTIAALNNRIGVLGVAPSAELYAVKVLGASGGGAISSIAQGLEWAGANGMHVANLSLGSPSPSATLEQAVNSATSRGVLVVAASGNSGAGSISYPARYANAMAVGATDQNNNRASFSQYGAGLDIVAPGVNVQSTYPQSTYASLNGTSMATPHVAGAAVLVKQKNPSWSNVRIRNHLKNTATSLGSTNLYGSGLVNAEAATR

SEQ ID NO: 60441 - protein, 269 aa, Unidentified
AQSVPWGISRVQAPAAHNRRLTGSGVKVAVLDTGISTHPDLNIRGGASFVPGEPSTQDGEGHGTHVAGTIAALNNGIGVLGVAPSAELYAVKVLGASGSGSVSSIAQGLEWAGNNDMHVANLSLGSESPSATLEQAVNSATSRGVLVVAASGNSGADSISYPARYANAMAVGATDQNNNRADFSQYGAGLDIVAPGVNVQSTYPGSTYASLNGTSMATPHVAGAAALVKQKNPSWSNVQIRDRLKNTATSLGSTNLYGSGLVNAEAATR

SEQ ID NO: 60442 - protein, 269 aa, Unidentified
AQSVPWGISRVQAPAAHRRGLTGRGVKVAVLDTGISTHPDLNIRGGASFVPGEPSTQDGNGHGTHVAGTIAALDNNIGVLGVAPSAELYAVKVLGASGSGSVSSIAQGLEWAGNNRMHVANLSLGLQAPSATLEQAVNSATSRGVLVVAASGNSGAGSISYPARYANAMAVGATDQNNNRASFSQYGAGLDIVAPGVNVQSTYPGSTYASLNGTSMATPHVAGAAALVKQKNPSWSNVQIRNRLKNTATSLGSTNLYGSGLVNAEAATR

SEQ ID NO: 60443 - protein, 269 aa, Unidentified
AQSVPWGISRVQAPAAHNRRLTGRGVKVAVLDTGISTHPDLNIRGGASFVPGEPSTQDGEGHGTHVAGTIAALNNGIGVLGVAPSAELYAVKVLGASGSGSVSSIAQGLEWAGNNDMHVANLSLGSESPSATLEQAVNSATSRGVLVVAASGNSGADSISYPARYANAMAVGATDQNNNRADFSQYGAGLDIVAPGVNVQSTYPGSTYASLNGTSMATPHVAGAAALVKQKNPSWSNVQIRNRLKNTATSLGSTNLYGSGLVNAEAATR

SEQ ID NO: 60444 - protein, 269 aa, Unidentified
AQSVPWGISRVQAPAAHNRGLQGSGVKVAVLDTGISTHPDLNIRGGASFVPGEPSTQDGNGHGTHVAGTIAALNNSIGVLGVAPSAELYAVKVLGASGGGAISSIAQGLEWAGNNGMHVANLSLGSPSPSATLEQAVNSATSRGVLVVAASGNSGADSISYPARYANAMAVGATDQNNNRADFSQYGAGLDIVAPGVNVQSTYPGSTYASLNGTSMATPHVAGAALLVKQKNPSWSNVTIRDHLKNTATSLGSTNLYGSGLVNAEAATR

SEQ ID NO: 60445 - protein, 269 aa, Unidentified
AQSVPWGISRVQAPAAHNRGLTGSGVKVAVLDTGISTHPDLNIRGGASFVPGEPSTQDGNGHGTHVAGTIAALNNSIGVLGVAPSAELYAVKVLGASGSAAISSIAQGLEWAGNNGMHVANLSLGSPSPSATLEQAVNSATSRGVLVVAASGNSGADSISYPARYANAMAVGATDQNNNRASFSQYGAGLDIVAPGVNVQSTYPGSTYASLNGTSMATPHVAGAAVLVKHKNPSWSNVRIRDHLKKTATSLGSTNLYGSGLVNAEAATR

SEQ ID NO: 60446 - protein, 269 aa, Unidentified
AQSVPWGISRVQAPAAHNRRLTGRGVKVAVLDTGISTHPDLNIRGGASFVPGEPSTQDGNGHGTHVAGTIAALNNDIGVLGVAPSAELYAVKVLGASGSGSVSSIAQGLEWAGNNDMHVANLSLGSPSPSATLEQAVNSATSRGVLVVAASGNSGADSISYPARYANAMAVGATDQNNNRADFSQYGAGLDIVAPGVNVQSTYPGSTYASLNGTSMATPHVAGAAALVKQKNPSWSNVRIRDRLKNTATSLGSTNLYGSGLVNAEAATR

SEQ ID NO: 60447 - protein, 269 aa, Unidentified
AQSVPWGISRVQAPAAHRRGLWGRGVKVAVLDTGISTHPDLNIRGGASFVPGEPSTQDGNGHGTHVAGTIAALDNSIGVLGVAPSAELYAVKVLGASGSGSVSSIAQGLEWAGANGMHVANLSLGSPSPSATLEQAVNSATSRGVLVVAASGNSGAGSISYPARYANAMAVGATDQDNNRASFSQYGAGLDLVAPGVNVQSTYPGSTYFSLNGTSMATPHVAGAAALVKQKNPSWSNVQIRNRLKNTATSLGSTNLYGSGLVNAEAATR

SEQ ID NO: 60448 - protein, 269 aa, Unidentified
AQSVPWGISRVQAPAAHRRGLTGSGVKVAVLDTGISTHPDLNITGGASFVPGEPSTQDGNGHGTHVAGTIAALDNSIGVLGVAPSAELYAVKVLGASGGGAISSIAQGLEWAGNNGMHVANLSLGSPSPSATLEQAVNSATSRGVLVVAASGNSGAGSISYPARYANAMAVGATDQNNNRASFSQYGAGLDIVAPGVNVQSTYPGSTYASLNGTSMATPHVAGAAVLVKQKNPSWSNVRIRNHLKNTATSLGSTNLYGSGLVRAEAATR

SEQ ID NO: 60449 - protein, 269 aa, Unidentified
AQSVPWGISRVQAPAAHNRKLTGGGVKVAVLDTGISTHPDLNIRGGASFVPGEPSTQDGEGHGTHVAGTIAALNNSIGVLGVAPSAELYAVKVLAASGNGSVSSIAGGLEWAGLNGMHVANLSLGSPSPSATLEQAVNSATSRGVLVVAASGNSGAGSISYPARYANAMAVGATDQNNNRADFSQYGAGLDIVAPGVNVQSTYPGSTYASQNGTSMATPHVAGAAALVKQKNPSWSNVQIRNHLKNTATSLGSTNLYGSGLVNAEAATR

SEQ ID NO: 60450 - protein, 269 aa, Unidentified
AQSVPWGISRVQAPAAHNRGLAGSGVKVAVLDTGISTHPDLNIRGGASFVPGEPSTQDGNGHGTHVAGTIAALNNSIGVLGVAPSAELYAVKVLAASGNGAISSIAQGLEWAGNNGMHVANLSLGAPSPSATLEQAVNSATSRGVLVVAASGNSGAGSISYPARYANAMAVGATDQNNNRASFSQYGAGLDIVAPGVNVQSTYPGSTYASQNGTSMATPHVAGAAVLVKQKNPSWSNVRIRNHLKNTATSLGSTNLYGSGLVNAEAATR

SEQ ID NO: 60451 - protein, 269 aa, Unidentified
AQTIPWGISRVQAPAAHNRGLTGSGVKVAVLDTGISTHPDLNIRGGASFVPGEPSTQDGNGHGTHVAGTIAALNNSIGVLGVAPSAELYAVKVLGADGEGAISSIAQGLEWAGNNGMHVANLSLGSPSPSATLEQAVNSATSRGVLVVAASGNSGASSISYPARYANAMAVGATDQNNNRASFSQYGAGLDIVAPGVNIQSTYPGATYASLNGTSMATPHVAGAAALVKQKNPSWSNVQIRNHLKNTATSLGSTNLYGSGLVNAEAATR

SEQ ID NO: 60452 - protein, 269 aa, Unidentified
AQSVPWGISRVQAPAAHRRRLTGRGVKVAVLDTGISTHPDLNIRGGASFVPGEPSTQDGNGHGTHVAGTIAALDNSIGVLGVAPSAELYAVKVLGASGAGSVSSIAQGLEWAGANGMHVANLSLGSPSPSATLEQAVNSATSRGVLVVAASGNSGAGSISYPARYANAMAVGATDQNNNRASFSQYGAGLDLVAPGVNVQSTYPGSTYFSLNGTSMATPHVAGAAALVKQKNPSWSNVQIRNRLKNTATSLGSTNLYGSGLVNAEAATR

SEQ ID NO: 60453 - protein, 269 aa, Unidentified
AQTIPWGISRVQAPAAHNRGLTGSGVKVAVLDTGISTHPDLNIRGGASFVPGEPSTQDGNGHGTHVAGTIAALNNSIGVLGVAPSAELYAVKVLGADGRGAISSIAQGLEWAGNNGMHVANLSLGSPSPSATLEQAVNSATSRGVLVVAASGNSGASSISYPARYANAMAVGATDQNNNRASFSQYGPGLDIMAPGVNVQSTYPGSTYASLNGTSMATPHVAGAAALVKQKNPSWSNVQIRNHLKNTATSLGSTNLYGSGLVNAEAATR

SEQ ID NO: 60454 - protein, 269 aa, Unidentified
AQVVPWGVSRVQAPAAHNRGLTGSGVKVAVLDTGISTHEDLNIRGGASFVPGEPSTQDGNGHGTHVAGTIAALDNSIGVLGVAPDAELYAVKVLGASGSGSVSSIAQGLEWAGNNRMHVANLSLGRPSPSATLEQAVNSATSRGVLVVAASGNSGAGSISYPARYANAMAVGATDQNNNRASFSQYGAGLDIVAPGVNVQSTYPGSTYKSLNGTSMATPHVAGAAALVKQKNPSWSNVQIRNHLKNTATSLGSTILYGSGLVNAEAATR

SEQ ID NO: 60455 - protein, 269 aa, Unidentified
AQSVPWGISRVQAPAAHNRGLAGGGVKVAVLDTGISTHPDLNIRGGASFVPGEPSTQDGNGHGTHVAGTIAALDNSIGVLGVAPSAELYAVKVLGASGNGAISSIAIGLEWAGNNGMHVANLSLGSPSPSATLEQAVNSATSRGVLVVAASGNSGAGSISYPARYANAMAVGATDQNNNRASFSQYGAGLDIVAPGVNVQSTYPGSTYASLNGTSMATPHVAGAAVLVKQKNPSWSNVRIRNHLKNTATSLGSTNLYGSGLVNAEAATR

SEQ ID NO: 60456 - protein, 269 aa, Unidentified
AQSVPWGISRVQAPAAHNRGLQGSGVKVAVLDTGISTHPDLNIRGGASFVPGEPSTQDGNGHGTHVAGTIAALNNSIGVLGVAPSAELYAVKVLGASGGGAISSIAQGLEWAGNNGMHVANLSLGSPSPSATLEQAVNSATSRGVLVVAASGNSGADSISYPARYANAMAVGATDQNNNRADFSQYGAGLDIVAPGVNVQSTYPGSTYASLNGTSMATPHVAGAATLVKQKNPSWSNVRIRDHLKNTATSLGSTNLYGSGLVNAEAATR

SEQ ID NO: 60457 - protein, 269 aa, Unidentified
AQSVPWGISRVQAPAAHNRGLAGFGVKVAVLDTGISTHPDLNIRGGASFVPGEPSTQDGNGHGTHVAGTIAALNNSIGVLGVAPSAELYAVKVLGASGGGAISSIAQGLEWAGLNGMHVANLSLGSPSPSATLEQAVNSATSRGVLVVAASGNSGAGSISYPARYANAMAVGATDQNNNRASFSQYGAGLDIVAPGVNVQSTAPQSTYASLNGTSMATPHVAGAAVLVKQKNPSWSNVQIRNHLKNTATSLGSTNLYGSGLVNAEAATR

SEQ ID NO: 60458 - protein, 269 aa, Unidentified
AQTIPWGICRVQAPAAHNRGLTGSGVKVAVLDTGISTHPDLNIRGGASFVPGEPSTQDGNGHGTHVAGTIAALNNSIGVLGVAPSAELYAVKVLGADGEGAISSIAQGLEWAGNNGMHVANLSLGSPSPSATLEQAVNSATSRGVLVVAASGNSGASSISYPARYANAMAVGATDQNNNRASFSQYGAGLDIVAPGVNIQSTYPGSTYASLNGTSMATPHVAGAAALVKQKNPSWSNVQIRNHLKNTATSLGSTNLYGSGLVNAEAATR

SEQ ID NO: 60459 - protein, 269 aa, Unidentified
AQSVPWGISRVQAPAAHNRGLTGSGVKVAVLDTGISTHPDLNIRGGASFVPGEPSTQDGNGHGTHVAGTIAALNNSIGVLGVAPSAELYAVKVLGASGGGAISSIAQGLEWAGANGMHVANLSLGNPSPSATLEQAVNSATSRGVLVVAASGNSGAGSISYPARYANAMAVGATDQNNNRASFSQYGAGLDIVAPGVNVQSTVPQSAYASLNGTSMATPHVAGAAVLVKQKNPSWSNVQIRNHLKNTATSLGSTNLYGSGLVNAEAATR

SEQ ID NO: 60460 - protein, 269 aa, Unidentified
AQSVPWGISRVQAPAAHNRGLTGSGVKVAVLDTGISTHPDLNIRGGASFVPGEPSTQDGNGHGTHAAGTIAALDNSIGVLGVAPSAELYAVKVLGASGSGAISSIAQGLEWAGNNGMHVANLSLGSPSPSATLEQAVNSATSRGVLVVAASGNSGADSISYPARYANAMAVGATDQNNNRASFSQYGAGLDIVAPGVNVQSTYRGSTYASLNGTSMATPHVAGAAVLVKHKNPSWSNVRIRNHLKNTATSLGSTNLYGSGLVNAEAATR

SEQ ID NO: 60461 - protein, 269 aa, Unidentified
AQSVPWGISRVQAPAAHNRGLTGSGVKVAVLDTGISTHPDLNIRGGASFVPGEPSTQDGNGHGTHVAGTIAALNNSIGVLGVAPSAELYAVKVLGADGRGAISSIAQGLEWAGNNGMHVANLSLGSPSPSATLEQQVNSATSWGVLVVAASGNSGASSISTPARYANAMAVGATDQNNNRASFSQYGAGLDIVAPGVNVLSTYPGSTYASLNGTSMATPHVAGAAALVKQKNPSWSNVQIRNHLKNTATSLGSTNLYGSGLVNAEAATR

SEQ ID NO: 60462 - protein, 269 aa, Unidentified
AQTIPWGISRVQAPAAHNRGLTGSGVKVAVLDTGISTHPDLNIRGGASFVPGEPSTQDGNGHGTHVAGTIAALNNSIGVLGVAPSAELYAVKVLGADGEGAISSIAQGLEWAGNNGMHVANLSLGSPSPSATLEQAVNSATSRGVLVVAASGNSGASSISYPARYANVMAVGATDQNNNRASFSQYGAGLDIVAPGVNIQSTYPGSTYASLNGTSMATPHVAGAAALVKQKNPSWSNVQIRNHLKNTATSLGSTNLYGSGLVNAEAATR

SEQ ID NO: 60463 - protein, 269 aa, Unidentified
AQSVPWGISRVQAPAAHNRGLTGSGVKVAVLDTGISTHPDLNIRGGASFVPGEPSTQDGNGHGTHVAGTIAALDNNIGVLGVAPRAELYAVKVLGASGSGSVSSIAQGLEWAGNNRMHVANLSLGLQAPSATLEQAVNSATSRGVLVVAASGNSGAGSISYPARYANAMAVGATDQNNNRASFSQYGAGLDIVAPGVNVLSTWPGSTYASLNGTSMATPHVAGAAALVKQKNPSWSNVQIRNHLKNTATSLGSTNLYGSGLVNAEAATR

SEQ ID NO: 60464 - protein, 269 aa, Unidentified
AQSVPWGISRVQAPAAHNRGLTGSGVKVAVLDTGISTHPDLNIRGGASFVPGEPSTQDGNGHGTHVAGTIAALDNSIGVLGVAPSAELYAVKVLGADGRGAISSIAQGLEWAGNNGMHVANLSLGSPSPSATLEQAVNSATSRGVLVVAASGNDGASSISYPARYANAMAVGATDQNNNRASFSQYGAGLDIVAPGVNVQSTWPGSTYASLNGTSMATPHVAGAAALVKQKNPSWSNVQIRNHLKNTATSLGSTNEYGSGLVNAEAATR

SEQ ID NO: 60465 - protein, 269 aa, Unidentified
AQVVPWGISRVQAPAAHNRGLTGSGVKVAVLDTGISTHPDLNIRGGASFVPGEPSTQDGNGHGTHVAGTIAALDNSIGVLGVAPDAELYAVKVLGASGSGSVSSIAQGLEWAGNNRMHVANLSLGRPSPSATLEQAVNSATSRGVLVVAASGNSGAGSISYPARYANAMAVGATDQNNNRASFSQYGAGLDIVAPGVNVQSTYIPSTYASLNGTSMATPHVAGAAALVKQKNPSWSNVQIRNHLKNTATSLGSTIQYGSGLVNAEAATR

SEQ ID NO: 60466 - protein, 269 aa, Unidentified
AQSVPWGISRVQAPAAHNRGLTGSGVKVAVLDTGISTHPDLNIRGGASFVPGEPSTQDGNGHGTHVAGTIAALDNNIGVLGVAPRAELYAVKVLGASGSGSVSSIAQGLEWAGNNRMHVANLSLGLQAPSATLEQAVNSATSRGVLVVAASGNSGEGSISYPARYANAMAVGATDQNNNRASFSQYGAGLDIVAPGVNVLSTYPGSTYASLNGTSMATPHVAGAAALVKQKNPSWSNVQIRNHLKNTATSLGSTNLYGSGLVNAEAATR

SEQ ID NO: 60467 - protein, 269 aa, Unidentified
AQSVPWGISRVQAPAAHNRGLAGSGVKVAVLDTGISTHPDLNIRGGASFVPGEPSTQDGNGHGTHVAGTIAALNNSIGVLGVAPSAELYAVKVLGASGGGAISSIAQGLEWAGNNGMHVANLSLGSPSPSATLEQAVNSATSRGVLVVAASGNSGAGSISYPARYANAMAVGATDQNNNRASFSQYGAGLDIVAPGVNVQSTYPGSTYASLNGTSMATPHVAGAAVLVKQKYPSWSNVRIRNHLKNTATSLGSTNLYGSGLVNVEVATR

SEQ ID NO: 60468 - protein, 269 aa, Unidentified
AQSVPWGISRVQAPASHNRGLAGSGVKVAVLDTGISTHPDLNIRGGASFVPGEPSTQDGNGHGTHVAGTIAALNNSIGVLGVAPSAELYAVKVLGASGGGAISSIAQGLEWAGANGMHVANLSLGSPSPSATLEQAVNSATSRGVLVVAASGNSGAGSISYPARYANAMAVGATDQNNNRASFSQYGAGLDIVAPGVNVQSTVPGSAYASLNGTSMATPHVAGAAVLVKQKNPSWSNVQIRNHLKNTATSLGSTNLYGSGLVNAEAATR

SEQ ID NO: 60469 - protein, 269 aa, Unidentified
AQSVPWGISRVQAPAAHRRRLWGRGVKVAVLDTGISTHPDLNIRGGASFVPGEPSTQDGNGHGTHVAGTIAALDNSIGVLGVAPSAELYAVKVLGASGSGSVSSIAQGLEWAGANGMHVANLSLGSPSPSATLEQAVNSATSRGVLVVAASGNSGAGSISYPARYANAMAVGATDQDNNRASFSQYGAGLDLVAPGVNVQSTYPGSTYASLNGTSMATPHVAGAAALVKQKNPSWSNVQIRNRLKNTATSLGSTNLYGSGLVNAEAATR

SEQ ID NO: 60470 - protein, 269 aa, Unidentified
AQSVPWGISRVQAPAAHNRGLTGSGVKVAVLDTGISTHPDLNIRGGASFVPGEPSTQDGNGHGTHVAGTIAALNNSIGVLGVAPSAELYAVKVLGASGGGSIASIAQGLEWAGNNGMHVANLSLGNESPSATLEQAVNSATSRGVLVVAASGNSGAGSISYPARYANAMAVGATDQNNNRASFSQYGAGLDIVAPGVNVQSTYPGSTYASLNGTSMATPHVAGAAVLVKQKRPSWSNVRIRDHLKNTATSLGSTNLYGSGLVNAEAATR

SEQ ID NO: 60471 - protein, 269 aa, Unidentified
AQSVPWGISRVQAPAAHNRGLTGSGVKVAVLDTGISTHPDLNIRGGASFVPGEPSTQDGNGHGTHVAGTIAALNNSIGVLGVAPSAELYAVKVLGASGGGAISSIAQGLEWAGNNGMHVANLSLGSPSPSATLEQAVNSATSRGVLVVAASGNSGADSISYPARYANAMAVGATDQNNNRADFSQYGAGLDIVAPGVNVQSTYPGSTYASLNGTSMATPHVAGAAVLVKQKNPSWSNVRIRDHLKNTATSLGSTNLYGSGLVNAFAATR

SEQ ID NO: 60472 - protein, 269 aa, Unidentified
AQSVPWGISRVQAPAAHNRGLTGSGVKVAVLDTGISTHPDLNIRGGASFVPGEPSTQDGNGHGTHVAGTIAALDNSIGVLGVAPSAELYAVKVLGASGGGAISSIAQGLEWAGNNGMHVANLSLGSPSPSATLEQAVNSATSRGVLVVAASGNSGEGSISYPARYANAMAVGATDQNNNRADFSQYGAGLDIVAPGVNVQSTYPGSTYASLNGTSSATPHVAGAAVLVKQKNPSWSNVRIRDRLKNTATSLGSTNLYGSGLVNAEAATR

SEQ ID NO: 60473 - protein, 269 aa, Unidentified
AQVVPWGISRVQAPAAHNRGLTGSGVKVAVLDTGISTHPDLNIRGGASFVPGEPSTQDGNGHGTHVAGTIAALDNNIGVLGVAPRAELYAVKVLGASGSGSVSSIAQGLEWAGNNRMHVANLSLGLQAPSATLEQAVNSATSRGVLVVAASGNSGAGSISYPARYANAMAVGATDQNNNRASFSQYGAGLDIVAPGVNVQSTWPGSTYASLNGTSMATPHVAGAAALVKQKNPSWSNVQIRNHLKNTATSLGSTNLYGSGLVNAEAATR

SEQ ID NO: 60474 - protein, 269 aa, Unidentified
AQSVPWGISRVQAPAAHNRGLTGFGVKVAVLDTGISTHPDLNIRGGASFVPGEPSTQDGNGHGTHVAGTIAALNNSIGVLGVAPSAELYAVKVLGASGGGAISSIAQGLEWAGLNGMHVANLSLGSPSPSATLEQAVNSATSRGVLVVAASGNSGAGSISYPARYANAMAVGATDQNNNRASFSQYGAGLDIVAPGVNVQSTAPQSAYASLNGTSMATPHVAGAAVLVKQKNPSWSNVQIRNHLKNTATSLGSTNLYGSGLVNAEAATR

SEQ ID NO: 60475 - protein, 269 aa, Unidentified
AQSVPWGISRVQAPAAHRRGLTGSGVKVAVLDTGISTHPDLRITGGASFVPGEPSTQDGNGHGTHVAGTIAALTNSIGVLGVAPSAELYAVKVLGASGGGAISSIAQGLEWAGNNGMHVANLSLGSPSPSATLEQAVNSATSRGVLVVAASGNSGAGSISYPARYANAMAVGATDQNNNRASFSQYGAGLDIVAPGVNVQSTYPGSTYASLNGTSMATPHVAGAATLVKQKNPSWSNVRIRNHLKNTATSLGSTNLYGSGLVNAEAATR

SEQ ID NO: 60476 - protein, 269 aa, Synthetic construct
AQTIPWGISRVQAPAAHNRGLTGSGVKVAVLDTGISTHPDLNIRGGASFVPGEPSTQDGNGHGTHVAGTIAALNNSIGVLGVAPSAELYAVKVLGADGRGAISSIAQGLEWAGNNGMHVANLSLGSPSPSATLEQAVNSATSRGVLVVAASGNSGASSISYPARYANAMAVGATDQNNNRASFSQYGAGLDIVAPGVNIQSTYPGSTYASDNGTSMATPHVAGAAALVKQKNPSWSNVQIRNHLKNTATSLGSTNLYGSGLVNAEAATR

SEQ ID NO: 60477 - protein, 269 aa, Unidentified
AQSVPWGIERVQAPAAHNRGLTGSGVKVAVLDTGISTHPDLRIRGGASFVPGEPSTQDGNGHGTHVAGTIAALNDSIGVLGVAPSAELYAVKVLGASGSGSVSSIAQGLEWAGNNGMHVANLSLGSPSPSATLEQAVNSATSRGVLVVAASGNSGAGSISYPARYANAMAVGATDQNNNRASFSQYGAGLDIVAPGVNILSTWPGSTYASLNGTSMATPHVAGAAALVKQKNPSWSNVQIRNHLKNTATSLGDTWEYGSGLVNAEAATR

SEQ ID NO: 60478 - protein, 269 aa, Unidentified
AQSVPWGISRVQAPAAHNRGLAGGGVKVAVLDTGISTHPDLNIRGGASFVPGEPSTQDGNGHGTHVAGTIAALNNNIGVLGVAPSAELYAVKVLAASGNGAISSIAQGLEWAGNNGMHVANLSLGSPSPSATLEQAVNSATSRGVLVVAASGNSGAGSISYPARYANAMAVGATDQNNNRASFSQYGAGLDIVAPGVNVQSTYPGSTYASLNGTSMATPHVAGAAVLVKQKNPSWSNVRIRNHLKNTATSLGSTNLYGSGLVNAEAATR

SEQ ID NO: 60479 - protein, 269 aa, Unidentified
AQSVPWGISRVQAPAAHRRRLTGRGVKVAVLDTGISTHPDLNIRGGASFVPGEPSTQDGNGHGTHVAGTIAALDNSIGVLGVAPSAELYAVKVLGASGSGSVSSIAQGLEWAGANGMHVANLSLGSPSPSATLEQAVNSATSRGVLVVAASGNSGAGSISYPARYANAMAVGATDQDNNRASFSQYGAGLDIVAPGVNVQSTYPGSTYFSLNGTSMATPHVAGAAALVKQKNPSWSNVQIRNRLKNTATSLGSTNLDGSGLVNAEAATR

SEQ ID NO: 60480 - protein, 269 aa, Unidentified
AQSVPWGISRVQAPAAHNRKLTGGGVKVAVLDTGISTHPDLNIRGGASFVPGEPSTQDGEGHGTHVAGTIAALNNNIGVLGVAPSAELYAVKVLSASGGGSVSSIAQGLEWAGLNGMHVANLSLGAPSPSATLEQAVNSATSRGVLVVAASGNSGAGSISYPARYANAMAVGATDQNNNRASFSQYGAGLDIVAPGVNVQSTYPGSTYASQNGTSMATPHVAGAAALVKQKNPSWSNVQIRNHLKNTATSLGSTNLYGSGLVNAEAATR

SEQ ID NO: 60481 - protein, 269 aa, Unidentified
AQSVPWGISRVQAPAAHNRGLTGSGVKVAVLDTGISTHPDLNIRGGASFVPGEPSTQDGNGHGTHVAGTIAALDNSIGVLGVAPSAELYAVKVLGASGSGAISSIAQGLEWAGNNGMHVANLSLGSPSPSATLEQAVNSATSRGVLVVAASGNSGADSISYPARYANAMAVGATDQNNNRASFSQYGAGLDIVAPGVNVQSTYPGSRYASLNGTSMATPHVAGAAVLVKHKNPSWSNVRIRNHLKNTATSLGSANLYGSGLVNAEAATR

SEQ ID NO: 60482 - protein, 269 aa, Unidentified
AQSVPWGISRVQAPAAHNRGLQGSGVKVAVLDTGISTHPDLNIRGGASFVPGEPSTQDGNGHGTHVAGTIAALNNSIGVLGVAPSAELYAVKVLGASGGGAISSIAQGLEWAGNNGMHVANLSLGSPSPSATLEQAVNSATSRGVLVVAASGNSGADSISYPARYANAMAVGATDQNNNRAEFSQYGAGLDIVAPGVNVQSTYPGSTYASLNGTSMATPHVAGAALLVKQKNPSWSNVRIRDHLKNTATSLGSTNLYGSGLVNAEAATR

SEQ ID NO: 60483 - protein, 269 aa, Unidentified
AQSVPWGISRVQAPAAHNRRLTGRGVKVAVLDTGISTHPDLNIRGGASFVPGEPSTQDGEGHGTHVAGTIAALNNDIGVLGVAPSAELYAVKVLGASGSGSVSSIAQGLEWAGNNDMHVANLSLGSESPSATLEQAVNSATSRGVLVVAASGNSGAGSISYPARYANAMAVGATDQNNNRADFSQYGAGLDIVAPGVNVQSTYPGSTYASLNGTSMATPHVAGAAALVKQKNPSWSNVRIRDHLKNTATSLGSTNLYGSGLVNAEAATR

SEQ ID NO: 60484 - protein, 269 aa, Unidentified
AQSVPWGISRVQAPASHNRGLTGSGVKVAVLDSGISTHPDLNIRGGASFVPGEPSTQDGNGHGTHVAGTIAALNNSIGVLGVAPSAELYAVKVLGASGGGAISSIAQGLEWAGLNGMHVANLSLGNPSPSATLEQAVNSATSRGVLVVAASGNSGAGSISYPARYANAMAVGATDQNNNRASFSQYGAGLDIVAPGVNVQSTAPGSTYASLNGTSMATPHVAGAAVLVKQKNPSWSNVQIRNHLKNTATSLGSTNLYGSGLVNAEAATR

SEQ ID NO: 60485 - protein, 269 aa, Unidentified
AQTIPWGISRVQAPAAHNRGLTGSGVKVAVLDTGISTHPDLNIRGGASFVPGEPSTQDGNGHGTHVAGTIAALNNSIGVLGVAPSAELYAVKVLGADGEGAISSIAQGLEWAGNNGMHVANLSLGSPSPSATLEQAVNSATSRGILVVAASGNSGASSISYPARYANAMAVGATDQNNNRASFSQYGAGLDIVAPGVNIQSTYPGSTYASLNGTSMATPHVAGAAALVKQKNPSWSNVQIRNHLKNTATSLGSTNLYGSGLVNAEAATR

SEQ ID NO: 60486 - protein, 269 aa, Unidentified
AQSVPWGISRVQAPAAHNRGLTGFGVKVAVLDSGISTHPDLNIRGGASFVPGEPSTQDGNGHGTHVAGTIAALNNSIGVLGVAPSAELYAVKVLGASGGGAISSIAQGLEWAGLNGMHVANLSLGSPSPSATLEQAVNSATSRGVLVVAASGNSGAGSISYPARYANAMAVGATDQNNNRASFSQYGAGLDIVAPGVNVQSTAPGSAYASLNGTSMATPHVAGAAVLVKQKNPSWSNVQIRNHLKNTATSLGSTNLYGSGLVNAEAATR

SEQ ID NO: 60487 - protein, 269 aa, Unidentified
AQSVPWGISRVQAPAAHNRGLAGSGVKVAVLDTGISTHPDLNIRGGASFVPGEPSTQDGNGHGTHVAGTIAALNNSIGVLGVAPSAELYAVKVLGASGGGAISSIAQGLEWAGNNGMHVANLSLGSPSPSATLEQAVNSATSRGVLVVAASGNSGADSISYPARYANAMAVGATDQNNNRADFSQYGAGLDIVAPGVNVQSTYPGSTYASLNGTSMATPHVAGAASLVKQKNPSWSNVRIREHLKNTATSLGSTNLYGSGLVNAEAATR

SEQ ID NO: 60488 - protein, 269 aa, Unidentified
AQSVPWGISRVQAPAAHNRGLTGFGVKVAVLDTGISTHPDLNIRGGASFVPGEPSTQDGNGHGTHVAGTIAALNNSIGVLGVAPSAELYAVKVLGASGGGAISSIAQGLEWAGLNGMHVANLSLGSPSPSATLEQAVNSATSRGVLVVAASGNSGAGSISYPARYANAMAVGATDQNNNRASFSQYGAGLDIVAPGVNVQSTVPQSAYASLNGTSMATPHVAGAAVLVKQKNPSWSNVQIRNHLKNTATSLGSTNLYGSGLVNAEAATR

SEQ ID NO: 60489 - protein, 269 aa, Unidentified
AQSVPWGISRVQAPAAHNRGLAGSGVKVAVLDTGISTHPDLNIRGGASFVPGEPSTQDGNGHGTHVAGTIAALNNSIGVLGVTPSAELYAVKVLSASGQGAISSIAQGLEWAGNNGMHVANLSLGSPSPSATLEQAVNSATSRGVLVVAASGNSGAGSISYPARYANAMAVGATDQNNNRASFSQYGAGLDIVAPGVNVQSTYPGSTYASQNGTSMATPHVAGAAVLVKQKNPSWSNVRIRNHLKNTATSLGSTNLYGSGLVNAEAATR

SEQ ID NO: 60490 - protein, 269 aa, Synthetic construct
AQTIPWGISRVQAPAAHNRGLTGSGVKVAVLDTGISTHPDLNIRGGASFVPGEPSTQDGNAHGTHVAGTIAALNNSIGVLGVAPSAELYAVKVLGADGRGAISSIAQGLEWAGNNGMHVANLSLGSPSPSATLEQAVNSATSRGVLVVAASGNSGASSISYPARYANAMAVGATDQNNNRASFSQYGAGLDIVAPGVNIQSTYPGSTYASLNGTSMATPHVAGAAALVKQKNPSWSNVQIRNHLKNTATSLGSTNLYGSGLVNAEAATR

SEQ ID NO: 60491 - protein, 269 aa, Unidentified
AQSVPWGISRVQAPAAHNRGLTGSGVKVAVLDTGISTHPDLNIRGGASFVPGEPSTQDGNGHGTHVAGTIAALDNNIGVLGVAPRAELYAVKVLGASGSGSVSSIAQGLEWAGNNRMHVANLSLGLQAPSATLEQAVNSATSRGVLVVAASGNSGAGSISYPARYANAMAVGATDQNNNRASFSQYGAGLDIVAPGVNVLSTYPGSAYASLNGTSMATPHVAGAAALVKQKNPSWSNVQIRNHLKNTATSLGSTNLYGSGLVNAEAATR

SEQ ID NO: 60492 - protein, 269 aa, Unidentified
AQSVPWGISRVQAPAAHNRGLTGRGVKVAVLDTGISTHPDLNIRGGASFVPGEPSTQDGNGHGTHVAGTIAALNNSIGVLGVAPSAELYAVKVLGASGGGSISSIAQGLEWAGNNGMHVANLSLGSPSPSATLEQAVNSATSRGVLVVAASGNSGAESISYPARYANAMAVGATDQNNNRADFSQYGAGLDIVAPGVNVQSTYPGSTYASLNGTSMATPHVAGAAVLVKQKNPSWSNVRIRDRLKNTATSLGSTNLYGSGLVNAEAATR

SEQ ID NO: 60493 - protein, 269 aa, Unidentified
AQSVPWGISRVQAPAAHNRGLAGSGVKVAVLDTGISTHPDLNIRGGASFVPGEPSTQDGNGHGTHVAGTIAALNNSIGVLGVAPSAELYAVKVLGASGGGAISSIAQGLEWAGNNGMHVANLSLGSPSPSATLEQAVNSATSRGVIVVAASGNSGAGSISYPARYANAMAVGATDQNNNRADFSQYGAGLDIVAPGVNVQSTYPGSTYASLNGTSMATPHVAGAAVLVKQKNPSWSNVRIRDHLKNTATSLGSTNLYGSGLVNAEAATR

SEQ ID NO: 60494 - protein, 269 aa, Unidentified
AQTVPWGISRVQAPAAHNRGLTGSGVKVAVLDTGISTHPDLNIRGGASFVPGEPSTQDGNGHGTHVAGTIAALNNSIGVLGVAPSAELYAVKVLGADGRGAISSIAQGLEWAGNNGMHVANLSLGSPSPSATLEQAVNSATSRGVLVVAASGNSGASSISYPARYANAMAVGATDQNNNRASFSQYGPGLDIMAPGVNIQSTYPGSTYASLNGTSMATPHVAGAAALVKQKNPSWSNVQIRNHLKNTATSLGSTNLYGSGLVNAEAATR

SEQ ID NO: 60495 - protein, 269 aa, Unidentified
AQSVPWGISRVQAPAAHNRGLAGGGVKVAVLDTGISTHPDLNIRGGASFVPGEPSTQDGNGHGTHVAGTIAALNNNIGVLGVAPSAELYAVKVLGASGQGAISSIAQGLEWAGNNGMHVANLSLGAPSPSATLEQAVNSATSRGVLVVAASGNSGAGSISYPARYANAMAVGATDQNNNRASFSQYGAGLDIVAPGVNVQSTYPGSTYASLNGTSMATPHVAGAAVLVKQKNPSWSNVRIRNHLKNTATSLGSTNLYGSGLVNAEAATR

SEQ ID NO: 60496 - protein, 269 aa, Unidentified
AQSVPWGISRVQAPAAHNRGLQGSGVKVAVLDTGISTHPDLNIRGGASFVPGEPSTQDGNGHGTHVAGTIAALNNSIGVLGVAPSAELYAVKVLGASGGGAISSIAQGLEWAGNNGMHVANLSLGSPSPSATLEQAVNSATSRGVLVVAASGNSGAGSIDYPARYANAMAVGATDQNNNRAEFSQYGAGLDIVAPGVNVQSTYPGSTYASLNGTSMATPHVAGAATLVKQKNPSWSNVTIREHLKNTATSLGSTNLYGSGLVNAEAATR

SEQ ID NO: 60497 - protein, 269 aa, Unidentified
AQSVPWGISRVQAPAAHNRGLTGSGVKVAVLDTGISTHPDLNIRGGASFVPGEPSTQDGNGHGTHVAGTIAALDNNIGVLGVAPRAELYAVKVLGASGSGSVSSIAQGLEWAGNNRMHVANLSLGLQAPSATLEQAVNSATSRGVLVVAASGNSGAGSIDYPARYANAMAVGATDQNNNRASFSQYGAGLDIVAPGVNVLSTYPGSTYASLNGTSMATPHVAGAAALVKQKNPSWSNVQIRNHLKNTATSLGSTNLYGSGLVNAEAATR

SEQ ID NO: 60498 - protein, 269 aa, Unidentified
AQSVPWGISRVQAPASHNRGLAGSGVKVAVLDTGISTHPDLNIRGGASFVPGEPSTQDGNGHGTHVAGTIAALNNSIGVLGVAPSAELYAVKVLGASGGGAISSIAQGLEWAGLNGMHVANLSLGSPSPSATLEQAVNSATSRGVLVVAASGNSGAGSISYPARYANAMAVGATDQNNNRASFSQYGAGLDIVAPGVNVQSTVPGSAYASLNGTSMATPHVAGAAVLVKQKNPSWSNVQIRNHLKNTATSLGSTNLYGSGLVNAEAATR

SEQ ID NO: 60499 - protein, 269 aa, Unidentified
AQSVPWGISRVQAPAAHNRGLTGSGVKVAVLDTGISTHPDLNIRGGASFVPGEPSTQDGNGHGTHAAGTIAALNNSIGVLGVAPSAELYAVKVLGASGSGAISSIAQGLEWAGNNGMHVANLSLGSPSPSATLEQAVNSATSRGVLVVAASGNSGADSISYPARYANAMAVGATDQNNNRASFSQYGSGLDIVAPGVNVQSTYPGSTYASLNGTSMATPHVAGAAVLVKHKNPSWSNVRIRNHLKNTATSVGSTNLYGSGLVNAEAATR

SEQ ID NO: 60500 - protein, 269 aa, Unidentified
AQVVPWGISRVQAPAAHNRGLTGSGVKVAVLDTGISTHEDLNIRGGASFVPGEPSTQDGNGHGTHVAGTIAALDNGIGVLGVAPSAELYAVKVLGASGSGSVSSIAQGLEWAGNNRMHVANLSLGLQAPSATLEQAVNSATSRGVLVVAASGNSGAGSISYPARYANAMAVGATDQNNNRASFSQYGAGLDIVAPGVNVQSTYPGSTYASKNGTSMATPHVAGAAALVKQKNPSWSNVQIRNHLKNTATSLGSTNLYGSGLVNAEAATR

SEQ ID NO: 60501 - protein, 269 aa, Unidentified
AQSVPWGVSRVQAPAAHNRGLTGSGVKVAVLDTGISTHEDLNIRGGASFVPGEPSTQDGNGHGTHVAGTIAALDNGIGVLGVAPSAELYAVKVLGASGSGSVSSIAQGLEWAGNNRMHVANLSLGSPSPSATLEQAVNSATSRGVLVVAASGNSGAGSISYPARYANAMAVGATDQNNNRASFSQYGAGLDIVAPGVNVYSTYIGSTYKSLNGTSMATPHVAGAAALVKQKNPSWSNVQIRNHLKNTATSLGSTILYGSGLVNAEAATR

SEQ ID NO: 60502 - protein, 269 aa, Unidentified
AQSVPWGISRVQAPAAHNRGLTGSGVKVAVLDTGISTHPDLNIRGGASFVPGEPSTQDGNGHGTHVAGTIAALNNSIGVLGVAPSAELYAVKVLGADGRGAISSIAQGLEWAGNNGMHVANLSLGSPSPSATLEQQVNSATSRGVLVVAASGNDGASSISYPARYANAMALGATDQNNNRASFSQYGAGLDIVAPGVNVLSTYPGSTYASLNGTSMATPHVAGAAALVKQKNPSWSNVQIRNHLKNTATSLGSTNLYGSGLVNAEAATR

SEQ ID NO: 60503 - protein, 269 aa, Unidentified
AQSVPWGISRVQAPAAHNRGLTGSGVKVAVLDTGISTHPDLNIRGGASFVPGEPSTQDGNGHGTHVAGTIAALNNSIGVLGVAPSAELYAVKVLGASGSGAISSIAQGLEWAGNNGMHVANLSLGSPSPSATLEQAVNSATSRGVLVVAASGNSGADSISYPARYANAMAVGATDQNNNRASFSQYGAGLDIVAPGVNVQSTYIGSTYASLNGTSMATPHVAGAAVLVKHKNPSWSNVRIRDHLKKTATSLGSTNLYGSGLVNAEAATR

SEQ ID NO: 60504 - protein, 269 aa, Unidentified
AQSVPWGISRVQAPAAHNRRLTGRGVKVAVLDTGISTHPDLNIRGGASFVPGEPSTQDGEGHGTHVAGTIAALNNGIGVLGVAPSAELYAVKVLGASGSGSVSSIAQGLEWAGNNDMHVANLSLGSESPSATLEQAVNSATSRGVLVVAASGNSGAGSISYPARYANAMAVGATDQNNNRADFSQYGAGLDIVAPGVNVQSTYPGSTYASLNGTSMATPHVAGAAALVKQKNPSWSNVQIRDRLKNTATSLGSTNLYGSGLVNAEAATR

SEQ ID NO: 60505 - protein, 269 aa, Unidentified
AQSVPWGISRVQAPAAHNRRLWGSGVKVAVLDTGISTHPDLNIRGGASFVPGEPSTQDGNGHGTHVAGTIAALNNRIGVLGVAPSAELYAVKVLGASGGGAISSIAQGLEWAGANGMHVANLSLGSPSPSATLEQAVNSATSRGVLVVAASGNSGAGSISYPARYANAMAVGATDQNNNRASFSQYGAGLDIVAPGVNVQSTYPGSTYASLNGTSMATPHVAGAAWLVKQKNPSWSNVRIRNHLKNTATSLGSTNLYGSGLVNAEAATR

SEQ ID NO: 60506 - protein, 269 aa, Unidentified
AQTIPWGISRVQAPAAHNRGLTGSGVKVAVLDTGISTHPDLNIRGGASFVPGEPSTQDGNGHGTHVAGTIAALNNSIGVLGVAPSAELYAVKVLGADGEGAISSIAQGLEWAGNNGMHVANLSLGSPSPSATLEQAVNSATSRGVLVVAASGNSGASSISYPARYANAMAVGATDQNNNRASFSQYGAGLDIVAPGVNIQSTYPGSTYASLNGTSMATPHVAGAAALVKQKNPSWSNVQIRNHLKNTATSLGCTNLYGSGLVNAEAATR

SEQ ID NO: 60507 - protein, 269 aa, Unidentified
AQSVPWGISRVQAPAAHNRGLTGRGVKVAVLDTGISTHPDLRIRGGASFVPGEPSTQDGNGHGTHVAGTIAALNNSIGVLGVAPSAELYAVKVLGASGAGAISSIAQGLEWAGNNGMHVANLSLGSPSPSATLEQAVNSATSRGVLVVAASGNSGDGSISYPARYANAMAVGATDQNNNRASFSQYGAGLDIVAPGVNVQSTYPGSTYASENGTSMATPHVAGAAVLVKQKNPSWSNVRIRNHLKNTATSLGSTNLYGSGLVNAEAATR

SEQ ID NO: 60508 - protein, 269 aa, Unidentified
AQSVPWGISRVQAPAAHNRGLTGSGVKVAVLDTGISTHPDLNIRGGASFVPGEPSTQDGNGHGTHVAGTIAALNNSIGVLGVAPSAELYAVKVLGASGGGSIASIAQGLEWAGNNGMHVANLSLGSPSPSATLEQAVNSATSRGVLVVAASGNSGEESISYPARYANAMAVGATDQNNNRASFSQYGAGLDIVAPGVNVQSTYPGSTYASLNGTSMATPHVAGAAVLVKQKNPSWSNVRIRDRLKNTATSLGSTNLYGSGLVNAEAATR

SEQ ID NO: 60509 - protein, 269 aa, Bacillus lentus
AQSVPWGIRRVQAPTAHNRGLTGSGVKVAVLDTGISTHPDLNIRGGASFVPGEPSTQDEDGHGTHAAGTIAALNNSIGVLGVAPSAELYAVKVLGASGSGSVSSIAQGLEWAGNNGMHVANLSLGSPSPSATLEQAVNSATSRGVLVVAASGNSGAGSISYPARYANAMAVGATDQNNNRASFSQYGPGLDIVAPGVNIQSTYPGSTYASLNGTSMATPHVAGAAALVKQKNPSWSNVRIRNHLKNTATSLGSTDLYGSGLVNAEAATR

SEQ ID NO: 60510 - protein, 269 aa, Unidentified
AQSVPWGISRVQAPAAHNRGLTGSGVKVAVLDTGISTHPDLNIRGGASFVPGEPSTQDGNGHGTHAAGTIAALNNSIGVLGVAPSAELYAVKVLGASGSGAISSIAQGLEWAGNNGMHVANLSLGSPSPSATLEQAVNSATSRGVLVVAASGNSGADSISYPARYANAMAVGATDQNNNRASFSQYGAGLDIVAPGVNVQSTWPGSTYASLNGTSMATPHVAGAAVLVKHKNPSWSNVRIRNHLKNTATSVGSTNLYGSGLVNAEAATR

SEQ ID NO: 60511 - protein, 269 aa, Unidentified
AQSVPWGISRVQAPAAHNRGLTGSGVKVAVLDTGISTHPDLNIRGGASFVPGEPSTQDGNGHGTHVAGTIAALNNSIGVLGVAPSAELYAVKVLGASGSGAISSIAQGLEWAGNNGMHVANLSLGSPSPSATLEQAVNSATSRGVLVVAASGNSGADSISYPARYANAMAVGATDQNNNRASFSQYGAGLDIVAPGVNIQSTWPGSTYASLNGTSMATPHVAGAAVLVKHKNPSWSNVRIRNHLKNTATSVGSTNLYGSGLVNAEAATR

SEQ ID NO: 60512 - protein, 269 aa, Unidentified
AQSVPWGISRVQAPAAHNRGLTGSGVKVAVLDTGISTHPDLNIRGGASFVPGEPSTQDGNGHGTHAAGTIAALDNSIGVLGVAPSAELYAVKVLGASGSGAISSIAQGLEWAGNNGMHVANLSLGSPSPSATLEQAVNSATSRGVLVVAASGNSGADSISYPARYANAMAVGATDQNNNRASFSQYGAGLDIVAPGVNVQSTYPGSTYASLNGTSMATPHVAGAAVLVKHKNPSWSNVRIRNHLKNTATRLGSTNLYGSGLVNAEAATR

SEQ ID NO: 60513 - protein, 269 aa, Unidentified
AQSVPWGISRVQAPAAHNRGLTGSGVKVAVLDTGISTHPDLNIRGGASFVPGEPSTQDGNGHGTHVAGTIAALDNNIGVLGVAPRAELYAVKVLGASGSGPVSSIAQGLEWAGNNRMHVANLSLGLQAPSATLEQAVNSATSRGVLVVAASGNSGAGSISYPARYANAMAVGATDQNNNRASFSQYGAGLDIVAPGVNVLSTYPGSTYASLNGTSMATPHVAGAAALVKQKNPSWSNVQIRNHLKNTATSLGSTNLYGSGLVNAEAATR

SEQ ID NO: 60514 - protein, 269 aa, Unidentified
AQSVPWGISRVQAPAAHNRGLTGSGVKVAVLDTGISTHPDLNIRGGASFVPGEPSTQDGNGHGTHVAGTIAALDNNIGVLGVAPRAELYAVKVLGASGSGSVSSIAQGLEWAGNNRMHVANLSLTLQAPSATLEQAVNSATSRGVLVVAASGNSGAGSISYPARYANAMAVGATDQNNNRASFSQYGAGLDIVAPGVNVLSTYPGSTYASLNGTSMATPHVAGAAALVKQKNPSWSNVQIRNHLKNTATSLGSTNLYGSGLVNAEAATR

SEQ ID NO: 60515 - protein, 269 aa, Unidentified
AQSVPWGISRVQAPAAHNRGLAGSGVKVAVLDTGISTHPDLNIRGGASFVPGEPSTQDGNGHGTHVAGTIAALDNSIGVLGVAPSAELYAVKVLAASGQGAISSIAQGLEWAGNNGMHVANLSLGAPSPSATLEQAVNSATSRGVLVVAASGNSGAGSISYPARYANAMAVGATDQNNNRASFSQYGAGLDIVAPGVNVQSTYPGSTYASLNGTSMATPHVAGAAVLVKQKNPSWSNVRIRNHLKNTATSLGSTNLYGSGLVNAEAATR

SEQ ID NO: 60516 - protein, 269 aa, Unidentified
AQSVPWGISRVQAPAAHNRGLQGSGVKVAVLDTGISTHPDLNIRGGASFVPGEPSTQDGNGHGTHVAGTIAALNNSIGVLGVAPSAELYAVKVLGASGGGAISSIAQGLEWAGNNGMHVANLSLGSPSPSATLEQAVNSATSRGVLVVAASGNSGADSISYPARYANAMAVGATDQNNNRAEFSQYGAGLDIVAPGVNVQSTYPGSTYASLNGTSMATPHVAGAASLVKQKNPSWSNVRIRHHLKNTATSLGSTNLYGSGLVNAEAATR

SEQ ID NO: 60517 - protein, 269 aa, Unidentified
AQSVPWGISRVQAPAAHNRGLTGSGVKVAVLDTGISTHPDLNIRGGASFVPGEPSTQDGNGHGTHVAGTIAALDNNIGVLGVAPRAELYAVKVLGASGSGSVSSIAQGLEWAGNNRMHVANMSLGLQAPSATLEQAVNSATSRGVLVVAASGNSGAGSISYPARYANAMAVGATDQNNNRASFSQYGAGLDIVAPGVNVLSTYPGSTYASLNGTSMATPHVAGAAALVKQKNPSWSNVQIRNHLKNTATSLGSTNLYGSGLVNAEAATR

SEQ ID NO: 60518 - protein, 269 aa, Unidentified
AQSVPWGISRVQAPAAHNRGLAGSGVKVAVLDTGISTHPDLNIRGGASFVPGEPSTQDGNGHGTHVAGTIAALNNSIGVLGVAPSAELYAVKVLGASGGGAISSIAQGLEWAGNNGMHVANLSLGSPSPSATLEQAVNSATSRGVLVVAASGNSGADSISYPARYANAMAVGATDQNNNRAEFSQYGAGLDIVAPGVNVQSTYPGSTYASLNGTSMATPHVAGAATLVKQKNPSWSNVTIREHLKNTATSLGSTNLYGSGLVNAEAATR

SEQ ID NO: 60519 - protein, 269 aa, Bacillus lentus
AQSVPWGISRVQAPAAHNRGLTGSGVKEAVLDTGISTHEDLNVRGGVSFVPGEPSYQDGNGHGTHVAGTIAALNNSIGVVGVAPSADLYAVKVLGASGSGSVSSIAQGLEWAGQNGMHVANLSLGSPSPSATLEQAVNSATSRGVLVVAASGNSGAGSISYPARYANAMAVGATDQNNNRASFSQYGAGLDIVAPGVNVQSTYPGSTYASLNGTSMATPHVAGAAALVKQKNPSWSNVQIRDHLKNTATSLGSTNLYGSGLVNAEAATR

SEQ ID NO: 60520 - protein, 269 aa, Unidentified
AQSVPWGISRVQAPAAHNRGLTGRGVKVAVLDTGISTHPDLNIRGGASFVPGEPSTQDGEGHGTHVAGTIAALNNGIGVLGVAPSAELYAVKVLGASGSGSVSSIAQGLEWAGNNDMHVANLSLGSESPSATLEQAVNSATSRGVLVVAASGNSGADSISYPARYANAMAVGATDQNNNRADFSQYGAGLDIVAPGVNVQSTYPGSTYASLNGTSMATPHVAGAAALVKQKNPSWSNVQIRDRLKNTATSLGSTNLYGSGLVNAEAATR

SEQ ID NO: 60521 - protein, 269 aa, Unidentified
AQSVPWGISRVQAPAAHNRRLTGRGVKVAVLDTGISTHPDLRIRGGASFVPGEPSTQDGNGHGTHVAGTIAALDNNIGVLGVAPRAELYAVKVLGASGSGSVSSIAQGLEWAGLNRMHVANLSLGSPSPSATLEQAVNSATSRGVLVVAASGNSGAGSISYPARYANAMAVGATDQNNNRASFSQYGAGLDIVAPGVNVQSTWPGSTYASLNGTSQATPHVAGAAALVKQKNPSWSNVQIRNHLKNTATSLGSTNLYGSGLVNAEAATR

SEQ ID NO: 60522 - protein, 269 aa, Unidentified
AQTIPWGISRVQAPAAHNRGFTGSGVKVAVLDTGISTHPDLNIRGGASFVPGEPSTQDGNGHGTHVAGTIAALNNSIGVLGVAPSAELYAVKVLGADGEGAISSIAQGLEWAGNNGMHVANLSLGSPSPSATLEQAVNSATSRGVLVVAASGNSGASSISYPARYANAMAVGATDQNNNRASFSQYGAGLDIVAPGVNIQSTYPGSTYASLNGTSMATPHVAGAAALVKQKNPSWSNVQIRNHLKNTATSLGSTNLYGSGLVNAEAATR

SEQ ID NO: 60523 - protein, 269 aa, Bacillus clausii
AQSVPWGISRIQAPAAHNRGLTASPVKVAVLDTGVSTHPDLNIRGGASFVPGEPSTQDGNGHGTHVAGTIAALNNSIGVLGVAPSAELYAVKVLPASGHGSVSSIAQGLEWAGNNGMHVANLSLGSPSPSATLEQAVNSATSRGILVVAASGNSGAGSISYPARYANAMAVGATDQNNNRASFSQYGAGLDIVAPGVNVQSTYPGSTYASLSGTSMATPHVAGAAALVKQKNPSWSNVQIRNHLKNTATSLGSTNLYGSGLVNAEAPTR

SEQ ID NO: 60524 - protein, 269 aa, Unidentified
AQSVPWGISRVQAPASHNRGLTGFGVKVAVLDTGISTHPDLNIRGGASFVPGEPSTQDGNGHGTHVAGTIAALNNSIGVLGVAPSAELYAVKVLGASGGGAISSIAQGLEWAGLNGMHVANLSLGNPSPSATLEQAVNSATSRGVLVVAASGNSGAGSISYPARYANAMAVGATDQNNNRASFSQYGAGLDIVAPGVNVQSTAPGSTYASLNGTSMATPHVAGAAVLVKQKNPSWSNVQIRNHLKNTATSLGSTNLYGSGLVNAEAATR

SEQ ID NO: 60525 - protein, 269 aa, Unidentified
AQSVPWGISRVQAPAAHNRGLTGRGVKVAVLDTGISTHPDLNIRGGASFVPGEPSTQDGNGHGTHVAGTIAALNNSIGVLGVAPSAELYAVKVLGASGGGAISSIAQGLEWAGNNGMHVANLSLGSPSPSATLEQAVNSATSRGVLVVAASGNSGAESISYPARYANAMAVGATDQNNNRADFSQYGAGLDIVAPGVNVQSTYPGSTYASLNGTSMATPHVAGAAVLVKQKNPSWSNVRIRDHLKNTATSLGSTNLYGSGLVNAEAATR

SEQ ID NO: 60526 - protein, 269 aa, Unidentified
AQSVPWGISRVQAPAAHNRGLTGSGVKVAVLDTGISTHPDLNIRGGASFVPGEPSTQDGEGHGTHVAGTIAALNNSIGVLGVAPSAELYAVKVLGASGGGAISSIAQGLEWAGNNGMHVANLSLGSPSPSATLEQAVNSATSRGVLVVAASGNSGADSISYPARYANAMAVGATDQNNNRASFSQYGAGLDIVAPGVNVQSTYPGSTYASLNGTSMATPHVAGAAVLVKQKNPSWSNVRIRDHLKNTATSLGSTNLYGSGLVNAFAATR

SEQ ID NO: 60527 - protein, 269 aa, Unidentified
AQSVPWGISRVQAPAAHNRGLTGSGVKVAVLDTGISTHPDLNIRGGASFVPGEPSTQDGNGHGTHVAGTIAALDNNIGVLGVAPRAELYAVKVLGASGSGSVSSIAQGLEWAGNNRMHVANLSLGLQAPSATLEQAVNSATSRGVLVVAASGNSGAGSISYPARYANAMAVGATDQNNNRASFSQYGAGLDIVAPGVNVLSTYPGSTYASLNGTSMATPHVAGAAALVKQKNPSWSSVQIRNHLKNTATSLGSTNLYGSGLVNAEAATR

SEQ ID NO: 60528 - protein, 269 aa, Unidentified
AQSVPWGISRVQAPAAHNRGLTGFGVKVAVLDTGISTHPDLNIRGGASFVPGEPSTQDGNGHGTHVAGTIAALNNSIGVLGVAPSAELYAVKVLGASGGGAISSIAQGLEWAGANGMHVANLSLGNPSPSATLEQAVNSATSRGVLVVAASGNSGAGSISYPARYANAMAVGATDQNNNRASFSQYGAGLDIVAPGVNVQSTVPQSTYASLNGTSMATPHVAGAAVLVKQKNPSWSNVQIRNHLKNTATSLGSTNLYGSGLVNAEAATR

SEQ ID NO: 60529 - protein, 269 aa, Unidentified
AQSVPWGISRVQAPAAHNRGLAGSGVKVAVLDTGISTHPDLNIRGGASFVPGEPSTQDGNGHGTHVAGTIAALNNSIGVLGVAPSAELYAVKVLGASGGGAISSIAQGLEWAGLNGMHVANLSLGSPSPSATLEQAVNSATSRGVLVVAASGNSGAGSISYPARYANAMAVGATDQNNNRASFSQYGAGLDIVAPGVNVQSTVPQSAYASLNGTSMATPHVAGAAVLVKQKNPSWSNVQIRNHLKNTATSLGSTNLYGSGLVNAEAATR

SEQ ID NO: 60530 - protein, 269 aa, Unidentified
AQSVPWGISRVQAPAAHRRGLTGSGVKVAVLDTGISTHPDLNIRGGASFVPGEPSTQDGNGHGTHVAGTIAALDNSIGVLGVAPRAELYAVKVLGASGSGSVSSIAQGLEWAGNNGMHVANLSLGLQAPSATLEQAVNSATSRGVLVVAASGNSGAGSISYPARYANAMAVGATDQNNNRASFSQYGAGLDIVAPGVNVLSTWPGSTYASLNGTSMATPHVAGAAALVKQKNPSWSNVQIRNRLKNTATSLGSTNLYGSGLVNAEAATR

SEQ ID NO: 60531 - protein, 269 aa, Unidentified
AQSVPWGISRVQAPAAHNRGLAGSGVKVAVLDTGISTHPDLNIRGGASFVPGEPSTQDGNGHGTHVAGTIAALDNSIGVLGVAPSAELYAVKVLGASGGGAISSIAQGLEWAGNNGMHVANLSLGSPSPSATLEQAVNSATSRGVLVVAASGNSGAGSISYPARYANAMAVGATDQNNNRASFSQYGAGLDIVAPGVNVQSTYPGSTYASLNGTSMATPHVAGAAVLVKQKNPSWSNVRIRNHLKNTATSLGSTNLYGSGLVNVEVATR

SEQ ID NO: 60532 - protein, 269 aa, Unidentified
AQSVPWGIERVQAPAAHNRGLTGSGVKVAVLDTGISTHPDLRIRGGASFVPGEPSTQDGNGHGTHVAGTIAALDNSIGVLGVAPSAELYAVKVLGASGSGSVSSIAQGLEWAGNNGMHVANLSLGSPSPSATLEQAVNSATSRGVLVVAASGNSGAGSISYPARYANAMAVGATDQNNNRASFSQYGPGLDIVAPGVNVLSTWPGSTYASLNGTSMATPHVAGAAALVKQKNPSWSNVQIRNHLKNTATSLGDANEYGSGLVNAEAATR

SEQ ID NO: 60533 - protein, 269 aa, Unidentified
AQSVPWGISRVQAPASHNRGLAGSGVKVAVLDTGISTHPDLNIRGGASFVPGEPSTQDGNGHGTHVAGTIAALNNSIGVLGVAPSAELYAVKVLGASGGGAISSIAQGLEWAGLNGMHVANLSLGSPSPSATLEQAVNSATSRGVLVVAASGNSGAGSISYPARYANAMAVGATDQNNNRASFSQYGAGLDIVAPGVNVQSTAPQSTYASLNGTSMATPHVAGAAVLVKQKNPSWSNVQIRNHLKNTATSLGSTNLYGSGLVNAEAATR

SEQ ID NO: 60534 - protein, 269 aa, Unidentified
AQSVPWGISRVQAPAAHNRGLAGFGVKVAVLDTGISTHPDLNIRGGASFVPGEPSTQDGNGHGTHVAGTIAALNNSIGVLGVAPSAELYAVKVLGASGGGAISSIAQGLEWAGANGMHVANLSLGNPSPSATLEQAVNSATSRGVLVVAASGNSGAGSISYPARYANAMAVGATDQNNNRASFSQYGAGLDIVAPGVNVQSTVPGSTYASLNGTSMATPHVAGAAVLVKQKNPSWSNVQIRNHLKNTATSLGSTNLYGSGLVNAEAATR

SEQ ID NO: 60535 - protein, 269 aa, Unidentified
AQSVPWGISRVQAPAAHNRGLRGSGVKVAVLDTGISTHPDLNIRGGASFVPGEPSTQDGNGHGTHVAGTIAALNNNIGVLGVAPSAELYAVKVLGASGNGAISSIANGLEWAGNNGMHVANLSLGSPSPSATLEQAVNSATSRGVLVVAASGNSGAGSISYPARYANAMAVGATDQNNNRASFSQYGAGLDIVAPGVNVQSTYPGSTYASQNGTSMATPHVAGAAVLVKQKNPSWSNVRIRNHLKNTATSLGSTNLYGSGLVNAEAATR

SEQ ID NO: 60536 - protein, 269 aa, Unidentified
AQSVPWGISRVQAPAAHRRGLTGRGVKVAVLDTGISTHPDLNIRGGASFVPGEPSTQDGNGHGTHVAGTIAALDNSIGVLGVAPSAELYAVKVLGASGGGAVSSIAQGLEWAGNNGMHVANLSLGSPSPSATLEQAVNSATSRGVLVVAASGNSGAGSISYPARYANAMAVGATDQNNNRASFSQYGAGLAIVAPGVNVQSTYPGSAYFSLNGTSMATPHVAGAAALVKQKNPSWSNVQIRNRLKNTATSLGSTNLYGSGLVNAEAATR

SEQ ID NO: 60537 - protein, 269 aa, Unidentified
AQSVPWGISRVQAPAAHNRGLQGSGVKVAVLDTGISTHPDLNIRGGASFVPGEPSTQDGNGHGTHVAGTIAALNNSIGVLGVAPSAELYAVKVLGASGGGAISSIAQGLEWAGNNGMHVANLSLGSPSPSATLEQAVNSATSRGVLVVAASGNSGADSISYPARYANAMAVGATDQNNNRAEFSQYGAGLDIVAPGVNVQSTYPGSTYASLNGTSMATPHVAGAALLVKQKNPSWSNVTIREHLKNTATSLGSTNLYGSGLVNAEAATR

SEQ ID NO: 60538 - protein, 269 aa, Unidentified
AQVVPWGISRVQAPAAHNRGLTGSGVKVAVLDTGISTHPDLNIRGGASFVPGEPSTQDGNGHGTHVAGTIAALDNGIGVLGVAPRAELYAVKVLGASGSGSVSSIAQGLEWAGNNRMHVANLSLGLQAPSATLEQAVNSATSRGVLVVAASGNSGAGSISYPARYANAMAVGATDQNNNRASFSQYGAGLDIVAPGVNVMSTYPGSTYASLNGTSMATPHVAGAAALVKQKNPSWSNVQIRNHLKNTATSLGSTNLYGSGLVNAEAATR

SEQ ID NO: 60539 - protein, 269 aa, Unidentified
AQSVPWGISRVQAPAAHNRGLTGSGVKVAVLDTGISTHPDLNIRGGASFVPGEPSTQDGNGHGTHVAGTIAALDNSIGVLGVAPSAELYAVKVLGASGGGAISSIAQGLEWAGNNGMHVANLSLGSPSPSATLEQAVNSATSRGVLVVAASGNSGEGSISYPARYANAMAVGATDQNNNRADFSQYGAGLDIVAPGVNVQSTYPGSTYASLNGTSSATPHVAGAAVLVKQKNPSWSNVRIRNRLKDTATSLGSTNLYGSGLVNAEAATR

SEQ ID NO: 60540 - protein, 269 aa, Unidentified
AQSVPWGISRVQAPAAHRRGLWGRGVKVAVLDTGISTHPDLNIRGGASFVPGEPSTQDGNGHGTHVAGTIAALDNSIGVLGVAPSAELYAVKVLGASGAGSVSSIAQGLEWAGNNGMHVANLSLGSPSPSATLEQAVNSATSRGVLVVAASGNSGAGSISYPARYANAMAVGATDQDNNRASFSQYGAGLDLVAPGVNVQSTHPGSTYASLNGTSMATPHVAGAAALVKQKNPSWSNVQIRNRLKNTATSLGSTNLYGSGLVNAEAATR

SEQ ID NO: 60541 - protein, 269 aa, Unidentified
AQSVPWGISRVQAPAAHNRGLTGSGVKVAVLDTGISTHPDLSIRGGASFVPGEPSTQDGNGHGTHAAGTIAALNNSIGVLGVAPSAELYAVKVLGASGSGAISSIAQGLEWAGNNGMHVANLSLGSPSPSATLEQAVNSATSRGVLVVAASGNSGADSISYPARYANAMAVGATDQNNNRASFSQYGAGLDIVAPGVNVQSTYPGSTYASLNGTSMATPHVAGAAVLVKHKNPSWSNVRIRNHLKKTATSLGSTNLYGSGLVNAEAATR

SEQ ID NO: 60542 - protein, 269 aa, Unidentified
AQSVPWGISRVQAPAAHNRGLAGSGVKVAVLDTGISTHPDLNIRGGASFVPGEPSTQDGNGHGTHVAGTIAALNNSIGVLGVAPSAELYAVKVLGASGGGAISSIAQGLEWAGNNGMHVANLSLGSPSPSATLEQAVNSATSRGVLVVAASGNSGADSISYPARYANAMAVGATDQNNNRAEFSQYGAGLDIVAPGVNVQSTYPGSTYASLNGTSMATPHVAGAATLVKQKNPSWSNVTIRDHLKNTATSLGSTNLYGSGLVNAEAATR

SEQ ID NO: 60543 - protein, 269 aa, Unidentified
AQSVPWGISRVQAPAAHNRGLTGSGVKVAVLDTGISTHPDLNIRGGASFVPGEPSTQDGNGHGTHAAGTIAALNNSIGVLGVAPSAELYAVKVLGASGSGAISSIAQGLEWAGNNGMHVANLSLGSPSPSATLEQAVNSATSRGVLVVAASGNSGAGSISYPARYANAMAVGATDQNNNRASFSQYGAGLDIVAPGVNVQSTYPGSEYASLNGTSMATPHVAGAAVLVKHKNPSWSNVRIRDHLKKTATSLGSTNLYGSGLVNAEAATR

SEQ ID NO: 60544 - protein, 269 aa, Unidentified
AQSVPWGISRVQAPAAHNRGLTGSGVKVAVLDTGISTHPDLNIRGGVSFVPGEPSTQDGNGHGTHAAGTIAALNNSIGVLGVAPSAELYAVKVLGASGSGAISSIAQGLEWAGNNGMHVANLSLGSPSPSATLEQAVNSATSRGVLVVAASGNSGADSISYPARYANAMAVGATDQNNNRASFSQYGAGLDIVAPGVNVQSTWPGSTYASLNGTSMATPHVAGAAVLVKHKNPSWSNVRIRNHLKNTATSLGSTNLYGSGLVNAEAATR

SEQ ID NO: 60545 - protein, 269 aa, Unidentified
AQSVPWGISRVQAPAAHNRGLAGSGVKVAVLDTGISTHPDLNIRGGASFVPGEPSTQDGNGHGTHVAGTIAALNNSIGVLGVAPSAELYAVKVLGASGGGAISSIAQGLEWAGNNGMHVANLSLGSPSPSATLEQAVNSATSRGVLVVAASGNSGADSISYPARYANAMAVGATDQNNNRAEFSQYGAGLDIVAPGVNVQSTYPGSTYASLNGTSMATPHVAGAATLVKQKNPSWSNVRIRDHLKNTATSLGSTNLYGSGLVNAEAATR

SEQ ID NO: 60546 - protein, 269 aa, Unidentified
AQSVPWGISRVQAPAAHNRGLAGGGVKVAVLDTGISTHPDLNIRGGASFVPGEPSTQDGNGHGTHVAGTIAALNNNIGVLGVAPSAELYAVKVLAASGQGAISSIAQGLEWAGNNGMHVANLSLGSPSPSATLEQAVNSATSRGVLVVAASGNSGAGSISYPARYANAMAVGATDQNNNRASFSQYGAGLDIVAPGVNVQSTYPGSTYASLNGTSMATPHVAGAAVLVKQKNPSWSNVRIRNHLKNTATSLGSTNLYGSGLVNAEAATR

SEQ ID NO: 60547 - protein, 269 aa, Unidentified
AQSVPWGISRVQAPAAHNRGLRGSGVKVAVLDTGISTHPDLNIRGGASFVPGEPSTQDGNGHGTHVAGTIAALNNSIGVLGVAPSAELYAVKVLSASGNGAISSIAQGLEWAGNNGMHVANLSLGAPSPSATLEQAVNSATSRGVLVVAASGNSGAGSISYPARYANAMAVGATDQNNNRASFSQYGAGLDIVAPGVNVQSTYPGSTYASQNGTSMATPHVAGAAVLVKQKNPSWSNVRIRNHLKNTATSLGSTNLYGSGLVNAEAATR

SEQ ID NO: 60548 - protein, 269 aa, Unidentified
AQSVPWGISRVQAPAAHNRGLQGSGVKVAVLDTGISTHPDLNIRGGASFVPGEPSTQDGNGHGTHVAGTIAALNNSIGVLGVAPSAELYAVKVLGASGGGAISSIAQGLEWAGNNGMHVANLSLGSPSPSATLEQAVNSATSRGVLVVAASGNSGADSISYPARYANAMAVGATDQNNNRAEFSQYGAGLDIVAPGVNVQSTYPGSTYASLNGTSMATPHVAGAALLVKQKNPSWSNVKIRHHLKNTATSLGSTNLYGSGLVNAEAATR

SEQ ID NO: 60549 - protein, 269 aa, Unidentified
AQSVPWGISRVQAPAAHNRGLRGGGVKVAVLDTGISTHPDLNIRGGASFVPGEPSTQDGNGHGTHVAGTIAALNNSIGVLGVAPSAELYAVKVLGASGGGAISSIAQGLEWAGLNGMHVANLSLGSPSPSATLEQAVNSATSRGVLVVAASGNSGAGSISYPARYANAMAVGATDQNNNRASFSQYGAGLDIVAPGVNVQSTYPGSTYASQNGTSMATPHVAGAAVLVKQKNPSWSNVRIRNHLKNTATSLGSTNLYGSGLVNAEAATR

SEQ ID NO: 60550 - protein, 269 aa, Unidentified
AQSVPWGISRVQAPASHNRGLTGSGVKVAVLDTGISTHPDLNIRGGASFVPGEPSTQDGNGHGTHVAGTIAALNNSIGVLGVAPSAELYAVKVLGASGGGAISSIAQGLEWAGLNGMHVANLSLGNPSPSATLEQAVNSATSRGVLVVAASGNSGAGSISYPARYANAMAVGATDQNNNRASFSQYGAGLDIVAPGVNVQSTAPQSTYASLNGTSMATPHVAGAAVLVKQKNPSWSNVQIRNHLKNTATSLGSTNLYGSGLVNAEAATR

SEQ ID NO: 60551 - protein, 269 aa, Unidentified
AQSVPWGISRVQAPAAHNRGLAGSGVKVAVLDTGISTHPDLNIRGGASFVPGEPSTQDGNGHGTHVAGTIAALNNSIGVLGVAPSAELYAVKVLGASGGGAISSIAQGLEWAGNNGMHVANLSLGSPSPSATLEQAVNSATSRGVLVVAASGNSGADSISYPARYANAMAVGATDQNNNRAEFSQYGAGLDIVAPGVNVQSTYPGSTYASLNGTSMATPHVAGAATLVKQKNPSWSNVVIRHHLKNTATSLGSTNLYGSGLVNAEAATR

SEQ ID NO: 60552 - protein, 269 aa, Unidentified
AQSVPWGISRVQAPAAHNRGLAGGGVKVAVLDTGISTHPDLNIRGGASFVPGEPSTQDGNGHGTHVAGTIAALDNSIGVLGVAPSAELYAVKVLGASGGGAISSIAQGLEWAGNNGMHVANLSLGSPSPSATLEQAVNSATSRGVLVVAASGNSGAGSISYPARYANAMAVGATDQNNNRASFSQYGAGLDIVAPGVNVQSTYPGSTYASQNGTSMATPHVAGAAVLVKQKNPSWSNVRIRNHLKNTATSLGSTNLYGSGLVNAEAATR

SEQ ID NO: 60553 - protein, 269 aa, Unidentified
AQSIPWGISRVQAPAAHNRGLTGSGVKVAVLDTGISTHPDLNIRGGASFVPGEPSTQDGNGHGTHVAGTIAALNNSIGVLGVAPSAELYAVKVLGADGRGAISSIAQGLEWAGNNGMHVANLSLGSPSPSATLEQAVNSATSRGVLVVAASGNSGASSISYPARYANAMAVGATDQNNNRASFSQYGPGLDIMAPGVNIQSTYPGSTYASLNGTSMATPHVAGAAALVKQKNPSWSNVQIRNHLKNTATSLGSTNLYGSGLVNAEAATR

SEQ ID NO: 60554 - protein, 269 aa, Unidentified
AQVVPWGISRVQAPAAHNRGLTGSGVKVAVLDTGISTHPDLNIRGGASFVPGEPSTQDGNGHGTHVAGTIAALDNNIGVLGVAPRAELYAVKVLGASGSGSVSSIAQGLEWAGNNRMHVANLSLGLQAPSATLEQAVNSATSRGVLVVAASGNSGAGSISYPARYANAMAVGATDQNNNRASFSQYGAGLDIVAPGVNVLSTYPGSTYASLNGTSMATPHVAGAAALVKQKNPSWSNVQIRNHLKNTATSLGSTNLYGSGLVNAEAATR

SEQ ID NO: 60555 - protein, 269 aa, Unidentified
AQSVPWGISRVQAPAAHNRGLTGRGVKVAVLDTGISTHPDLNIRGGASFVPGEPSTQDGEGHGTHVAGTIAALNNDIGVLGVAPSAELYAVKVLGASGSGSVSSIAQGLEWAGNNSMHVANLSLGSESPSATLEQAVNSATSRGVLVVAASGNSGADSISYPARYANAMAVGATDQNNNRADFSQYGAGLDIVAPGVNVQSTYPGSTYASLNGTSMATPHVAGAAALVKQKNPSWSNVRIRNRLKNTATSLGSTNLYGSGLVNAEAATR

SEQ ID NO: 60556 - protein, 269 aa, Unidentified
AQSVPWGISRVQAPAAHNRGLQGSGVKVAVLDTGISTHPDLNIRGGASFVPGEPSTQDGNGHGTHVAGTIAALNNSIGVLGVAPSAELYAVKVLGASGGGAISSIAQGLEWAGNNGMHVANLSLGSPSPSATLEQAVNSATSRGVLVVAASGNSGADSISYPARYANAMAVGATDQNNNRADFSQYGAGLDIVAPGVNVQSTYPGSTYASLNGTSMATPHVAGAAVLVKQKNPSWSNVVIRHHLKNTATSLGSTNLYGSGLVNAEAATR

SEQ ID NO: 60557 - protein, 269 aa, Unidentified
AQSVPWGISRVQAPAAHNRGLAGSGVKVAVLDTGISTHPDLNIRGGASFVPGEPSTQDGNGHGTHVAGTIAALNNSIGVLGVAPSAELYAVKVLAASGNGALSSIAQGLEWAGNNGMHVANLSLGSSSPSATLEQAVNSATSRGVLVVAASGNSGAGSISYPARYANAMAVGATDQNNNRASFSQYGAGLDIVAPGVNVQSTYPGSTYASQNGTSMATPHVAGAAVLVKQKNPSWSNVRIRNHLKNTATSLGSTNLYGSGLVNAEAATR

SEQ ID NO: 60558 - protein, 269 aa, Unidentified
AQSVPWGISRVQAPAAHNRGLAGSGVKVAVLDTGISTHPDLNIRGGASFVPGEPSTQDGNGHGTHVAGTIAALNNSIGVLGVAPSAELYAVKVLGASGGGAISSIAQGLEWAGNNGMHVANLSLGSPSPSATLEQAVNSATSRGVLVVAASGNSGADSISYPARYANAMAVGATDQNNNRAEFSQYGAGLDIVAPGVNVQSTYPGSTYASLNGTSMATPHVAGAALLVKQKNPSWSNVRIRDHLKNTATSLGSTNLYGSGLVNAEAATR

SEQ ID NO: 60559 - protein, 269 aa, Unidentified
AQSVPWGISRVQAPAAHNRGLTGSGVKVAVLDTGISTHPDLNIRGGASFVPGEPSTQDGNGHGTHVAGTIAALNNSIGVLGVAPSAELYAVKVLEASGSGAISSIAQGLEWAGNNGMHVANLSLGSPSPSATLEQAVNSATSRGVLVVAASGNSGADSISYPARYANAMAVGATDQNNNRASFSQYGAGLDIVAPGVNVQSTYPGSTYASLNGTSMATPHVAGAAVLVKHKNPSWSNVRIRDHLKKTATSLGSTNLYGSGLVNAEAATR

SEQ ID NO: 60560 - protein, 269 aa, Unidentified
AQSVPWGISRVQAPAAHNRGLTGRGVKVAVLDTGISTHPDLRIRGGASFVPGEPSTQDGNGHGTHVAGTIAALDNRIGVLGVAPSAELYAVKVLGASGGGAISSIAQGLEWAGNNGMHVANLSLGSPSPSATLEQAVNSATSRGVLVVAASGNSGAGSISYPARYANAMAVGATDQNNNRASFSQYGAGLDIVAPGVNVQSTYPGSTYASLNGTSMATPHVAGAAVLVKQKNPSWSNVRIRNHLKNTATSLGSTNLYGSGLVNAEAATR

SEQ ID NO: 60561 - protein, 269 aa, Unidentified
AQSVPWGISRVQAPAAHNRKLTGGGVKVAVLDTGISTHPDLNIRGGASFVPGEPSTQDGEGHGTHVAGTIAALNNSIGVLGVAPSAELYAVKVLSASGQGSVSSIAQGLEWAGLNGMHVANLSLGAPSPSATLEQAVNSATSRGVLVVAASGNSGAGSISYPARYANAMAVGATDQNNNRADFSQYGAGLDIVAPGVNVQSTYPGSTYASQNGTSMATPHVAGAAALVKQKNPSWSNVQIRNHLKNTATSLGSTNLYGSGLVNAEAATR

SEQ ID NO: 60562 - protein, 269 aa, Unidentified
AQSVPWGISRVQAPAAHNRGLTGSGVKVAVLDTGISTHEDLNIRGGASFVPGEPSTQDGNGHGTHVAGTIAALDNSIGVLGVAPSAELYAVKVLGADGEGAISSIAQGLEWAGNNGMHVANLSLGSPSPSATLEQAVNSATSRGVLVVAASGNSGASSIGYPARYANAMAVGATDQNNNRASFSRYGAGLDIVAPGVNVQSTYPGSTYASLNGTSMATPHVAGAAALVKQKNPSWSNVQIRNHLKNTATSLGSTNLYGSGLVNAEAATR

SEQ ID NO: 60563 - protein, 269 aa, Unidentified
AQSVPWGISRVQAPAAHNRGLTGSGVKVAVLDTGISTHPDLNIRGGASFVPGEPSTQDGNGHGTHAAGTIAALNNSIGVLGVAPSAELYAVKVLGASGSGAISSIAQGLEWAGNNGMHVANLSLGSPSPSATLEQAVDSATSRGVLVVAASGNSGADSISYPARYANAMAVGATDQNNNRASFSQYGAGLDIVAPGVNVQSTYPGSTYASLNGTSMATPHVAGAAVLVKHKNPSWSNVRIRNHLKKTATSLGSTNLYGSGLVNAEAATR

SEQ ID NO: 60564 - protein, 269 aa, Unidentified
AQSVPWGISRVQAPAAHNRGLTGSGVKVAVLDTGISTHPDLNIRGGASFVPGEPSTQDGNGHGTHAAGTIAALNNSIGVLGVAPSAELYAVKVLGASGSGAISSIAQGLEWAGNNGMHVANLSLGSPSPSATLEQAVNSATSRGVLVVAASGNSGAGSISYPARYANAMAVGATDQNNNRASFSQYGAGLDIVAPGVNVQSTYPGSSYASLNGTSMATPHVAGAAVLVKHKNPSWSNVRIRDHLKKTATSLGSTNLYGSGLVNAEAATR

SEQ ID NO: 60565 - protein, 269 aa, Unidentified
AQTIPWGISRVQAPAAHNRGLTGSGVKVAVLDTGISTHPDLNIRGGASFVPGEPSTQDGNGHGTHVAGTIAALNNSIGVLGVAPSAELYAVKVLGADGEGAISSIAQGLEWAGNNGMHVANLSLGSPSPSATLEQAVNSATSRGVLVVAASGNSGASSISYPARYANAMAVGATDQNNNRASFSQYGAGLDIVAPGVDIQSTYPGSTYASLNGTSMATPHVAGAAALVKQKNPSWSNVQIRNHLKNTATSLGSTNLYGSGLVNAEAATR

SEQ ID NO: 60566 - protein, 269 aa, Unidentified
AQSVPWGISRVQAPAAHRRRLWGRGVKVAVLDTGISTHPDLNIRGGASFVPGEPSTQDGNGHGTHVAGTIAALDNSIGVLGVAPSAELYAVKVLGASGSGSVSSIAQGLEWAGNNGMHVANLSLGSPSPSATLEQAVNSATSRGVLVVAASGNSGAGSISYPARYANAMAVGATDQNNNRASFSQYGAGLDLVAPGVNVQSTYPQSTYFSLNGTSMATPHVAGAAALVKQKNPSWSNVQIRNRLKNTATSLGSTNLYGSGLVNAEAATR

SEQ ID NO: 60567 - protein, 269 aa, Unidentified
AQSVPWGISRVQAPAAHNRGLTGSGVKVAVLDTGISTHPDLNIRGGASFVPGEPSTQDGNGHGTHVAGTIAALDNNIGVLGVAPRAELYAVKVLGASGSGSVSSIAQGLEWAGNNRMHVANLSLGLQAPSATLEQAVNSATSRGVLVVAASGNSGAGSISYPARYANAMAVGATDQNNNRASFSQYGAGLDIVAPGVNVLSTYPGSTYASLNGTSMATPHVAGAAALVKQKNPSWSNVQIRNRLKNTATSLGSTNLYGSGLVNAEAATR

SEQ ID NO: 60568 - protein, 269 aa, Unidentified
AQSVPWGISRVQAPAAHRRGLWGRGVKVAVLDTGISTHPDLNIRGGASFVPGEPSTQDGNGHGTHVAGTIAALDNSIGVLGVAPSAELYAVKVLGASGAGSVSSIAQGLEWAGNNGMHVANLSLGSPSPSATLEQAVNSATSRGVLVVAASGNSGAGSISYPARYANAMAVGATDQNNNRASFSQYGAGLDLVAPGVNVQSTYPQSTYFSLNGTSMATPHVAGAAALVKQKNPSWSNVQIRNRLKNTATSLGSTNLYGSGLVNAEAATR

SEQ ID NO: 60569 - protein, 269 aa, Unidentified
AQSVPWGISRVQAPAAHNRGLAGSGVKVAVLDTGISTHPDLNIRGGASFVPGEPSTQDGNGHGTHVAGTIAALNNSIGVLGVAPSAELYAVKVLGASGGGAISSIAQGLEWAGLNVMHVANLSLGSPSPSATLEQAVNSATSRGVLVVAASGNSGAGSISYPARYANAMAVGATDQNNNRASFSQYGAGLDIVAPGVNVQSTVPGSAYASLNGTSMATPHVAGAAVLVKQKNPSWSNVQIRNHLKNTATSLGSTNLYGSGLVNAEAATR

SEQ ID NO: 60570 - protein, 269 aa, Unidentified
AQSVPWGISRVQAPAAHNRGLAGSGVKVAVLDTGISTHPDLNIRGGASFVPGEPSTQDGNGHGTHVAGTIAALNNNIGVLGVAPSAELYAVKVLGASGNGAISSIAQGLEWAGNNGMHVANLSLGAPSPSATLEQAVNSATSRGVLVVAASGNSGAGSISYPARYANAMAVGATDQNNNRASFSQYGAGLDIVAPGVNVQSTYPGSTYASQNGTSMATPHVAGAAVLVKQKNPSWSNVRIRNHLKNTATSLGSTNLYGSGLVNAEAATR

SEQ ID NO: 60571 - protein, 269 aa, Unidentified
AQSVPWGISRVQAPAAHRRGLTGRGVKVAVLDTGISTHPDLNIRGGASFVPGEPSTQDGNGHGTHVAGTIAALDNSIGVLGVAPSAELYAVKVLGASGAGSVSSIAQGLEWAGANGMHVANLSLGSPSPSATLEQAVNSATSRGVLVVAASGNSGAGSISYPARYANAMAVGATDQDNNRASFSQYGAGLDIVAPGVNVQSTYPQSAYASLNGTSMATPHVAGAAALVKQKNPSWSNVQIRNRLKNTATSLGSTNLYGSGLVNAEAATR

SEQ ID NO: 60572 - protein, 269 aa, Unidentified
AQSVPWGISRVQAPAAHNRGLAGSGVKVAVLDTGISTHPDLNIRGGASFVPGEPSTQDGNGHGTHVAGTIAALNNSIGVLGVAPSAELYAVKVLGASGGGAISSIAQGLEWAGNNGMHVANLSLGSPSPSATLEQAVNSATSRGVLVVAASGNSGADSISYPARYANAMAVGATDQNNNRADFSQYGAGLDIVAPGVNVQSTYPGSTYASLNGTSMATPHVAGAAVLVKQKNPSWSNVRIRNHLKNTATSLGSTNLYGSGLVNAFAATR

SEQ ID NO: 60573 - protein, 215 aa, Unidentified
AQSVPWGISRVQAPAAHNRGLTGSGVKVAVLDTGISTHPDLNIRGGASFVPGEPSTQDGNGHGTHVAGTIAALNNSIGVLGVAPSAELYAVKVLGASGSGSVSSIAQGLEWAGNNGMHVANLSLGSPSPSATLEQAVNSATSRGVLVVAASGNSGAGSISYPARYANAMAVGATDQNNNRASFSQYGAGLDIVAPGVNVQSTYPGCFAAGTLLHT

SEQ ID NO: 60574 - protein, 324 aa, Unidentified
LGKIVASTALLISVAFSSSIASAAEEAKEKYLIGFNEQEAVSEFVEQVEANDEVAILSEEEEVEIELLHEFETIPVLSVELSPEDVDALELDPAISYIEEDAEVTTMAQSVPWGISRVQAPAAHNRGLTGSGVKVAVLDTGISTHPDLNIRGGASFVPGEPSTQDGNGHGTHVAGTIAALNNSIGVLGVAPSAELYAVKVLGASGSGSVSSIAQGLEWAGNNGMHVANLSLGSPSPSATLEQAVNSATSRGVLVVAASGNSGAGSISYPARYANAMAVGATDQNNNRASFSQYGAGLDIVAPGVNVQSTYPGSTYASLNGTCFA

SEQ ID NO: 60575 - protein, 268 aa, Unidentified
AQSVPWGISRVQAPAHNRGLAGSGVKVAVLDTGISTHPDLNIRGGASFVPGEPSTQDGNGHGTHVAGTIAALNNSIGVLGVAPSAELYAVKVLGASGGGAISSIAQGLEWAGLNVMHVANLSLGSPSPSATLEQAVNSATSRGVLVVAASGNSGAGSISYPARYANAMAVGATDQNNNRASFSQYGAGLDIVAPGVNVQSTVPQSTYASLNGTSMATPHVAGAAVLVKQKNPSWSNVQIRNHLKNTATSLGSTNLYGSGLVNAEAATR

SEQ ID NO: 60576 - protein, 268 aa, Unidentified
AQSVPWGISRVQAPAAHNRGLAGSGVKVAVLDTGISTHPDLNIRGGASFVPGEPSTQDGNGHGTHVAGTIAALNNSIGVLGVAPSAELYAVKVLGASGGAISSIAQGLEWAGNNGMHVANLSLGSPSPSATLEQAVNSATSRGVLVVAASGNSGADSISYPARYANAMAVGATDQNNNRADFSQYGAGLDIVAPGVNVQSTYPGSTYASLNGTSMATPHVAGAAVLVKQKNPSWSNVRIRHHLKNTATSLGSTNLYGSGLVNATAATR

SEQ ID NO: 60577 - protein, 268 aa, Unidentified
AQSVPWGISRVQAPAAHNRGLQGSGVKVAVLDTGISTHPDLNIRGGASFVPGEPSTQDGNGHGTHVAGTIAALNNSIGVLGVAPSAELYAVKVLGASGGGAISSIAQGLEWAGNNGMHVANLSLGSPSPSATLEQAVNSATSRGVLVVAASGNSGADSISYPARYANAMAVGATDQNNNRAEFSQYGAGLDIVAPGVNVQSTYPGSTYASLNGTSMATPHVAGAALVKQKNPSWSNVTIRHHLKNTATSLGSTNLYGSGLVNATAATR

SEQ ID NO: 60578 - protein, 268 aa, Unidentified
AQSVPWGISRVQAPAAHNRGLAGSGVKVAVLDTGISTHPDLNIRGGASFVPGEPSTQDGNGHGTHVAGTIAALNNSIGVLGVAPSAELYAVKVLGASGGGASSIAQGLEWAGNNGMHVANLSLGSPSPSATLEQAVNSATSRGVLVVAASGNSGADSISYPARYANAMAVGATDQNNNRADFSQYGAGLDIVAPGVNVQSTYPGSTYASLNGTSMATPHVAGAATLVKQKNPSWSNVRIRDHLKNTATSLGSTNLYGSGLVNATAATR

SEQ ID NO: 60579 - protein, 268 aa, Unidentified
AQSVPWGISRVQAPAHNRGLAGFGVKVAVLDTGISTHPDLNIRGGASFVPGEPSTQDGNGHGTHVAGTIAALNNSIGVLGVAPSAELYAVKVLGASGGGAISSIAQGLEWAGLNGMHVANLSLGSPSPSATLEQAVNSATSRGVLVVAASGNSGAGSISYPARYANAMAVGATDQNNNRASFSQYGAGLDIVAPGVNVQSTAPGSAYASLNGTSMATPHVAGAAVLVKQKNPSWSNVQIRNHLKNTATSLGSTNLYGSGLVNAEAATR

SEQ ID NO: 60580 - protein, 268 aa, Unidentified
AQSVPWGISRVQAPAAHNRGLAGSGVKVAVLDTGISTHPDLNIRGGASFVPGEPSTQDGNGHGTHVAGTIAALNNSIGVLGVAPSAELYAVKVLGASGGGASSIAQGLEWAGNNGMHVANLSLGSPSPSATLEQAVNSATSRGVLVVAASGNSGADSISYPARYANAMAVGATDQNNNRAEFSQYGAGLDIVAPGVNVQSTYPGSTYASLNGTSMATPHVAGAASLVKQKNPSWSNVRIREHLKNTATSLGSTNLYGSGLVNAFAATR

SEQ ID NO: 60581 - protein, 268 aa, Unidentified
AQSVPWGISRVQAPAAHNRGLAGSGVKVAVLDTGISTHPDLNIRGGASFVPGEPSTQDGNGHGTHVAGTIAALNNSIGVLGVAPSAELYAVKVLGASGGGASSIAQGLEWAGNNGMHVANLSLGSPSPSATLEQAVNSATSRGVLVVAASGNSGADSISYPARYANAMAVGATDQNNNRADFSQYGAGLDIVAPGVNVQSTYPGSTYASLNGTSMATPHVAGAAVLVKQKNPSWSNVTIRDHLKNTATSLGSTNLYGSGLVNAFAATR

SEQ ID NO: 60582 - protein, 268 aa, Unidentified
AQSVPWGISRVQAPAAHNRGLQGSGVKVAVLDTGISTHPDLNIRGGASFVPGEPSTQDGNGHGTHVAGTIAALNNSIGVLGVAPSAELYAVKVLGASGGAISSIAQGLEWAGNNGMHVANLSLGSPSPSATLEQAVNSATSRGVLVVAASGNSGADSISYPARYANAMAVGATDQNNNRAEFSQYGAGLDIVAPGVNVQSTYPGSTYASLNGTSMATPHVAGAALLVKQKNPSWSNVVIREHLKNTATSLGSTNLYGSGLVNAHAATR

SEQ ID NO: 60583 - protein, 268 aa, Unidentified
AQSVPWGISRVQAPAAHNRGLQGSGVKVAVLDTGISTHPDLNIRGGASFVPGEPSTQDGNGHGTHVAGTIAALNNSIGVLGVAPSAELYAVKVLGASGGGAISSIAQGLEWAGNNGMHVANLSLGSPSPSATLEQAVNSATSRGVLVVAASGNSGADSISYPARYANAMAVGATDQNNNRAEFSQYGAGLDIVAPGVNVQSTYPGSTYASLNGTSMATPHVAGAALVKQKNPSWSNVVIREHLKNTATSLGSTNLYGSGLVNATAATR

SEQ ID NO: 60584 - protein, 268 aa, Unidentified
AQSVPWGISRVQAPAAHNRGLQGSGVKVAVLDTGISTHPDLNIRGGASFVPGEPSTQDGNGHGTHVAGTIAALNNSIGVLGVAPSAELYAVKVLGASGGGASSIAQGLEWAGNNGMHVANLSLGSPSPSATLEQAVNSATSRGVLVVAASGNSGADSISYPARYANAMAVGATDQNNNRAEFSQYGAGLDIVAPGVNVQSTYPGSTYASLNGTSMATPHVAGAASLVKQKNPSWSNVRIRHHLKNTATSLGSTNLYGSGLVNATAATR

SEQ ID NO: 60585 - protein, 268 aa, Unidentified
AQSVPWGISRVQAPAAHNRGLAGSGVKVAVLDTGISTHPDLNIRGGASFVPGEPSTQDGNGHGTHVAGTIAALNNSIGVLGVAPSAELYAVKVLGASGGGASSIAQGLEWAGNNGMHVANLSLGSPSPSATLEQAVNSATSRGVLVVAASGNSGADSISYPARYANAMAVGATDQNNNRADFSQYGAGLDIVAPGVNVQSTYPGSTYASLNGTSMATPHVAGAAVLVKQKNPSWSNVRIREHLKNTATSLGSTNLYGSGLVNAHAATR

SEQ ID NO: 60586 - protein, 268 aa, Unidentified
AQSVPWGISRVQAPAAHNRGLAGSGVKVAVLDTGISTHPDLNIRGGASFVPGEPSTQDGNGHGTHVAGTIAALNNSIGVLGVAPSAELYAVKVLGASGGGAISSIAQGLEWAGNNGMHVANLSLGSPSPSATLEQAVNSATSRGVLVVAASGNSGADSISYPARYANAMAVGATDQNNNRADFSQYGAGLDIVAPGVNVQSTYPGSTYASLNGTSMATPHVAGAALVKQKNPSWSNVTIRHHLKNTATSLGSTNLYGSGLVNATAATR

SEQ ID NO: 60587 - protein, 268 aa, Unidentified
AQSVPWGISRVQAPAAHNRGLAGSGVKVAVLDTGISTHPDLNIRGGASFVPGEPSTQDGNGHGTHVAGTIAALNNSIGVLGVAPSAELYAVKVLGASGGGAISSIAQGLEWAGNNGMHVANLSLGSPSPSATLEQAVNSATSRGVLVVAASGNSGADSISYPARYANAMAVGATDQNNNRADFSQYGAGLDIVAPGVNVQSTYPGSTYASLNGTSMATPHVAGAALVKQKNPSWSNVRIRDHLKNTATSLGSTNLYGSGLVNAHAATR

SEQ ID NO: 60588 - protein, 268 aa, Unidentified
AQSVPWGISRVQAPAAHNRGLAGSGVKVAVLDTGISTHPDLNIRGGASFVPGEPSTQDGNGHGTHVAGTIAALNNSIGVLGVAPSAELYAVKVLGASGGAISSIAQGLEWAGNNGMHVANLSLGSPSPSATLEQAVNSATSRGVLVVAASGNSGADSISYPARYANAMAVGATDQNNNRAEFSQYGAGLDIVAPGVNVQSTYPGSTYASLNGTSMATPHVAGAAVLVKQKNPSWSNVTIRDHLKNTATSLGSTNLYGSGLVNALAATR

SEQ ID NO: 60589 - protein, 268 aa, Unidentified
AQSVPWGISRVQAPAAHNRGLQGSGVKVAVLDTGISTHPDLNIRGGASFVPGEPSTQDGNGHGTHVAGTIAALNNSIGVLGVAPSAELYAVKVLGASGGGASSIAQGLEWAGNNGMHVANLSLGSPSPSATLEQAVNSATSRGVLVVAASGNSGADSISYPARYANAMAVGATDQNNNRAEFSQYGAGLDIVAPGVNVQSTYPGSTYASLNGTSMATPHVAGAAVLVKQKNPSWSNVTIRHHLKNTATSLGSTNLYGSGLVNATAATR

SEQ ID NO: 60590 - protein, 268 aa, Unidentified
AQSVPWGISRVQAPASHNRGLAGFGVKVAVLDTGISTHPDLNIRGGASFVPGEPSTQDGNGHGTHVAGTIAALNNSIGVLGVAPSAELYAVKVLGASGGGASSIAQGLEWAGANGMHVANLSLGSPSPSATLEQAVNSATSRGVLVVAASGNSGAGSISYPARYANAMAVGATDQNNNRASFSQYGAGLDIVAPGVNVQSTAPGSAYASLNGTSMATPHVAGAAVLVKQKNPSWSNVQIRNHLKNTATSLGSTNLYGSGLVNAEAATR

SEQ ID NO: 60591 - protein, 268 aa, Unidentified
AQSVPWGISRVQAPAAHNRGLAGSGVKVAVLDTGISTHPDLNIRGGASFVPGEPSTQDGNGHGTHVAGTIAALNNSIGVLGVAPSAELYAVKVLGASGGGASSIAQGLEWAGNNGMHVANLSLGSPSPSATLEQAVNSATSRGVLVVAASGNSGADSISYPARYANAMAVGATDQNNNRADFSQYGAGLDIVAPGVNVQSTYPGSTYASLNGTSMATPHVAGAASLVKQKNPSWSNVTIRDHLKNTATSLGSTNLYGSGLVNAFAATR

SEQ ID NO: 60592 - protein, 268 aa, Unidentified
AQSVPWGISRVQAPAAHNRGLQGSGVKVAVLDTGISTHPDLNIRGGASFVPGEPSTQDGNGHGTHVAGTIAALNNSIGVLGVAPSAELYAVKVLGASGGAISSIAQGLEWAGNNGMHVANLSLGSPSPSATLEQAVNSATSRGVLVVAASGNSGADSISYPARYANAMAVGATDQNNNRAEFSQYGAGLDIVAPGVNVQSTYPGSTYASLNGTSMATPHVAGAALLVKQKNPSWSNVTIREHLKNTATSLGSTNLYGSGLVNATAATR

SEQ ID NO: 60593 - protein, 268 aa, Unidentified
AQSVPWGISRVQAPAAHNRGLAGSGVKVAVLDTGISTHPDLNIRGGASFVPGEPSTQDGNGHGTHVAGTIAALNNSIGVLGVAPSAELYAVKVLGASGGGAISSIAQGLEWAGNNGMHVANLSLGSPSPSATLEQAVNSATSRGVLVVAASGNSGADSISYPARYANAMAVGATDQNNNRAEFSQYGAGLDIVAPGVNVQSTYPGSTYASLNGTSMATPHVAGAALVKQKNPSWSNVRIRDHLKNTATSLGSTNLYGSGLVNAHAATR

SEQ ID NO: 60594 - protein, 268 aa, Unidentified
AQSVPWGISRVQAPAAHNRRLTGRGVKVAVLDTGISTHPDLNIRGGASFVPGEPSTQDGEGHGTHVAGTIAALNNIGVLGVAPSAELYAVKVLGASGSGSVSSIAQGLEWAGNNSMHVANLSLGSESPSATLEQAVNSATSRGVLVVAASGNSGADSISYPARYANAMAVGATDQNNNRADFSQYGAGLDIVAPGVNVQSTYPGSTYASLNGTSMATPHVAGAAALVKQKNPSWSNVQIRDRLKNTATSLGSTNLYGSGLVNAEAATR

SEQ ID NO: 60595 - protein, 268 aa, Unidentified
AQSVPWGISRVQAPAHNRGLAGFGVKVAVLDTGISTHPDLNIRGGASFVPGEPSTQDGNGHGTHVAGTIAALNNSIGVLGVAPSAELYAVKVLGASGGGAISSIAQGLEWAGANGMHVANLSLGSPSPSATLEQAVNSATSRGVLVVAASGNSGAGSISYPARYANAMAVGATDQNNNRASFSQYGAGLDIVAPGVNVQSTAPQSTYASLNGTSMATPHVAGAAVLVKQKNPSWSNVQIRNHLKNTATSLGSTNLYGSGLVNAEAATR

SEQ ID NO: 60596 - protein, 268 aa, Unidentified
AQSVPWGISRVQAPAAHNRGLAGFGVKVAVLDTGISTHPDLNIRGGASFVPGEPSTQDGNGHGTHVAGTIAALNNSIGVLGVAPSAELYAVKVLGASGGGASSIAQGLEWAGANGMHVANLSLGNPSPSATLEQAVNSATSRGVLVVAASGNSGAGSISYPARYANAMAVGATDQNNNRASFSQYGAGLDIVAPGVNVQSTVPGSAYASLNGTSMATPHVAGAAVLVKQKNPSWSNVQIRNHLKNTATSLGSTNLYGSGLVNAEAATR

SEQ ID NO: 60597 - protein, 268 aa, Unidentified
AQSVPWGISRVQAPAAHNRGLTGFGVKVAVLDSGISTHPDLNIRGGASFVPGEPSTQDGNGHGTHVAGTIAALNNSIGVLGVAPSAELYAVKVLGASGGGASSIAQGLEWAGANGMHVANLSLGSPSPSATLEQAVNSATSRGVLVVAASGNSGAGSISYPARYANAMAVGATDQNNNRASFSQYGAGLDIVAPGVNVQSTAPQSAYASLNGTSMATPHVAGAAVLVKQKNPSWSNVQIRNHLKNTATSLGSTNLYGSGLVNAEAATR

SEQ ID NO: 60598 - protein, 268 aa, Unidentified
AQSVPWGISRVQAPAAHRRRLTGRGVKVAVLDTGISTHPDLNIRGGASFVPGEPSTQDGNGHGTHVAGTIAALDNSIGVLGVAPSAELYAVKVLGASGAGSVSSIAQGLEWAGANGMHVANLSLGSPSPSATLEQAVNSATSRGVLVVAASGNSGAGSISYPARYANAMAVGATDQDNNRASFSQYGAGLDIVAPGVNVQSTYPQSTYASLNGTSMATPHVAGAAALVKQKNPSWSNVQIRNRLKNTATSLGSTNLYGSGLVNAEAAT

SEQ ID NO: 60599 - protein, 268 aa, Unidentified
AQSVPWGISRVQAPAAHNRGLTGSGVKVAVLDTGISTHPDLNIRGGASFVPGEPSTQDGNGHGTHAAGTIAALNNSIGVLGVAPGAELYAVKVLGASGSGAISSIAQGLEWAGNNGMHVANLSLGSPSPSATLEQAVNSATSRGVLVVAASGNSGADSISYPARYANAMAVGATDQNNNRASFSQYGAGLDIVAPGVNVQSTYPGSTYASLNGTSMATPHVAGAAVLVKHKNPSWSNVRIRNHLKKTATSLGSTNLYGSGLVNAEAAT

SEQ ID NO: 60600 - protein, 214 aa, Unidentified
AQSVPWGISRVQAPAAHNRGLTGSGVKVAVLDTGISTHPDLNIRGGASFVPGEPSTQDGNGHGTHVAGTIAALNNSIGVLGVAPSAELYAVKVLGASGSGSVSSIAQGLEWAGNNGMHVANLSLGSPSPSATLEQAVNSATSRGVLVVAASGNSGAGSISYPARYANAMAVGATDQNNNRASFSQYGAGLDIVAPGVNVQSTYPGCVHGDTRVT

SEQ ID NO: 60601 - protein, 215 aa, Unidentified
AQSVPWGISRVQAPAAHNRGLTGSGVKVAVLDTGISTHPDLNIRGGASFVPGEPSTQDGNGHGTHVAGTIAALNNSIGVLGVAPSAELYAVKVLGASGSGSVSSIAQGLEWAGNNGMHVANLSLGSPSPSATLEQAVNSATSRGVLVVAASGNSGAGSISYPARYANAMAVGATDQNNNRASFSQYGAGLDIVAPGVNVQSTYPGCQPYDALVST

SEQ ID NO: 60602 - protein, 376 aa, Synthetic construct
LGKIVASTALLISVAFSSSIASAAEEAKEKYLIGFNEQEAVSEFVEQVEANDEVAILSEEEEVEIELLHEFETIPVLSVELSPEDVDALELDPAISYIEEDAEVTTMAQSVPWGISRVQAPAAHNRGLTGSGVKVAVLDTGISTHPDLNIRGGASFVPGEPSTQDGNGHGTHVAGTIAALDNSIGVLGVAPSAELYAVKVLGASGSGAISSIAQGLEWAGNNGMHVANLSLGSPSPSATLEQAVNSATSRGVLVVAASGNSGAGSISYPARYANAMAVGATDQNNNRASFSQYGAGLDIVAPGVNVQSTYPGSTYASLNGTSMATPHVAGAAALVKQKNPSWSNVQIRNHLKNTATSLGSTNLYGSGLVNAEAATR

SEQ ID NO: 60603 - protein, 264 aa, Unidentified
LGKIVASTALLISVAFSSSIASAAEEAKEKYLIGFNEQEAVSEFVEQVEANDEVAILSEEEEVEIELLHEFETIPVLSVELSPEDVDALELDPAISYIEEDAEVTTMAQSVPWGISRVQAPAAHNRGLTGSGVKVAVLDTGISTHPDLNIRGGASFVPGEPSTQDGNGHGTHVAGTIAALNNSIGVLGVAPSAELYAVKVLGASGSGSVSSIAQGLEWAGNNGMHVANLSLGSPSPSATLEQAVNSATSRGVLVVAASGNSGAG

SEQ ID NO: 60604 - protein, 367 aa, Unidentified
LGKIVASTALLISVAFSSSIASAAEEAKXKYLIGFNEQEAVSEFVEQVEANDXVAILSEEEEVEIELLHEFETIPVLSVELSPEDVDALELDPAISYIEEDAEVTTMRVQAPAAHNRGLTGSGVKVAVLDTGISTHPDLNIRGGASFVPGEPSTQDGNGHGTHVAGTIAALNNSIGVLGVAPNAELYAVKVLGASGSGSVSSIAQGLEWAGNNGMHVANLSLGSPSPSATLEQAVNSATSRGVLVVAASGNSGAGSISYPARYANAMAVGATDQNNNRASFSQYGAGLDIVAPGVNVQSTYPGSTYASLNGTSMATPHVAGAAALVKQKNPSWSNVQIRNHLKNTATSLGSTNLYGSGLVNAEAATR

SEQ ID NO: 60605 - protein, 265 aa, Unidentified
IEVPHTHNFALASGVFVHNSGVKVAVLDTGISTHPDLNIRGGASFVPGEPSTQDGNGHGTHVAGTIAALNNSIGVLGVAPSAELYAVKVLGASGSGSVSSIAQGLEWAGNNGMHVANLSLGSPSPSATLEQAVNSATSRGVLVVAASGNSGAGSISYPARYANAMAVGATDQNNNRASFSQYGAGLDIVAPGVNVQSTYPGSTYASLNGTSMATPHVAGAAALVKQKNPSWSNVQIRNHLKNTATSLGSTNLYGSGLVNAEAATR

SEQ ID NO: 60606 - protein, 265 aa, Unidentified
LEVPVTHNFALASGVFVHNSGVKVAVLDTGISTHPDLNIRGGASFVPGEPSTQDGNGHGTHVAGTIAALNNSIGVLGVAPSAELYAVKVLGASGSGSVSSIAQGLEWAGNNGMHVANLSLGSPSPSATLEQAVNSATSRGVLVVAASGNSGAGSISYPARYANAMAVGATDQNNNRASFSQYGAGLDIVAPGVNVQSTYPGSTYASLNGTSMATPHVAGAAALVKQKNPSWSNVQIRNHLKNTATSLGSTNLYGSGLVNAEAATR

SEQ ID NO: 60607 - protein, 260 aa, Saccharomyces cerevisiae
LGKIVASTALLISVAFSSSIASAAEEAKEKYLIGFNEQEAVSEFVEQVEANDEVAILSEEEEVEIELLHEFETIPVLSVELSPEDVDALELDPAISYIEEDAEVTTMAQSVPWGISRVQAPAAHNRGLTGSGVKVAVLDTGISTHPDLNIRGGASFVPGEPSTQDGNGHGTHVAGTIAALNNSIGVLGVAPSAELYAVKVLGASGSGSVSSIAQGLEWAGNNGMHVANLSLGSPSPSATLEQAVNSATSRGVLVVAASGN

SEQ ID NO: 60608 - protein, 382 aa, Unidentified
VRSKKLWISLLFALTLIFTMAFSNMSAQAAEEAKEKYLIGFNEQEAVSEFVEQVEANDEVAILSEEEEVEIELLHEFETIPVLSVELSPEDVDALELDPAISYIEEDAEVTTMAQSVPWGISRVQAPAAHNRGLTGSGVKVAVLDTGISTHPDLNIRGGASFVPGEPSTQDGNGHGTHVAGTIAALNNSIGVLGVAPNAELYAVKVLGASGSGSVSSIAQGLEWAGNNGMHVANLSLGSPSPSATLEQAVNSATSRGVLVVAASGNSGAGSISYPARYANAMAVGATDQNNNRASFSQYGAGLDIVAPGVNVQSTYPGSTYASLNGTSMATPHVAGAAALVKQKNPSWSNVQIRNHLKNTATSLGSTNLYGSGLVNAEAATR

SEQ ID NO: 60609 - protein, 380 aa, Unidentified
VRSKKLWIVASTALLISVAFSSSIASAAEEAKEKYLIGFNEQEAVSEFVEQVEANDEVAILSEEEEVEIELLHEFETIPVLSVELSPEDVDALELDPAISYIEEDAEVTTMAQSVPWGISRVQAPAAHNRGLTGSRVKVAVLDTGISTHPDLNIRGGASFVPGEPSTQDGNGHGTHVAGTIAALNNSIGVLGVAPSAELYAVKVLGASGSGSVSSIAQGLEWAGNNGMHVANLSLGSPSPSATLEQAVNSATSRGVLVVAASGNSGAGSISYPARYANAMAVGATDQNNNRASFSQYGAGLDIVAPGVNVQSTYPGSTYASLNGTSMATPHVAGAAALVKQKNPSWSNVQIRNHLKNTATSLGSTNLYGSGLVNAEAATR

SEQ ID NO: 60610 - protein, 380 aa, Unidentified
VRSKKLWIVASTALLISVAFSSSIASAAEEAKEKYLIGFNEQEAVSEFVEQVEANDEVAILSEEEEVEIELLHEFETIPVLSVELSPEDVDALELDPAISYIEEDAEVTTMAQSVPWGISRVQAPAAHNRGLTGSGVKVAVLDTGISTHPDLNIRGGASFVPGEPSTQDGNGHGTHVAGTIAALNNSIGVLGVAPSAELYAVKVLGASGSGSVSSIAQGLEWAKNNGMHVANLSLGSPSPSATLEQAVNSATSRGVLVVAASGNSGAGSISYPARYANAMAVGATDQNNNRASFSQYGAGLDIVAPGVNVQSTYPGSTYASLNGTSMATPHVAGAAALVKQKNPSWSNVQIRNHLKNTATSLGSTNLYGSGLVNAEAATR

SEQ ID NO: 60611 - protein, 380 aa, Unidentified
VRSKKLWIVASTALLISVAFSSSIASAAEEAKEKYLIGFNEQEAVSEFVEQVEANDEVAILSEEEEVEIELLHEFETIPVLSVELSPEDVDALELDPAISYIEEDAEVTTMAQSVPWGISRVQAPAAHNRGLTGSGVKVAVLDTGISTHPDLNIRGGASFVPGEPSTQDGNGHGTHVAGTIAALNNSIGVLGVAPSAELYAVKVLGASGSGSVSTIAQGLEWAGNNGMHVANLSLGSPSPSATLEQAVNSATSRGVLVVAASGNSGAGSISYPARYANAMAVGATDQNNNRASFSQYGAGLDIVAPGVNVQSTYPGSTYASLNGTSMATPHVAGAAALVKQKNPSWSNVQIRNHLKNTATSLGSTNLYGSGLVNAEAATR

SEQ ID NO: 60612 - protein, 380 aa, Unidentified
VRSKKLWIVASTALLISVAFSSSIASAAEEAKEKYLIGFNEQEAVSEFVEQVEANDEVAILSEEEEVEIELLHEFETIPVLSVELSPEDVDALELDPAISYIEEDAEVTTMAQSVPWGISRVQAPAAHNRGLTGSGVKVAVLDTGIFTHPDLNIRGGASFVPGEPSTQDGNGHGTHVAGTIAALNNSIGVLGVAPSAELYAVKVLGASGSGSVSSIAQGLEWAGNNGMHVANLSLGSPSPSATLEQAVNSATSRGVLVVAASGNSGAGSISYPARYANAMAVGATDQNNNRASFSQYGAGLDIVAPGVNVQSTYPGSTYASLNGTSMATPHVAGAAALVKQKNPSWSNVQIRNHLKNTATSLGSTNLYGSGLVNAEAATR

SEQ ID NO: 60613 - protein, 380 aa, Unidentified
VRSKKLWIVASTALLISVAFSSSIASAAEEAKEKYLIGFNEQEAVSEFVEQVEANDEVAILSEEEEVEIELLHEFETIPVLSVELSPEDVDALELDPAISYIEEDAEVTTMAQSVPWGISRVQAPAAHNRGLTGSGVKVAVLDTGISTHPDLNIRGGASFVPGEPSTQDGNGHGTHVAGTIAALNNSIGVLGVAPSAELYAVKVLGASGSGSVSSIAQGLEWAGNNGMHVANLSLGSPSPSATLEQAVNSATSRGVLVVAASGNSGAGSISYPARYANAMAVGATDQNNNRASFSQYGAGLDIVAPGVNVQSTYPGSTYASLNGTSMATPHVAGAAALVKQKNPSWSNVQIRNHLKNTATSLGSTNLYGSGLVNAIAATR

SEQ ID NO: 60614 - protein, 380 aa, Unidentified
VRSKKLWIVASTALLISVAFSSSIASAAEEAKEKYLIGFNEQEAVSEFVEQVEANDEVAILSEEEEVEIELLHEFETIPVLSVELSPEDVDALELDPAISYIEEDAEVTTMAQSVPWGISRVQAPAAHNRGLTGSGVKVAVLDTGISTHPDLNIRGGASFVPGEPSTQDGNGHGTHVAGTIAALNNSIGVLGVAPSAELYAVKVLGASGSGSVSSIAQGLEWAGNNGMHVANLSLGSPSPSATLEQAVNSATSRGVLVVAASGNSGAGSISYPARYANAMAVGATDQNNNRADFSQYGAGLDIVAPGVNVQSTYPGSTYASLNGTSMATPHVAGAAALVKQKNPSWSNVQIRNHLKNTATSLGSTNLYGSGLVNAEAATR

SEQ ID NO: 60615 - protein, 380 aa, Unidentified
VRSKKLWIVASTALLISVAFSSSIASAAEEAKEKYLIGFNEQEAVSEFVEQVEANDEVAILSEEEEVEIELLHEFETIPVLSVELSPEDVDALELDPAISYIEEDAEVTTMAQSVPWGISRVQAPAAHNRGLTGSGVKVAVLDTGISTHPDLNIRGGRSFVPGEPSTQDGNGHGTHVAGTIAALNNSIGVLGVAPSAELYAVKVLGASGSGSVSSIAQGLEWAGNNGMHVANLSLGSPSPSATLEQAVNSATSRGVLVVAASGNSGAGSISYPARYANAMAVGATDQNNNRASFSQYGAGLDIVAPGVNVQSTYPGSTYASLNGTSMATPHVAGAAALVKQKNPSWSNVQIRNHLKNTATSLGSTNLYGSGLVNAEAATR

SEQ ID NO: 60616 - protein, 380 aa, Unidentified
VRSKKLWIVASTALLISVAFSSSIASAAEEAKEKYLIGFNEQEAVSEFVEQVEANDEVAILSEEEEVEIELLHEFETIPVLSVELSPEDVDALELDPAISYIEEDAEVTTMAQSVPWGISRVQAPAAHNRGLTGSGVKVAVLDTGISTHPDLNIRGGASFVPGEPSTQDGNGHGTHVAGTIAALNNSIGVLGVAWSAELYAVKVLGASGSGSVSSIAQGLEWAGNNGMHVANLSLGSPSPSATLEQAVNSATSRGVLVVAASGNSGAGSISYPARYANAMAVGATDQNNNRASFSQYGAGLDIVAPGVNVQSTYPGSTYASLNGTSMATPHVAGAAALVKQKNPSWSNVQIRNHLKNTATSLGSTNLYGSGLVNAEAATR

SEQ ID NO: 60617 - protein, 380 aa, Unidentified
VRSKKLWIVASTALLISVAFSSSIASAAEEAKEKYLIGFNEQEAVSEFVEQVEANDEVAILSEEEEVEIELLHEFETIPVLSVELSPEDVDALELDPAISYIEEDAEVTTMAQSVPWGISRVQAPAAHNRGLTGSVVKVAVLDTGISTHPDLNIRGGASFVPGEPSTQDGNGHGTHVAGTIAALNNSIGVLGVAPSAELYAVKVLGASGSGSVSSIAQGLEWAGNNGMHVANLSLGSPSPSATLEQAVNSATSRGVLVVAASGNSGAGSISYPARYANAMAVGATDQNNNRASFSQYGAGLDIVAPGVNVQSTYPGSTYASLNGTSMATPHVAGAAALVKQKNPSWSNVQIRNHLKNTATSLGSTNLYGSGLVNAEAATR

SEQ ID NO: 60618 - protein, 380 aa, Unidentified
VRSKKLWIVASTALLISVAFSSSIASAAEEAKEKYLIGFNEQEAVSEFVEQVEANDEVAILSEEEEVEIELLHEFETIPVLSVELSPEDVDALELDPAISYIEEDAEVTTMAQSVPWGISRVQAPAAHNRGLTGSGVKVAVLDDGISTHPDLNIRGGASFVPGEPSTQDGNGHGTHVAGTIAALNNSIGVLGVAPSAELYAVKVLGASGSGSVSSIAQGLEWAGNNGMHVANLSLGSPSPSATLEQAVNSATSRGVLVVAASGNSGAGSISYPARYANAMAVGATDQNNNRASFSQYGAGLDIVAPGVNVQSTYPGSTYASLNGTSMATPHVAGAAALVKQKNPSWSNVQIRNHLKNTATSLGSTNLYGSGLVNAEAATR

SEQ ID NO: 60619 - protein, 380 aa, Unidentified
VRSKKLWIVASTALLISVAFSSSIASAAEEAKEKYLIGFNEQEAVSEFVEQVEANDEVAILSEEEEVEIELLHEFETIPVLSVELSPEDVDALELDPAISYIEEDAEVTTMAQSVPWGISRVQAPAAHNRGLTGSGVKVAVLDTGISTHPDLNIRGGASFVPGEPSTQDGNGHGTHVAGTIAALNNSIGVLGVAPSAELYAVKVLGASGSGSVSSIAQGLEWAGNNGMHVANLSLGSPSPSATLEQAVNSATSRGVLVVAASGNSGAGSISYPARYANAMAVGATDQRNNRASFSQYGAGLDIVAPGVNVQSTYPGSTYASLNGTSMATPHVAGAAALVKQKNPSWSNVQIRNHLKNTATSLGSTNLYGSGLVNAEAATR

SEQ ID NO: 60620 - protein, 380 aa, Unidentified
VRSKKLWIVASTALLISVAFSSSIASAAEEAKEKYLIGFNEQEAVSEFVEQVEANDEVAILSEEEEVEIELLHEFETIPVLSVELSPEDVDALELDPAISYIEEDAEVTTMAQSVPWGISRVQAPAAHNRRLTGSGVKVAVLDTGISTHPDLNIRGGASFVPGEPSTQDGNGHGTHVAGTIAALNNSIGVLGVAPSAELYAVKVLGASGSGSVSSIAQGLEWAGNNGMHVANLSLGSPSPSATLEQAVNSATSRGVLVVAASGNSGAGSISYPARYANAMAVGATDQNNNRASFSQYGAGLDIVAPGVNVQSTYPGSTYASLNGTSMATPHVAGAAALVKQKNPSWSNVQIRNHLKNTATSLGSTNLYGSGLVNAEAATR

SEQ ID NO: 60621 - protein, 380 aa, Unidentified
VRSKKLWIVASTALLISVAFSSSIASAAEEAKEKYLIGFNEQEAVSEFVEQVEANDEVAILSEEEEVEIELLHEFETIPVLSVELSPEDVDALELDPAISYIEEDAEVTTMAQSVPWGISRVQAPAAHNRGLTGLGVKVAVLDTGISTHPDLNIRGGASFVPGEPSTQDGNGHGTHVAGTIAALNNSIGVLGVAPSAELYAVKVLGASGSGSVSSIAQGLEWAGNNGMHVANLSLGSPSPSATLEQAVNSATSRGVLVVAASGNSGAGSISYPARYANAMAVGATDQNNNRASFSQYGAGLDIVAPGVNVQSTYPGSTYASLNGTSMATPHVAGAAALVKQKNPSWSNVQIRNHLKNTATSLGSTNLYGSGLVNAEAATR

SEQ ID NO: 60622 - protein, 380 aa, Unidentified
VRSKKLWIVASTALLISVAFSSSIASAAEEAKEKYLIGFNEQEAVSEFVEQVEANDEVAILSEEEEVEIELLHEFETIPVLSVELSPEDVDALELDPAISYIEEDAEVTTMAQSVPWGISRVQAPAAHNRGLTGSGVKVAVLDTGISTHPDLNIRGGASFVPGEPSTQDGNGHGTHVAGTIAALNNSIGVLGVAPSAELYAVKVLGASGSGSVSSIAQGLEWAGNNGMHVANLSLGSPSPSATLEQAVNSATSRGVLVVAASGNSGAGSISYPARYANAMAVGATDQNNNRASFSQYGAGLDIVAPGVNVQSTYPGSTYASLNGTSMATPHVAGAAALVKQKNPSRSNVQIRNHLKNTATSLGSTNLYGSGLVNAEAATR

SEQ ID NO: 60623 - protein, 380 aa, Unidentified
VRSKKLWIVASTALLISVAFSSSIASAAEEAKEKYLIGFNEQEAVSEFVEQVEANDEVAILSEEEEVEIELLHEFETIPVLSVELSPEDVDALELDPAISYIEEDAEVTTMAQSVPWGISRVQAPAAHNRGLTGSGVKVAVLDTGISTHPDLNIRGGASFVPGEPSTQDGNGHGTHVAGTIAALNNSIGVLGVAPSAELYAVKVLGASGSGSVSSIAQGLEWAGNNGMHVANLSLGSPSPSATLEQAVNSATSRGVLVVAASGNSGAGSISYPARYANAMAVGATDQNNNRASFSQYGAGLDIVAPGVNVQSTYPGSTYASLNGTSMATPHVAGAAALFKQKNPSWSNVQIRNHLKNTATSLGSTNLYGSGLVNAEAATR

SEQ ID NO: 60624 - protein, 380 aa, Unidentified
VRSKKLWIVASTALLISVAFSSSIASAAEEAKEKYLIGFNEQEAVSEFVEQVEANDEVAILSEEEEVEIELLHEFETIPVLSVELSPEDVDALELDPAISYIEEDAEVTTMAQSVPWGISRVQAPAAHNRGLTGSGVKVAVLDTGISTHPDLNIRGGASFVPGEPSTQDGNGHGTHVAGTIAALNNSIGVLGVAPSAELYAVKVLGASGSGSVTSIAQGLEWAGNNGMHVANLSLGSPSPSATLEQAVNSATSRGVLVVAASGNSGAGSISYPARYANAMAVGATDQNNNRASFSQYGAGLDIVAPGVNVQSTYPGSTYASLNGTSMATPHVAGAAALVKQKNPSWSNVQIRNHLKNTATSLGSTNLYGSGLVNAEAATR

SEQ ID NO: 60625 - protein, 380 aa, Unidentified
VRSKKLWIVASTALLISVAFSSSIASAAEEAKEKYLIGFNEQEAVSEFVEQVEANDEVAILSEEEEVEIELLHEFETIPVLSVELSPEDVDALELDPAISYIEEDAEVTTMAQSVPWGISRVQAPASHNRGLTGSGVKVAVLDTGISTHPDLNIRGGASFVPGEPSTQDGNGHGTHVAGTIAALNNSIGVLGVAPSAELYAVKVLGASGSGSVSSIAQGLEWAGNNGMHVANLSLGSPSPSATLEQAVNSATSRGVLVVAASGNSGAGSISYPARYANAMAVGATDQNNNRASFSQYGAGLDIVAPGVNVQSTYPGSTYASLNGTSMATPHVAGAAALVKQKNPSWSNVQIRNHLKNTATSLGSTNLYGSGLVNAEAATR

SEQ ID NO: 60626 - protein, 380 aa, Unidentified
VRSKKLWIVASTALLISVAFSSSIASAAEEAKEKYLIGFNEQEAVSEFVEQVEANDEVAILSEEEEVEIELLHEFETIPVLSVELSPEDVDALELDPAISYIEEDAEVTTMAQSVPWGISRVQAPAAHNRGLTGSGVKVAVLDTGISTHPDLNIRGGASFVPGEPSTQDGNGHGTHVAGTIAALNNSIGVLGVAPSAELYAVKVLGASGSGSVSSIAQGLEWAGNNGMHVANLSLGSPSPSATLEQAVNSATSRGVLVVAASGNSGAGSISYPARYANAMAVGATDQNNNRASFSQYGAGLDLVAPGVNVQSTYPGSTYASLNGTSMATPHVAGAAALVKQKNPSWSNVQIRNHLKNTATSLGSTNLYGSGLVNAEAATR

SEQ ID NO: 60627 - protein, 380 aa, Unidentified
VRSKKLWIVASTALLISVAFSSSIASAAEEAKEKYLIGFNEQEAVSEFVEQVEANDEVAILSEEEEVEIELLHEFETIPVLSVELSPEDVDALELDPAISYIEEDAEVTTMAQSVPWGISRVQAPAAHNRGLTGSGVKVAVLDTGISTHPDLNIRGGASFVPGEPSTQDGNGHGTHVAGTIAALNNSIGVLGVAPSAELYAVKVLGASGSGSVSSIAQGLEWAGNNGMHVANLSLGIPSPSATLEQAVNSATSRGVLVVAASGNSGAGSISYPARYANAMAVGATDQNNNRASFSQYGAGLDIVAPGVNVQSTYPGSTYASLNGTSMATPHVAGAAALVKQKNPSWSNVQIRNHLKNTATSLGSTNLYGSGLVNAEAATR

SEQ ID NO: 60628 - protein, 380 aa, Unidentified
VRSKKLWIVASTALLISVAFSSSIASAAEEAKEKYLIGFNEQEAVSEFVEQVEANDEVAILSEEEEVEIELLHEFETIPVLSVELSPEDVDALELDPAISYIEEDAEVTTMAQSVPWGISRVQAPAAHNRGLTGSGVKVAVLDGGISTHPDLNIRGGASFVPGEPSTQDGNGHGTHVAGTIAALNNSIGVLGVAPSAELYAVKVLGASGSGSVSSIAQGLEWAGNNGMHVANLSLGSPSPSATLEQAVNSATSRGVLVVAASGNSGAGSISYPARYANAMAVGATDQNNNRASFSQYGAGLDIVAPGVNVQSTYPGSTYASLNGTSMATPHVAGAAALVKQKNPSWSNVQIRNHLKNTATSLGSTNLYGSGLVNAEAATR

SEQ ID NO: 60629 - protein, 380 aa, Unidentified
VRSKKLWIVASTALLISVAFSSSIASAAEEAKEKYLIGFNEQEAVSEFVEQVEANDEVAILSEEEEVEIELLHEFETIPVLSVELSPEDVDALELDPAISYIEEDAEVTTMAQSVPWGISRVQAPAAHNRGLTGSGVKVAVLDTGISTHPDLNIRGGASFVPGEPSTQDGNGHGTHVAGTIAALNNSIGVLGVAPSAELYAVKVLGASGEGSVSSIAQGLEWAGNNGMHVANLSLGSPSPSATLEQAVNSATSRGVLVVAASGNSGAGSISYPARYANAMAVGATDQNNNRASFSQYGAGLDIVAPGVNVQSTYPGSTYASLNGTSMATPHVAGAAALVKQKNPSWSNVQIRNHLKNTATSLGSTNLYGSGLVNAEAATR

SEQ ID NO: 60630 - protein, 380 aa, Unidentified
VRSKKLWIVASTALLISVAFSSSIASAAEEAKEKYLIGFNEQEAVSEFVEQVEANDEVAILSEEEEVEIELLHEFETIPVLSVELSPEDVDALELDPAISYIEEDAEVTTMAQSVPWGISRVQAPAAHNRGLTGSGVKVAVLDTGISTHPDLNIRGGASFVPGEPSTQDGNGHGTHVAGTIACLNNSIGVLGVAPSAELYAVKVLGASGSGSVSSIAQGLEWAGNNGMHVANLSLGSPSPSATLEQAVNSATSRGVLVVAASGNSGAGSISYPARYANAMAVGATDQNNNRASFSQYGAGLDIVAPGVNVQSTYPGSTYASLNGTSMATPHVAGAAALVKQKNPSWSNVQIRNHLKNTATSLGSTNLYGSGLVNAEAATR

SEQ ID NO: 60631 - protein, 380 aa, Unidentified
VRSKKLWIVASTALLISVAFSSSIASAAEEAKEKYLIGFNEQEAVSEFVEQVEANDEVAILSEEEEVEIELLHEFETIPVLSVELSPEDVDALELDPAISYIEEDAEVTTMAQSVPWGISHVQAPAAHNRGLTGSGVKVAVLDTGISTHPDLNIRGGASFVPGEPSTQDGNGHGTHVAGTIAALNNSIGVLGVAPSAELYAVKVLGASGSGSVSSIAQGLEWAGNNGMHVANLSLGSPSPSATLEQAVNSATSRGVLVVAASGNSGAGSISYPARYANAMAVGATDQNNNRASFSQYGAGLDIVAPGVNVQSTYPGSTYASLNGTSMATPHVAGAAALVKQKNPSWSNVQIRNHLKNTATSLGSTNLYGSGLVNAEAATR

SEQ ID NO: 60632 - protein, 380 aa, Unidentified
VRSKKLWIVASTALLISVAFSSSIASAAEEAKEKYLIGFNEQEAVSEFVEQVEANDEVAILSEEEEVEIELLHEFETIPVLSVELSPEDVDALELDPAISYIEEDAEVTTMAQSVPWGISRVQAPAAHNRGLTGSGVKVAVLDTGISTHPDLMIRGGASFVPGEPSTQDGNGHGTHVAGTIAALNNSIGVLGVAPSAELYAVKVLGASGSGSVSSIAQGLEWAGNNGMHVANLSLGSPSPSATLEQAVNSATSRGVLVVAASGNSGAGSISYPARYANAMAVGATDQNNNRASFSQYGAGLDIVAPGVNVQSTYPGSTYASLNGTSMATPHVAGAAALVKQKNPSWSNVQIRNHLKNTATSLGSTNLYGSGLVNAEAATR

SEQ ID NO: 60633 - protein, 380 aa, Unidentified
VRSKKLWIVASTALLISVAFSSSIASAAEEAKEKYLIGFNEQEAVSEFVEQVEANDEVAILSEEEEVEIELLHEFETIPVLSVELSPEDVDALELDPAISYIEEDAEVTTMAQSVPWGISRVQAPAAHNRGLTGSGVKVAVLDTGISTHPDLNIRGGASFVPGEPSTQDGNGHGTHVAGTIAALNNSIGVLGVAPSAELYAVKVLGASGSGSVSSIAQGLEWAGNNGMHVANLSLGSPSPSATLEQAVNSATSRGVLVVAASGNSGAGSISYPARYANAMAVGATDQNNNRASFSQYGAGLDIVAPGVNVQSTYPGSTYASLNGTSMATPHVAGAAALVKQKNPSWSNVQIRNHLKNTATSLGSVNLYGSGLVNAEAATR

SEQ ID NO: 60634 - protein, 380 aa, Unidentified
VRSKKLWIVASTALLISVAFSSSIASAAEEAKEKYLIGFNEQEAVSEFVEQVEANDEVAILSEEEEVEIELLHEFETIPVLSVELSPEDVDALELDPAISYIEEDAEVTTMAQSVPWGISRVQAPAAHNRGLTGSGVKVAVLDTGISTHPDLNIRGGASFVPGEPSTQDGNGHGTHVAGTIAALNNSIGVLGVAPSAELYAVKVLGASGSGSVSSIAQGLEWAGNNGMHVANLSLGSPSPSATLEQAVNSATSRGVLVVAASGNSGAGSISYPARYANAMAVGATDQNNERASFSQYGAGLDIVAPGVNVQSTYPGSTYASLNGTSMATPHVAGAAALVKQKNPSWSNVQIRNHLKNTATSLGSTNLYGSGLVNAEAATR

SEQ ID NO: 60635 - protein, 380 aa, Unidentified
VRSKKLWIVASTALLISVAFSSSIASAAEEAKEKYLIGFNEQEAVSEFVEQVEANDEVAILSEEEEVEIELLHEFETIPVLSVELSPEDVDALELDPAISYIEEDAEVTTMAQSVPWGISRVQAPAAHNRGLTGSGVKVAVLDTGISTHPDLNIRGGASFVPGEPSTQDGNGHGTHVAGTIAALNNSIGVLGVAPSAELYAVKVLGASGSGSVSSIAQGLEWAGNNIMHVANLSLGSPSPSATLEQAVNSATSRGVLVVAASGNSGAGSISYPARYANAMAVGATDQNNNRASFSQYGAGLDIVAPGVNVQSTYPGSTYASLNGTSMATPHVAGAAALVKQKNPSWSNVQIRNHLKNTATSLGSTNLYGSGLVNAEAATR

SEQ ID NO: 60636 - protein, 380 aa, Unidentified
VRSKKLWIVASTALLISVAFSSSIASAAEEAKEKYLIGFNEQEAVSEFVEQVEANDEVAILSEEEEVEIELLHEFETIPVLSVELSPEDVDALELDPAISYIEEDAEVTTMAQSVPWGISRVQAPAAHNRGLTGSGVKVAVLDTGISTHPDLNIRGGASFVPGEPSTQDGQGHGTHVAGTIAALNNSIGVLGVAPSAELYAVKVLGASGSGSVSSIAQGLEWAGNNGMHVANLSLGSPSPSATLEQAVNSATSRGVLVVAASGNSGAGSISYPARYANAMAVGATDQNNNRASFSQYGAGLDIVAPGVNVQSTYPGSTYASLNGTSMATPHVAGAAALVKQKNPSWSNVQIRNHLKNTATSLGSTNLYGSGLVNAEAATR

SEQ ID NO: 60637 - protein, 380 aa, Unidentified
VRSKKLWIVASTALLISVAFSSSIASAAEEAKEKYLIGFNEQEAVSEFVEQVEANDEVAILSEEEEVEIELLHEFETIPVLSVELSPEDVDALELDPAISYIEEDAEVTTMAQSVPWGISRVQAPAAHNRGLTGSGVKVAVLDTGISTHPDLNIRGGASFVPGEPSTQDGNGHGTHVAGTIAALNNSIGVLGVAPSAELYAVKVLGASGSGSVSSIAQGIEWAGNNGMHVANLSLGSPSPSATLEQAVNSATSRGVLVVAASGNSGAGSISYPARYANAMAVGATDQNNNRASFSQYGAGLDIVAPGVNVQSTYPGSTYASLNGTSMATPHVAGAAALVKQKNPSWSNVQIRNHLKNTATSLGSTNLYGSGLVNAEAATR

SEQ ID NO: 60638 - protein, 380 aa, Unidentified
VRSKKLWIVASTALLISVAFSSSIASAAEEAKEKYLIGFNEQEAVSEFVEQVEANDEVAILSEEEEVEIELLHEFETIPVLSVELSPEDVDALELDPAISYIEEDAEVTTMAQSVPWGISRVQAPAAHNRGLTGSGVKVAVLDTGISTHPDLNIRGGASFVPGEPSTQDGNGHGTHVAGTIAALNNSIGVLGVAPSAELYAVKVLGASGSGSVSSIAQGLVWAGNNGMHVANLSLGSPSPSATLEQAVNSATSRGVLVVAASGNSGAGSISYPARYANAMAVGATDQNNNRASFSQYGAGLDIVAPGVNVQSTYPGSTYASLNGTSMATPHVAGAAALVKQKNPSWSNVQIRNHLKNTATSLGSTNLYGSGLVNAEAATR

SEQ ID NO: 60639 - protein, 380 aa, Unidentified
VRSKKLWIVASTALLISVAFSSSIASAAEEAKEKYLIGFNEQEAVSEFVEQVEANDEVAILSEEEEVEIELLHEFETIPVLSVELSPEDVDALELDPAISYIEEDAEVTTMAQSVPWGISRVQAPAAHNRGLTGSGVKNAVLDTGISTHPDLNIRGGASFVPGEPSTQDGNGHGTHVAGTIAALNNSIGVLGVAPSAELYAVKVLGASGSGSVSSIAQGLEWAGNNGMHVANLSLGSPSPSATLEQAVNSATSRGVLVVAASGNSGAGSISYPARYANAMAVGATDQNNNRASFSQYGAGLDIVAPGVNVQSTYPGSTYASLNGTSMATPHVAGAAALVKQKNPSWSNVQIRNHLKNTATSLGSTNLYGSGLVNAEAATR

SEQ ID NO: 60640 - protein, 380 aa, Unidentified
VRSKKLWIVASTALLISVAFSSSIASAAEEAKEKYLIGFNEQEAVSEFVEQVEANDEVAILSEEEEVEIELLHEFETIPVLSVELSPEDVDALELDPAISYIEEDAEVTTMAQSVPWGISRVQAPAAHNRGLTGSGVKVAVLDTGISTHPDLNIRGGASFVPGEPSTQDGNGHGTHVAGTIAALNNSIGVLGVAPSAELYAVKVLGATGSGSVSSIAQGLEWAGNNGMHVANLSLGSPSPSATLEQAVNSATSRGVLVVAASGNSGAGSISYPARYANAMAVGATDQNNNRASFSQYGAGLDIVAPGVNVQSTYPGSTYASLNGTSMATPHVAGAAALVKQKNPSWSNVQIRNHLKNTATSLGSTNLYGSGLVNAEAATR

SEQ ID NO: 60641 - protein, 380 aa, Unidentified
VRSKKLWIVASTALLISVAFSSSIASAAEEAKEKYLIGFNEQEAVSEFVEQVEANDEVAILSEEEEVEIELLHEFETIPVLSVELSPEDVDALELDPAISYIEEDAEVTTMAQSVPWGISRVQAPAAHNRGLTGSGVKVAVLDTGISTHPDLNIRGGASFVPGEPSTQDGNGHGTHVAGTIAALNNSIGVLGVAPSAELYAVKVLGASGSGSVSSIAQGLEWAGNNGMHVANLSLGSPSPSATLEQAVNSATSRGVLVVAASGNSGAGSISYPARYANAMAVGATDQFNNRASFSQYGAGLDIVAPGVNVQSTYPGSTYASLNGTSMATPHVAGAAALVKQKNPSWSNVQIRNHLKNTATSLGSTNLYGSGLVNAEAATR

SEQ ID NO: 60642 - protein, 380 aa, Unidentified
VRSKKLWIVASTALLISVAFSSSIASAAEEAKEKYLIGFNEQEAVSEFVEQVEANDEVAILSEEEEVEIELLHEFETIPVLSVELSPEDVDALELDPAISYIEEDAEVTTMAQSVPWGISRVQAPAAHNRGLTGSGVKVAVLDTGISTHPDLNIRGGASFVPGEPSTQDGNGHGTHVAGTIAALNNSIGVLGVAPSAELYAVKVLGASGSGSVSSIAQGLEWAGNNGMHVANLSLGSPSPSATLEQAVNSATSRGVLVVAASGNSGAGSISYPARYANAMAVGATDQNNNRASFSQYGAGLDIVAPGVNVQSTYPGSTYASLNGTSMAAPHVAGAAALVKQKNPSWSNVQIRNHLKNTATSLGSTNLYGSGLVNAEAATR

SEQ ID NO: 60643 - protein, 380 aa, Unidentified
VRSKKLWIVASTALLISVAFSSSIASAAEEAKEKYLIGFNEQEAVSEFVEQVEANDEVAILSEEEEVEIELLHEFETIPVLSVELSPEDVDALELDPAISYIEEDAEVTTMAQSVPWGISRVQAPAAHNRGLTGSGVKVAVLDTGISTHPDLNIRGGASFVPGEPSTQDGNGHGTHVAGTIAALNNSIGVLGVAPSAELYAVKVLGASGSGSVSSIAQGLEWAGNNGMHVANLSLGSPSPSATLEQAVNSATSRGVLVVAASGNSGAGSISYPARYANAMAVGATDQNNNRASFSQYGVGLDIVAPGVNVQSTYPGSTYASLNGTSMATPHVAGAAALVKQKNPSWSNVQIRNHLKNTATSLGSTNLYGSGLVNAEAATR

SEQ ID NO: 60644 - protein, 380 aa, Unidentified
VRSKKLWIVASTALLISVAFSSSIASAAEEAKEKYLIGFNEQEAVSEFVEQVEANDEVAILSEEEEVEIELLHEFETIPVLSVELSPEDVDALELDPAISYIEEDAEVTTMAQSVPWGISRVQAPAAHNRGLTGSGVKVAVLDTGISTHPDLNIRGGASFVPGEPSTQDGNGHGTHVAGTIAALNNSIGVLGVAPSAELYAVKVLGASGSGSVSSIAQGLEWAGNNRMHVANLSLGSPSPSATLEQAVNSATSRGVLVVAASGNSGAGSISYPARYANAMAVGATDQNNNRASFSQYGAGLDIVAPGVNVQSTYPGSTYASLNGTSMATPHVAGAAALVKQKNPSWSNVQIRNHLKNTATSLGSTNLYGSGLVNAEAATR

SEQ ID NO: 60645 - protein, 380 aa, Unidentified
VRSKKLWIVASTALLISVAFSSSIASAAEEAKEKYLIGFNEQEAVSEFVEQVEANDEVAILSEEEEVEIELLHEFETIPVLSVELSPEDVDALELDPAISYIEEDAEVTTMAQSVPWGISRVQAPAAHNRGLTGSGVKVAVLDTGISTHPDLNIRGGASFVPGEPSTQDGNGHGTHVAGTIAALNNSIGVLGVAPSAELYAVKVLGASGSGSVSSIAQGLEWAGNNGMHVANLSLGSPSPSATLEQAVNSATSRGVLVVAASGNSGAGSISYPARYANAMAVGATDQNNNRASFSQYGAGLDIVAPGVNVQSTYPGSTYASLNGTSMATPHVAGAAALVKQKNSSWSNVQIRNHLKNTATSLGSTNLYGSGLVNAEAATR

SEQ ID NO: 60646 - protein, 380 aa, Unidentified
VRSKKLWIVASTALLISVAFSSSIASAAEEAKEKYLIGFNEQEAVSEFVEQVEANDEVAILSEEEEVEIELLHEFETIPVLSVELSPEDVDALELDPAISYIEEDAEVTTMAQSVPWGISRVQAPAAHNRGLTGSGVKVAVLDTGISTHPDLNIRGGASFVPGEPSTQDGNGHGTHVAGTIAALNNSIGVLGVAPSAELYAVKVLGASGSGSVSSIAQGVEWAGNNGMHVANLSLGSPSPSATLEQAVNSATSRGVLVVAASGNSGAGSISYPARYANAMAVGATDQNNNRASFSQYGAGLDIVAPGVNVQSTYPGSTYASLNGTSMATPHVAGAAALVKQKNPSWSNVQIRNHLKNTATSLGSTNLYGSGLVNAEAATR

SEQ ID NO: 60647 - protein, 380 aa, Unidentified
VRSKKLWIVASTALLISVAFSSSIASAAEEAKEKYLIGFNEQEAVSEFVEQVEANDEVAILSEEEEVEIELLHEFETIPVLSVELSPEDVDALELDPAISYIEEDAEVTTMAQSVPWGISRVQAPAAHNRGLTGSGVKVAVLDTGISTHPDLNIRGGASFVPGEPSTQDGNGFGTHVAGTIAALNNSIGVLGVAPSAELYAVKVLGASGSGSVSSIAQGLEWAGNNGMHVANLSLGSPSPSATLEQAVNSATSRGVLVVAASGNSGAGSISYPARYANAMAVGATDQNNNRASFSQYGAGLDIVAPGVNVQSTYPGSTYASLNGTSMATPHVAGAAALVKQKNPSWSNVQIRNHLKNTATSLGSTNLYGSGLVNAEAATR

SEQ ID NO: 60648 - protein, 380 aa, Unidentified
VRSKKLWIVASTALLISVAFSSSIASAAEEAKEKYLIGFNEQEAVSEFVEQVEANDEVAILSEEEEVEIELLHEFETIPVLSVELSPEDVDALELDPAISYIEEDAEVTTMAQSVPWGISRVQAPAAHNRGLTGSGVKVAVLDTGISTHPDLNIRGGASFVPGEPSTQDGNGHGTHVAGTIAALNNSIGVLGVAPSAELYAVKVLGASGSGSVSSIAQGLEWAGNNGMHVAGLSLGSPSPSATLEQAVNSATSRGVLVVAASGNSGAGSISYPARYANAMAVGATDQNNNRASFSQYGAGLDIVAPGVNVQSTYPGSTYASLNGTSMATPHVAGAAALVKQKNPSWSNVQIRNHLKNTATSLGSTNLYGSGLVNAEAATR

SEQ ID NO: 60649 - protein, 380 aa, Unidentified
VRSKKLWIVASTALLISVAFSSSIASAAEEAKEKYLIGFNEQEAVSEFVEQVEANDEVAILSEEEEVEIELLHEFETIPVLSVELSPEDVDALELDPAISYIEEDAEVTTMAQSVPWGISRVQAPAAHNRGLTGSGVKVAVLDTGISTHPDLNIRGGASFVPGEPSTQDGNGHGTHVAGTIAALNNSIGVLGVAPSAELYAVKVLGASGSHSVSSIAQGLEWAGNNGMHVANLSLGSPSPSATLEQAVNSATSRGVLVVAASGNSGAGSISYPARYANAMAVGATDQNNNRASFSQYGAGLDIVAPGVNVQSTYPGSTYASLNGTSMATPHVAGAAALVKQKNPSWSNVQIRNHLKNTATSLGSTNLYGSGLVNAEAATR

SEQ ID NO: 60650 - protein, 380 aa, Unidentified
VRSKKLWIVASTALLISVAFSSSIASAAEEAKEKYLIGFNEQEAVSEFVEQVEANDEVAILSEEEEVEIELLHEFETIPVLSVELSPEDVDALELDPAISYIEEDAEVTTMAQSVPWGISRVQAPAAHNRGLTGSGVKVAVLDTGISTHPDLNIRGGASFVPGEPSTQDGNGHGTHVAGTIAALNNSIGVLGVAPSAELYAVKVLGASGSGSVSSIAMGLEWAGNNGMHVANLSLGSPSPSATLEQAVNSATSRGVLVVAASGNSGAGSISYPARYANAMAVGATDQNNNRASFSQYGAGLDIVAPGVNVQSTYPGSTYASLNGTSMATPHVAGAAALVKQKNPSWSNVQIRNHLKNTATSLGSTNLYGSGLVNAEAATR

SEQ ID NO: 60651 - protein, 380 aa, Unidentified
VRSKKLWIVASTALLISVAFSSSIASAAEEAKEKYLIGFNEQEAVSEFVEQVEANDEVAILSEEEEVEIELLHEFETIPVLSVELSPEDVDALELDPAISYIEEDAEVTTMAQSVPWGISRVQAPAAHNRGLTGSGVKVAVLDTGISTHPDLNIRGGASFVPGEPSTQDGNGHGTHVAGTIAALNNSIGVLGVAPSAELYAVKVLGASGSGSVSSIAQGLEWAGNNGMHVANLSLGSPSPSATLEQAVNSATSRGVLVVAASGNSGAGSISYPARYANAMAVGATDQNNNRASFSQYGAGLDIVAPGVNVQSTYPGSTYASLNGTSMATPHVAGAAALVKQKNPSWSNVQIRNHLKNTATSLGSTNLFGSGLVNAEAATR

SEQ ID NO: 60652 - protein, 380 aa, Unidentified
VRSKKLWIVASTALLISVAFSSSIASAAEEAKEKYLIGFNEQEAVSEFVEQVEANDEVAILSEEEEVEIELLHEFETIPVLSVELSPEDVDALELDPAISYIEEDAEVTTMAQSVPWGISRVQAPAAHNRGLTGSGVKVAVLDTGISTHPDLNIRGGASFVPGEPSTQDGNGHGTHVAGTIAAFNNSIGVLGVAPSAELYAVKVLGASGSGSVSSIAQGLEWAGNNGMHVANLSLGSPSPSATLEQAVNSATSRGVLVVAASGNSGAGSISYPARYANAMAVGATDQNNNRASFSQYGAGLDIVAPGVNVQSTYPGSTYASLNGTSMATPHVAGAAALVKQKNPSWSNVQIRNHLKNTATSLGSTNLYGSGLVNAEAATR

SEQ ID NO: 60653 - protein, 380 aa, Unidentified
VRSKKLWIVASTALLISVAFSSSIASAAEEAKEKYLIGFNEQEAVSEFVEQVEANDEVAILSEEEEVEIELLHEFETIPVLSVELSPEDVDALELDPAISYIEEDAEVTTMAQSVPWGISRVQAPAAHNRGLTGSGVKVAVLDTGISTHPDLNIRGGASFVPGEPSTQDGNGHGTHVAGTIAALNNSIGVLGVAPSAELYAVKVLGASGSGSVSSIAQGLEWAGNNGMHVANLSLGSPSPSATLEQAVNSATSRGVLVVAASGNSGAGSIDYPARYANAMAVGATDQNNNRASFSQYGAGLDIVAPGVNVQSTYPGSTYASLNGTSMATPHVAGAAALVKQKNPSWSNVQIRNHLKNTATSLGSTNLYGSGLVNAEAATR

SEQ ID NO: 60654 - protein, 380 aa, Unidentified
VRSKKLWIVASTALLISVAFSSSIASAAEEAKEKYLIGFNEQEAVSEFVEQVEANDEVAILSEEEEVEIELLHEFETIPVLSVELSPEDVDALELDPAISYIEEDAEVTTMAQSVPWGISRVQAPAAHNRGLTGSGVKVAVLDTGISTHPDLNIRGGASFVPGEPSTQDGNGHGTHVAGTIAALNNSIGVLGVAPSAELYAVKVLGASGSGSVSSIAQGLEWAGNNGMHVANLSLGSPSPSATLEQAVNSATSRGVLVVAASGNSGAGSISYPARYANAMAVGATDQNNNRASFSQYGAGLDIVAPGVNVQSTYPGSTYDSLNGTSMATPHVAGAAALVKQKNPSWSNVQIRNHLKNTATSLGSTNLYGSGLVNAEAATR

SEQ ID NO: 60655 - protein, 380 aa, Unidentified
VRSKKLWIVASTALLISVAFSSSIASAAEEAKEKYLIGFNEQEAVSEFVEQVEANDEVAILSEEEEVEIELLHEFETIPVLSVELSPEDVDALELDPAISYIEEDAEVTTMAQSVPWGISRVQAPAAHNRGLTGSGVKVAVLDTGISTHPDLNIRGGASFVPGEPSTQDGNGHGTHVAGTIAALNNSIGVLGVAPSAELYAVKVLGASGSTSVSSIAQGLEWAGNNGMHVANLSLGSPSPSATLEQAVNSATSRGVLVVAASGNSGAGSISYPARYANAMAVGATDQNNNRASFSQYGAGLDIVAPGVNVQSTYPGSTYASLNGTSMATPHVAGAAALVKQKNPSWSNVQIRNHLKNTATSLGSTNLYGSGLVNAEAATR

SEQ ID NO: 60656 - protein, 380 aa, Unidentified
VRSKKLWIVASTALLISVAFSSSIASAAEEAKEKYLIGFNEQEAVSEFVEQVEANDEVAILSEEEEVEIELLHEFETIPVLSVELSPEDVDALELDPAISYIEEDAEVTTMAQSVPWGISRVQAPAAHNRGLTGSGVKVAVLDTGISTHPDLNIRGGASFVPGEPSTQDGNHHGTHVAGTIAALNNSIGVLGVAPSAELYAVKVLGASGSGSVSSIAQGLEWAGNNGMHVANLSLGSPSPSATLEQAVNSATSRGVLVVAASGNSGAGSISYPARYANAMAVGATDQNNNRASFSQYGAGLDIVAPGVNVQSTYPGSTYASLNGTSMATPHVAGAAALVKQKNPSWSNVQIRNHLKNTATSLGSTNLYGSGLVNAEAATR

SEQ ID NO: 60657 - protein, 380 aa, Unidentified
VRSKKLWIVASTALLISVAFSSSIASAAEEAKEKYLIGFNEQEAVSEFVEQVEANDEVAILSEEEEVEIELLHEFETIPVLSVELSPEDVDALELDPAISYIEEDAEVTTMAQSVPWGISRVQAPAAHNRGLTGSGVKVAVLDTGISTHPDLNIRGGASFVPGEPSTQDGNGHGTHVAGTIAALNNSIGVLGVAPSAELYAVKVLGAPGSGSVSSIAQGLEWAGNNGMHVANLSLGSPSPSATLEQAVNSATSRGVLVVAASGNSGAGSISYPARYANAMAVGATDQNNNRASFSQYGAGLDIVAPGVNVQSTYPGSTYASLNGTSMATPHVAGAAALVKQKNPSWSNVQIRNHLKNTATSLGSTNLYGSGLVNAEAATR

SEQ ID NO: 60658 - protein, 380 aa, Unidentified
VRSKKLWIVASTALLISVAFSSSIASAAEEAKEKYLIGFNEQEAVSEFVEQVEANDEVAILSEEEEVEIELLHEFETIPVLSVELSPEDVDALELDPAISYIEEDAEVTTMAQSVPWGISRVQAPAAHNRGLTGSGVKVAVLDTGISTHPDLNIRGGASFVPGEPSTQDGNGHGTHVAGTIAALNNSIGVLGVAPSAELYAVKVLGASGSGSESSIAQGLEWAGNNGMHVANLSLGSPSPSATLEQAVNSATSRGVLVVAASGNSGAGSISYPARYANAMAVGATDQNNNRASFSQYGAGLDIVAPGVNVQSTYPGSTYASLNGTSMATPHVAGAAALVKQKNPSWSNVQIRNHLKNTATSLGSTNLYGSGLVNAEAATR

SEQ ID NO: 60659 - protein, 380 aa, Unidentified
VRSKKLWIVASTALLISVAFSSSIASAAEEAKEKYLIGFNEQEAVSEFVEQVEANDEVAILSEEEEVEIELLHEFETIPVLSVELSPEDVDALELDPAISYIEEDAEVTTMAQSVPWGISRVQAPAAHNRGLTGSGVKVAVLDTGISTHPDLNIRGGASFVPGEPSTQDGNGHGTHVAGTIAALNNSIGVLGVAPSAELYAVKVLGASGSGSVSSIAQGLEWAGNNGMHVANLSLGSPSPSATLEQAVNSATSRGVLVVAASGNSGAGSISYPARYANAMAVGATDQNNNRASFSQYGAGLDIVAPGVNVQSTYPGSTYASLNGTSMATPHVAGAAALVKQKNPSWSNVQIRNHLKNTATSLGSTNLYGSGLVNAVAATR

SEQ ID NO: 60660 - protein, 380 aa, Unidentified
VRSKKLWIVASTALLISVAFSSSIASAAEEAKEKYLIGFNEQEAVSEFVEQVEANDEVAILSEEEEVEIELLHEFETIPVLSVELSPEDVDALELDPAISYIEEDAEVTTMAQSVPWGISRVQAPAAHNRGLTGSGVKVAVLDTGISTHPDLNIRGGASFVPGEPSTQDGNGHGTHVAGGIAALNNSIGVLGVAPSAELYAVKVLGASGSGSVSSIAQGLEWAGNNGMHVANLSLGSPSPSATLEQAVNSATSRGVLVVAASGNSGAGSISYPARYANAMAVGATDQNNNRASFSQYGAGLDIVAPGVNVQSTYPGSTYASLNGTSMATPHVAGAAALVKQKNPSWSNVQIRNHLKNTATSLGSTNLYGSGLVNAEAATR

SEQ ID NO: 60661 - protein, 380 aa, Unidentified
VRSKKLWIVASTALLISVAFSSSIASAAEEAKEKYLIGFNEQEAVSEFVEQVEANDEVAILSEEEEVEIELLHEFETIPVLSVELSPEDVDALELDPAISYIEEDAEVTTMAQSVPWGISRVQAPAAHNRGLTGSGVKVAVLDTGISTHPDLNIRGGASFVPGEPSTQDGNGHGTHVAGTIAALNNSIGVLGVAPSAELYAVKVLGASGSGSVSSIAQGLEWAGNNGMHVANLSLGSPSPSATLEQAVNSATSRGVLVVAASGNSGAGSISYPARYANAMAVGATDQNNNRASFSQYGAGLDIVAPGVNVQSTSPGSTYASLNGTSMATPHVAGAAALVKQKNPSWSNVQIRNHLKNTATSLGSTNLYGSGLVNAEAATR

SEQ ID NO: 60662 - protein, 380 aa, Unidentified
VRSKKLWIVASTALLISVAFSSSIASAAEEAKEKYLIGFNEQEAVSEFVEQVEANDEVAILSEEEEVEIELLHEFETIPVLSVELSPEDVDALELDPAISYIEEDAEVTTMAMSVPWGISRVQAPAAHNRGLTGSGVKVAVLDTGISTHPDLNIRGGASFVPGEPSTQDGNGHGTHVAGTIAALNNSIGVLGVAPSAELYAVKVLGASGSGSVSSIAQGLEWAGNNGMHVANLSLGSPSPSATLEQAVNSATSRGVLVVAASGNSGAGSISYPARYANAMAVGATDQNNNRASFSQYGAGLDIVAPGVNVQSTYPGSTYASLNGTSMATPHVAGAAALVKQKNPSWSNVQIRNHLKNTATSLGSTNLYGSGLVNAEAATR

SEQ ID NO: 60663 - protein, 380 aa, Unidentified
VRSKKLWIVASTALLISVAFSSSIASAAEEAKEKYLIGFNEQEAVSEFVEQVEANDEVAILSEEEEVEIELLHEFETIPVLSVELSPEDVDALELDPAISYIEEDAEVTTMAQSVPWGISRVQAPAAHNRGLTGSGVKVAVLDTGISTHPDLNIRGGASFVPGEPSTQDGNGHGTHVAGTIAALNNSIGVLGVAPSAELYAVKVLGASGSGSVSSIAQGLEWAGNNGMHVANLSLGSPSPSATLEQAVNSATSRGVLVVAASGNSGAGSISYPARYANAMAVGATDQNNNRASFSQYGAGLDIVAPGVNVQSTYPGSTYASLNGTSMATPHVAGAAALVKQKNPSWSNVQIRNHLKNRATSLGSTNLYGSGLVNAEAATR

SEQ ID NO: 60664 - protein, 380 aa, Unidentified
VRSKKLWIVASTALLISVAFSSSIASAAEEAKEKYLIGFNEQEAVSEFVEQVEANDEVAILSEEEEVEIELLHEFETIPVLSVELSPEDVDALELDPAISYIEEDAEVTTMAQSVPWGISRVQAPAAHNRGLTGSGVKVAVLDTGISTHPDLNIRGGASFVPGEPSTQDGNGHGTHVAGTIAALNNSIGVLGVAPSALLYAVKVLGASGSGSVSSIAQGLEWAGNNGMHVANLSLGSPSPSATLEQAVNSATSRGVLVVAASGNSGAGSISYPARYANAMAVGATDQNNNRASFSQYGAGLDIVAPGVNVQSTYPGSTYASLNGTSMATPHVAGAAALVKQKNPSWSNVQIRNHLKNTATSLGSTNLYGSGLVNAEAATR

SEQ ID NO: 60665 - protein, 380 aa, Unidentified
VRSKKLWIVASTALLISVAFSSSIASAAEEAKEKYLIGFNEQEAVSEFVEQVEANDEVAILSEEEEVEIELLHEFETIPVLSVELSPEDVDALELDPAISYIEEDAEVTTMAQSVPWGISRVQAPAAHNRGLTGSGVKVAVLDTGISTHPDLDIRGGASFVPGEPSTQDGNGHGTHVAGTIAALNNSIGVLGVAPSAELYAVKVLGASGSGSVSSIAQGLEWAGNNGMHVANLSLGSPSPSATLEQAVNSATSRGVLVVAASGNSGAGSISYPARYANAMAVGATDQNNNRASFSQYGAGLDIVAPGVNVQSTYPGSTYASLNGTSMATPHVAGAAALVKQKNPSWSNVQIRNHLKNTATSLGSTNLYGSGLVNAEAATR

SEQ ID NO: 60666 - protein, 380 aa, Unidentified
VRSKKLWIVASTALLISVAFSSSIASAAEEAKEKYLIGFNEQEAVSEFVEQVEANDEVAILSEEEEVEIELLHEFETIPVLSVELSPEDVDALELDPAISYIEEDAEVTTMAQSVPWGISRVQAPAAHNRGLTGSGVKVAVLDTGISTHPDLFIRGGASFVPGEPSTQDGNGHGTHVAGTIAALNNSIGVLGVAPSAELYAVKVLGASGSGSVSSIAQGLEWAGNNGMHVANLSLGSPSPSATLEQAVNSATSRGVLVVAASGNSGAGSISYPARYANAMAVGATDQNNNRASFSQYGAGLDIVAPGVNVQSTYPGSTYASLNGTSMATPHVAGAAALVKQKNPSWSNVQIRNHLKNTATSLGSTNLYGSGLVNAEAATR

SEQ ID NO: 60667 - protein, 380 aa, Unidentified
VRSKKLWIVASTALLISVAFSSSIASAAEEAKEKYLIGFNEQEAVSEFVEQVEANDEVAILSEEEEVEIELLHEFETIPVLSVELSPEDVDALELDPAISYIEEDAEVTTMAQSVPWGISRVQAPAAHNRGLTGSGVKVAVLDTGMSTHPDLNIRGGASFVPGEPSTQDGNGHGTHVAGTIAALNNSIGVLGVAPSAELYAVKVLGASGSGSVSSIAQGLEWAGNNGMHVANLSLGSPSPSATLEQAVNSATSRGVLVVAASGNSGAGSISYPARYANAMAVGATDQNNNRASFSQYGAGLDIVAPGVNVQSTYPGSTYASLNGTSMATPHVAGAAALVKQKNPSWSNVQIRNHLKNTATSLGSTNLYGSGLVNAEAATR

SEQ ID NO: 60668 - protein, 380 aa, Unidentified
VRSKKLWIVASTALLISVAFSSSIASAAEEAKEKYLIGFNEQEAVSEFVEQVEANDEVAILSEEEEVEIELLHEFETIPVLSVELSPEDVDALELDPAISYIEEDAEVTTMAQSVPWGISRVQAPAAHNRGLTGSGVKVAVLDTGISTHPDLNIRGGASFVPGEPSTQDGNGHGTHVAGTIAALNNSWGVLGVAPSAELYAVKVLGASGSGSVSSIAQGLEWAGNNGMHVANLSLGSPSPSATLEQAVNSATSRGVLVVAASGNSGAGSISYPARYANAMAVGATDQNNNRASFSQYGAGLDIVAPGVNVQSTYPGSTYASLNGTSMATPHVAGAAALVKQKNPSWSNVQIRNHLKNTATSLGSTNLYGSGLVNAEAATR

SEQ ID NO: 60669 - protein, 380 aa, Unidentified
VRSKKLWIVASTALLISVAFSSSIASAAEEAKEKYLIGFNEQEAVSEFVEQVEANDEVAILSEEEEVEIELLHEFETIPVLSVELSPEDVDALELDPAISYIEEDAEVTTMAQSVPWGISRVQAPAAHNRGLTGSGVKVAVLDTGISTHPDLNIRGGASFVPGEPSTQDGNGHGTHVAGTIAALNNSIGVLGVAPSAELYAVKVLGASGSGSVSSIAQGLEWAGNNGMRVANLSLGSPSPSATLEQAVNSATSRGVLVVAASGNSGAGSISYPARYANAMAVGATDQNNNRASFSQYGAGLDIVAPGVNVQSTYPGSTYASLNGTSMATPHVAGAAALVKQKNPSWSNVQIRNHLKNTATSLGSTNLYGSGLVNAEAATR

SEQ ID NO: 60670 - protein, 380 aa, Unidentified
VRSKKLWIVASTALLISVAFSSSIASAAEEAKEKYLIGFNEQEAVSEFVEQVEANDEVAILSEEEEVEIELLHEFETIPVLSVELSPEDVDALELDPAISYIEEDAEVTTMAQSVPWGISRVQAPAAHNRGLTGSGVKVAVLDTGISTHPDLNIRGGASFVPGEPSTQDGNGHGTHVAGTIAALNNSIGVLGVAPSAELYAVKVLGASGSGSVSSIAQGLEWAGNNGMHVANLSLGSPSPSATLEQAVNSATSRGVLVVAASGNSGAGSISYPARYANAMACGATDQNNNRASFSQYGAGLDIVAPGVNVQSTYPGSTYASLNGTSMATPHVAGAAALVKQKNPSWSNVQIRNHLKNTATSLGSTNLYGSGLVNAEAATR

SEQ ID NO: 60671 - protein, 380 aa, Unidentified
VRSKKLWIVASTALLISVAFSSSIASAAEEAKEKYLIGFNEQEAVSEFVEQVEANDEVAILSEEEEVEIELLHEFETIPVLSVELSPEDVDALELDPAISYIEEDAEVTTMAQSVPWGISRVQAPAAHNRGLTGSGVKVAVLDTGISTHNDLNIRGGASFVPGEPSTQDGNGHGTHVAGTIAALNNSIGVLGVAPSAELYAVKVLGASGSGSVSSIAQGLEWAGNNGMHVANLSLGSPSPSATLEQAVNSATSRGVLVVAASGNSGAGSISYPARYANAMAVGATDQNNNRASFSQYGAGLDIVAPGVNVQSTYPGSTYASLNGTSMATPHVAGAAALVKQKNPSWSNVQIRNHLKNTATSLGSTNLYGSGLVNAEAATR

SEQ ID NO: 60672 - protein, 380 aa, Unidentified
VRSKKLWIVASTALLISVAFSSSIASAAEEAKEKYLIGFNEQEAVSEFVEQVEANDEVAILSEEEEVEIELLHEFETIPVLSVELSPEDVDALELDPAISYIEEDAEVTTMAQSVPWGISRVQAPAAHNRGLTGSGVVVAVLDTGISTHPDLNIRGGASFVPGEPSTQDGNGHGTHVAGTIAALNNSIGVLGVAPSAELYAVKVLGASGSGSVSSIAQGLEWAGNNGMHVANLSLGSPSPSATLEQAVNSATSRGVLVVAASGNSGAGSISYPARYANAMAVGATDQNNNRASFSQYGAGLDIVAPGVNVQSTYPGSTYASLNGTSMATPHVAGAAALVKQKNPSWSNVQIRNHLKNTATSLGSTNLYGSGLVNAEAATR

SEQ ID NO: 60673 - protein, 380 aa, Unidentified
VRSKKLWIVASTALLISVAFSSSIASAAEEAKEKYLIGFNEQEAVSEFVEQVEANDEVAILSEEEEVEIELLHEFETIPVLSVELSPEDVDALELDPAISYIEEDAEVTTMAQSVPWGISRVQAPAAHNRGLTGSGVKVAVLDTGISTHPDLNIRGGASFHPGEPSTQDGNGHGTHVAGTIAALNNSIGVLGVAPSAELYAVKVLGASGSGSVSSIAQGLEWAGNNGMHVANLSLGSPSPSATLEQAVNSATSRGVLVVAASGNSGAGSISYPARYANAMAVGATDQNNNRASFSQYGAGLDIVAPGVNVQSTYPGSTYASLNGTSMATPHVAGAAALVKQKNPSWSNVQIRNHLKNTATSLGSTNLYGSGLVNAEAATR

SEQ ID NO: 60674 - protein, 380 aa, Unidentified
VRSKKLWIVASTALLISVAFSSSIASAAEEAKEKYLIGFNEQEAVSEFVEQVEANDEVAILSEEEEVEIELLHEFETIPVLSVELSPEDVDALELDPAISYIEEDAEVTTMAQSVPWGISRVQAPAAHNRGLTGSGVKEAVLDTGISTHPDLNIRGGASFVPGEPSTQDGNGHGTHVAGTIAALNNSIGVLGVAPSAELYAVKVLGASGSGSVSSIAQGLEWAGNNGMHVANLSLGSPSPSATLEQAVNSATSRGVLVVAASGNSGAGSISYPARYANAMAVGATDQNNNRASFSQYGAGLDIVAPGVNVQSTYPGSTYASLNGTSMATPHVAGAAALVKQKNPSWSNVQIRNHLKNTATSLGSTNLYGSGLVNAEAATR

SEQ ID NO: 60675 - protein, 380 aa, Unidentified
VRSKKLWIVASTALLISVAFSSSIASAAEEAKEKYLIGFNEQEAVSEFVEQVEANDEVAILSEEEEVEIELLHEFETIPVLSVELSPEDVDALELDPAISYIEEDAEVTTMAQSVPWGISRVQAPAAHNRGLTGSGVKVAVLDTGISTHPDLNIRGGASFVPGEPSTQDGNGHGTHVAGTIAALNNSIGVLGVAPSAVLYAVKVLGASGSGSVSSIAQGLEWAGNNGMHVANLSLGSPSPSATLEQAVNSATSRGVLVVAASGNSGAGSISYPARYANAMAVGATDQNNNRASFSQYGAGLDIVAPGVNVQSTYPGSTYASLNGTSMATPHVAGAAALVKQKNPSWSNVQIRNHLKNTATSLGSTNLYGSGLVNAEAATR

SEQ ID NO: 60676 - protein, 380 aa, Unidentified
VRSKKLWIVASTALLISVAFSSSIASAAEEAKEKYLIGFNEQEAVSEFVEQVEANDEVAILSEEEEVEIELLHEFETIPVLSVELSPEDVDALELDPAISYIEEDAEVTTMAQSVPWGISRVQAPAAHNRGLTGSGVKVAVLDTGISTHPDLNIRGGASFVPGEPSTQDGNGHGTHVAGTIAALNNSIGVLGVAPSAELYAVKVLGASGSGSVSSIAQGLEWAGNNGMHVANLSLGSPSPSATLEQAVNSATSRGVLVVAASGNSGAGSISYPARYANAMAVGATDQNNNRASFSQYGAGLDIVAPGVNVQSTYPGSTYAALNGTSMATPHVAGAAALVKQKNPSWSNVQIRNHLKNTATSLGSTNLYGSGLVNAEAATR

SEQ ID NO: 60677 - protein, 380 aa, Unidentified
VRSKKLWIVASTALLISVAFSSSIASAAEEAKEKYLIGFNEQEAVSEFVEQVEANDEVAILSEEEEVEIELLHEFETIPVLSVELSPEDVDALELDPAISYIEEDAEVTTMAQSVPWGISRVQAPAAHNRFLTGSGVKVAVLDTGISTHPDLNIRGGASFVPGEPSTQDGNGHGTHVAGTIAALNNSIGVLGVAPSAELYAVKVLGASGSGSVSSIAQGLEWAGNNGMHVANLSLGSPSPSATLEQAVNSATSRGVLVVAASGNSGAGSISYPARYANAMAVGATDQNNNRASFSQYGAGLDIVAPGVNVQSTYPGSTYASLNGTSMATPHVAGAAALVKQKNPSWSNVQIRNHLKNTATSLGSTNLYGSGLVNAEAATR

SEQ ID NO: 60678 - protein, 380 aa, Unidentified
VRSKKLWIVASTALLISVAFSSSIASAAEEAKEKYLIGFNEQEAVSEFVEQVEANDEVAILSEEEEVEIELLHEFETIPVLSVELSPEDVDALELDPAISYIEEDAEVTTMAQSVPWGISRVQAPAAHNRGLTGSGVKVAVLDTGISTHPDLNIRGGASFVPGEPSTQDGNGHGTHVAGTIAALNNSIGVLGVAPSAELYAVKVLGASGSGSVSSMAQGLEWAGNNGMHVANLSLGSPSPSATLEQAVNSATSRGVLVVAASGNSGAGSISYPARYANAMAVGATDQNNNRASFSQYGAGLDIVAPGVNVQSTYPGSTYASLNGTSMATPHVAGAAALVKQKNPSWSNVQIRNHLKNTATSLGSTNLYGSGLVNAEAATR

SEQ ID NO: 60679 - protein, 380 aa, Unidentified
VRSKKLWIVASTALLISVAFSSSIASAAEEAKEKYLIGFNEQEAVSEFVEQVEANDEVAILSEEEEVEIELLHEFETIPVLSVELSPEDVDALELDPAISYIEEDAEVTTMAQSVPWGISRVQAPAAHNRGLTGSGVKVAVLDTGISTHPDLNIRGGASFVPGEPSTQDGNGHGTHVAGTIAALNNSIGVLGVAPSAELYAVKVLGASGSGSVSAIAQGLEWAGNNGMHVANLSLGSPSPSATLEQAVNSATSRGVLVVAASGNSGAGSISYPARYANAMAVGATDQNNNRASFSQYGAGLDIVAPGVNVQSTYPGSTYASLNGTSMATPHVAGAAALVKQKNPSWSNVQIRNHLKNTATSLGSTNLYGSGLVNAEAATR

SEQ ID NO: 60680 - protein, 380 aa, Unidentified
VRSKKLWIVASTALLISVAFSSSIASAAEEAKEKYLIGFNEQEAVSEFVEQVEANDEVAILSEEEEVEIELLHEFETIPVLSVELSPEDVDALELDPAISYIEEDAEVTTMAQSVPWGISRVQAPAAHNRGLTGSGVKVAVLDTGISTHPDLNIRGGASFVPGEPSTQDGNGHGTHVAGTIAALNNSIGVLGVAPSAELYAVKVLGASGSGSVSSIAQGLEWAGNNGMHVAELSLGSPSPSATLEQAVNSATSRGVLVVAASGNSGAGSISYPARYANAMAVGATDQNNNRASFSQYGAGLDIVAPGVNVQSTYPGSTYASLNGTSMATPHVAGAAALVKQKNPSWSNVQIRNHLKNTATSLGSTNLYGSGLVNAEAATR

SEQ ID NO: 60681 - protein, 380 aa, Unidentified
VRSKKLWIVASTALLISVAFSSSIASAAEEAKEKYLIGFNEQEAYSEFVEQVEANDEVAILSEEEEVEIELLHEFETIPVLSVELSPEDVDALELDPAISYIEEDAEVTTMAQSVPWGISRVQAPAAHNRGLTGSGVKVAVLDTGISTHPDLNIRGGASFVPGEPSTQDGNGHGTHVAGTIAALNNSIGVLGVAPSAELYAVKVLGASGSGSVSSIAQGLEWAGNNGMHVANLSLGSPSPSATLEQAVNSATSRGVLVVAASGNSGAGSISYPARYANAMAVGATDQNNNRASFSQYGAGLDIVAPGVNVQSTYPGSTYASLNGTSMATPHVAGAAALVKQKNPSWSNVQIRNHLKNTATSLGSTNLYGSGLVNAEAATR

SEQ ID NO: 60682 - protein, 380 aa, Unidentified
VRSKKLWIVASTALLISVAFSSSIASAAEEAKEKYLIGFNEQEAVSEFVEQVEANDEVAILSEEEEVEIELLHEFETIPVLSVELSPEDVDALELDPAISYIEEDAEVTTMAQSVPWGISRVQAPAAHNRGLTGSGVKVAVLDTGISTHPDLNIRGGASFVPGEPSTQDGNGHGTHVAGTIAALNNSIGVLGVAPSAHLYAVKVLGASGSGSVSSIAQGLEWAGNNGMHVANLSLGSPSPSATLEQAVNSATSRGVLVVAASGNSGAGSISYPARYANAMAVGATDQNNNRASFSQYGAGLDIVAPGVNVQSTYPGSTYASLNGTSMATPHVAGAAALVKQKNPSWSNVQIRNHLKNTATSLGSTNLYGSGLVNAEAATR

SEQ ID NO: 60683 - protein, 380 aa, Unidentified
VRSKKLWIVASTALLISVAFSSSIASAAEEAKEKYLIGFNEQEAVSEFVEQVEANDEVAILSEEEEVEIELLHEFETIPVLSVELSPEDVDALELDPAISYIEEDAEVTTMAQSVPWGISRVQAPAAHNRGLTGSGVKVAVLDTGISTHPDLNIRGGASFVPGEPSTQDGNGHGTHVAGTIAALNNSIGVLGVAPSAELYAVKVLGASGSGSVSSIAQGLEWAGNNGMHVANLSLGSPSPSATLEQAVNSATSRGVLVVAASGNSGAGSISYPARYANAMAVGATDQNNNRASFSQYGAGLDIVAPGVNVQSTYPGSTYASLNGTSMAGPHVAGAAALVKQKNPSWSNVQIRNHLKNTATSLGSTNLYGSGLVNAEAATR

SEQ ID NO: 60684 - protein, 380 aa, Unidentified
VRSKKLWIVASTALLISVAFSSSIASAAEEAKEKYLIGFNEQEAVSEFVEQVEANDEVAILSEEEEVEIELLHEFETIPVLSVELSPEDVDALELDPAISYIEEDAEVTTMAQSVPWGISRVQAPAAHNRGLTGSGVKVAVLDTGISTHPDLNIRGGASFVPGEPSTQDGNGHGTHVAGTIAALNNSIGVLGVAPSAELYAVKVLGASGSGSVSSIAQGLEWAGNNGMHVANLSLGSPSPSATLEQAVNSATSRGVLVVAASGNSGAGSISYPARYANAMAVGATDQNNNRASFSQYGAGLDIVAPGVNVQSTYPGSTYASLDGTSMATPHVAGAAALVKQKNPSWSNVQIRNHLKNTATSLGSTNLYGSGLVNAEAATR

SEQ ID NO: 60685 - protein, 380 aa, Unidentified
VRSKKLWIVASTALLISVAFSSSIASAAEEAKEKYLIGFNEQEAVSEFVEQVEANDEVAILSEEEEVEIELLHEFETIPVLSVELSPEDVDALELDPAISYIEEDAEVTTMAQSVPWGISRVQAPAAHNRGLTGSGVKVAVLDTGISTHPDLNIRGGASFVPGEPSTQDGNGHGTHVAGTIAALNNSIGVLGVAPSAELYAVKVLGAMGSGSVSSIAQGLEWAGNNGMHVANLSLGSPSPSATLEQAVNSATSRGVLVVAASGNSGAGSISYPARYANAMAVGATDQNNNRASFSQYGAGLDIVAPGVNVQSTYPGSTYASLNGTSMATPHVAGAAALVKQKNPSWSNVQIRNHLKNTATSLGSTNLYGSGLVNAEAATR

SEQ ID NO: 60686 - protein, 380 aa, Unidentified
VRSKKLWIVASTALLISVAFSSSIASAAEEAKEKYLIGFNEQEAVSEFVEQVEANDEVAILSEEEEVEIELLHEFETIPVLSVELSPEDVDALELDPAISYIEEDAEVTTMAQSVPWGISRVQAPAAHNRGLTGSGVKVAVLDTGISTHPDLNIRGGASFVPGEPSTQDGNGHGTHVAGTIAALNNSIGVLGVAPSAELYAVKVLGASGFGSVSSIAQGLEWAGNNGMHVANLSLGSPSPSATLEQAVNSATSRGVLVVAASGNSGAGSISYPARYANAMAVGATDQNNNRASFSQYGAGLDIVAPGVNVQSTYPGSTYASLNGTSMATPHVAGAAALVKQKNPSWSNVQIRNHLKNTATSLGSTNLYGSGLVNAEAATR

SEQ ID NO: 60687 - protein, 380 aa, Unidentified
VRSKKLWIVASTALLISVAFSSSIASAAEEAKEKYLIGFNEQEAVSEFVEQVEANDEVAILSEEEEVEIELLHEFETIPVLSVELSPEDVDALELDPAISYIEEDAEVTTMAQSVPWGISRVQAPAAHNRGLTGSGVKVAVLDTGISTHPDLNIRGGASFVPGEPSTQDGNGHGTHVAGTIAALNNSIGVLGVAPSAFLYAVKVLGASGSGSVSSIAQGLEWAGNNGMHVANLSLGSPSPSATLEQAVNSATSRGVLVVAASGNSGAGSISYPARYANAMAVGATDQNNNRASFSQYGAGLDIVAPGVNVQSTYPGSTYASLNGTSMATPHVAGAAALVKQKNPSWSNVQIRNHLKNTATSLGSTNLYGSGLVNAEAATR

SEQ ID NO: 60688 - protein, 380 aa, Unidentified
VRSKKLWIVASTALLISVAFSSSIASAAEEAKEKYLIGFNEQEAVSEFVEQVEANDEVAILSEEEEVEIELLHEFETIPVLSVELSPEDVDALELDPAISYIEEDAEVTTMAQSVPWGISRVQAPAAHNRGLTGSGVKVAVLDTGISTHPDLNIRGGASFVPGEPSTQDGNGHGTHVAGTIAALNNSIGVLGVAPSAELYAVKVLGASGSGSVSSIAQGLEWAGNNGMHVANLSLGSPSPSATLEQAVNSATSRGVLVVAASGNSGAGSISYPARYANAMAVGATDQNNNRASFSQYGAGLDIVAPGVNVQSTYPGSTYASLNGTSMATPHVAGAAALVFQKNPSWSNVQIRNHLKNTATSLGSTNLYGSGLVNAEAATR

SEQ ID NO: 60689 - protein, 380 aa, Unidentified
VRSKKLWIVASTALLISVAFSSSIASAAEEAKEKYLIGFNEQEAVSEFVEQVEANDEVAILSEEEEVEIELLHEFETIPVLSVELSPEDVDALELDPAISYIEEDAEVTTMAQSVPWGISRVQAPRAHNRGLTGSGVKVAVLDTGISTHPDLNIRGGASFVPGEPSTQDGNGHGTHVAGTIAALNNSIGVLGVAPSAELYAVKVLGASGSGSVSSIAQGLEWAGNNGMHVANLSLGSPSPSATLEQAVNSATSRGVLVVAASGNSGAGSISYPARYANAMAVGATDQNNNRASFSQYGAGLDIVAPGVNVQSTYPGSTYASLNGTSMATPHVAGAAALVKQKNPSWSNVQIRNHLKNTATSLGSTNLYGSGLVNAEAATR

SEQ ID NO: 60690 - protein, 380 aa, Unidentified
VRSKKLWIVASTALLISVAFSSSIASAAEEAKEKYLIGFNEQEAVSEFVEQVEANDEVAILSEEEEVEIELLHEFETIPVLSVELSPEDVDALELDPAISYIEEDAEVTTMAQSVPWGISRVQAPAAHNRGLTGSGVKVAVLDTGISTHPDLNIRGGASFVEGEPSTQDGNGHGTHVAGTIAALNNSIGVLGVAPSAELYAVKVLGASGSGSVSSIAQGLEWAGNNGMHVANLSLGSPSPSATLEQAVNSATSRGVLVVAASGNSGAGSISYPARYANAMAVGATDQNNNRASFSQYGAGLDIVAPGVNVQSTYPGSTYASLNGTSMATPHVAGAAALVKQKNPSWSNVQIRNHLKNTATSLGSTNLYGSGLVNAEAATR

SEQ ID NO: 60691 - protein, 380 aa, Unidentified
VRSKKLWIVASTALLISVAFSSSIASAAEEAKEKYLIGFNEQEAVSEFVEQVEANDEVAILSEEEEVEIELLHEFETIPVLSVELSPEDVDALELDPAISYIEEDAEVTTMAQSVPWGISRVQAPAAHNRGLTGSGVKVAVLDTGISTHPDLNIRGGASFVPGEPSTQDGNGHGTHVAGTIAALNNSIGVLGVAPSAELYAVKVLGASGSGSVSSIAQGLEWAGNNGMHVANLSLGSPSPSATLEQAVNSATSRGVLVVAASGNSGAGSISYPARYANAMAVGATDQNNNRASFSQYGAGLDIVAPGVNVQSTYPGSTYASLNGTSMATPHVAGAAALVKQKNPSWSNVQIRNHLKNTATSLGSTNLYGSGLVNAHAATR

SEQ ID NO: 60692 - protein, 380 aa, Unidentified
VRSKKLWIVASTALLISVAFSSSIASAAEEAKEKYLIGFNEQEAVSEFVEQVEANDEVAILSEEEEVEIELLHEFETIPVLSVELSPEDVDALELDPAISYIEEDAEVTTMAQSVPWGISRVQAPAAHNRGLTGSGVKVAVLDTGISTHHDLNIRGGASFVPGEPSTQDGNGHGTHVAGTIAALNNSIGVLGVAPSAELYAVKVLGASGSGSVSSIAQGLEWAGNNGMHVANLSLGSPSPSATLEQAVNSATSRGVLVVAASGNSGAGSISYPARYANAMAVGATDQNNNRASFSQYGAGLDIVAPGVNVQSTYPGSTYASLNGTSMATPHVAGAAALVKQKNPSWSNVQIRNHLKNTATSLGSTNLYGSGLVNAEAATR

SEQ ID NO: 60693 - protein, 380 aa, Unidentified
VRSKKLWIVASTALLISVAFSSSIASAAEEAKEKYLIGFNEQEAVSEFVEQVEANDEVAILSEEEEVEIELLHEFETIPVLSVELSPEDVDALELDPAISYIEEDAEVTTMAQSVPWGISRVQAPAAHNRGLTGSGVKVAVLDTGISTHPDLNIRGGASFVPGEPSTQDGNGHGTHVAGTIAALNNSIGVLGVAPSAELYAVKVLGASGSGSVSSIAQGLEWAGNNGMHVANLSLGSPSPSATLEQAVNSATSRGVLVVAASGNSGAGSISYPARYANAMAVGATDQNNNRASFSQYGAGLDIVAPGVNVQSTYPGSTYASLNGTSMATPHVAGAAALVKQKNTSWSNVQIRNHLKNTATSLGSTNLYGSGLVNAEAATR

SEQ ID NO: 60694 - protein, 380 aa, Unidentified
VRSKKLWIVASTALLISVAFSSSIASAAEEAKEKYLIGFNEQEAVSEFVEQVEANDEVAILSEEEEVEIELLHEFETIPVLSVELSPEDVDALELDPAISYIEEDAEVTTMAQSVPWGISRVQAPAAHNRGLTGSGVKVAVLDTGISTHPDLNIRGGASFVPGEPSTQDGNGHGTHVAGTIAALNNSIGVLGVAPSAELYAVKVLGASGSGSVSSIAQGLEWAGNNGMHVANLSLGSPSPSATLEQAVNSATSRGVLVVAASGNSGAGSISYPARYANAMAVGATDQNNNRASFSQYGAGLDIVAPGVNVQSTGPGSTYASLNGTSMATPHVAGAAALVKQKNPSWSNVQIRNHLKNTATSLGSTNLYGSGLVNAEAATR

SEQ ID NO: 60695 - protein, 380 aa, Unidentified
VRSKKLWIVASTALLISVAFSSSIASAAEEAKEKYLIGFNEQEAVSEFVEQVEANDEVAILSEEEEVEIELLHEFETIPVLSVELSPEDVDALELDPAISYIEEDAEVTTMAQSVPWGISRVQAPAAHNRGLTGSGVKVAVLDTGISTHPDLNIRGGASFVPGEPSTQDGNGHGTHVAGTIAALNNSIGVLGVAPSAELYAVKVLGASGSGSVSDIAQGLEWAGNNGMHVANLSLGSPSPSATLEQAVNSATSRGVLVVAASGNSGAGSISYPARYANAMAVGATDQNNNRASFSQYGAGLDIVAPGVNVQSTYPGSTYASLNGTSMATPHVAGAAALVKQKNPSWSNVQIRNHLKNTATSLGSTNLYGSGLVNAEAATR

SEQ ID NO: 60696 - protein, 380 aa, Unidentified
VRSKKLWIVASTALLISVAFSSSIASAAEEAKEKYLIGFNEQEAVSEFVEQVEANDEVAILSEEEEVEIELLHEFETIPVLSVELSPEDVDALELDPAISYIEEDAEVTTMAQSVPWGISRVQAPAAHNRGLTGSGVKVAVLDTGISTHPDLNIRGGASFVPGEPSTQDGNGHGTHVAGTIAALNNSIGVLGVAPSAELYAVKVLGASGSGSVSSIAQGLEWAGNNGMHVANLSLGSPSPSATLEQAVNSATSRGVLVVAASGNSGAGSISYPARYANAMAVGATDQNNNRASFSQYGAGLDIVAPGVNVQSTYPGSTYASLNGTSMATPHVAGACALVKQKNPSWSNVQIRNHLKNTATSLGSTNLYGSGLVNAEAATR

SEQ ID NO: 60697 - protein, 380 aa, Unidentified
VRSKKLWIVASTALLISVAFSSSIASAAEEAKEKYLIGFNEQEAVSEFVEQVEANDEVAILSEEEEVEIELLHEFETIPVLSVELSPEDVDALELDPAISYIEEDAEVTTMAQSSPWGISRVQAPAAHNRGLTGSGVKVAVLDTGISTHPDLNIRGGASFVPGEPSTQDGNGHGTHVAGTIAALNNSIGVLGVAPSAELYAVKVLGASGSGSVSSIAQGLEWAGNNGMHVANLSLGSPSPSATLEQAVNSATSRGVLVVAASGNSGAGSISYPARYANAMAVGATDQNNNRASFSQYGAGLDIVAPGVNVQSTYPGSTYASLNGTSMATPHVAGAAALVKQKNPSWSNVQIRNHLKNTATSLGSTNLYGSGLVNAEAATR

SEQ ID NO: 60698 - protein, 380 aa, Unidentified
VRSKKLWIVASTALLISVAFSSSIASAAEEAKEKYLIGFNEQEAVSEFVEQVEANDEVAILSEEEEVEIELLHEFETIPVLSVELSPEDVDALELDPAISYIEEDAEVTTMAQSVPWGISRVQAPAAHNRGLTGSGVKVAVLDTGISTHLDLNIRGGASFVPGEPSTQDGNGHGTHVAGTIAALNNSIGVLGVAPSAELYAVKVLGASGSGSVSSIAQGLEWAGNNGMHVANLSLGSPSPSATLEQAVNSATSRGVLVVAASGNSGAGSISYPARYANAMAVGATDQNNNRASFSQYGAGLDIVAPGVNVQSTYPGSTYASLNGTSMATPHVAGAAALVKQKNPSWSNVQIRNHLKNTATSLGSTNLYGSGLVNAEAATR

SEQ ID NO: 60699 - protein, 380 aa, Unidentified
VRSKKLWIVASTALLISVAFSSSIASAAEEAKEKYLIGFNEQEAVSEFVEQVEANDEVAILSEEEEVEIELLHEFETIPVLSVELSPEDVDALELDPAISYIEEDAEVTTMAQSVPWGISRVQAPAAHNRGLTGSGVKVAVLDTGISTHPDLNIRGGASFVPGEPSTQDGNGHGTHVAGTIAALNNSIGVTGVAPSAELYAVKVLGASGSGSVSSIAQGLEWAGNNGMHVANLSLGSPSPSATLEQAVNSATSRGVLVVAASGNSGAGSISYPARYANAMAVGATDQNNNRASFSQYGAGLDIVAPGVNVQSTYPGSTYASLNGTSMATPHVAGAAALVKQKNPSWSNVQIRNHLKNTATSLGSTNLYGSGLVNAEAATR

SEQ ID NO: 60700 - protein, 380 aa, Unidentified
VRSKKLWIVASTALLISVAFSSSIASAAEEAKEKYLIGFNEQEAVSEFVEQVEANDEVAILSEEEEVEIELLHEFETIPVLSVELSPEDVDALELDPAISYIEEDAEVTTMAQSVPWGISRVQAPAAHNRGLTGSGVKVAVLDTGISTHPDLNIRGGASFVPGEPSTQDGNGHGTHVAGTIAALNNSIGVLGVAPSAELYAVKVLGASGSGSVSVIAQGLEWAGNNGMHVANLSLGSPSPSATLEQAVNSATSRGVLVVAASGNSGAGSISYPARYANAMAVGATDQNNNRASFSQYGAGLDIVAPGVNVQSTYPGSTYASLNGTSMATPHVAGAAALVKQKNPSWSNVQIRNHLKNTATSLGSTNLYGSGLVNAEAATR

SEQ ID NO: 60701 - protein, 380 aa, Unidentified
VRSKKLWIVASTALLISVAFSSSIASAAEEAKEKYLIGFNEQEAVSEFVEQVEANDEVAILSEEEEVEIELLHEFETIPVLSVELSPEDVDALELDPAISYIEEDAEVTTMAQSVPWGISRVQAPAAHNRGLTGSGVKVAVLDTGISTHPDLNIRGGASFVPGEPSTQDGNGHGTHVAGTIAALNNSIGVLGVAPSAELYAVKVLGASGSGSVSSIAQGLQWAGNNGMHVANLSLGSPSPSATLEQAVNSATSRGVLVVAASGNSGAGSISYPARYANAMAVGATDQNNNRASFSQYGAGLDIVAPGVNVQSTYPGSTYASLNGTSMATPHVAGAAALVKQKNPSWSNVQIRNHLKNTATSLGSTNLYGSGLVNAEAATR

SEQ ID NO: 60702 - protein, 380 aa, Unidentified
VRSKKLWIVASTALLISVAFSSSIASAAEEAKEKYLIGFNEQEAVSEFVEQVEANDEVAILSEEEEVEIELLHEFETIPVLSVELSPEDVDALELDPAISYIEEDAEVTTMAQSVPWGISRVQAPAAHNRGLTGSGVKVAVLDTGISTHPDLNIRGGASFVPGEPSTQDGNTHGTHVAGTIAALNNSIGVLGVAPSAELYAVKVLGASGSGSVSSIAQGLEWAGNNGMHVANLSLGSPSPSATLEQAVNSATSRGVLVVAASGNSGAGSISYPARYANAMAVGATDQNNNRASFSQYGAGLDIVAPGVNVQSTYPGSTYASLNGTSMATPHVAGAAALVKQKNPSWSNVQIRNHLKNTATSLGSTNLYGSGLVNAEAATR

SEQ ID NO: 60703 - protein, 380 aa, Unidentified
VRSKKLWIVASTALLISVAFSSSIASAAEEAKEKYLIGFNEQEAVSEFVEQVEANDEVAILSEEEEVEIELLHEFETIPVLSVELSPEDVDALELDPAISYIEEDAEVTTMAQSVPWGISRVQAPAAHNRGLTGSGVKVAVLDTGISTHPDLNIRGGASFVPGEPSTQDGNGHGTHVAGTIAALNNSIGVLGVAPSAELYAVKVLGASGSGSVSSIAQGLEWAGNNGMHVANLSLGSPSPSATLEQAVNSATSRGVLVVAASGNSGAGSISYPARYANAMAVGATDQINNRASFSQYGAGLDIVAPGVNVQSTYPGSTYASLNGTSMATPHVAGAAALVKQKNPSWSNVQIRNHLKNTATSLGSTNLYGSGLVNAEAATR

SEQ ID NO: 60704 - protein, 380 aa, Unidentified
VRSKKLWIVASTALLISVAFSSSIASAAEEAKEKYLIGFNEQEAVSEFVEQVEANDEVAILSEEEEVEIELLHEFETIPVLSVELSPEDVDALELDPAISYIEEDAEVTTMAQSVPWGISRVQAPAAHNRGLTGSGVKVAVLDTGISTHPDLNIRGGASFVPGEPSTQDGNAHGTHVAGTIAALNNSIGVLGVAPSAELYAVKVLGASGSGSVSSIAQGLEWAGNNGMHVANLSLGSPSPSATLEQAVNSATSRGVLVVAASGNSGAGSISYPARYANAMAVGATDQNNNRASFSQYGAGLDIVAPGVNVQSTYPGSTYASLNGTSMATPHVAGAAALVKQKNPSWSNVQIRNHLKNTATSLGSTNLYGSGLVNAEAATR

SEQ ID NO: 60705 - protein, 380 aa, Unidentified
VRSKKLWIVASTALLISVAFSSSIASAAEEAKEKYLIGFNEQEAVSEFVEQVEANDEVAILSEEEEVEIELLHEFETIPVLSVELSPEDVDALELDPAISYIEEDAEVTTMAQSVPWGISRVQAPAAHNRGLTGSGVKVAVLDTGISTHPDLNIRGGASFVPGEPSTQDGNGHGTHVAGTIAALNNSIGVLGVAISAELYAVKVLGASGSGSVSSIAQGLEWAGNNGMHVANLSLGSPSPSATLEQAVNSATSRGVLVVAASGNSGAGSISYPARYANAMAVGATDQNNNRASFSQYGAGLDIVAPGVNVQSTYPGSTYASLNGTSMATPHVAGAAALVKQKNPSWSNVQIRNHLKNTATSLGSTNLYGSGLVNAEAATR

SEQ ID NO: 60706 - protein, 380 aa, Unidentified
VRSKKLWIVASTALLISVAFSSSIASAAEEAKEKYLIGFNEQEAVSEFVEQVEANDEVAILSEEEEVEIELLHEFETIPVLSVELSPEDVDALELDPAISYIEEDAEVTTMAQSVPWGISRVQAPAAHNRGLTGSGVKVAVLDTGISTHPDLRIRGGASFVPGEPSTQDGNGHGTHVAGTIAALNNSIGVLGVAPSAELYAVKVLGASGSGSVSSIAQGLEWAGNNGMHVANLSLGSPSPSATLEQAVNSATSRGVLVVAASGNSGAGSISYPARYANAMAVGATDQNNNRASFSQYGAGLDIVAPGVNVQSTYPGSTYASLNGTSMATPHVAGAAALVKQKNPSWSNVQIRNHLKNTATSLGSTNLYGSGLVNAEAATR

SEQ ID NO: 60707 - protein, 380 aa, Unidentified
VRSKKLWIVASTALLISVAFSSSIASAAEEAKEKYLIGFNEQEAVSEFVEQVEANDEVAILSEEEEVEIELLHEFETIPVLSVELSPEDVDALELDPAISYIEEDAEVTTMAQSVPWGISRVQAPAAHNRGLTFSGVKVAVLDTGISTHPDLNIRGGASFVPGEPSTQDGNGHGTHVAGTIAALNNSIGVLGVAPSAELYAVKVLGASGSGSVSSIAQGLEWAGNNGMHVANLSLGSPSPSATLEQAVNSATSRGVLVVAASGNSGAGSISYPARYANAMAVGATDQNNNRASFSQYGAGLDIVAPGVNVQSTYPGSTYASLNGTSMATPHVAGAAALVKQKNPSWSNVQIRNHLKNTATSLGSTNLYGSGLVNAEAATR

SEQ ID NO: 60708 - protein, 380 aa, Unidentified
VRSKKLWIVASTALLISVAFSSSIASAAEEAKEKYLIGFNEQEAVSEFVEQVEANDEVAILSEEEEVEIELLHEFETIPVLSVELSPEDVDALELDPAISYIEEDAEVTTMAQSVPWGISRVQAPAAHNRGLTGSGVKVAVLDTGISTHPDLNIRRGASFVPGEPSTQDGNGHGTHVAGTIAALNNSIGVLGVAPSAELYAVKVLGASGSGSVSSIAQGLEWAGNNGMHVANLSLGSPSPSATLEQAVNSATSRGVLVVAASGNSGAGSISYPARYANAMAVGATDQNNNRASFSQYGAGLDIVAPGVNVQSTYPGSTYASLNGTSMATPHVAGAAALVKQKNPSWSNVQIRNHLKNTATSLGSTNLYGSGLVNAEAATR

SEQ ID NO: 60709 - protein, 380 aa, Unidentified
VRSKKLWIVASTALLISVAFSSSIASAAEEAKEKYLIGFNEQEAVSEFVEQVEANDEVAILSEEEEVEIELLHEFETIPVLSVELSPEDVDALELDPAISYIEEDAEVTTMAQSVPWGISRVQAPAAHNRGLTGSGVKVAVLDTGISTHPDLNIRGGASFVPGEPSTQDGNGHGTHVAGTIAALNNSIGVLGVAPSAELYAVKVLGASGSGSVSSIAQGLEWAGNNGMHVANLSLGSPSPSATLEQAVNSATSRGVLVVAASGNSGAGSISYPARYANAMAVGATDQNNNRASFSQYGAGLDIVAPGVNVQSTYLGSTYASLNGTSMATPHVAGAAALVKQKNPSWSNVQIRNHLKNTATSLGSTNLYGSGLVNAEAATR

SEQ ID NO: 60710 - protein, 380 aa, Unidentified
VRSKKLWIVASTALLISVAFSSSIASAAEEAKEKYLIGFNEQEAVSEFVEQVEANDEVAILSEEEEVEIELLHEFETIPVLSVELSPEDVDALELDPAISYIEEDAEVTTMRQSVPWGISRVQAPAAHNRGLTGSGVKVAVLDTGISTHPDLNIRGGASFVPGEPSTQDGNGHGTHVAGTIAALNNSIGVLGVAPSAELYAVKVLGASGSGSVSSIAQGLEWAGNNGMHVANLSLGSPSPSATLEQAVNSATSRGVLVVAASGNSGAGSISYPARYANAMAVGATDQNNNRASFSQYGAGLDIVAPGVNVQSTYPGSTYASLNGTSMATPHVAGAAALVKQKNPSWSNVQIRNHLKNTATSLGSTNLYGSGLVNAEAATR

SEQ ID NO: 60711 - protein, 380 aa, Unidentified
VRSKKLWIVASTALLISVAFSSSIASAAEEAKEKYLIGFNEQEAVSEFVEQVEANDEVAILSEEEEVEIELLHEFETIPVLSVELSPEDVDALELDPAISYIEEDAEVTTMAQSVPWGISRVQAPAAHNRGLTGSGVKVAVLDTGISTHPDLNIRGGASFVPGEPSTQDGNGHGTHVAGTIAALNNSIGVLGVAPSAELYAVKVLGASGSGSVSSIAQGLEWAGNNGMHVANLSLGSPSPSATLEQAVNSATSRGVLVVAASGNSGAGSISYPARYANAMAVGATDQNNNRASFSQYGAGLDIVAPGVNVQSTYPGSTYASLNGTSMATPHVAGAAALVKQKNPSWSNVQIRNHLKNTATSLGSINLYGSGLVNAEAATR

SEQ ID NO: 60712 - protein, 380 aa, Unidentified
VRSKKLWIVASTALLISVAFSSSIASAAEEAKEKYLIGFNEQEAVSEFVEQVEANDEVAILSEEEEVEIELLHEFETIPVLSVELSPEDVDALELDPAISYIEEDAEVTTMAQSVPWGISRVQAPAAHNRGLTGSGVKVAVLDTGISTHPDLNIRGGASFVPGEPSTQDGNGHGTHVAGTIAALNNSIGVLGVAPSAELYAVKVLGASGNGSVSSIAQGLEWAGNNGMHVANLSLGSPSPSATLEQAVNSATSRGVLVVAASGNSGAGSISYPARYANAMAVGATDQNNNRASFSQYGAGLDIVAPGVNVQSTYPGSTYASLNGTSMATPHVAGAAALVKQKNPSWSNVQIRNHLKNTATSLGSTNLYGSGLVNAEAATR

SEQ ID NO: 60713 - protein, 380 aa, Unidentified
VRSKKLWIVASTALLISVAFSSSIASAAEEAKEKYLIGFNEQEAVSEFVEQVEANDEVAILSEEEEVEIELLHEFETIPVLSVELSPEDVDALELDPAISYIEEDAEVTTMAQSVPWGISRVQAPAAHNRGLTGSGVKVAVLDTGISTHPDLNIRGGASFVPGEPSTQDGNPHGTHVAGTIAALNNSIGVLGVAPSAELYAVKVLGASGSGSVSSIAQGLEWAGNNGMHVANLSLGSPSPSATLEQAVNSATSRGVLVVAASGNSGAGSISYPARYANAMAVGATDQNNNRASFSQYGAGLDIVAPGVNVQSTYPGSTYASLNGTSMATPHVAGAAALVKQKNPSWSNVQIRNHLKNTATSLGSTNLYGSGLVNAEAATR

SEQ ID NO: 60714 - protein, 380 aa, Unidentified
VRSKKLWIVASTALLISVAFSSSIASAAEEAKEKYLIGFNEQEAVSEFVEQVEANDEVAILSEEEEVEIELLHEFETIPVLSVELSPEDVDALELDPAISYIEEDAEVTTMAQSVPWGISRVQAFAAHNRGLTGSGVKVAVLDTGISTHPDLNIRGGASFVPGEPSTQDGNGHGTHVAGTIAALNNSIGVLGVAPSAELYAVKVLGASGSGSVSSIAQGLEWAGNNGMHVANLSLGSPSPSATLEQAVNSATSRGVLVVAASGNSGAGSISYPARYANAMAVGATDQNNNRASFSQYGAGLDIVAPGVNVQSTYPGSTYASLNGTSMATPHVAGAAALVKQKNPSWSNVQIRNHLKNTATSLGSTNLYGSGLVNAEAATR

SEQ ID NO: 60715 - protein, 380 aa, Unidentified
VRSKKLWIVASTALLISVAFSSSIASAAEEAKEKYLIGFNEQEAVSEFVEQVEANDEVAILSEEEEVEIELLHEFETIPVLSVELSPEDVDALELDPAISYIEEDAEVTTMAQSVPWGISRVQAPAAHNRGLTGSGVKVAVLDTGISTHPDLNIRGGASFVPGEPSTQDGNDHGTHVAGTIAALNNSIGVLGVAPSAELYAVKVLGASGSGSVSSIAQGLEWAGNNGMHVANLSLGSPSPSATLEQAVNSATSRGVLVVAASGNSGAGSISYPARYANAMAVGATDQNNNRASFSQYGAGLDIVAPGVNVQSTYPGSTYASLNGTSMATPHVAGAAALVKQKNPSWSNVQIRNHLKNTATSLGSTNLYGSGLVNAEAATR

SEQ ID NO: 60716 - protein, 380 aa, Unidentified
VRSKKLWIVASTALLISVAFSSSIASAAEEAKEKYLIGFNEQEAVSEFVEQVEANDEVAILSEEEEVEIELLHEFETIPVLSVELSPEDVDALELDPAISYIEEDAEVTTMAQSVPWGISRVQAPAAHNRGLTGSGVKVAVLDTGISTHPDLNIRGGASFVPGEPSTQDGNGHGTHVAGTIAALNNSIGVLGVAPSAELYAVKVLGASGSGSVSSIAQGLEWAGNNGMHVANLSLGHPSPSATLEQAVNSATSRGVLVVAASGNSGAGSISYPARYANAMAVGATDQNNNRASFSQYGAGLDIVAPGVNVQSTYPGSTYASLNGTSMATPHVAGAAALVKQKNPSWSNVQIRNHLKNTATSLGSTNLYGSGLVNAEAATR

SEQ ID NO: 60717 - protein, 380 aa, Unidentified
VRSKKLWIVASTALLISVAFSSSIASAAEEAKEKYLIGFNEQEAVSEFVEQVEANDEVAILSEEEEVEIELLHEFETIPVLSVELSPEDVDALELDPAISYIEEDAEVTTMAQSVPWGISRVQAPAAHNRGLTGSGVKVAVLDTGISTHPDLNIRGGASFVPGEPSTQDGNGHGTHVAGTIAALNNSIGVLGVMPSAELYAVKVLGASGSGSVSSIAQGLEWAGNNGMHVANLSLGSPSPSATLEQAVNSATSRGVLVVAASGNSGAGSISYPARYANAMAVGATDQNNNRASFSQYGAGLDIVAPGVNVQSTYPGSTYASLNGTSMATPHVAGAAALVKQKNPSWSNVQIRNHLKNTATSLGSTNLYGSGLVNAEAATR

SEQ ID NO: 60718 - protein, 380 aa, Unidentified
VRSKKLWIVASTALLISVAFSSSIASAAEEAKEKYLIGFNEQEAVSEFVEQVEANDEVAILSEEEEVEIELLHEFETIPVLSVELSPEDVDALELDPAISYIEEDAEVTTMAQSVPWGISRVQAPAAHNRGLTGSGVKVAVLDTGISTHPDLNIRGGASFVPGEPSTQDGNGHGTHVAGTIAALNNSIGVLGVAPSAELYAVKVLGASGSGSVSSIAQGLEWAGNNGMFVANLSLGSPSPSATLEQAVNSATSRGVLVVAASGNSGAGSISYPARYANAMAVGATDQNNNRASFSQYGAGLDIVAPGVNVQSTYPGSTYASLNGTSMATPHVAGAAALVKQKNPSWSNVQIRNHLKNTATSLGSTNLYGSGLVNAEAATR

SEQ ID NO: 60719 - protein, 380 aa, Unidentified
VRSKKLWIVASTALLISVAFSSSIASAAEEAKEKYLIGFNEQEAVSEFVEQVEANDEVAILSEEEEVEIELLHEFETIPVLSVELSPEDVDALELDPAISYIEEDAEVTTMAQSVPWGISRVQAPAAHNRGLTGSGVKVAVLDTGISTHPDLNIRGGASFVPGEPSTQDGNGHGTHVAGTIAALNNSIGVLGVAPSAELYAVKVLGASGSGSVSSIAQGLEWAGNNGMHVANLSLGSPSPSATLEQAVNSATSRGVLVVAASGNSGAGSISYPARYANAMAVGATDQNNNHASFSQYGAGLDIVAPGVNVQSTYPGSTYASLNGTSMATPHVAGAAALVKQKNPSWSNVQIRNHLKNTATSLGSTNLYGSGLVNAEAATR

SEQ ID NO: 60720 - protein, 380 aa, Unidentified
VRSKKLWIVASTALLISVAFSSSIASAAEEAKEKYLIGFNEQEAVSEFVEQVEANDEVAILSEEEEVEIELLHEFETIPVLSVELSPEDVDALELDPAISYIEEDAEVTTMAQSVPWGISRVQAPAAHNRGLTGSGVKVAVLDTGISTHPDLNIRGGASFVPGEPSTQDGEGHGTHVAGTIAALNNSIGVLGVAPSAELYAVKVLGASGSGSVSSIAQGLEWAGNNGMHVANLSLGSPSPSATLEQAVNSATSRGVLVVAASGNSGAGSISYPARYANAMAVGATDQNNNRASFSQYGAGLDIVAPGVNVQSTYPGSTYASLNGTSMATPHVAGAAALVKQKNPSWSNVQIRNHLKNTATSLGSTNLYGSGLVNAEAATR

SEQ ID NO: 60721 - protein, 380 aa, Unidentified
VRSKKLWIVASTALLISVAFSSSIASAAEEAKEKYLIGFNEQEAVSEFVEQVEANDEVAILSEEEEVEIELLHEFETIPVLSVELSPEDVDALELDPAISYIEEDAEVTTMAQSVPWGISRVQAPAAHNRGLTGSGVKVAVLDTGISTHPDLNIRGGASFVPGEPSTQDGNGHGTHVAGTIAALNNSIGVLGVAPSAELYAVKVLGASGSGSVSSIAQGLEWAGNNGMHVANLSLGSPSPSATLEQAVNSATSRGVLVVAASGNSGAGSISYPARYANAMAVGATDQNNNRASFSQYGAGLDIVAPGVNVQSTYPGSTYASLNGTSMATPHVAGAAALVKQKNPSWSNVQIRNHLKNFATSLGSTNLYGSGLVNAEAATR

SEQ ID NO: 60722 - protein, 380 aa, Unidentified
VRSKKLWIVASTALLISVAFSSSIASAAEEAKEKYLIGFNEQEAVSEFVEQVEANDEVAILSEEEEVEIELLHEFETIPVLSVELSPEDVDALELDPAISYIEEDAEVTTMAQSVPWGIFRVQAPAAHNRGLTGSGVKVAVLDTGISTHPDLNIRGGASFVPGEPSTQDGNGHGTHVAGTIAALNNSIGVLGVAPSAELYAVKVLGASGSGSVSSIAQGLEWAGNNGMHVANLSLGSPSPSATLEQAVNSATSRGVLVVAASGNSGAGSISYPARYANAMAVGATDQNNNRASFSQYGAGLDIVAPGVNVQSTYPGSTYASLNGTSMATPHVAGAAALVKQKNPSWSNVQIRNHLKNTATSLGSTNLYGSGLVNAEAATR

SEQ ID NO: 60723 - protein, 380 aa, Unidentified
VRSKKLWIVASTALLISVAFSSSIASAAEEAKEKYLIGFNEQEAVSEFVEQVEANDEVAILSEEEEVEIELLHEFETIPVLSVELSPEDVDALELDPAISYIEEDAEVTTMAQSVPWGISRVQAPAAHNRGLTGSGVKVAVLDTGISTHPDLNIRGGASFVPGEPSTQDGNGHGTHVPGTIAALNNSIGVLGVAPSAELYAVKVLGASGSGSVSSIAQGLEWAGNNGMHVANLSLGSPSPSATLEQAVNSATSRGVLVVAASGNSGAGSISYPARYANAMAVGATDQNNNRASFSQYGAGLDIVAPGVNVQSTYPGSTYASLNGTSMATPHVAGAAALVKQKNPSWSNVQIRNHLKNTATSLGSTNLYGSGLVNAEAATR

SEQ ID NO: 60724 - protein, 380 aa, Unidentified
VRSKKLWIVASTALLISVAFSSSIASAAEEAKEKYLIGFNEQEAVSEFVEQVEANDEVAILSEEEEVEIELLHEFETIPVLSVELSPEDVDALELDPAISYIEEDAEVTTMAQSVPWGISRVQAPAAHNRGLTGSGVKVAVLDTGISTHPDLNIRGGASFVPGEPSTQDGNGHGTHVAGTIAALNNSIGVLGVAPSAELYAVKVLGASGSGSVSSIAQGLEWAGNNGMHVANLSLGSPSPSATLEQAVNSATSRGVLVVAASGNSGAGSISYPARYANAMAVGATDQNNNRASFSQYGAGLDIVAPGVNVQSTYPGSTYASLNGTSMATPHVAGAAALVKQKNPSWSNVQIRNHLKNTATSLGSTNLYGSGLVRAEAATR

SEQ ID NO: 60725 - protein, 380 aa, Unidentified
VRSKKLWIVASTALLISVAFSSSIASAAEEAKEKYLIGFNEQEAVSEFVEQVEANDEVAILSEEEEVEIELLHEFETIPVLSVELSPEDVDALELDPAISYIEEDAEVTTMAQSVPWGISRVQAPAAHNRGLTGSGVKVAVLDTGISTHPDLNIRGGASFVPGEPSTQDGNGHGTHVAGTIAALNNSIGVLGVAPSAELYAVKVLGASGSGSVSSIGQGLEWAGNNGMHVANLSLGSPSPSATLEQAVNSATSRGVLVVAASGNSGAGSISYPARYANAMAVGATDQNNNRASFSQYGAGLDIVAPGVNVQSTYPGSTYASLNGTSMATPHVAGAAALVKQKNPSWSNVQIRNHLKNTATSLGSTNLYGSGLVNAEAATR

SEQ ID NO: 60726 - protein, 380 aa, Unidentified
VRSKKLWIVASTALLISVAFSSSIASAAEEAKEKYLIGFNEQEAVSEFVEQVEANDEVAILSEEEEVEIELLHEFETIPVLSVELSPEDVDALELDPAISYIEEDAEVTTMAQSVPWGISRVQAPAAHNRGLTGSGVKVAVLDTGISTHPDLNIRGGASFVPGEPSTQDGNGHGTHVAGTIAALNNSIGVLGVAPSAELYAVKVLGASGSGSVSSIAQGLEWAGNNGMHVANLSLGSESPSATLEQAVNSATSRGVLVVAASGNSGAGSISYPARYANAMAVGATDQNNNRASFSQYGAGLDIVAPGVNVQSTYPGSTYASLNGTSMATPHVAGAAALVKQKNPSWSNVQIRNHLKNTATSLGSTNLYGSGLVNAEAATR

SEQ ID NO: 60727 - protein, 380 aa, Unidentified
VRSKKLWIVASTALLISVAFSSSIASAAEEAKEKYLIGFNEQEAVSEFVEQVEANDEVAILSEEEEVEIELLHEFETIPVLSVELSPEDVDALELDPAISYIEEDAEVTTMAQSVPWGISRVQAPAAHNRGLTGSGVKVAVLDTGISTHPDLNIRGGASFWPGEPSTQDGNGHGTHVAGTIAALNNSIGVLGVAPSAELYAVKVLGASGSGSVSSIAQGLEWAGNNGMHVANLSLGSPSPSATLEQAVNSATSRGVLVVAASGNSGAGSISYPARYANAMAVGATDQNNNRASFSQYGAGLDIVAPGVNVQSTYPGSTYASLNGTSMATPHVAGAAALVKQKNPSWSNVQIRNHLKNTATSLGSTNLYGSGLVNAEAATR

SEQ ID NO: 60728 - protein, 380 aa, Unidentified
VRSKKLWIVASTALLISVAFSSSIASAAEEAKEKYLIGFNEQEAVSEFVEQVEANDEVAILSEEEEVEIELLHEFETIPVLSVELSPEDVDALELDPAISYIEEDAEVTTMAQSVPWGISRVQAPAAHNRGLTGSGVKVAVLDTGISFHPDLNIRGGASFVPGEPSTQDGNGHGTHVAGTIAALNNSIGVLGVAPSAELYAVKVLGASGSGSVSSIAQGLEWAGNNGMHVANLSLGSPSPSATLEQAVNSATSRGVLVVAASGNSGAGSISYPARYANAMAVGATDQNNNRASFSQYGAGLDIVAPGVNVQSTYPGSTYASLNGTSMATPHVAGAAALVKQKNPSWSNVQIRNHLKNTATSLGSTNLYGSGLVNAEAATR

SEQ ID NO: 60729 - protein, 380 aa, Unidentified
VRSKKLWIVASTALLISVAFSSSIASAAEEAKEKYLIGFNEQEAVSEFVEQVEANDEVAILSEEEEVEIELLHEFETIPVLSVELSPEDVDALELDPAISYIEEDAEVTTMAQSVPWGISRVQAPAAHNRGLTGSGVKVAVLDTGISTHPDLNIRGGASFVPGEPSTQDGNGHGTHVAGTIAALNNSIGVLGVAPSAELYAVKVLGASGSGSVSSIAQGLEWAGNNGMHVANLSLGSPSPSATLEQAVNSATSRGVLVVAASGNSGAGSISYPARYANAMAVGATDQNNNRASFSQYGAGLDIVAPGVNVQSTYPGSTYASLEGTSMATPHVAGAAALVKQKNPSWSNVQIRNHLKNTATSLGSTNLYGSGLVNAEAATR

SEQ ID NO: 60730 - protein, 380 aa, Unidentified
VRSKKLWIVASTALLISVAFSSSIASAAEEAKEKYLIGFNEQEAVSEFVEQVEANDEVAILSEEEEVEIELLHEFETIPVLSVELSPEDVDALELDPAISYIEEDAEVTTMAQSVPWGISRVQAPAAHNRGLTGSGVKVAVLDTGISTHPDLNIRGGASFVPGEPSTQDGNGHGTHVAGTIAALNNSIGVLGVAPSAELYAVKVLGASGSGSVSSIAQGLEWAGNNGMHVANLSLGSPSPSATLEQAVNSATSRGVLVVAASGNSGAGDISYPARYANAMAVGATDQNNNRASFSQYGAGLDIVAPGVNVQSTYPGSTYASLNGTSMATPHVAGAAALVKQKNPSWSNVQIRNHLKNTATSLGSTNLYGSGLVNAEAATR

SEQ ID NO: 60731 - protein, 380 aa, Unidentified
VRSKKLWIVASTALLISVAFSSSIASAAEEAKEKYLIGFNEQEAVSEFVEQVEANDEVAILSEEEEVEIELLHEFETIPVLSVELSPEDVDALELDPAISYIEEDAEVTTMAQSVPWGISRVQAPAAHNRGLTGSGVKVAVLDTGISTHPDLNIRGGASFVPGEPSTQDGNGHGTHVAGTIAALNNSIGVLGVAPSAELYAVKVLGASGSGSVSSIAQGLEWAGNNGMHEANLSLGSPSPSATLEQAVNSATSRGVLVVAASGNSGAGSISYPARYANAMAVGATDQNNNRASFSQYGAGLDIVAPGVNVQSTYPGSTYASLNGTSMATPHVAGAAALVKQKNPSWSNVQIRNHLKNTATSLGSTNLYGSGLVNAEAATR

SEQ ID NO: 60732 - protein, 380 aa, Unidentified
VRSKKLWIVASTALLISVAFSSSIASAAEEAKEKYLIGFNEQEAVSEFVEQVEANDEVAILSEEEEVEIELLHEFETIPVLSVELSPEDVDALELDPAISYIEEDAEVTTMAQSVPWGISRVQAPAAHNRGLTGSGVKVAVLDTGISTHPDLNIRGGASFVPGEPSTQDGNGHGTHVAGTIAALNNSIGVLGVAPSATLYAVKVLGASGSGSVSSIAQGLEWAGNNGMHVANLSLGSPSPSATLEQAVNSATSRGVLVVAASGNSGAGSISYPARYANAMAVGATDQNNNRASFSQYGAGLDIVAPGVNVQSTYPGSTYASLNGTSMATPHVAGAAALVKQKNPSWSNVQIRNHLKNTATSLGSTNLYGSGLVNAEAATR

SEQ ID NO: 60733 - protein, 380 aa, Unidentified
VRSKKLWIVASTALLISVAFSSSIASAAEEAKEKYLIGFNEQEAVSEFVEQVEANDEVAILSEEEEVEIELLHEFETIPVLSVELSPEDVDALELDPAISYIEEDAEVTTMAQSVPWGISRVQAPAAHNRGLTGSGVKVAVLDTGISTHPDLNIRGGASFVPGEPSTQDGNGHGTHVAGTIAALNNSIGVLGVAPSAELYAVKVLGASGSGSVSSIAQGLEWAGNNGMHVANLSLGSPSPSATLEQAVNSATSRGVLVVAASGNSGAGSISYPARYANAMAVGATDQNNNRAEFSQYGAGLDIVAPGVNVQSTYPGSTYASLNGTSMATPHVAGAAALVKQKNPSWSNVQIRNHLKNTATSLGSTNLYGSGLVNAEAATR

SEQ ID NO: 60734 - protein, 380 aa, Unidentified
VRSKKLWIVASTALLISVAFSSSIASAAEEAKEKYLIGFNEQEAVSEFVEQVEANDEVAILSEEEEVEIELLHEFETIPVLSVELSPEDVDALELDPAISYIEEDAEVTTMAQSVPWGISRVQAPAAHNRGLTGSGVKVAVLDTGISTHPDLNIRGGASFVPGEYSTQDGNGHGTHVAGTIAALNNSIGVLGVAPSAELYAVKVLGASGSGSVSSIAQGLEWAGNNGMHVANLSLGSPSPSATLEQAVNSATSRGVLVVAASGNSGAGSISYPARYANAMAVGATDQNNNRASFSQYGAGLDIVAPGVNVQSTYPGSTYASLNGTSMATPHVAGAAALVKQKNPSWSNVQIRNHLKNTATSLGSTNLYGSGLVNAEAATR

SEQ ID NO: 60735 - protein, 380 aa, Unidentified
VRSKKLWIVASTALLISVAFSSSIASAAEEAKEKYLIGFNEQEAVSEFVEQVEANDEVAILSEEEEVEIELLHEFETIPVLSVELSPEDVDALELDPAISYIEEDAEVTTMAQSVPWGISRVQAPAAHNRGLTGSGVKVAVLDTGISTHPDLNIRGGASFVPGEPSTQDGNGHGTHVAGTIAALNNSIGVLGVAPSAELYAVKVLGASGSGSVSSIAQGLEWAGNNGMHVANLSLGSPSPSATLEQAVNSATSRGVLVVAASGNSGAGSISYPARYANAMAVGATDQNNNRASFSQYGAGLDIVAPGVNVQSTYPGSTYASLNGTSMATPHVAGAAALVKQKNPSWSNVQSRNHLKNTATSLGSTNLYGSGLVNAEAATR

SEQ ID NO: 60736 - protein, 380 aa, Unidentified
VRSKKLWIVASTALLISVAFSSSIASAAEEAKEKYLIGFNEQEAVSEFVEQVEANDEVAILSEEEEVEIELLHEFETIPVLSVELSPEDVDALELDPAISYIEEDAEVTTMAQSVPWGISRVQAPAAHNRGLTGSGVKVAVLDTGISTHPDLNIRGGASFVPGEPSTQDGNGHGTHVAGTIAALNNSIGVLGVAPSAELYAVKVLGASGSGSVSSIAQGLEWAGNNGMHVANLSLGSPSPSATLEQAVNSATSRGVLVVAASGNSGAGSISYPARYANAMAVGATDQNNNRASFSQYGAGLDIVAPGVNVQSTYPGSTYASLNGTSMATPHVAGAAALVKQKNPSWSNVQIRNHLKNTATSLGSTNLYGSGNVNAEAATR

SEQ ID NO: 60737 - protein, 380 aa, Unidentified
VRSKKLWIVASTALLISVAFSSSIASAAEEAKEKYLIGFNEQEAVSEFVEQVEANDEVAILSEEEEVEIELLHEFETIPVLSVELSPEDVDALELDPAISYIEEDAEVTTMAQSVPWGISRVQAPAAHNRGLTGSGVKVAVLDTGISTHPDLNIRGGASFVPGEPSTQDGNGHGTHVAGTIAALNNSIGVLGVAPSAELYAVKVLGASGSGSVSSIAQGLEWAGNNGMHVANLSLGSPSPSATLEQAVNSATSRGVLVVAASGNSGAGSISYPARYANAMAVGATDQNNNRASFSQYGAGLDIVAPGVNVQSTYPGSTYASLNGTSMATPHVAGAAALVKQKNPSWSNVQIRNHLKNTATSLGSTNLYGSGLVNAEAITR

SEQ ID NO: 60738 - protein, 380 aa, Unidentified
VRSKKLWIVASTALLISVAFSSSIASAAEEAKEKYLIGFNEQEAVSEFVEQVEANDEVAILSEEEEVEIELLHEFETIPVLSVELSPEDVDALELDPAISYIEEDAEVTTMAQSVPWGISRVQAPAAHNRGLTGSGVKVAVLDTGISTHPDLNIRGGASFVPGEPSTQDGNEHGTHVAGTIAALNNSIGVLGVAPSAELYAVKVLGASGSGSVSSIAQGLEWAGNNGMHVANLSLGSPSPSATLEQAVNSATSRGVLVVAASGNSGAGSISYPARYANAMAVGATDQNNNRASFSQYGAGLDIVAPGVNVQSTYPGSTYASLNGTSMATPHVAGAAALVKQKNPSWSNVQIRNHLKNTATSLGSTNLYGSGLVNAEAATR

SEQ ID NO: 60739 - protein, 380 aa, Unidentified
VRSKKLWIVASTALLISVAFSSSIASAAEEAKEKYLIGFNEQEAVSEFVEQVEANDEVAILSEEEEVEIELLHEFETIPVLSVELSPEDVDALELDPAISYIEEDAEVTTMAQSVPWGISRVQAPAAHNRGLAGSGVKVAVLDTGISTHPDLNIRGGASFVPGEPSTQDGNGHGTHVAGTIAALNNSIGVLGVAPSAELYAVKVLGASGSGSVSSIAQGLEWAGNNGMHVANLSLGSPSPSATLEQAVNSATSRGVLVVAASGNSGAGSISYPARYANAMAVGATDQNNNRASFSQYGAGLDIVAPGVNVQSTYPGSTYASLNGTSMATPHVAGAAALVKQKNPSWSNVQIRNHLKNTATSLGSTNLYGSGLVNAEAATR

SEQ ID NO: 60740 - protein, 380 aa, Unidentified
VRSKKLWIVASTALLISVAFSSSIASAAEEAKEKYLIGFNEQEAVSEFVEQVEANDEVAILSEEEEVEIELLHEFETIPVLSVELSPEDVDALELDPAISYIEEDAEVTTMAQSVPWGISRVQAPAAHNRGLTGSGVKVAVLDTGISTHPDLNIRGGASFVPGEPSTQDGNGHGTHVAGTIAALNNSIGVLGVAPSAELYAVKVLGAGGSGSVSSIAQGLEWAGNNGMHVANLSLGSPSPSATLEQAVNSATSRGVLVVAASGNSGAGSISYPARYANAMAVGATDQNNNRASFSQYGAGLDIVAPGVNVQSTYPGSTYASLNGTSMATPHVAGAAALVKQKNPSWSNVQIRNHLKNTATSLGSTNLYGSGLVNAEAATR

SEQ ID NO: 60741 - protein, 380 aa, Unidentified
VRSKKLWIVASTALLISVAFSSSIASAAEEAKEKYLIGFNEQEAVSEFVEQVEANDEVAILSEEEEVEIELLHEFETIPVLSVELSPEDVDALELDPAISYIEEDAEVTTMAQSVPWGISRVQAPAAHNRGLTGSGVKVAVLDTGISTHPDLNIRGGASFVPGEPSTQDGNGHGTHVAGTIAALNNSIGVLGVAPSAELYAVKVLGASSSGSVSSIAQGLEWAGNNGMHVANLSLGSPSPSATLEQAVNSATSRGVLVVAASGNSGAGSISYPARYANAMAVGATDQNNNRASFSQYGAGLDIVAPGVNVQSTYPGSTYASLNGTSMATPHVAGAAALVKQKNPSWSNVQIRNHLKNTATSLGSTNLYGSGLVNAEAATR

SEQ ID NO: 60742 - protein, 380 aa, Unidentified
VRSKKLWIVASTALLISVAFSSSIASAAEEAKEKYLIGFNEQEAVSEFVEQVEANDEVAILSEEEEVEIELLHEFETIPVLSVELSPEDVDALELDPAISYIEEDAEVTTMAQSVPWGISRVQAPAAHNRGLTGSGVKVAVLDTGISTHPDLNIRGGASFVPGEPSTRDGNGHGTHVAGTIAALNNSIGVLGVAPSAELYAVKVLGASGSGSVSSIAQGLEWAGNNGMHVANLSLGSPSPSATLEQAVNSATSRGVLVVAASGNSGAGSISYPARYANAMAVGATDQNNNRASFSQYGAGLDIVAPGVNVQSTYPGSTYASLNGTSMATPHVAGAAALVKQKNPSWSNVQIRNHLKNTATSLGSTNLYGSGLVNAEAATR

SEQ ID NO: 60743 - protein, 380 aa, Unidentified
VRSKKLWIVASTALLISVAFSSSIASAAEEAKEKYLIGFNEQEAVSEFVEQVEANDEVAILSEEEEVEIELLHEFETIPVLSVELSPEDVDALELDPAISYIEEDAEVTTMAQSVPWGISRVQAPAAHNRGLTGSGVKVAVLDTGISTHPDLNIRGGASFVPGEPSTQDGNGHGTHVAGTIAALNNSIGVLGVALSAELYAVKVLGASGSGSVSSIAQGLEWAGNNGMHVANLSLGSPSPSATLEQAVNSATSRGVLVVAASGNSGAGSISYPARYANAMAVGATDQNNNRASFSQYGAGLDIVAPGVNVQSTYPGSTYASLNGTSMATPHVAGAAALVKQKNPSWSNVQIRNHLKNTATSLGSTNLYGSGLVNAEAATR

SEQ ID NO: 60744 - protein, 380 aa, Unidentified
VRSKKLWIVASTALLISVAFSSSIASAAEEAKEKYLIGFNEQEAVSEFVEQVEANDEVAILSEEEEVEIELLHEFETIPVLSVELSPEDVDALELDPAISYIEEDAEVTTMAQSVPWGISRVQAPAAHNRGLTGSGVKVAVLDTGISTHPDLNIRGGASFVPGEPSTQDGNGHGTHVAGTIAALNNSIGVLGVAPSAELYAVKVLGASGSGSVSSIAQGLEWAGNNGMHVANLSLGSPSPSATLEQAVNSATSRGVLVVAASGNSGAGSISYPARYANAMAVGATDQNNNRASFSQYGAGLDIVAPGVNVQSTYPGITYASLNGTSMATPHVAGAAALVKQKNPSWSNVQIRNHLKNTATSLGSTNLYGSGLVNAEAATR

SEQ ID NO: 60745 - protein, 380 aa, Unidentified
VRSKKLWIVASTALLISVAFSSSIASAAEEAKEKYLIGFNEQEAVSEFVEQVEANDEVAILSEEEEVEIELLHEFETIPVLSVELSPEDVDALELDPAISYIEEDAEVTTMAQSVPWGISRVQAPAAHNRGLTGSGVKVAVLDTGISTHPDLNIRGGASFVPGEPSTQDGNGHGTHVAGTIAALNNSIGVLGVAPSAELYAVKVLGASNSGSVSSIAQGLEWAGNNGMHVANLSLGSPSPSATLEQAVNSATSRGVLVVAASGNSGAGSISYPARYANAMAVGATDQNNNRASFSQYGAGLDIVAPGVNVQSTYPGSTYASLNGTSMATPHVAGAAALVKQKNPSWSNVQIRNHLKNTATSLGSTNLYGSGLVNAEAATR

SEQ ID NO: 60746 - protein, 380 aa, Unidentified
VRSKKLWIVASTALLISVAFSSSIASAAEEAKEKYLIGFNEQEAVSEFVEQVEANDEVAILSEEEEVEIELLHEFETIPVLSVELSPEDVDALELDPAISYIEEDAEVTTMAQSVPWGISRVQAPAAHNRGLTGSGVKVAVLDTGISTHPDLNIRGGASFVPGEPSTQDGNGHGTHVAGTIAALNNSIGVMGVAPSAELYAVKVLGASGSGSVSSIAQGLEWAGNNGMHVANLSLGSPSPSATLEQAVNSATSRGVLVVAASGNSGAGSISYPARYANAMAVGATDQNNNRASFSQYGAGLDIVAPGVNVQSTYPGSTYASLNGTSMATPHVAGAAALVKQKNPSWSNVQIRNHLKNTATSLGSTNLYGSGLVNAEAATR

SEQ ID NO: 60747 - protein, 380 aa, Unidentified
VRSKKLWIVASTALLISVAFSSSIASAAEEAKEKYLIGFNEQEAVSEFVEQVEANDEVAILSEEEEVEIELLHEFETIPVLSVELSPEDVDALELDPAISYIEEDAEVTTMAQSVPWGISRVQAPAAHNRGLTGSGVKVAVLDTGISTHPDLNIRGGASFVPGEPSTQDGNGHGTHVAGTIAALNNSIGVLGVAPSAELYAVKVLGASGSGSVSSIAQGLEWAGNNGMHVANLSLGSPSPSATLEQAVNSATSRGVLVVAASGNSGAGSISYPARYANAMAVGATDQNNNRASFSQYGAGLDIVAPGVNVQSTYPGSTYASLNGTSMATPHVAGAAALVKQKNPSWSNVQIRNHLKNTATSLGSTNDYGSGLVNAEAATR

SEQ ID NO: 60748 - protein, 380 aa, Unidentified
VRSKKLWIVASTALLISVAFSSSIASAAEEAKEKYLIGFNEQEAVSEFVEQVEANDEVAILSEEEEVEIELLHEFETIPVLSVELSPEDVDALELDPAISYIEEDAEVTTMAQSVPWGISRVQAPAAHNRGLTGSGVKVAVLDTGISTHPDLNIRGGASFVPGEPSTQDGNGHGTHVAGTIAALNNSIGVLGVAPSAELYAVKVLGASGSGSVSSIAQGLEWAGNNGMHVANLSLGSPSPSATLEQAVNSATSRGVLVVAASGNSGAGSISYPARYANAMAVGATAQNNNRASFSQYGAGLDIVAPGVNVQSTYPGSTYASLNGTSMATPHVAGAAALVKQKNPSWSNVQIRNHLKNTATSLGSTNLYGSGLVNAEAATR

SEQ ID NO: 60749 - protein, 380 aa, Unidentified
VRSKKLWIVASTALLISVAFSSSIASAAEEAKEKYLIGFNEQEAVSEFVEQVEANDEVAILSEEEEVEIELLHEFETIPVLSVELSPEDVDALELDPAISYIEEDAEVTTMAQSVPWGISRVQAPAAHNRGLTGSGVKVAVLDTGISTHPDLNIRGGASFVPGEPSTQDGNGHGTHVAGTIAALNNSIGVLGVAPSAELYAVKVLGASGSGSVSSIAQGLEWAGNNGMHVANLSLGSPSPSATLEQAVNSATSRGVLVVAASGNSGAGSISYPARYANAMAVGATDQNNNRASFSQYGAGLDIVAPGVNVQSTYPGSTYASLNGTSMATPHVAGAAALVKQKNPSWSNVQIRNHLKNTATNLGSTNLYGSGLVNAEAATR

SEQ ID NO: 60750 - protein, 380 aa, Unidentified
VRSKKLWIVASTALLISVAFSSSIASAAEEAKEKYLIGFNEQEAVSEFVEQVEANDEVAILSEEEEVEIELLHEFETIPVLSVELSPEDVDALELDPAISYIEEDAEVTTMAQSVPWGIWRVQAPAAHNRGLTGSGVKVAVLDTGISTHPDLNIRGGASFVPGEPSTQDGNGHGTHVAGTIAALNNSIGVLGVAPSAELYAVKVLGASGSGSVSSIAQGLEWAGNNGMHVANLSLGSPSPSATLEQAVNSATSRGVLVVAASGNSGAGSISYPARYANAMAVGATDQNNNRASFSQYGAGLDIVAPGVNVQSTYPGSTYASLNGTSMATPHVAGAAALVKQKNPSWSNVQIRNHLKNTATSLGSTNLYGSGLVNAEAATR

SEQ ID NO: 60751 - protein, 380 aa, Unidentified
VRSKKLWIVASTALLISVAFSSSIASAAEEAKEKYLIGFNEQEAVSEFVEQVEANDEVAILSEEEEVEIELLHEFETIPVLSVELSPEDVDALELDPAISYIEEDAEVTTMAQSVPWGISRVQAPAAHNRGLTGSGVKVAVLDTGISTHPDLNIRGGASFVPGEPSTQDGNGHGTHVAGTIAALNNSIGVLGVAPSAELYAVKVLGASGSGSVSEIAQGLEWAGNNGMHVANLSLGSPSPSATLEQAVNSATSRGVLVVAASGNSGAGSISYPARYANAMAVGATDQNNNRASFSQYGAGLDIVAPGVNVQSTYPGSTYASLNGTSMATPHVAGAAALVKQKNPSWSNVQIRNHLKNTATSLGSTNLYGSGLVNAEAATR

SEQ ID NO: 60752 - protein, 380 aa, Unidentified
VRSKKLWIVASTALLISVAFSSSIASAAEEAKEKYLIGFNEQEAVSEFVEQVEANDEVAILSEEEEVEIELLHEFETIPVLSVELSPEDVDALELDPAISYIEEDAEVTTMAQSVPWGISRVQAPAAHNRGLTGSGVKVAVLDTGISTHPDLNIRGGASFVPGEPSTQDGNGHGTHVAGTIAALNNSIGVLGVAPSAELYAVKVLGASGAGSVSSIAQGLEWAGNNGMHVANLSLGSPSPSATLEQAVNSATSRGVLVVAASGNSGAGSISYPARYANAMAVGATDQNNNRASFSQYGAGLDIVAPGVNVQSTYPGSTYASLNGTSMATPHVAGAAALVKQKNPSWSNVQIRNHLKNTATSLGSTNLYGSGLVNAEAATR

SEQ ID NO: 60753 - protein, 380 aa, Unidentified
VRSKKLWIVASTALLISVAFSSSIASAAEEAKEKYLIGFNEQEAVSEFVEQVEANDEVAILSEEEEVEIELLHEFETIPVLSVELSPEDVDALELDPAISYIEEDAEVTTMAQSVPWGISRVQAPAAHNRGLTGSGVKVAVLDTGISTHPDLNIRGGASFVPGEPSTQDGNGHGTHVAGTIAALNNSIGVLGVAPSAELYAVKVLGASGSGSVSSIAQGLEWAGNNGMHVANLSLGSPSPSATLEQAVNSATSRGVLVVAASGNSGAGSISYPARYANAMAVGATDQNNNRASFSQYGAGLDIVAPGVNVQSTYRGSTYASLNGTSMATPHVAGAAALVKQKNPSWSNVQIRNHLKNTATSLGSTNLYGSGLVNAEAATR

SEQ ID NO: 60754 - protein, 380 aa, Unidentified
VRSKKLWIVASTALLISVAFSSSIASAAEEAKEKYLIGFNEQEAVSEFVEQVEANDEVAILSEEEEVEIELLHEFETIPVLSVELSPEDVDALELDPAISYIEEDAEVTTMAQSVPWGISRVQAPAAHNRGLTGSGVKVAVLDTGISTHPDLNIRGGASFVPGEPSTQDGNGHGTHVAGTIAALNNSIGVLGVAPSAELYAVKVLGASGSGSVSSIAQGLEWAGNNGMHVANLSLGSPSPSATLEQAVNSATSRGVLVVAASGNSGAGSISYPARYANAMAVGATDQNNNRASFSQYGAGLDIVAPGVNVQSTYPGSTYASLNGTSMATPHVAGAAALVKQKNPSWSNVQIRRHLKNTATSLGSTNLYGSGLVNAEAATR

SEQ ID NO: 60755 - protein, 380 aa, Unidentified
VRSKKLWIVASTALLISVAFSSSIASAAEEAKEKYLIGFNEQEAVSEFVEQVEANDEVAILSEEEEVEIELLHEFETIPVLSVELSPEDVDALELDPAISYIEEDAEVTTMAQSVPWGISRVQAPAAHNRGLTGSGVKVAVLDTGISTHPDLNIRGGASFVPGEPSTQDGNGHGTHVAGTIAALNNSIGVLGVAPSAELYAVKVLGASGSGSVSSIAQGLEWAGNNGMHVANLSLGSPSPSATLEQAVNSATSRGVLVVAASGNSGAGSISYPARYANAMAVGATDQNNNRASFSQYGAGLDIVAPGVNVQSTHPGSTYASLNGTSMATPHVAGAAALVKQKNPSWSNVQIRNHLKNTATSLGSTNLYGSGLVNAEAATR

SEQ ID NO: 60756 - protein, 380 aa, Unidentified
VRSKKLWIVASTALLISVAFSSSIASAAEEAKEKYLIGFNEQEAVSEFVEQVEANDEVAILSEEEEVEIELLHEFETIPVLSVELSPEDVDALELDPAISYIEEDAEVTTMAQSVPWGISRVQAPAAMNRGLTGSGVKVAVLDTGISTHPDLNIRGGASFVPGEPSTQDGNGHGTHVAGTIAALNNSIGVLGVAPSAELYAVKVLGASGSGSVSSIAQGLEWAGNNGMHVANLSLGSPSPSATLEQAVNSATSRGVLVVAASGNSGAGSISYPARYANAMAVGATDQNNNRASFSQYGAGLDIVAPGVNVQSTYPGSTYASLNGTSMATPHVAGAAALVKQKNPSWSNVQIRNHLKNTATSLGSTNLYGSGLVNAEAATR

SEQ ID NO: 60757 - protein, 380 aa, Unidentified
VRSKKLWIVASTALLISVAFSSSIASAAEEAKEKYLIGFNEQEAVSEFVEQVEANDEVAILSEEEEVEIELLHEFETIPVLSVELSPEDVDALELDPAISYIEEDAEVTTMAQSVPWGISRVQAPAAHNRGLTGSGVKVAVLDTGISTHPDLNIRGGASFVPGEPSTQDGNGHGTHVAGTIAALNNSIGVLGVAPSAELYAVKVLGASGSGSVSSIAQGLEWAGNNGMHVANLSLGSPSPSATLEQAVNSATSRGVLVVAASGNSGAGSISYPARYANAMAVGATDQNNNRASFSQYGAGLDIVAPGVNVQSTYPGSTYASLNGTSMATPHVAGAAALVKQKNPSWSNVQIRNRLKNTATSLGSTNLYGSGLVNAEAATR

SEQ ID NO: 60758 - protein, 380 aa, Unidentified
VRSKKLWIVASTALLISVAFSSSIASAAEEAKEKYLIGFNEQEAVSEFVEQVEANDEVAILSEEEEVEIELLHEFETIPVLSVELSPEDVDALELDPAISYIEEDAEVTTMAQSVPWGISRVQAPAAHNRGLTGSGVKVAVLDTGISTHPDLNIRGGASFVPGEPSTQDGNGHGTHVAGTIAALNNSIGVLGVAPSAELYAVKVLGASGSGSVSSIAQGLEWAGNNGMHVANLSLGSPSPSATLEQAVNSATSRGVLVVAASGNSGAGSISYPARYANAMAVGATDQNNNRASFSQYGAGLDIVAPGVNVQSTYPGSTYASLNGTSMATPHVAGAAALVKFKNPSWSNVQIRNHLKNTATSLGSTNLYGSGLVNAEAATR

SEQ ID NO: 60759 - protein, 380 aa, Unidentified
VRSKKLWIVASTALLISVAFSSSIASAAEEAKEKYLIGFNEQEAVSEFVEQVEANDEVAILSEEEEVEIELLHEFETIPVLSVELSPEDVDALELDPAISYIEEDAEVTTMAQSVPWGISRVQAPAAHNRGLTGSGVKVAVLDTGISTHPDLNIRGGASFVPGEPSTQDGNGHGTHVAGTIAALNNSIGVLGVAPSAELYAVKVLGASGSGSVSSIAQGLEWAGNNGMHVANLSLGSPSPSATLEQAVNSATSRGVLVVAASGNSGAGSISYPARYANAMAVGATDQNNNRASFSQYGAGLDIVAPGVNVQSTYPGSTYASLNGTSMATPHVAGAAALVKQKNPRWSNVQIRNHLKNTATSLGSTNLYGSGLVNAEAATR

SEQ ID NO: 60760 - protein, 380 aa, Unidentified
VRSKKLWIVASTALLISVAFSSSIASAAEEAKEKYLIGFNEQEAVSEFVEQVEANDEVAILSEEEEVEIELLHEFETIPVLSVELSPEDVDALELDPAISYIEEDAEVTTMAQSVPWGISRVQAPAAHNRGLTGSGVKVAVLDTGIRTHPDLNIRGGASFVPGEPSTQDGNGHGTHVAGTIAALNNSIGVLGVAPSAELYAVKVLGASGSGSVSSIAQGLEWAGNNGMHVANLSLGSPSPSATLEQAVNSATSRGVLVVAASGNSGAGSISYPARYANAMAVGATDQNNNRASFSQYGAGLDIVAPGVNVQSTYPGSTYASLNGTSMATPHVAGAAALVKQKNPSWSNVQIRNHLKNTATSLGSTNLYGSGLVNAEAATR

SEQ ID NO: 60761 - protein, 380 aa, Unidentified
VRSKKLWIVASTALLISVAFSSSIASAAEEAKEKYLIGFNEQEAVSEFVEQVEANDEVAILSEEEEVEIELLHEFETIPVLSVELSPEDVDALELDPAISYIEEDAEVTTMAQSVPWGISRVQAPAAHNRGLTGSGVKVAVLDTGISTHPDLNIRGGASFVPGEPSTQDGNGHGTHVAGTIAALNNSIGVLGVAPSAELYAVKVLGASGSGSVSSIAQGLEWAGNNGMHVANLSLGSPSPSATLEQAVNSATSRGVLVVAASGNSGAGSISYPARYANAMAVGATDQNNNRASFSQYGAGLDIVAPGVNVQSTYPGSTYASNNGTSMATPHVAGAAALVKQKNPSWSNVQIRNHLKNTATSLGSTNLYGSGLVNAEAATR

SEQ ID NO: 60762 - protein, 380 aa, Unidentified
VRSKKLWIVASTALLISVAFSSSIASAAEEAKEKYLIGFNEQEAVSEFVEQVEANDEVAILSEEEEVEIELLHEFETIPVLSVELSPEDVDALELDPAISYIEEDAEVTTMAQSVPWGISRVQAPAAHNRGLTGSGVKVAVLDTGISTHPDLNIRGGASFVPGEPSTQDGNGHGTHVAGTIAALNNSIGVLGVAPSAELYAVKVLGASISGSVSSIAQGLEWAGNNGMHVANLSLGSPSPSATLEQAVNSATSRGVLVVAASGNSGAGSISYPARYANAMAVGATDQNNNRASFSQYGAGLDIVAPGVNVQSTYPGSTYASLNGTSMATPHVAGAAALVKQKNPSWSNVQIRNHLKNTATSLGSTNLYGSGLVNAEAATR

SEQ ID NO: 60763 - protein, 380 aa, Unidentified
VRSKKLWIVASTALLISVAFSSSIASAAEEAKEKYLIGFNEQEAVSEFVEQVEANDEVAILSEEEEVEIELLHEFETIPVLSVELSPEDVDALELDPAISYIEEDAEVTTMAQSVPWGISRVQAPAAHNRGLTGSGVKVAVLDTGISTHPDLNIRGGASFVPGEPSTQDGNGHGTHVAGTIAALNNSIGVLGVAPSAELYAVKVLGASGSGGVSSIAQGLEWAGNNGMHVANLSLGSPSPSATLEQAVNSATSRGVLVVAASGNSGAGSISYPARYANAMAVGATDQNNNRASFSQYGAGLDIVAPGVNVQSTYPGSTYASLNGTSMATPHVAGAAALVKQKNPSWSNVQIRNHLKNTATSLGSTNLYGSGLVNAEAATR

SEQ ID NO: 60764 - protein, 380 aa, Unidentified
VRSKKLWIVASTALLISVAFSSSIASAAEEAKEKYLIGFNEQEAVSEFVEQVEANDEVAILSEEEEVEIELLHEFETIPVLSVELSPEDVDALELDPAISYIEEDAEVTTMAQSVPWGISRVQAPAAHNRGLTGSGVKVAVLDTGISTHPDLNIRGGASFVPGEPSTADGNGHGTHVAGTIAALNNSIGVLGVAPSAELYAVKVLGASGSGSVSSIAQGLEWAGNNGMHVANLSLGSPSPSATLEQAVNSATSRGVLVVAASGNSGAGSISYPARYANAMAVGATDQNNNRASFSQYGAGLDIVAPGVNVQSTYPGSTYASLNGTSMATPHVAGAAALVKQKNPSWSNVQIRNHLKNTATSLGSTNLYGSGLVNAEAATR

SEQ ID NO: 60765 - protein, 380 aa, Unidentified
VRSKKLWIVASTALLISVAFSSSIASAAEEAKEKYLIGFNEQEAVSEFVEQVEANDEVAILSEEEEVEIELLHEFETIPVLSVELSPEDVDALELDPAISYIEEDAEVTTMAQSVPWGISRVQAPAAHNRGLTGSGVKVAVLDSGISTHPDLNIRGGASFVPGEPSTQDGNGHGTHVAGTIAALNNSIGVLGVAPSAELYAVKVLGASGSGSVSSIAQGLEWAGNNGMHVANLSLGSPSPSATLEQAVNSATSRGVLVVAASGNSGAGSISYPARYANAMAVGATDQNNNRASFSQYGAGLDIVAPGVNVQSTYPGSTYASLNGTSMATPHVAGAAALVKQKNPSWSNVQIRNHLKNTATSLGSTNLYGSGLVNAEAATR

SEQ ID NO: 60766 - protein, 380 aa, Unidentified
VRSKKLWIVASTALLISVAFSSSIASAAEEAKEKYLIGFNEQEAVSEFVEQVEANDEVAILSEEEEVEIELLHEFETIPVLSVELSPEDVDALELDPAISYIEEDAEVTTMAQSVPWGISRVQAPAAHNRGLTGSFVKVAVLDTGISTHPDLNIRGGASFVPGEPSTQDGNGHGTHVAGTIAALNNSIGVLGVAPSAELYAVKVLGASGSGSVSSIAQGLEWAGNNGMHVANLSLGSPSPSATLEQAVNSATSRGVLVVAASGNSGAGSISYPARYANAMAVGATDQNNNRASFSQYGAGLDIVAPGVNVQSTYPGSTYASLNGTSMATPHVAGAAALVKQKNPSWSNVQIRNHLKNTATSLGSTNLYGSGLVNAEAATR

SEQ ID NO: 60767 - protein, 380 aa, Unidentified
VRSKKLWIVASTALLISVAFSSSIASAAEEAKEKYLIGFNEQEAVSEFVEQVEANDEVAILSEEEEVEIELLHEFETIPVLSVELSPEDVDALELDPAISYIEEDAEVTTMAQSVPWGISRVQAPAAHNRGLVGSGVKVAVLDTGISTHPDLNIRGGASFVPGEPSTQDGNGHGTHVAGTIAALNNSIGVLGVAPSAELYAVKVLGASGSGSVSSIAQGLEWAGNNGMHVANLSLGSPSPSATLEQAVNSATSRGVLVVAASGNSGAGSISYPARYANAMAVGATDQNNNRASFSQYGAGLDIVAPGVNVQSTYPGSTYASLNGTSMATPHVAGAAALVKQKNPSWSNVQIRNHLKNTATSLGSTNLYGSGLVNAEAATR

SEQ ID NO: 60768 - protein, 380 aa, Unidentified
VRSKKLWIVASTALLISVAFSSSIASAAEEAKEKYLIGFNEQEAVSEFVEQVEANDEVAILSEEEEVEIELLHEFETIPVLSVELSPEDVDALELDPAISYIEEDAEVTTMAQSVPWGISRVQAPAAHNRGLTGSGVKVAVLDTGISTHPDLNIRGGASFVPGEPSTQDGNGHGTHVAGTIAALNNSIGVLGVAPSAELYAVKVLGASGSGSVSSIAQGLEWAGNNGMHVANLSLGSPSPSATLEQAVNSATSRGVLVVAASGNSGAESISYPARYANAMAVGATDQNNNRASFSQYGAGLDIVAPGVNVQSTYPGSTYASLNGTSMATPHVAGAAALVKQKNPSWSNVQIRNHLKNTATSLGSTNLYGSGLVNAEAATR

SEQ ID NO: 60769 - protein, 380 aa, Unidentified
VRSKKLWIVASTALLISVAFSSSIASAAEEAKEKYLIGFNEQEAVSEFVEQVEANDEVAILSEEEEVEIELLHEFETIPVLSVELSPEDVDALELDPAISYIEEDAEVTTMAQSVPWGISRVQAPAAHNRGLTGSGVKVAVLDTGISTHPDLNIRGGASFVPGEPSTQDGNGHGTHVAGTIAALNNSIGVLGVAPSAELYAVKVLGASGSGSVSSIAQGLEWAGLNGMHVANLSLGSPSPSATLEQAVNSATSRGVLVVAASGNSGAGSISYPARYANAMAVGATDQNNNRASFSQYGAGLDIVAPGVNVQSTYPGSTYASLNGTSMATPHVAGAAALVKQKNPSWSNVQIRNHLKNTATSLGSTNLYGSGLVNAEAATR

SEQ ID NO: 60770 - protein, 380 aa, Unidentified
VRSKKLWIVASTALLISVAFSSSIASAAEEAKEKYLIGFNEQEAVSEFVEQVEANDEVAILSEEEEVEIELLHEFETIPVLSVELSPEDVDALELDPAISYIEEDAEVTTMAQSVPWGISRVQAPAAHNRGLTGSGVKVAVLDTGISTHPDLNIRGGASFVPGEPSTQDGNGHGTHVAGTIAALNNSIGVLGVAPSAELYAVKVLGASGSGSISSIAQGLEWAGNNGMHVANLSLGSPSPSATLEQAVNSATSRGVLVVAASGNSGAGSISYPARYANAMAVGATDQNNNRASFSQYGAGLDIVAPGVNVQSTYPGSTYASLNGTSMATPHVAGAAALVKQKNPSWSNVQIRNHLKNTATSLGSTNLYGSGLVNAEAATR

SEQ ID NO: 60771 - protein, 380 aa, Unidentified
VRSKKLWIVASTALLISVAFSSSIASAAEEAKEKYLIGFNEQEAVSEFVEQVEANDEVAILSEEEEVEIELLHEFETIPVLSVELSPEDVDALELDPAISYIEEDAEVTTMAQSVPWGISRVQAPAAHNRGLTGSGVKVAVLDTGISTHPDLNIRGGASFVPGEPSTQDGNGHGTHVAGTIAALNNSIGVLGVAPSAELYAVKVLGASGSGSVSSIAQGLEWAGNNGMHVANLSLGSPSPSATLEQAVNSATSRGLLVVAASGNSGAGSISYPARYANAMAVGATDQNNNRASFSQYGAGLDIVAPGVNVQSTYPGSTYASLNGTSMATPHVAGAAALVKQKNPSWSNVQIRNHLKNTATSLGSTNLYGSGLVNAEAATR

SEQ ID NO: 60772 - protein, 380 aa, Unidentified
VRSKKLWIVASTALLISVAFSSSIASAAEEAKEKYLIGFNEQEAVSEFVEQVEANDEVAILSEEEEVEIELLHEFETIPVLSVELSPEDVDALELDPAISYIEEDAEVTTMAQSVPWGISRVQAPAAHNRGLTGSGVKVAVLDTGISTHPDLNIRGGASFVPGEPSTQDGNGHGTHVAGTIAALNNSIGVLGVAPSAELYAVKVLGASGSGSVSSIAQGLEWAGNNGMHVANLSLGSPSPSATLEQAVNSATSRGVLVVAASGNSGAGSISYPARYANAMAVGATDQNNNRASFSQYGAGLDIVAPGVNVQSTYPGSTYASLNGTSMATPHVAGAAALVKQKNPSWSNVQIRNHLKNTATSLGSTNHYGSGLVNAEAATR

SEQ ID NO: 60773 - protein, 380 aa, Unidentified
VRSKKLWIVASTALLISVAFSSSIASAAEEAKEKYLIGFNEQEAVSEFVEQVEANDEVAILSEEEEVEIELLHEFETIPVLSVELSPEDVDALELDPAISYIEEDAEVTTMAQSVPWGISRVQAPAAHNRGLTGSGVKVAVLDTGISTHPDLNIRGGASFVPGEPSTQDGNGHGTHVAGTIAALNNSIGVLGVAPSAELYAVKVLGASGSGSVSSIAQGLEWAGNNGMHVANLSLGSPSPSATLEQAVNSATSRGVLVVAASGNSGAGSIEYPARYANAMAVGATDQNNNRASFSQYGAGLDIVAPGVNVQSTYPGSTYASLNGTSMATPHVAGAAALVKQKNPSWSNVQIRNHLKNTATSLGSTNLYGSGLVNAEAATR

SEQ ID NO: 60774 - protein, 380 aa, Unidentified
VRSKKLWIVASTALLISVAFSSSIASAAEEAKEKYLIGFNEQEAVSEFVEQVEANDEVAILSEEEEVEIELLHEFETIPVLSVELSPEDVDALELDPAISYIEEDAEVTTMAQSVPWGISRVQAPAAHNRGLTGSGVKVAVLDTGISTHPDLNIRGGASFVPGEPSTQDGNGHGTHVAGTIAALNNSIGVLGVAPSAELYAVKVLGASGSGSVSSIAQGLEWAGNNGMHVANLSLGSPSPSATLEQAVNSATSRGVLVVAASGNSGAGSISYPARYANAMAVGATDQNNNRASFSQYGAGLDIVAPGVNVQSTYPGSTYASLNGTSMATPHVAGAAALVKQKNPSWSNVQIRNHLKFTATSLGSTNLYGSGLVNAEAATR

SEQ ID NO: 60775 - protein, 380 aa, Unidentified
VRSKKLWIVASTALLISVAFSSSIASAAEEAKEKYLIGFNEQEAVSEFVEQVEANDEVAILSEEEEVEIELLHEFETIPVLSVELSPEDVDALELDPAISYIEEDAEVTTMAQSVPWGISRVQAPAAHNRGLTGSGVKVAVLDTGISTHPDLNIRGGASFVPGEPSTFDGNGHGTHVAGTIAALNNSIGVLGVAPSAELYAVKVLGASGSGSVSSIAQGLEWAGNNGMHVANLSLGSPSPSATLEQAVNSATSRGVLVVAASGNSGAGSISYPARYANAMAVGATDQNNNRASFSQYGAGLDIVAPGVNVQSTYPGSTYASLNGTSMATPHVAGAAALVKQKNPSWSNVQIRNHLKNTATSLGSTNLYGSGLVNAEAATR

SEQ ID NO: 60776 - protein, 380 aa, Unidentified
VRSKKLWIVASTALLISVAFSSSIASAAEEAKEKYLIGFNEQEAVSEFVEQVEANDEVAILSEEEEVEIELLHEFETIPVLSVELSPEDVDALELDPAISYIEEDAEVTTMAQSVPWGISRVQAPAAHNRGLTGSGVKVAVLDTGISTHPDLNIRGGASFVPGEPSTQDGNGHGTHVAGTIAALNNSIGVLGVAPSAELYAVKVLGASGSGSVSSIAQGLEWAGNNGMHVANLSLGSPSPSATLEQGVNSATSRGVLVVAASGNSGAGSISYPARYANAMAVGATDQNNNRASFSQYGAGLDIVAPGVNVQSTYPGSTYASLNGTSMATPHVAGAAALVKQKNPSWSNVQIRNHLKNTATSLGSTNLYGSGLVNAEAATR

SEQ ID NO: 60777 - protein, 380 aa, Unidentified
VRSKKLWIVASTALLISVAFSSSIASAAEEAKEKYLIGFNEQEAVSEFVEQVEANDEVAILSEEEEVEIELLHEFETIPVLSVELSPEDVDALELDPAISYIEEDAEVTTMAQSVPWGISRVQAPAAHNRGLRGSGVKVAVLDTGISTHPDLNIRGGASFVPGEPSTQDGNGHGTHVAGTIAALNNSIGVLGVAPSAELYAVKVLGASGSGSVSSIAQGLEWAGNNGMHVANLSLGSPSPSATLEQAVNSATSRGVLVVAASGNSGAGSISYPARYANAMAVGATDQNNNRASFSQYGAGLDIVAPGVNVQSTYPGSTYASLNGTSMATPHVAGAAALVKQKNPSWSNVQIRNHLKNTATSLGSTNLYGSGLVNAEAATR

SEQ ID NO: 60778 - protein, 380 aa, Unidentified
VRSKKLWIVASTALLISVAFSSSIASAAEEAKEKYLIGFNEQEAVSEFVEQVEANDEVAILSEEEEVEIELLHEFETIPVLSVELSPEDVDALELDPAISYIEEDAEVTTMAQSVPWGISRVQAPAAHNRGLTGSGVKVAVLDTGISTHPDLNIRGGASFVPGEPSTQDGNGHGTHVAGTIAALNNSIGVLGVAPSAELYAVKVLGASGSGSVSSIAQGLEWAGNNGMHVANLSLGSPSPSATLEQAVNSATSRGVLVVAASGNSGAGSISYPARYANAMAVGATDQNNNRASFSQYGAGLDIVAPGVNVQSTYPGSTYASLNGTSMATPHVAGAAALVKQKLPSWSNVQIRNHLKNTATSLGSTNLYGSGLVNAEAATR

SEQ ID NO: 60779 - protein, 380 aa, Unidentified
VRSKKLWIVASTALLISVAFSSSIASAAEEAKEKYLIGFNEQEAVSEFVEQVEANDEVAILSEEEEVEIELLHEFETIPVLSVELSPEDVDALELDPAISYIEEDAEVTTMAQSVPWGISRVQAPAAHNRGLTGSGVKVAVLDTGISTHPDLNIRGGASFVPGEPSTQDGNGHGTHVAGTIAALNNSIGVLGVAPSAELYAVKVLGASGSGSVSSIAQGLEWAGNNGMHVANLSLGSPSPSATLEQAVNSATSRGVLVVAASGNSGAGSISYPARYANAMAVGATDQNNNRASFSQYGAGLDIVAPGVNVQSTYPGSTYASLNGTSMATPHVAGAAALVKQKNPSWSRVQIRNHLKNTATSLGSTNLYGSGLVNAEAATR

SEQ ID NO: 60780 - protein, 380 aa, Unidentified
VRSKKLWIVASTALLISVAFSSSIASAAEEAKEKYLIGFNEQEAVSEFVEQVEANDEVAILSEEEEVEIELLHEFETIPVLSVELSPEDVDALELDPAISYIEEDAEVTTMAQSVPWGISRVQAPAAHNRGLTGSGVKVAVLDTGISTHPDLNIRGGASFVPGEPSTQDGNGHGTHVAGTIAALNNNIGVLGVAPSAELYAVKVLGASGSGSVSSIAQGLEWAGNNGMHVANLSLGSPSPSATLEQAVNSATSRGVLVVAASGNSGAGSISYPARYANAMAVGATDQNNNRASFSQYGAGLDIVAPGVNVQSTYPGSTYASLNGTSMATPHVAGAAALVKQKNPSWSNVQIRNHLKNTATSLGSTNLYGSGLVNAEAATR

SEQ ID NO: 60781 - protein, 380 aa, Unidentified
VRSKKLWIVASTALLISVAFSSSIASAAEEAKEKYLIGFNEQEAVSEFVEQVEANDEVAILSEEEEVEIELLHEFETIPVLSVELSPEDVDALELDPAISYIEEDAEVTTMAQSVPWGISRVQAPAAHNRGLTGQGVKVAVLDTGISTHPDLNIRGGASFVPGEPSTQDGNGHGTHVAGTIAALNNSIGVLGVAPSAELYAVKVLGASGSGSVSSIAQGLEWAGNNGMHVANLSLGSPSPSATLEQAVNSATSRGVLVVAASGNSGAGSISYPARYANAMAVGATDQNNNRASFSQYGAGLDIVAPGVNVQSTYPGSTYASLNGTSMATPHVAGAAALVKQKNPSWSNVQIRNHLKNTATSLGSTNLYGSGLVNAEAATR

SEQ ID NO: 60782 - protein, 380 aa, Unidentified
VRSKKLWIVASTALLISVAFSSSIASAAEEAKEKYLIGFNEQEAVSEFVEQVEANDEVAILSEEEEVEIELLHEFETIPVLSVELSPEDVDALELDPAISYIEEDAEVTTMAQSVPWGISRVQAPAAHNRGLTGSGVKVAVLDTGISTHPDLNIRGGASFVPGEPSTQDGNGHGTHVAGTIAALNNSIGVLGVAPSAELYAVKVLGASGSGSVSSIAQGLEWAGNNGMHVANLSLGSPSPSATLEQAVNSATSRGVLVVAASGNSGEGSISYPARYANAMAVGATDQNNNRASFSQYGAGLDIVAPGVNVQSTYPGSTYASLNGTSMATPHVAGAAALVKQKNPSWSNVQIRNHLKNTATSLGSTNLYGSGLVNAEAATR

SEQ ID NO: 60783 - protein, 380 aa, Unidentified
VRSKKLWIVASTALLISVAFSSSIASAAEEAKEKYLIGFNEQEAVSEFVEQVEANDEVAILSEEEEVEIELLHEFETIPVLSVELSPEDVDALELDPAISYIEEDAEVTTMAQSVPWGISRVQAPAAHNRGLTGSGVKVAVLDTGISTHPDLNIRGGASFVPGEPSTQDGNGHGTHVAGTIAALNNSIGVLGVAPSAELYAVKVLGASGSGSVSSIAQGLEWAGNNGMHVANLSLGSPSPSATLEQAVNSATSRGVLVVAASGNSGAGSISYPARYANAMAVGATDQNNNRASFSQYGAGLDIVAPGVNVQSTYPGSTYASLNGTSMATPHVAGAAALVKQKNPSWSNVQIRNHLKNTATSLGSTNLYGSGLVNALAATR

SEQ ID NO: 60784 - protein, 380 aa, Unidentified
VRSKKLWIVASTALLISVAFSSSIASAAEEAKEKYLIGFNEQEAVSEFVEQVEANDEVAILSEEEEVEIELLHEFETIPVLSVELSPEDVDALELDPAISYIEEDAEVTTMAQSVPWGISAVQAPAAHNRGLTGSGVKVAVLDTGISTHPDLNIRGGASFVPGEPSTQDGNGHGTHVAGTIAALNNSIGVLGVAPSAELYAVKVLGASGSGSVSSIAQGLEWAGNNGMHVANLSLGSPSPSATLEQAVNSATSRGVLVVAASGNSGAGSISYPARYANAMAVGATDQNNNRASFSQYGAGLDIVAPGVNVQSTYPGSTYASLNGTSMATPHVAGAAALVKQKNPSWSNVQIRNHLKNTATSLGSTNLYGSGLVNAEAATR

SEQ ID NO: 60785 - protein, 380 aa, Unidentified
VRSKKLWIVASTALLISVAFSSSIASAAEEAKEKYLIGFNEQEAVSEFVEQVEANDEVAILSEEEEVEIELLHEFETIPVLSVELSPEDVDALELDPAISYIEEDAEVTTMAQSVPWGISRVQAPAAHNRGLTGSGVKVAVLDTGISTHPDLNIRGGASFVPGEPSTQDGNGHGTHVAGTIAALNNSIGVLGVAPSAELYAVKVLGASGSGSVSSIAQGLEWAGNNGMHVANLSLGSPSPSATLEQAVNSATSRGVLVVAASGNSGAGSISYPARYANAMAVGATDQNNNRASFSQYGFGLDIVAPGVNVQSTYPGSTYASLNGTSMATPHVAGAAALVKQKNPSWSNVQIRNHLKNTATSLGSTNLYGSGLVNAEAATR

SEQ ID NO: 60786 - protein, 380 aa, Unidentified
VRSKKLWIVASTALLISVAFSSSIASAAEEAKEKYLIGFNEQEAVSEFVEQVEANDEVAILSEEEEVEIELLHEFETIPVLSVELSPEDVDALELDPAISYIEEDAEVTTMAQSVPWGISRVQAPAAHNRGLTGRGVKVAVLDTGISTHPDLNIRGGASFVPGEPSTQDGNGHGTHVAGTIAALNNSIGVLGVAPSAELYAVKVLGASGSGSVSSIAQGLEWAGNNGMHVANLSLGSPSPSATLEQAVNSATSRGVLVVAASGNSGAGSISYPARYANAMAVGATDQNNNRASFSQYGAGLDIVAPGVNVQSTYPGSTYASLNGTSMATPHVAGAAALVKQKNPSWSNVQIRNHLKNTATSLGSTNLYGSGLVNAEAATR

SEQ ID NO: 60787 - protein, 380 aa, Unidentified
VRSKKLWIVASTALLISVAFSSSIASAAEEAKEKYLIGFNEQEAVSEFVEQVEANDEVAILSEEEEVEIELLHEFETIPVLSVELSPEDVDALELDPAISYIEEDAEVTTMAQSVPWGISRVQAPAAHNRGLTGSGVKVAVLDTGISTHPDLNIRGGASFVPGEPSTQDGNGHGTHVAGTIAALNNRIGVLGVAPSAELYAVKVLGASGSGSVSSIAQGLEWAGNNGMHVANLSLGSPSPSATLEQAVNSATSRGVLVVAASGNSGAGSISYPARYANAMAVGATDQNNNRASFSQYGAGLDIVAPGVNVQSTYPGSTYASLNGTSMATPHVAGAAALVKQKNPSWSNVQIRNHLKNTATSLGSTNLYGSGLVNAEAATR

SEQ ID NO: 60788 - protein, 380 aa, Unidentified
VRSKKLWIVASTALLISVAFSSSIASAAEEAKEKYLIGFNEQEAVSEFVEQVEANDEVAILSEEEEVEIELLHEFETIPVLSVELSPEDVDALELDPAISYIEEDAEVTTMAQSVPWGISRVQAPAAHNRGLTGSGVKVAVLDTGISTHPDLNIRGGASFVPGEPSTQDGNGHGTHVAGTIAALNNSIGVLGVAPSAELYAVKVLGASGSGSVSSIAQGLEWAGNNGMHVANLSLGSPSPSATLEQAVNSATSRGVLVVAASGNSGAGSISYPARYANAMAVGATDQNNNRASFSQYGAGLDIVAPGVNVQSTYPQSTYASLNGTSMATPHVAGAAALVKQKNPSWSNVQIRNHLKNTATSLGSTNLYGSGLVNAEAATR

SEQ ID NO: 60789 - protein, 380 aa, Unidentified
VRSKKLWIVASTALLISVAFSSSIASAAEEAKEKYLIGFNEQEAVSEFVEQVEANDEVAILSEEEEVEIELLHEFETIPVLSVELSPEDVDALELDPAISYIEEDAEVTTMAQSVPWGISRVQAPAAHNRGLTGSGVKVAVLDTGISTHPDLNIRGGASFVPGEPSTQDGNGHGTHVAGTIAALNNSIGVLGVAPSAELYAVKVLGASGSGSVSSIAQGLEWAGNNGMHVANLSLGSPSPSATLEQAVNSATSRGVLVVAASGNSGAGSISYPARYANAMAVGATDQNNNRASFSQYGAGLDIVAPGVNVQSTYPGSTYASLNGTSMATPHVAGAAALVKQKNPSWSNVQIRIHLKNTATSLGSTNLYGSGLVNAEAATR

SEQ ID NO: 60790 - protein, 380 aa, Unidentified
VRSKKLWIVASTALLISVAFSSSIASAAEEAKEKYLIGFNEQEAVSEFVEQVEANDEVAILSEEEEVEIELLHEFETIPVLSVELSPEDVDALELDPAISYIEEDAEVTTMAQSVPWGISRVQAPAAHNRGLTGSGVKAAVLDTGISTHPDLNIRGGASFVPGEPSTQDGNGHGTHVAGTIAALNNSIGVLGVAPSAELYAVKVLGASGSGSVSSIAQGLEWAGNNGMHVANLSLGSPSPSATLEQAVNSATSRGVLVVAASGNSGAGSISYPARYANAMAVGATDQNNNRASFSQYGAGLDIVAPGVNVQSTYPGSTYASLNGTSMATPHVAGAAALVKQKNPSWSNVQIRNHLKNTATSLGSTNLYGSGLVNAEAATR

SEQ ID NO: 60791 - protein, 380 aa, Unidentified
VRSKKLWIVASTALLISVAFSSSIASAAEEAKEKYLIGFNEQEAVSEFVEQVEANDEVAILSEEEEVEIELLHEFETIPVLSVELSPEDVDALELDPAISYIEEDAEVTTMAQSVPWGISRVQAPAAHNRGLTGSGVKVAVLDTGISTHPDLNIRGGASFVPGEPSTQDGNGHGTHVAGTIAALNNSIGVLGVAPSAELYAVKVLGASGSGSVSSIAQGLEWAGNNGMHVANLSLGSPSPSATLEQAVNSATSRGVLVVAASGNSGAGSISYPARYANAMAVGATDQNNNRARFSQYGAGLDIVAPGVNVQSTYPGSTYASLNGTSMATPHVAGAAALVKQKNPSWSNVQIRNHLKNTATSLGSTNLYGSGLVNAEAATR

SEQ ID NO: 60792 - protein, 380 aa, Unidentified
VRSKKLWIVASTALLISVAFSSSIASAAEEAKEKYLIGFNEQEAVSEFVEQVEANDEVAILSEEEEVEIELLHEFETIPVLSVELSPEDVDALELDPAISYIEEDAEVTTMAQSVPWGISRVRAPAAHNRGLTGSGVKVAVLDTGISTHPDLNIRGGASFVPGEPSTQDGNGHGTHVAGTIAALNNSIGVLGVAPSAELYAVKVLGASGSGSVSSIAQGLEWAGNNGMHVANLSLGSPSPSATLEQAVNSATSRGVLVVAASGNSGAGSISYPARYANAMAVGATDQNNNRASFSQYGAGLDIVAPGVNVQSTYPGSTYASLNGTSMATPHVAGAAALVKQKNPSWSNVQIRNHLKNTATSLGSTNLYGSGLVNAEAATR

SEQ ID NO: 60793 - protein, 380 aa, Unidentified
VRSKKLWIVASTALLISVAFSSSIASAAEEAKEKYLIGFNEQEAVSEFVEQVEANDEVAILSEEEEVEIELLHEFETIPVLSVELSPEDVDALELDPAISYIEEDAEVTTMAQSVPWGISRVQAPAAHNRGLTGSGVKVAVLDTGISTHPDLNIRGGASFVPGEPSTQDGNGHGTHVAGTIAALNNSIGVLGVAPSAELYAVKVLGASGSGSVSSIAQGLEWAGNNGMHVANLSLGSPSPSATLEQAVNSATSRGVLVVAASGNSGAGSISYPARYANAMAVGATDQNNNRASFSQYGAGLDIVAPGVNVQSTYPGSTYHSLNGTSMATPHVAGAAALVKQKNPSWSNVQIRNHLKNTATSLGSTNLYGSGLVNAEAATR

SEQ ID NO: 60794 - protein, 380 aa, Unidentified
VRSKKLWIVASTALLISVAFSSSIASAAEEAKEKYLIGFNEQEAVSEFVEQVEANDEVAILSEEEEVEIELLHEFETIPVLSVELSPEDVDALELDPAISYIEEDAEVTTMAQSVPWGISRVQAPAAHNRGLTGSGVKVAVLDTGISTHPDLNIRGGASFVPGEPSTQDGNGHGTHVAGTIAALNNSIGVLGVAPSAELYAVKVLGASGSGSVSSIAQGLEWAGNNGMHVANLSLGSPSPSATLEQAVNSATSRGVLVVAASGNSGAGSISYPARYANAMAVGATDQNNNRASFSQYGAGLDIVAPGVNVQSTYPGSTYASLNGTSMATPHVAGAAALVKQKNPSWSNVQIRNHLKNTATSLGSTNLYGSGLVIAEAATR

SEQ ID NO: 60795 - protein, 380 aa, Unidentified
VRSKKLWIVASTALLISVAFSSSIASAAEEAKEKYLIGFNEQEAVSEFVEQVEANDEVAILSEEEEVEIELLHEFETIPVLSVELSPEDVDALELDPAISYIEEDAEVTTMAQSVPWGISRVQAPAAHNRGLTGSGVKVAVLDTGISTHPDLNIRGGASFVPGEPSTQDGNGHGTHVAGTIAALNNSIGVLGVAPSAELYAVKVLGASGSGSVSSIAQGLEWAGNNGMHVANLSLGSPSPSATLEQAVNSATSRGVLVVAASGNSGAGSISYPARYANAMAVGATDQNNNRASFSQYGAGLDIVAPGVNVQSTNPGSTYASLNGTSMATPHVAGAAALVKQKNPSWSNVQIRNHLKNTATSLGSTNLYGSGLVNAEAATR

SEQ ID NO: 60796 - protein, 380 aa, Unidentified
VRSKKLWIVASTALLISVAFSSSIASAAEEAKEKYLIGFNEQEAVSEFVEQVEANDEVAILSEEEEVEIELLHEFETIPVLSVELSPEDVDALELDPAISYIEEDAEVTTMAQSVPWGISRVQAPAAHNRGLTGSGVKVAVLDTGISTHPDLNIRGGASFVPGEPSTQDGNGHGTHVAGTIAALNNSIGVLGVAPSAELYAVKVLGASGSGSVSSIAQGLEWAGNNGMHVANLSLGSPSPSATLEQAVNSATSRGVLVVAASGNSGAGSISYPARYANAMAVGATDQNNNRASFSQYGAGLDIVAPGVNVQSTYPGSTYASLNGTSMATPHVAGAAALVKQKNPSWSNVQIRNHLKNTATSLGSTNLYGSGLVNAEFATR

SEQ ID NO: 60797 - protein, 380 aa, Unidentified
VRSKKLWIVASTALLISVAFSSSIASAAEEAKEKYLIGFNEQEAVSEFVEQVEANDEVAILSEEEEVEIELLHEFETIPVLSVELSPEDVDALELDPAISYIEEDAEVTTMAQSVPWGISRVQAPAAHNRGLTGSGVKVAVLDTGISTHPDLNIRGGASFVPGEPSTQDGNGHGTHVAGTIAALNNSIGVLGVAPSAELYAVKVLGASGSGSVSSIAQGLEWAGNNGMHVANLSLGSPSPSATLEQAVNSATSRGVLVVAASGNSGAGSISYPARYANAMAVGATDQNNNRASFSQYGAGLDIVAPGVNVQSTYPGSTFASLNGTSMATPHVAGAAALVKQKNPSWSNVQIRNHLKNTATSLGSTNLYGSGLVNAEAATR

SEQ ID NO: 60798 - protein, 380 aa, Unidentified
VRSKKLWIVASTALLISVAFSSSIASAAEEAKEKYLIGFNEQEAVSEFVEQVEANDEVAILSEEEEVEIELLHEFETIPVLSVELSPEDVDALELDPAISYIEEDAEVTTMAQSVPWGISRVQAPAAHNRGLTGSGVKVAVLDTGISTHPDLNIRGGASFVPGEPSTQDGNGHGTHVAGTIAALNNSIGVLGVAPSAELYAVKVLGASGSGSVSSIAQGLEWAGNNGMHVANLSLGSPSPSATLEQAVNSATSRGVLVVAASGNSGAGSISYPARYANAMAVGATDQNNNRASFSQYGAGLDIVAPGVNVQSTYVGSTYASLNGTSMATPHVAGAAALVKQKNPSWSNVQIRNHLKNTATSLGSTNLYGSGLVNAEAATR

SEQ ID NO: 60799 - protein, 380 aa, Unidentified
VRSKKLWIVASTALLISVAFSSSIASAAEEAKEKYLIGFNEQEAVSEFVEQVEANDEVAILSEEEEVEIELLHEFETIPVLSVELSPEDVDALELDPAISYIEEDAEVTTMAQSVPWGISRVQAPAAHNRGLTGSGVKVAVLDTGISTHPDLNIRGGASFVPGEPSTQDGNGHGTHVAGTIAALNNSIGVLGVAPSAELYAVKVLGASGSGSVSSIAQGLEWAGNNGMHVANLSLGSPSPSATLEQAVNSATSRGVLVVAASGNSGACSISYPARYANAMAVGATDQNNNRASFSQYGAGLDIVAPGVNVQSTYPGSTYASLNGTSMATPHVAGAAALVKQKNPSWSNVQIRNHLKNTATSLGSTNLYGSGLVNAEAATR

SEQ ID NO: 60800 - protein, 380 aa, Unidentified
VRSKKLWIVASTALLISVAFSSSIASAAEEAKEKYLIGFNEQEAVSEFVEQVEANDEVAILSEEEEVEIELLHEFETIPVLSVELSPEDVDALELDPAISYIEEDAEVTTMAQSVPWGISRVQAPAAHNRGLTGSGVKVAVLDTGISTHPDLNIRGGASFVPGEPSTQDGNGHGTHVAGTIAALNNSIGVLGVAPSAELYAVKVLGASGGGSVSSIAQGLEWAGNNGMHVANLSLGSPSPSATLEQAVNSATSRGVLVVAASGNSGAGSISYPARYANAMAVGATDQNNNRASFSQYGAGLDIVAPGVNVQSTYPGSTYASLNGTSMATPHVAGAAALVKQKNPSWSNVQIRNHLKNTATSLGSTNLYGSGLVNAEAATR

SEQ ID NO: 60801 - protein, 380 aa, Unidentified
VRSKKLWIVASTALLISVAFSSSIASAAEEAKEKYLIGFNEQEAVSEFVEQVEANDEVAILSEEEEVEIELLHEFETIPVLSVELSPEDVDALELDPAISYIEEDAEVTTMAQSVPWGISRVQAPAAHNRGLTGSGVKVAVLDTGISTHPDLNIRGGASFVPGEPSTQDGNGHGTHVAGTIAALNNSIGVLGVAPSAELYAVKVLGASGSGNVSSIAQGLEWAGNNGMHVANLSLGSPSPSATLEQAVNSATSRGVLVVAASGNSGAGSISYPARYANAMAVGATDQNNNRASFSQYGAGLDIVAPGVNVQSTYPGSTYASLNGTSMATPHVAGAAALVKQKNPSWSNVQIRNHLKNTATSLGSTNLYGSGLVNAEAATR

SEQ ID NO: 60802 - protein, 380 aa, Unidentified
VRSKKLWIVASTALLISVAFSSSIASAAEEAKEKYLIGFNEQEAVSEFVEQVEANDEVAILSEEEEVEIELLHEFETIPVLSVELSPEDVDALELDPAISYIEEDAEVTTMAQSVPWGISRVQAPAAHNRGLTGSGVKVAVLDTGISTHPDLNIRGGASFVPGEPSTQDGNGHGTHVAGTIAALNNSIGVLGVAPSAELYAVKVLGASGSGSVQSIAQGLEWAGNNGMHVANLSLGSPSPSATLEQAVNSATSRGVLVVAASGNSGAGSISYPARYANAMAVGATDQNNNRASFSQYGAGLDIVAPGVNVQSTYPGSTYASLNGTSMATPHVAGAAALVKQKNPSWSNVQIRNHLKNTATSLGSTNLYGSGLVNAEAATR
